(19) United States
(12) Patent Application Publication
(10) Pub. No.: US 2023/0026259 A1
(43) Pub. Date: Jan. 26, 2023

(54) CA2 COMPOSITIONS AND METHODS FOR TUNABLE REGULATION

(71) Applicant: Obsidian Therapeutics, Inc., Cambridge, MA (US)

(72) Inventors: Vipin SURI, Belmont, MA (US); Celeste RICHARDSON, Brookline, MA (US); Brian DOLINSKI, Cambridge, MA (US); Abhishek KULKARNI, Brookline, MA (US); Mara Christine Inniss, Beverly, MA (US); Dexue SUN, Cambridge, MA (US); Elizabeth Jane WEISMAN, Jamaica Plain, MA (US); Grace Y. Olinger, Cambridge, MA (US); Scott Francis HELLER, Stoughton, MA (US); Jennifer Leah GORI, Jamaica Plain, MA (US); Michelle Lynn OLS, Northborough, MA (US); Kutlu Goksu ELPEK, Cambridge, MA (US); Tucker Read EZELL, Cambrdige, MA (US); Michael SCHEBESTA, Cambrdige, MA (US); Michelle Lois FLEURY, Cambridge, MA (US); Dhruv Kam SETHI, Westwood, MA (US)

(73) Assignee: Obsidian Therapeutics, Inc., Cambridge, MA (US)

(21) Appl. No.: 17/436,892

(22) PCT Filed: Mar. 6, 2020
(86) PCT No.: PCT/US2020/021596

§ 371 Date: Sep. 7, 2021

Related U.S. Application Data
(60) Provisional application No. 62/860,388, filed on Jun. 12, 2019.
(60) Provisional application No. 62/835,548, filed on Apr. 18, 2019.
(60) Provisional application No. 62/835,552, filed on Apr. 18, 2019.
(60) Provisional application No. 62/826,487, filed on Mar. 29, 2019.
(60) Provisional application No. 62/826,443, filed on Mar. 29, 2019.
(60) Provisional application No. 62/815,399, filed on Mar. 8, 2019.
(60) Provisional application No. 62/815,402, filed on Mar. 8, 2019.

(51) Int. Cl. C12N 9/88; A61K 39/00; C07K 14/705

(52) U.S. Cl. CPC C12N 9/88; A61K 39/001112; C07K 14/705; C12Y 402/01001

(57) ABSTRACT

The present disclosure provides regulatable biocircuit systems. Such systems provide modular and tunable protein expression systems in support of the discovery and development of therapeutic modalities. In particular, the present application is directed to fusion proteins comprising a fragment of human human carbonic anhydrase 2 and a chimeric antigen receptor (CAR). The activity of the destabilizing domain can be regulated by externally administered agents.

### CROSS REFERENCE TO RELATED APPLICATIONS

[0001] This application claims benefit of priority to U.S. Provisional Application No. 62/815,399, filed Mar. 8, 2019; U.S. Provisional Application No. 62/815,402, filed Mar. 8, 2019; U.S. Provisional Application No. 62/826,487, filed Mar. 29, 2019; U.S. Provisional Application No. 62/826,443 filed Mar. 29, 2019; U.S. Provisional Application No. 62/835,548 filed Apr. 18, 2019; U.S. Provisional Application No. 62/835,552, filed Apr. 18, 2019; and U.S. Provisional Application No. 62/860,388, filed Jun. 12, 2019. The entire contents of the aforementioned applications are incorporated herein by reference in their entireties.

### REFERENCE TO THE SEQUENCE LISTING

[0002] The instant application contains a “lengthy” Sequence Listing which has been submitted via CD-R in lieu of a printed paper copy and is hereby incorporated by reference in its entirety. Said CD-R, created and recorded on Mar. 6, 2020, are labeled “CRF”, “Copy 1”, “Copy 2” “Copy 3,” and “Copy 4” respectively, and each contains only one identical 699,270,904 bytes (measured in MS-WINDOWS) file named 268052-462540_SL.txt. The machine-readable format of each CD-R is IBM-PC and the operating system of each compact disc is MS-Windows.

### FIELD

[0003] The present disclosure relates to destabilizing domains (DDs) derived from human carbonic anhydrase 2 (CA2) which can tune protein stability for at least one payload, and compositions and methods of use thereof. Provided in the present disclosure include polypeptides of CA2 biocircuit systems, CA2 effector modules, stimulus response elements (SREs), polynucleotides encoding the same, vectors and cells containing the polypeptides and/or polynucleotides for use in cancer immunotherapy.

### BACKGROUND

[0004] Gene and cell therapies are revolutionizing medicine and offering new promise for the treatment of previously intractable conditions. However, most current technologies do not allow titration of the timing or levels of target protein induction. This has rendered many potential gene and cell therapy applications difficult or impossible to safely and effectively deploy.

[0005] Inadequate exogenous and/or endogenous gene control is a critical issue in many gene and cell therapy settings. This lack of tunability also makes it difficult to safely express proteins with narrow or uncertain therapeutic windows or those requiring more titrated or transient expression.

[0006] One approach to regulated protein expression or function is the use of Destabilizing Domains (DDs). Destabilizing domains are small protein domains that can be appended to a target protein of interest. DDs render the attached protein of interest unstable in the absence of a DD-binding ligand and the protein of interest is rapidly degraded by the ubiquitin-proteasome system of the cell. However, when a specific small molecule DD-binding ligand binds to the DD, the attached protein of interest is stabilized, and protein function is achieved.

[0007] DD technology forms the basis of a new class of cell and gene therapies that can deliver tunable and temporal control of gene expression and function, expanding the universe of protein therapeutics that can be safely and effectively incorporated into cell and gene therapy modalities.

### SUMMARY

[0008] The present disclosure provides novel protein domains derived from human carbonic anhydrase 2 (CA2) displaying small molecule dependent stability. Such protein domains are called destabilizing domains (DDs). In the absence of its binding ligand, the DD is destabilizing and causes degradation of a payload fused to the DD (e.g., a protein of interest (POI), while in the presence of its binding ligand, the fused DD and payload can be stabilized, and its stability is dose dependent.

[0009] In a first aspect, the present disclosure provides a composition comprising an effector module. The effector module comprises a stimulus response element (SRE) and at least one payload which is operably linked to the SRE. In various embodiments, the SRE comprises a destabilizing domain (DD), wherein the DD comprises a region of or the whole human carbonic anhydrase 2 (CA2; SEQ ID NO. 11717), and further comprises a H122Y mutation in the amino acid at position 122 (H122) of SEQ ID NO. 11717.

[0010] In a second aspect, the present disclosure provides a composition comprising an effector module. The effector module comprises a stimulus response element (SRE) and at least one payload which is operably linked to the SRE. In various embodiments, the SRE comprises a destabilizing domain (DD), wherein the DD comprises a region of or the whole human carbonic anhydrase 2 (CA2; SEQ ID NO. 11717), and further comprises a E106D mutation in the amino acid at position 106 (E106) of SEQ ID NO. 11717.

[0011] In a third aspect of the present disclosure, a composition comprising an effector module is provided. The effector module comprises a stimulus response element (SRE) and at least one payload which is operably linked to the SRE. In various embodiments, the SRE comprises a destabilizing domain (DD), wherein the DD comprises a region of or the whole human carbonic anhydrase 2 (CA2; SEQ ID NO. 11717), and further comprises a W208S mutation in the amino acid at position 208 (W208) of SEQ ID NO. 11717.

[0012] In a fourth aspect of the present disclosure, a composition comprising an effector module is provided. The effector module comprises a stimulus response element (SRE) and at least one payload which is operably linked to the SRE. In various embodiments, the SRE comprises a destabilizing domain (DD), wherein the DD comprises a region of or the whole human carbonic anhydrase 2 (CA2; SEQ ID NO. 11717), and further comprises a I59N mutation in the amino acid at position 59 (I59) of SEQ ID NO. 11717.

[0013] In a fifth aspect of the present disclosure, a composition comprising an effector module is provided. The effector module comprises a stimulus response element (SRE) and at least one payload which is operably linked to the SRE. In various embodiments, the SRE comprises a destabilizing domain (DD), wherein the DD comprises a region of or the whole human carbonic anhydrase 2 (CA2; SEQ ID NO. 11717), and further comprises a L156H mutation in the amino acid at position 156 (L156) of SEQ ID NO. 11717. In related embodiments to the fifth aspect, the DD further comprises: (i) a W4Y mutation in the amino acid at position 4 (W4) of SEQ ID NO. 11717; (ii) a F225L mutation in the amino acid at position 225 (F225) of SEQ ID NO. 11717; (iii) deletion of amino acids at positions 257-260 of SEQ ID NO. 11717; (iv) deletion of amino acids at positions 1-5 of SEQ ID NO. 11717; or (v) deletion of amino acids G234, E235 and P236 of SEQ ID NO. 11717; or the DD comprises four mutations relative to SEQ ID NO. 11717, including mutations corresponding to: (i) L156H, S172C, F178Y, and E186D; or (ii) D70N, D74N, D100N, and L156H.

[0014] In a sixth aspect, the present disclosure provides a composition comprising an effector module. The effector module comprises a stimulus response element (SRE) and at least one payload which is operably linked to the SRE. In various embodiments, the SRE comprises a destabilizing domain (DD), comprising a region of or the whole human carbonic anhydrase 2 (CA2; SEQ ID NO. 11717), and further comprises a first mutation and a second mutation relative to SEQ ID NO. 11717, wherein: (i) the first mutation is a S73N mutation in the amino acid at position 73 (S73) of SEQ ID NO. 11717; and (ii) the second mutation is a substitution of F or Y at the amino acid position 89 (R89) of SEQ ID NO. 11717.

[0015] In a seventh aspect, a composition comprising an effector module is provided. The effector module comprises a stimulus response element (SRE) and at least one payload which is operably linked to the SRE. In various embodiments, the SRE comprises a destabilizing domain (DD), comprising a region of or the whole human carbonic anhydrase 2 (CA2; SEQ ID NO. 11717), and further comprises a substitution of N or F at the amino acid position 56 (S56) of SEQ ID NO. 11717.

[0016] In an eighth aspect, a composition comprising an effector module is provided. The effector module comprises a stimulus response element (SRE) and at least one payload which is operably linked to the SRE. In various embodiments, the SRE comprises a destabilizing domain (DD), comprising a region of or the whole human carbonic anhydrase 2 (CA2; SEQ ID NO. 11717), and further comprises one or more substitutions relative to SEQ ID NO. 11717, wherein at least one substitution is a substitution of D or N at the amino acid position 63 (G63) of SEQ ID NO. 11717, and wherein the one or more substitutions correspond to: G63D; G63D and M240L; G63D, E69V and N231I; or T55K, G63N and Q248N.

[0017] In a ninth aspect, a composition comprising an effector module is provided. The effector module comprises a stimulus response element (SRE) and at least one payload which is operably linked to the SRE. In various embodiments, the SRE comprises a destabilizing domain (DD), comprising a region of or the whole human carbonic anhydrase 2 (CA2; SEQ ID NO. 11717), and further comprises two or more substitutions relative to SEQ ID NO. 11717, wherein one of the two or more substitutions is a substitution of L or K at the amino acid position 71 (D71) of SEQ ID NO. 11717. In various embodiments the two or more substitutions correspond to: D71L and T87N; D71L and L250R; D71L, T87N and L250R; or D71K and T192F.

[0018] In a tenth aspect, a composition comprising an effector module is provided. The effector module comprises a stimulus response element (SRE) and at least one payload which is operably linked to the SRE. In various embodiments, the SRE comprises a destabilizing domain (DD), comprising a region of or the whole human carbonic anhydrase 2 (CA2; SEQ ID NO. 11717), and further comprises two or more substitutions relative to SEQ ID NO. 11717. The at least one of the two or more substitutions is: (i) a substitution of F at the amino acid position 241 (V241) of SEQ ID NO. 11717; or (ii) a substitution of F or L at the amino acid position 249 (P249) of SEQ ID NO. 11717; and wherein the two or more substitutions correspond to: D72F and V241F; D72F and P249L; D72F and P249F; D72F, V241F and P249L; A77I and P249F; or V241F and P249L.

[0019] In an eleventh aspect, the present disclosure provides a composition comprising an effector module. The effector module comprises a stimulus response element (SRE) and at least one payload which is operably linked to the SRE. The SRE comprises a destabilizing domain (DD), comprising a region of or the whole human carbonic anhydrase 2 (CA2; SEQ ID NO. 11717), and further comprises one or more substitutions relative to SEQ ID NO. 11717, selected from Y51T, L183S, Y193I, L197P and the combination of V134F and L228F.

[0020] In related embodiments to all of the exemplified aspects provided above, the SRE is responsive to one or more stimuli. In various embodiments the stimuli is a small molecule selected from Acetazolamide, Celecoxib, Valdecoxib, Rofecoxib, Methazolamide, Dorzolamide, Brinzolamide, Diclofenamide, Ethoxzolamide, Zonisamide, Dansylamide, or Dichlorphenamide. Furthermore, the compositions described and exemplified herein comprise a DD having at least one mutation or substitution in the DD, which destabilizes the DD and the at least one payload in the absence of a stimulus and wherein the DD and the payload are stabilized in the presence of the stimulus.

[0021] In a twelfth aspect, the present disclosure provides: a biocircuit system comprising any one or more of the compositions described in the aspects 1-10; a pharmaceutical composition comprising a compositions described in aspects 1-10, and a pharmaceutically acceptable excipient; a polynucleotide encoding a composition described in aspects 1-10; a vector comprising a polynucleotide which encodes a composition described in aspects 1-10; a cell comprising a polynucleotide which encodes a composition described in aspects 1-10; a pharmaceutical composition comprising a cell which comprises a polynucleotide which encodes a composition described in aspects 1-10, and a pharmaceutically acceptable excipient.

[0022] In a thirteenth aspect, the present disclosure provides a method of treating a disease in a subject in need thereof. The method comprises: (a) administering to the subject a therapeutically effective amount of a cell of aspect, 11, wherein the cell comprises a payload that treats the disease; and (b) administering to the subject, a therapeutically effective amount of a stimulus, wherein the SRE is responsive to the stimulus and wherein expression of the payload is modulated in response to the stimulus to thereby treat the disease.

[0023] In some embodiments, the present disclosure provides a stimulus response element (SRE) which may comprise a destabilizing domain (DD) derived from human carbonic anhydrase 2 (CA2; SEQ ID NO. 11717) in whole or in part. In one embodiment, the DD may include the whole CA2 (SEQ ID NO. 11717).

[0024] In some embodiments, the present disclosure provides a DD comprising a region of or the whole human carbonic anhydrase 2 (CA2; SEQ ID NO. 11717), and further comprising a mutation relative to SEQ ID NO. 11717 selected from A115L, A116Q, A116V, A133L, A133T, A141P, A152D, A152L, A152R, A173C, A173G, A173L, A173T, A23P, A247L, A247S, A257L, A257S, A38P, A38V, A54Q, A54V, A54X, A65L, A65N, A65V, A77I, A77P, A77Q, C205M, C205R, C205V, C205W, C205Y, D101G, D101M, D110I, D129I, D138G, D138M, D138N, D161*, D161M, D161V, D164G, D164I, D174*, D174T, D179E, D179I, D179R, D189G, D189I, D19T, D19V, D242G, D242T, D32T, D34T, D41T, D52I, D52L, D71F, D71G, D71K, D71M, D71S, D71Y, D72I, D72S, D72T, D72X, D75T, D75V, D85M, E106D, E106G, E106S, E117*, E117N, E14N, E186*, E186N, E204A, E204D, E204G, E204N, E213*, E213G, E213N, E220K, E220R, E220S, E233D, E233G, E233R, E235*, E235G, E235N, E237K, E237R, E238*, E238N, E238R, E26S, E69D, E69K, E69S, F130L, F146V, F175I, F175L, F175S, F178L, F178S, F20L, F20S, F225I, F225L, F225S, F225Y, F230I, F230L, F230S, F259L, F259S, F66S, F70I, F70L, F95Y, G102D, G104R, G104V, G128R, G12D, G12E, G131E, G131R, G131W, G139D, G144D, G144V, G150A, G150S, G150W, G155A, G155C, G155D, G155S, G170A, G170D, G182A, G182W, G195A, G195R, G232R, G232W, G234L, G234V, G25E, G63D, G63V, G81E, G81V, G82D, G86A, G86D, G98V, H107I, H107Q, H119T, H119Y, H122T, H122Y, H15L, H15T, H15Y, H17D, H17I, H36I, H36Q, H64M, H94T, H96T, I145F, I145M, I166H, I166L, I209D, I209L, I215H, I215S, I22L, I255N, I255S, I33S, I59F, I59N, I59S, I91F, K111E, K111N, K112R, K113I, K113N, K126N, K132E, K132R, K148E, K148R, K153*, K153N, K158E, K158N, K167*, K169N, K169R, K171Q, K171R, K18R, K212N, K212Q, K212R, K212W, K224E, K224N, K227*, K227N, K24R, K251E, K251R, K256Q, K260F, K260L, K260Q, K39S, K45N, K45S, K80M, K80R, L118F, L120W, L140V, L140W, L143*, L147*, L147F, L156F, L156H, L156P, L156Q, L163A, L163W, L183P, L183S, L184F, L184P, L188P, L188W, L197*, L197M, L197P, L197R, L197T, L202F, L202H, L202I, L202P, L202R, L202S, L203P, L203S, L203W, L211*, L211A, L211S, L223*, L223I, L223V, L228F, L228H, L228T, L239*, L239F, L239T, L250*, L250P, L250T, L44*, L44M, L47C, L47V, L57*, L57X, L60S, L79F, L79S, L84W, L90*, L90V, M240D, M240L, M240R, M240W, N11D, N11K, N124T, N177*, N177T, N229*, N229T, N231D, N231F, N231K, N231L, N231M, N231Q, N231T, N243Q, N243T, N252E, N252T, N61R, N61T, N61Y, N62K, N62M, N67D, N67T, P137L, P13A, P13H, P13L, P13S, P154L, P154R, P154T, P180L, P180S, P185L, P185S, P185V, P194Q, P200A, P200L, P200S, P200T, P201A, P201L, P201R, P201S, P214T, P236L, P236T, P246L, P246Q, P249A, P249F, P249H, P249I, P249X, P30L, P30S, P42L, P83A, Q103K, Q135S, Q136N, Q157R, Q157S, Q221A, Q221R, Q248F, Q248L, Q248S, Q254A, Q254K, Q28S, Q53H, Q53K, Q53N, Q74R, Q92H, Q92S, R181H, R181S, R181V, R226H, R226P, R226V, R245A, R253G, R253Q, R27A, R58G, R89D, R89F, R89I, R89X, R89Y, S105L, S105Q, S151A, S151I, S151Q, S165F, S165P, S172E, S172V, S187I, S187P, S196H, S196L, S216A, S216Q, S218A, S218Q, S219A, S219Q, S258F, S258P, S29C, S29P, S43P, S43T, S48L, S50P, S56F, S56N, S56P, S56X, S73L, S73N, S73X, S99H, T108L, T125I, T125P, T168K, T168N, T168Q, T176H, T176L, T192D, T192F, T192I, T192N, T192P, T192X, T198D, T198I, T198P, T199A, T199H, T199P, T207D, T207I, T207P, T207S, T35I, T35L, T37Q, T55L, T87L, V109M, V109W, V121F, V134C, V134F, V142F, V149G, V149L, V159L, V159S, V160C, V160L, V162A, V162C, V206*, V206C, V206M, V210C, V217L, V217R, V217S, V222A, V222C, V222G, V241G, V241W, V241X, V31L, V49F, V68L, V68W, V78C, W123G, W123R, W16G, W191*, W191G, W191L, W208G, W208L, W208S, W244*, W244G, W244L, W97C, W97G, Y114H, Y114M, Y127M, Y190*, Y190L, Y190T, Y193C, Y193F, Y193I, Y193L, Y193T, Y193V, Y193X, Y40M, Y51F, Y51M, Y51T, Y51X, Y88T, K9N, and S29A.

[0025] In some embodiments, the present disclosure provides a DD comprising a region of or the whole human carbonic anhydrase 2 (CA2; SEQ ID NO. 11717), and further comprising a mutation relative to SEQ ID NO. 11717 selected from E106D, G63D, H122Y, I59N, L156H, L183S, L197P, S56F, S56N, W208S, Y193I, and Y51T.

[0026] In some embodiments, the present disclosure provides a DD comprising a region of or the whole human carbonic anhydrase 2 (CA2; SEQ ID NO. 11717), and further comprises two or more mutations relative to SEQ ID NO. 11717. In some embodiments, a DD may comprise CA2 (aa 2-260 of WT, R27L, H122Y), CA2 (aa 2-260 of WT, T87I, H122Y), CA2 (aa 2-260 of WT, H122Y, N252D), CA2 (aa 2-260 of WT, D72F, V241F), CA2 (aa 2-260 of WT, V241F, P249L), CA2 (aa 2-260 of WT, D72F, P249L), CA2 (aa 2-260 of WT, D71L, L250R), CA2 (aa 2-260 of WT, D72F, P249F), CA2 (aa 2-260 of WT, T55K, G63N, Q248N), CA2 (aa 2-260 of WT, L156H, A257de1, S258de1, F259de1, K260de1), CA2 (aa 2-260 of WT, L156H, S2de1, H3de1, H4de1, W5de1), CA2 (aa 2-260 of WT, W4Y, L156H), CA2 (aa 2-260 of WT, L156H, G234de1, E235de1, P236de1), CA2 (aa 2-260 of WT, L156H, F225L), CA2 (aa 2-260 of WT, D70N, D74N, D100N, L156H), (CA2 (aa 2-260 of WT, I59N, G102R)(SEQ ID NO. 210598), CA2 (aa 2-260 of WT, G63D, E69V, N231I)(SEQ ID NO. 210748), CA2 (aa 2-260 of WT, R27L, T87I, H122Y, N252D)(SEQ ID NO. 210702), CA2 (aa 2-260 of WT, D72F, V241F, P249L)(SEQ ID NO. 210503), CA2 (aa 2-260 of WT, D71L, T87N, L250R)(SEQ ID NO. 210510), CA2 (aa 2-260 of WT, L156H, S172C, F178Y, E186D)(SEQ ID NO. 210756), CA2 (aa 2-260 of WT, D71F, N231F)(SEQ ID NO. 210505), CA2 (aa 2-260 of WT, A77I, P249F)(SEQ ID NO. 210514), CA2 (aa 2-260 of WT, D71K, P249H)(SEQ ID NO. 210516), CA2 (aa 2-260 of WT, D72F, P249H)(SEQ ID NO. 210518), CA2 (aa 2-260 of WT, Q53N, N61Y)(SEQ ID NO. 210521), CA2 (aa 2-260 of WT, E106D, C205S)(SEQ ID NO. 210523), CA2 (aa 2-260 of WT, C205S, W208S)(SEQ ID NO. 210525), CA2 (aa 2-260 of WT, S73N, R89Y)(SEQ ID NO. 210532), CA2 (aa 2-260 of WT, D71K, T192F)(SEQ ID NO. 210534), CA2 (aa 2-260 of WT, Y193L, K260L)(SEQ ID NO. 210540), CA2 (aa 2-260 of WT, D71F, V241F, P249L)(SEQ ID NO. 210544), CA2 (aa 2-260 of WT, L147F, Q248F)(SEQ ID NO. 210548), CA2 (aa 2-260 of WT, D52I, S258P)(SEQ ID NO. 210550), CA2 (aa 2-260 of WT, D72S, T192N)(SEQ ID NO. 210552), CA2 (aa 2-260 of WT, D179E, T192I)(SEQ ID NO. 210554), CA2 (aa 2-260 of WT, S56N, Q103K)(SEQ ID NO. 210558), CA2 (aa 2-260 of WT, D71Y, Q248L)(SEQ ID NO. 210560), CA2 (aa 2-260 of WT, S73N, R89F)(SEQ ID NO. 210562), CA2 (aa 2-260 of WT, D71K, N231L, E235G, L239F)(SEQ ID NO. 210564), CA2 (aa 2-260 of WT, D72F, P249I)(SEQ ID NO. 210568), CA2 (aa 2-260 of WT, D72X, V241X, P249X)(SEQ ID NO. 210572), CA2 (aa 2-260 of WT, A54X, S56X, L57X, T192X)(SEQ ID NO. 210574), CA2 (aa 2-260 of WT, Y193V, K260F)(SEQ ID NO. 210576), CA2 (aa 2-260 of WT, G63D, M240L)(SEQ ID NO. 210578), CA2 (aa 2-260 of WT, V134F, L228F)(SEQ ID NO. 210580), CA2 (aa 2-260 of WT, D71G, N231K)(SEQ ID NO. 210582), CA2 (aa 2-260 of WT, S56F, D71S)(SEQ ID NO. 210584), CA2 (aa 2-260 of WT, D52L, G128R, Q248F)(SEQ ID NO. 210586), CA2 (aa 2-260 of WT, S73X, R89X)(SEQ ID NO. 210588), CA2 (aa 2-260 of WT, Y51X, D72X, V241X, P249X)(SEQ ID NO. 210592), CA2 (aa 2-260 of WT, D72I, W97C)(SEQ ID NO. 210594), CA2 (aa 2-260 of WT, D71K, T192F, N231F)(SEQ ID NO. 210596), CA2 (aa 2-260 of WT, H36Q, S43T, Y51F, N67D, G131W, R226H)(SEQ ID NO. 210698), CA2 (aa 2-260 of WT, F70I, F146V)(SEQ ID NO. 210700), CA2 (aa 2-260 of WT, K45N, V68L, H119Y, K169R, D179E)(SEQ ID NO. 210704), CA2 (aa 2-260 of WT, H15L, A54V, K111E, E220K, F225I)(SEQ ID NO. 210706), CA2 (aa 2-260 of WT, P13S, P83A, D101G, K111N, F230I)(SEQ ID NO. 210708), CA2 (aa 2-260 of WT, G63D, W123R, E220K)(SEQ ID NO. 210712), CA2 (aa 2-260 of WT, N11D, E69K, G86D, V109M, K113I, T125I, D138G, G155S)(SEQ ID NO. 210714), CA2 (aa 2-260 of WT, I59N, G102R, A173T)(SEQ ID NO. 210716), CA2 (aa 2-260 of WT, L79F, P180S)(SEQ ID NO. 210718), CA2 (aa 2-260 of WT, A77P, G102R, D138N)(SEQ ID NO. 210724), CA2 (aa 2-260 of WT, F20L, K45N, G63D, E69V, N231I)(SEQ ID NO. 210726), CA2 (aa 2-260 of WT, T199N, L202P, L228F)(SEQ ID NO. 210728), CA2 (aa 2-260 of WT, K9N, H122Y, T168K)(SEQ ID NO. 210730), CA2 (aa 2-260 of WT, Q53H, L90V, Q92H, G131E)(SEQ ID NO. 210732), CA2 (aa 2-260 of WT, L44M, L47V, N62K, E69D)(SEQ ID NO. 210734), CA2 (aa 2-260 of WT, D75V, K169N, F259L)(SEQ ID NO. 210738), CA2 (aa 2-260 of WT, T207S, V222A, N231D)(SEQ ID NO. 210740), CA2 (aa 2-260 of WT, I59F, V206M, G232R)(SEQ ID NO. 210742), CA2 (aa 2-260 of WT, P13A, A133T)(SEQ ID NO. 210744), CA2 (aa 2-260 of WT, I59N, R89I)(SEQ ID NO. 210750), CA2 (aa 2-260 of WT, A65N, G86D, G131R, G155D, K158N, V162A, G170D, P236L)(SEQ ID NO. 210752), CA2 (aa 2-260 of WT, G12R, H15Y, D19V)(SEQ ID NO. 210754), CA2 (aa 2-260 of WT, A65V, F95Y, E106G, H107Q, I145M, F175I)(SEQ ID NO. 210758), and/or CA2 (aa 2-260 of WT, G63D, E69V, N231I)(SEQ ID NO. 210851 or 210847).

[0027] In some embodiments, a DD may comprise CA2 (aa 2-260 of WT, R27L, H122Y), CA2 (aa 2-260 of WT, T87I, H122Y), CA2 (aa 2-260 of WT, H122Y, N252D), CA2 (aa 2-260 of WT, D72F, V241F), CA2 (aa 2-260 of WT, V241F, P249L), CA2 (aa 2-260 of WT, D72F, P249L), CA2 (aa 2-260 of WT, D71L, L250R), CA2 (aa 2-260 of WT, D72F, P249F), CA2 (aa 2-260 of WT, T55K, G63N, Q248N), CA2 (aa 2-260 of WT, L156H, A257de1, S258de1, F259de1, K260de1), CA2 (aa 2-260 of WT, L156H, S2de1, H3de1, H4de1, W5de1), CA2 (aa 2-260 of WT, W4Y, L156H), CA2 (aa 2-260 of WT, L156H, G234de1, E235de1, P236de1), CA2 (aa 2-260 of WT, L156H, F225L), CA2 (aa 2-260 of WT, D70N, D74N, D100N, L156H), (CA2 (aa 2-260 of WT, I59N, G102R)(SEQ ID NO. 210598), CA2 (aa 2-260 of WT, G63D, E69V, N231I)(SEQ ID NO. 210748), CA2 (aa 2-260 of WT, R27L, T87I, H122Y, N252D)(SEQ ID NO. 210702), CA2 (aa 2-260 of WT, D72F, V241F, P249L)(SEQ ID NO. 210503), CA2 (aa 2-260 of WT, D71L, T87N, L250R)(SEQ ID NO. 210510), CA2 (aa 2-260 of WT, L156H, S172C, F178Y, E186D)(SEQ ID NO. 210756), CA2 (aa 2-260 of WT, A77I, P249F)(SEQ ID NO. 210514), CA2 (aa 2-260 of WT, E106D, C205S)(SEQ ID NO. 210523), CA2 (aa 2-260 of WT, C205S, W208S)(SEQ ID NO. 210525), CA2 (aa 2-260 of WT, S73N, R89Y)(SEQ ID NO. 210532), CA2 (aa 2-260 of WT, D71K, T192F)(SEQ ID NO. 210534), CA2 (aa 2-260 of WT, S73N, R89F)(SEQ ID NO. 210562), CA2 (aa 2-260 of WT, G63D, M240L)(SEQ ID NO. 210578), CA2 (aa 2-260 of WT, V134F, L228F)(SEQ ID NO. 210580), and/or CA2 (aa 2-260 of WT, S56F, D71S)(SEQ ID NO. 210584).

[0028] The SREs described herein may be responsive to one or more stimuli. Such stimuli may be small molecule such as but not limited to Acetazolamide, Celecoxib, Valdecoxib, Rofecoxib, Methazolamide, Dorzolamide, Brinzolamide, Diclofenamide, Ethoxzolamide, Zonisamide, Dansylamide, and Dichlorphenamide. In embodiment, the small molecule may be Acetazolamide. In some aspects, the stimulus may Celecoxib.

[0029] The present disclosure provides CA2 biocircuit systems which include at least one effector module. Such effector modules may include a stimulus response element (SRE). Provided herein are biocircuits with an SRE which includes a region or the complete human carbonic anhydrase 2 (CA2; SEQ ID NO. 11717).

[0030] Payloads included in the CA2 biocircuit systems may be a therapeutic agent, a natural protein, a fusion polypeptide, antibody or a variant or a fragment thereof.

[0031] In some embodiments, the payload may be a therapeutic agent. In some embodiments, the therapeutic agent may be a cytokine, a chimeric antigen receptor, a cytokine or a cytokine-cytokine receptor fusion protein.

[0032] CA2 biocircuit systems may be responsive to one or more stimuli. In one aspect, the stimulus may be a small molecule such as but not limited to Acetazolamide, Celecoxib, Valdecoxib, Rofecoxib, Methazolamide, Dorzolamide, Brinzolamide, Diclofenamide, Ethoxzolamide, Zonisamide, Dansylamide, or Dichlorphenamide. In one embodiment, the small molecule may be Acetazolamide. In another aspect, the small molecule may be Celecoxib.

[0033] Also provided herein are polynucleotides encoding the SREs, biocircuit systems and/or compositions described herein as well as vectors that include the polynucleotides. The present disclosure also describes pharmaceutical compositions that include CA2 biocircuit and/or the compositions described herein and a pharmaceutically acceptable excipient.

### BRIEF DESCRIPTION OF THE DRAWINGS

[0034] The foregoing and other objects, features, and advantages will be apparent from the following description of particular embodiments of the present disclosure, as illustrated in the accompanying drawings. The drawings are not necessarily to scale; emphasis instead being placed upon illustrating the principles of various embodiments of the present disclosure.

[0035] FIG. 1 shows the ligand dependent regulation of CA2 chimeric antigen receptors.

[0036] FIG. 2 shows the response of CA2 biocircuits to varying doses of Acetazolamide.

[0037] FIG. 3 shows Acetazolamide responses for OT-002347 (labeled as CA2-070) and OT-001978 (labeled as CA2-026).

### DETAILED DESCRIPTION

[0038] The details of one or more embodiments of the present disclosure are set forth in the accompanying description below. Although any materials and methods similar or equivalent to those described herein can be used in the practice or testing of the present disclosure, the preferred materials and methods are now described. Other features, objects and advantages of the present disclosure will be apparent from the description. In the description, the singular forms also include the plural unless the context clearly dictates otherwise. Unless defined otherwise, all technical and scientific terms used herein have the same meaning as commonly understood by one of ordinary skill in the art to which the present disclosure belongs. In the case of conflict, the present description will control.

### I. Compositions

### Biocircuits or Biocircuit Systems

[0039] According to the present disclosure, biocircuit systems are provided which comprise, at their core, at least one effector module. Such effector module(s) are independently associated, or integral therewith, one or more stimulus response elements (SREs). In general, a stimulus response element (SRE) may be operably linked to a payload which could be any protein of interest (POI) (e.g., an immunotherapeutic agent), to form an effector module. The SRE, when activated by a particular stimulus, e.g., a small molecule, can produce a signal or outcome, to regulate transcription and/or protein levels of the linked payload either up or down by perpetuating a stabilizing signal or destabilizing signal, or any other types of regulation. A much-detailed description of a biocircuit system are taught in co-owned U.S. Provisional Patent Application No. 62/320,864 filed Apr. 11, 2016, 62/466,596 filed Mar. 3, 2017 and the International Publication WO2017/180587 (the contents each of which are herein incorporated by reference in their entirety). In accordance with the present disclosure, biocircuit systems, effector modules, SREs and components that tune expression levels and activities of any agents used for immunotherapy are provided.

[0040] As used herein, a “biocircuit” or “biocircuit system” is defined as a circuit within or useful in biologic systems comprising a stimulus and at least one effector module responsive to a stimulus, where the response to the stimulus produces at least one signal or outcome within, between, as an indicator of, or on a biologic system. Biologic systems are generally understood to be any cell, tissue, organ, organ system or organism, whether animal, plant, fungi, bacterial, or viral. It is also understood that biocircuits may be artificial circuits which employ the stimuli or effector modules taught by the present disclosure and effect signals or outcomes in acellular environments such as with diagnostic, reporter systems, devices, assays or kits. The artificial circuits may be associated with one or more electronic, magnetic, or radioactive components or parts.

[0041] In accordance with the present disclosure, a biocircuit system may be a destabilizing domain (DD) biocircuit system, a chimeric antigen receptor (CAR) biocircuit systems (e.g., I/O biocircuit systems), a dimerization biocircuit system, a receptor biocircuit system, and a cell biocircuit system. Any of these systems may act as a signal to any other of these biocircuit systems.

### Effector Modules

[0042] The biocircuits of the present disclosure include at least one effector module. As used herein, an “effector module” is a single or multi-component construct or complex comprising at least (a) one or more stimulus response elements (SREs) and (b) one or more payloads (e.g., proteins of interest (POIs)).

[0043] Effector modules may be designed to include one or more payloads, one or more SREs, one or more cleavage sites, one or more signal sequences and one or more additional features including the presence or absence of one or more linkers. Representative effector module embodiments of the present disclosure are illustrated in FIGS. 2-6 in International Publication No. WO2017/180587, the contents of which are herein incorporated by reference in their entirety. Biocircuits and components utilizing such effector molecules are given in FIGS. 7-12 in International Publication No. WO2017/180587, the contents of which are herein incorporated by reference in their entirety.

[0044] As shown in FIG. 2 in International Publication No. WO2017/180587, representative effector module embodiments comprising one payload, i.e. one immunotherapeutic agent are illustrated. Each components of the effector module may be located or positioned in various arrangements without (A to F) or with (G to Z, and AA to DD) a cleavage site. An optional linker may be inserted between each component of the effector module.

[0045] FIGS. 3 to 6 in International Publication No. WO2017/180587, illustrate representative effector module embodiments comprising two payloads, i.e. two immunotherapeutic agents. In some aspects, more than two immunotherapeutic agents (payloads) may be included in the effector module under the regulation of the same SRE (e.g., the same DD). The two or more agents may be either directly linked to each other or separated. The SRE may be positioned at the N terminus of the construct, or the C terminus of the construct, or in the internal location.

[0046] In some embodiments, biocircuits of the present disclosure may be modified to reduce their immunogenicity. Immunogenicity is the result of a complex series of responses to a substance that is perceived as foreign and may include the production of neutralizing and non-neutralizing antibodies, formation of immune complexes, complement activation, mast cell activation, inflammation, hypersensitivity responses, and anaphylaxis. Several factors can contribute to protein immunogenicity, including, but not limited to protein sequence, route and frequency of administration and patient population. In a preferred embodiment, protein engineering may be used to reduce the immunogenicity of the compositions of the present disclosure. In some embodiments, modifications to reduce immunogenicity may include modifications that reduce binding of the processed peptides derived from the parent sequence to MHC proteins. For example, amino acid modifications may be engineered such that there are no or a minimal of number of immune epitopes that are predicted to bind with high affinity, to any prevalent MHC alleles. Several methods of identifying MHC binding epitopes of known protein sequences are known in the art and may be used to score epitopes in the compositions of the present disclosure. Such methods are disclosed in US Patent Publication No. US 20020119492, US20040230380, and US 20060148009; the contents of each of which are incorporated by reference in their entirety.

[0047] Effector modules, including their SREs and payloads, may be nucleic acid-based, protein-based or a combination thereof. They may be in the form of DNA, RNA, mRNA, proteins, fusion proteins, or any combination of the foregoing.

[0048] Effector modules, including their SREs and payloads may individually, collectively or independently comprise peptides, polypeptides or proteins. At the protein level, such payload may be any natural or artificial peptide or polypeptide or fragment thereof. Natural peptides or polypeptide components of the payload may be derived from any known protein of any species.

[0049] Effector modules may be designed to operate in groups of one, two, three, four or more modules. When more than one effector module is utilized in a biocircuit, it is known as an effector module system of that biocircuit.

### Stimulus Response Element (SRE)

[0050] As used herein a “stimulus response element” (SRE) is a component of an effector module which is joined, attached, linked to or associated with one or more payloads and in some instances, is responsible for the responsive nature of the effector module to one or more stimuli. As used herein, the “responsive” nature of an SRE to a stimulus may be characterized by a covalent or non-covalent interaction, a direct or indirect association or a structural or chemical reaction to the stimulus. Further, the response of any SRE to a stimulus may be a matter of degree or kind. The response may be a partial response. The response may be a reversible response. The response may ultimately lead to a regulated signal or output. Such output signal may be of a relative nature to the stimulus, e.g., producing a modulatory effect of between 1% and 100% or a factored increase or decrease such as 2-fold, 3-fold, 4-fold, 5-fold, 10-fold or more. In some embodiments, the SRE is a polypeptide fused to a polypeptide payload.

[0051] In some embodiments, the present disclosure provides methods for modulating protein expression, function or level. In some aspects, the modulation of protein expression, function or level refers to modulation of expression, function or level by at least about 20%, such as by at least about 30%, 40%, 50%, 60%, 70%, 80%, 85%, 90%, 95% and 100%, or at least 20-30%, 20-40%, 20-50%, 20-60%, 20-70%, 20-80%, 20-90%, 20-95%, 20-100%, 30-40%, 30-50%, 30-60%, 30-70%, 30-80%, 30-90%, 30-95%, 30-100%, 40-50%, 40-60%, 40-70%, 40-80%, 40-90%, 40-95%, 40-100%, 50-60%, 50-70%, 50-80%, 50-90%, 50-95%, 50-100%, 60-70%, 60-80%, 60-90%, 60-95%, 60-100%, 70-80%, 70-90%, 70-95%, 70-100%, 80-90%, 80-95%, 80-100%, 90-95%, 90-100% or 95-100%.

### Destabilizing Domains

[0052] Destabilizing domains (DDs) are small protein domains that can be appended to a target protein of interest. The term destabilizing domain (DD) is interchangeable with the term drug responsive domain (DRD). DDs render the attached protein of interest unstable in the absence of a DD-binding ligand such that the protein is rapidly degraded by the ubiquitin-proteasome system of the cell (Stankunas, K., et al., Mol. Cell, 2003, 12: 1615-1624; Banaszynski, et al., Cell; 2006, 126(5): 995-1004; reviewed in Banaszynski, L. A., and Wandless, T. J. Chem. Biol.; 2006, 13:11-21 and Rakhit R et al., Chem Biol. 2014; 21(9):1238-1252). However, when a specific small molecule ligand binds its intended DD as a ligand binding partner, the instability is reversed, and protein function is restored. The conditional nature of DD stability allows a rapid and non-perturbing switch from stable protein to unstable substrate for degradation. Moreover, its dependency on the concentration of its ligand further provides tunable control of degradation rates.

[0053] In one embodiment, the SRE is a destabilizing domain (DD). The presence, absence or an amount of a small molecule ligand that binds to or interacts with the DD, can, upon such binding or interaction modulate the stability of the payload(s) and consequently the function of the payload. Depending on the degree of binding and/or interaction the altered function of the payload may vary, hence providing a “tuning” of the payload function.

[0054] In some embodiments, the desired characteristics of the DDs may include, but are not limited to, low protein levels in the absence of a ligand of the DD (e.g., low basal stability), large dynamic range, robust and predictable dose-response behavior, and rapid kinetics of degradation. DDs that bind to a desired ligand, but not endogenous molecules may be preferred.

[0055] In some embodiments, the DDs of the present disclosure may be developed from known proteins herein referred to as the parent protein. In some embodiments, the CA2 destabilizing domains described herein or known in the art may be used as SREs in the biocircuit systems of the present disclosure in association with any of the payloads (e.g., proteins of interest or immunotherapeutic agents) taught herein.

[0056] Regions or portions or domains of wild type proteins (e.g., CA2) may be utilized as SREs/DDs in whole or in part. They may be combined or rearranged to create new peptides, proteins, regions or domains of which any may be used as SREs/DDs or the starting point for the design of further SREs and/or DDs.

[0057] In one embodiment, the SRE is derived from a region of parent protein (e.g., CA2) or from a mutant protein. The region of the parent protein may be 10, 11, 12, 13, 14, 15, 16, 17, 18, 19, 20, 21, 22, 23, 24, 25, 26, 27, 28, 29, 30, 31, 32, 33, 34, 35, 36, 37, 38, 39, 40, 41, 42, 43, 44, 45, 46, 47, 48, 49, 50, 51, 52, 53, 54, 55, 56, 57, 58, 59, 60, 61, 62, 63, 64, 65, 66, 67, 68, 69, 70, 71, 72, 73, 74, 75, 76, 77, 78, 79, 80, 81, 82, 83, 84, 85, 86, 87, 88, 89, 90, 91, 92, 93, 94, 95, 96, 97, 98, 99, 100, 101, 102, 103, 104, 105, 106, 107, 108, 109, 110, 111, 112, 113, 114, 115, 116, 117, 118, 119, 120, 121, 122, 123, 124, 125, 126, 127, 128, 129, 130, 131, 132, 133, 134, 135, 136, 137, 138, 139, 140, 141, 142, 143, 144, 145, 146, 147, 148, 149, 150, 151, 152, 153, 154, 155, 156, 157, 158, 159, 160, 161, 162, 163, 164, 165, 166, 167, 168, 169, 170, 171, 172, 173, 174, 175, 176, 177, 178, 179, 180, 181, 182, 183, 184, 185, 186, 187, 188, 189, 190, 191, 192, 193, 194, 195, 196, 197, 198, 199, 200, 201, 202, 203, 204, 205, 206, 207, 208, 209, 210, 211, 212, 213, 214, 215, 216, 217, 218, 219, 220, 221, 222, 223, 224, 225, 226, 227, 228, 229, 230, 231, 232, 233, 234, 235, 236, 237, 238, 239, 240, 241, 242, 243, 244, 245, 246, 247, 248, 249, 250, 251, 252, 253, 254, 255, 256, 257, 258, 259, 260, 261, 262, 263, 264, 265, 266, 267, 268, 269, 270, 271, 272, 273, 274, 275, 276, 277, 278, 279, 280, 281, 282, 283, 284, 285, 286, 287, 288, 289, 290, 291, 292, 293, 294, 295, 296, 297, 298, 299, 300, 301, 302, 303, 304, 305, 306, 307, 308, 309, 310, 311, 312, 313, 314, 315, 316, 317, 318, 319, 320, 321, 322, 323, 324, 325, 326, 327, 328, 329, 330, 331, 332, 333, 334, 335, 336, 337, 338, 339, 340, 341, 342, 343, 344, 345, 346, 347, 348, 349, 350, 351, 352, 353, 354, 355, 356, 357, 358, 359, 360, 361, 362, 363, 364, 365, 366, 367, 368, 369, 370, 371, 372, 373, 374, 375, 376, 377, 378, 379, 380, 381, 382, 383, 384, 385, 386, 387, 388, 389, 390, 391, 392, 393, 394, 395, 396, 397, 398, 399, 400, 401, 402, 403, 404, 405, 406, 407, 408, 409, 410, 411, 412, 413, 414, 415, 416, 417, 418, 419, 420, 421, 422, 423, 424, 425, 426, 427, 428, 429, 430, 431, 432, 433, 434, 435, 436, 437, 438, 439, 440, 441, 442, 443, 444, 445, 446, 447, 448, 449, 450, or more than 450 amino acids in length. The region of the parent protein may be 5-50, 25-75, 50-100, 75-125, 100-150, 125-175, 150-200, 175-225, 200-250, 225-275, 250-300, 275-325, 300-350, 325-375, 350-400, 375-425, or 400-450 amino acids in length. As a non-limiting example, the region of the parent protein may be 250-270 amino acids in length. As a non-limiting example, the region of the parent protein may be 225-250 amino acids in length. As a non-limiting example, the region of the parent protein may be 225-260 amino acids in length.

[0058] In one embodiment, the SRE is derived from a parent protein (e.g., CA2) or from a mutant protein and includes a region of the parent protein. The SRE may include a region of the parent protein which is 1%, 5%, 10%, 15%, 20%, 25%, 30%, 35%, 40%, 45%, 50%, 55%, 60%, 65%, 70%, 75%, 80%, 85%, 90%, 95%, 99%, or 100%, 5-10%, 10-15%, 15-20%, 20-25%, 25-30%, 30-35%, 35-40%, 40-45%, 45-50%, 50-55%, 55-60%, 60-65%, 65-70%, 70-75%, 75-80%, 80-85%, 85-90%, 90-95%, 95-100%, 10-20%, 20-30%, 30-40%, 40-50%, 50-60%, 60-70%, 70-80%, 80-90%, 90-100%, 10-30%, 20-40%, 30-50%, 40-60%, 50-70%, 60-80%, 70-90%, 80-100%, 10-40%, 20-50%, 30-60%, 40-70%, 50-80%, 60-90%, 70-100%, 10-50%, 20-60%, 30-70%, 40-80%, 50-90%, 60-100%, 10-60%, 20-70%, 30-80%, 40-90%, 50-100%, 10-70%, 20-80%, 30-90%, 40-100%, 10-80%, 20-90%, 30-100%, 10-90%, 20-100%, 25-50%, 50-75%, or 75-100% of the parent protein or mutant protein.

[0059] In one embodiment, the SRE is derived from a parent protein (e.g., CA2) or from a mutant protein and may have 1%, 5%, 10%, 15%, 20%, 25%, 30%, 35%, 40%, 45%, 50%, 55%, 60%, 65%, 70%, 75%, 80%, 85%, 90%, 95%, 99%, or 100%, 5-10%, 10-15%, 15-20%, 20-25%, 25-30%, 30-35%, 35-40%, 40-45%, 45-50%, 50-55%, 55-60%, 60-65%, 65-70%, 70-75%, 75-80%, 80-85%, 85-90%, 90-95%, 95-100%, 10-20%, 20-30%, 30-40%, 40-50%, 50-60%, 60-70%, 70-80%, 80-90%, 90-100%, 10-30%, 20-40%, 30-50%, 40-60%, 50-70%, 60-80%, 70-90%, 80-100%, 10-40%, 20-50%, 30-60%, 40-70%, 50-80%, 60-90%, 70-100%, 10-50%, 20-60%, 30-70%, 40-80%, 50-90%, 60-100%, 10-60%, 20-70%, 30-80%, 40-90%, 50-100%, 10-70%, 20-80%, 30-90%, 40-100%, 10-80%, 20-90%, 30-100%, 10-90%, 20-100%, 25-50%, 50-75%, or 75-100% identity to the parent protein or mutant protein.

[0060] Candidate destabilizing domain sequence identified from protein domains of parent proteins (as a template) may be mutated to generate libraries of mutants based on the template candidate domain sequence. Mutagenesis strategies used to generate DD libraries may include site-directed mutagenesis e.g. by using structure guided information; or random mutagenesis e.g. using error-prone PCR, or a combination of both. In some embodiments, destabilizing domains identified using random mutagenesis may be used to identify structural properties of the candidate DDs that may be required for destabilization, which may then be used to further generate libraries of mutations using site directed mutagenesis.

[0061] In some embodiments, DD mutant libraries may be screened for mutations with altered, preferably higher binding affinity to the ligand, as compared to the wild type protein. DD libraries may also be screened using two or more ligands and DD mutations that are stabilized by some ligands but not others may be preferentially selected. DD mutations that bind preferentially to the ligand compared to a naturally occurring protein may also be selected. Such methods may be used to optimize ligand selection and ligand binding affinity of the DD. Additionally, such approaches can be used to minimize deleterious effects caused by off-target ligand binding.

[0062] In some embodiments, suitable DDs may be identified by screening mutant libraries using barcodes. Such methods may be used to detect, identify and quantify individual mutant clones within the heterogeneous mutant library. Each DD mutant within the library may have distinct barcode sequences (with respect to each other). In other instances, the polynucleotides can also have different barcode sequences with respect to 2, 3, 4, 5, 6, 7, 8, 9, 10 or more nucleic acid bases. Each DD mutant within the library may also comprise a plurality of barcode sequences. When used in plurality may be used such that each barcode is unique to any other barcode. Alternatively, each barcode used may not be unique, but the combination of barcodes used may create a unique sequence that can be individually tracked. The barcode sequence may be placed upstream of the SRE, downstream of the SRE, or in some instances may be placed within the SRE. DD mutants may be identified by barcodes using sequencing approaches such as Sanger sequencing, and next generation sequencing, but also by polymerase chain reaction and quantitative polymerase chain reaction. In some embodiments, polymerase chain reaction primers that amplify a different size product for each barcode may be used to identify each barcode on an agarose gel. In other instances, each barcode may have a unique quantitative polymerase chain reaction probe sequence that enables targeted amplification of each barcode.

[0063] In one embodiment, the effector modules and/or SREs of the present disclosure may include at least one destabilizing domain (DD). The effector modules and/or SRE may include 1, 2, 3, 4, 5, 6, 7, 8, 9, 10 or more than 10 DDs. When there are more than one DDs, each of the DDs may be derived from the same parent protein, from different parent proteins, may be a fusion of two different parent proteins, or may be artificial.

[0064] In one embodiment, the effector modules and/or SREs of the present disclosure may include 2 DDs. In one embodiment, the effector modules and/or SREs of the present disclosure may include 3 DDs. In one embodiment, the effector modules and/or SREs of the present disclosure may include 4 DDs. In one embodiment, the effector modules and/or SREs of the present disclosure may include 5 DDs. In one embodiment, the effector modules and/or SREs of the present disclosure may include 6 DDs. In one embodiment, the effector modules and/or SREs of the present disclosure may include 7 DDs. In one embodiment, the effector modules and/or SREs of the present disclosure may include 8 DDs. In one embodiment, the effector modules and/or SREs of the present disclosure may include 9 DDs. In one embodiment, the effector modules and/or SREs of the present disclosure may include 10 DDs. The DDs may be derived from any parent protein known in the art and/or described herein. In some embodiments the DDs are derived from the same parent protein. In some embodiments the DDs are derived from different regions of the same parent protein. In some embodiments, the DDs are derived from different parent proteins.

### CA2 Destabilizing Domains

[0065] In some embodiments, the DDs of the present disclosure may be derived from human carbonic anhydrase 2 CA2, which is a member of the Carbonic anhydrases (CAs, EC 4.2.1.1) a superfamily of metalloenzymes present in all life kingdoms. CAs equilibrate the reaction between three chemical species: CO2, bicarbonate, and protons. CAs have convergently evolved, with seven genetically distinct CA families that evolved independently in Bacteria, Archaea, and Eukarya, the α-, β-, γ-, δ-, ζ-, η-, and θ-CAs. In some embodiments, the DDs described herein may be derived from at least one parent protein selected from, but not limited to Carbonic Anhydrase 2 (CA2), Carbonic Anhydrase 1 (CA1), Carbonic Anhydrase 3 (CA3), Carbonic Anhydrase 4 (CA4), Carbonic Anhydrase 5A (CA5A), Carbonic Anhydrase 5B (CA5B), Carbonic Anhydrase 6 (CA6), Carbonic Anhydrase 7 (CA7), Carbonic Anhydrase 8 (CA8), Carbonic Anhydrase 9 (CA9), Carbonic Anhydrase 10 (CA10), Carbonic Anhydrase 11 (CA11), Carbonic Anhydrase 12 (CA12), Carbonic Anhydrase 13 (CA13), and Carbonic Anhydrase 14 (CA14).

[0066] In one embodiment, the DDs may be derived from cytosolic CAs such as but not limited to Carbonic Anhydrase 2 (CA2), Carbonic Anhydrase 1 (CA1), Carbonic Anhydrase 3 (CA3), Carbonic Anhydrase 7 (CA7), and Carbonic Anhydrase 13 (CA13). In one embodiment, the DDs may be derived from mitochondrial CAs such as but not limited to Carbonic Anhydrase 5A (CA5A), and Carbonic Anhydrase 5B (CA5B). In one embodiment, the DDs may be derived from secreted CAs such as but not limited to Carbonic Anhydrase 6 (CA6). In one embodiment, the DDs may be derived from membrane associated CAs such as but not limited to Carbonic Anhydrase 4 (CA4), Carbonic Anhydrase 9 (CA9), Carbonic Anhydrase 12 (CA12), and Carbonic Anhydrase 14 (CA14). In one embodiment, the DD is derived from CA2. In another aspect, the DD may be derived from CA9.

[0067] In some embodiments, the DDs of the present disclosure may be derived from CA2 (SEQ ID NO. 11717; Uniprot ID: P00918) which may be stabilized by ligands such as small molecule inhibitors of CA2. As used herein the term “CA2 WT”, refers to the human wildtype CA2 protein sequence, which is defined as SEQ ID NO. 11717, with the GenBank Access NO. P00918, having the amino acid sequence: MSHHWGYGKHNGPEHWHKDFPIAKGERQSPVDIDTHTAKYDPSLKPLSVSYDQATSLRILNNGHAFNVEFDDS QDKAVLKGGPLDGTYRLIQFHFHWGSLDGQGSEHTVDKKKYAAELHLVHWNTKYGDFGKAVQQPDGLAVLG IFLKVGSAKPGLQKVVDVLDSIKTKGKSADFTNFDPRGLLPESLDYWTYPGSLTTPPLLECVTWIVLKEPISVSSE QVLKFRKLNFNGEGEPEELMVDNWRPAQPLKNRQIKASFK. In some aspects the DDs may be derived from CA2 of SEQ ID NO. 11718 (having the amino acid sequence: MSHHWGYGKHNGPEHWHKDFPIAKGERQSPVDIDTHTAKYDPSLKPLSVSYDQATSLRILNNGHAFNVEFDDS QDKAASLGSLEHQIWGFWESCAAT) or SEQ ID NO. 11719 (having the amino acid sequence: MSHHWGYGKHNGPEHWHKDFPIAKGERQSPVDIDTHTAKYDPSLKPLSVSYDQATSLRILNNGHAFNVEFDDS QDKAEKGISMLRKKDVKNIHSPDNACEE). In some embodiments, DDs of the present disclosure may be identified by utilizing a cocktail of CA2 inhibitors. In other instances, the suitable DDs may be identified by screening first with one CA2 inhibitor and subsequently screening with a second CA2 inhibitor.

[0068] The amino acid sequences of the destabilizing domains encompassed in the disclosure have at least about 40%, 50 or 60% identity, further at least about 70% identity, preferably at least about 75% or 80% identity, more preferably at least about 85%, 86%, 87%, 88%, 89% or 90% identity, and further preferably at least about 91%, 92%, 93%, 94%, 95%, 96%, 97%, 98% or 99% identity to the amino acid sequence set forth therein. Percent identity may be determined, for example, by comparing sequence information using the advanced BLAST computer program, including version Magic-BLAST 1.2.0, available from the National Institutes of Health. The BLAST program is based on the alignment method discussed in Karl and Altschul (1990) Proc. Natl. Acad. Sci USA, 87:2264-68 (the contents of which are incorporated by reference in their entirety).

[0069] In some embodiments, DDs derived from CA2 may comprise amino acids 2-260 of the parent CA2 sequence. This is referred to herein as an M1de1 mutation. In one embodiment, the DDs derived from CA2 may comprise amino acids 2-237 of the parent CA2 sequence.

[0070] Provided herein in Table 1, Table 2, Table 3, Table 4, and Table 6 are CA2 mutants identified by mutagenesis such as random mutagenesis screening, using a combination of nucleotide analog mutagenesis and error-prone PCR, to generate libraries of mutants; or saturation mutagenesis. CA2 destabilizing mutants may also be identified by structure guided mutagenesis and are provided in Table 1. The position of the mutated amino acids listed in Table 1, Table 2, Table 3, Table 4, Table 5 and Table 6 is relative to the full length CA2 of SEQ ID NO. 11717.

TABLE 1
CA2 DDs

| | | | AA | NA |
|---|---|---|---|---|
| Library | | | SEQ ID | SEQ ID |
| ID | Description | AA SEQUENCE | NO. | NO. |
| — | CA2 (aa 2- | SHHWGYGKHNGPEHWHKDFPIAKGERQSPVDIDTHTAKYDPSLKP | 210492 | 210493 |
| | 260 of WT) | LSVSYDQATSLRILNNGHAFNVEFDDSQDKAVLKGGPLDGTYRLI | | |
| | | QFHFHWGSLDGQGSEHTVDKKKYAAELHLVHWNTKYGDFGKAV | | |
| | | QQPDGLAVLGIFLKVGSAKPGLQKVVDVLDSIKTKGKSADFTNFD | | |
| | | PRGLLPESLDYWTYPGSLTTPPLLECVTWIVLKEPISVSSEQVLKFR | | |
| | | KLNFNGEGEPEELMVDNWRPAQPLKNRQIKASFK | | |
| — | CA2 (aa 2- | SHHWGYGKHNGPEHWHKDFPIAKGERQSPVDIDTHTAKYDPSLKP | 210494 | 210495 |
| | 260 of WT, | LSVSYDQATSLRILNNGHAFNVEFDDSQDKAVLKGGPLDGTYRLI | | |
| | W208S) | QFHFHWGSLDGQGSEHTVDKKKYAAELHLVHWNTKYGDFGKAV | | |
| | | QQPDGLAVLGIFLKVGSAKPGLQKVVDVLDSIKTKGKSADFTNFD | | |
| | | PRGLLPESLDYWTYPGSLTTPPLLECVTSIVLKEPISVSSEQVLKFRK | | |
| | | LNFNGEGEPEELMVDNWRPAQPLKNRQIKASFK | | |
| LibC000103 | CA2 (aa 2- | SHHWGYGKHNGPEHWHKDFPIAKGERQSPVDIDTHTAKYDPSLKP | 210496 | 210497 |
| | 260 of WT, | LSVSNDQATSLRILNNGHAFNVEFDDSQDKAVLKGGPLDGTYRLI | | |
| | Y51N) | QFHFHWGSLDGQGSEHTVDKKKYAAELHLVHWNTKYGDFGKAV | | |
| | | QQPDGLAVLGIFLKVGSAKPGLQKVVDVLDSIKTKGKSADFTNFD | | |
| | | PRGLLPESLDYWTYPGSLTTPPLLECVTWIVLKEPISVSSEQVLKFR | | |
| | | KLNFNGEGEPEELMVDNWRPAQPLKNRQIKASFK | | |
| LibC000101 | CA2 (aa 2- | SHHWGYGKHNGPEHWHKDFPIAKGERQSPVDIDTHTAKYDPSLKP | 210498 | 210499 |
| | 260 of WT, | LSVSYDQATNLRILNNGHAFNVEFDDSQDKAVLKGGPLDGTYRLI | | |
| | S56N) | QFHFHWGSLDGQGSEHTVDKKKYAAELHLVHWNTKYGDFGKAV | | |
| | | QQPDGLAVLGIFLKVGSAKPGLQKVVDVLDSIKTKGKSADFTNFD | | |
| | | PRGLLPESLDYWTYPGSLTTPPLLECVTWIVLKEPISVSSEQVLKFR | | |
| | | KLNFNGEGEPEELMVDNWRPAQPLKNRQIKASFK | | |
| LibC000098 | CA2 (aa 2- | SHHWGYGKHNGPEHWHKDFPIAKGERQSPVDIDTHTAKYDPSLKP | 210500 | 210501 |
| LibC000097 | 260 of WT, | LSVSTDQATSLRILNNGHAFNVEFDDSQDKAVLKGGPLDGTYRLIQ | | 210502 |
| | Y51T) | FHFHWGSLDGQGSEHTVDKKKYAAELHLVHWNTKYGDFGKAVQ | | |
| | | QPDGLAVLGIFLKVGSAKPGLQKVVDVLDSIKTKGKSADFTNFDP | | |
| | | RGLLPESLDYWTYPGSLTTPPLLECVTWIVLKEPISVSSEQVLKFRK | | |
| | | LNFNGEGEPEELMVDNWRPAQPLKNRQIKASFK | | |
| LibC000095 | CA2 (aa 2- | SHHWGYGKHNGPEHWHKDFPIAKGERQSPVDIDTHTAKYDPSLKP | 210503 | 210504 |
| | 260 of WT, | LSVSYDQATSLRILNNGHAFNVEFDFSQDKAVLKGGPLDGTYRLIQ | | |
| | D72F, V241F, | FHFHWGSLDGQGSEHTVDKKKYAAELHLVHWNTKYGDFGKAVQ | | |
| | P249L) | QPDGLAVLGIFLKVGSAKPGLQKVVDVLDSIKTKGKSADFTNFDP | | |
| | | RGLLPESLDYWTYPGSLTTPPLLECVTWIVLKEPISVSSEQVLKFRK | | |
| | | LNFNGEGEPEELMFDNWRPAQLLKNRQIKASFK | | |
| LibC000084 | CA2 (aa 2- | SHHWGYGKHNGPEHWHKDFPIAKGERQSPVDIDTHTAKYDPSLKP | 210505 | 210506 |
| | 260 of WT, | LSVSYDQATSLRILNNGHAFNVEFFDSQDKAVLKGGPLDGTYRLIQ | | |
| | D71F, | FHFHWGSLDGQGSEHTVDKKKYAAELHLVHWNTKYGDFGKAVQ | | |
| | N231F) | QPDGLAVLGIFLKVGSAKPGLQKVVDVLDSIKTKGKSADFTNFDP | | |
| | | RGLLPESLDYWTYPGSLTTPPLLECVTWIVLKEPISVSSEQVLKFRK | | |
| | | LNFFGEGEPEELMVDNWRPAQPLKNRQIKASFK | | |
| LibC000079 | CA2 (aa 2- | SHHWGYGKHNGPEHWHKDFPIAKGERQSPVDIDTHTAKYDPSLKP | 210507 | 210508 |
| LibC000078 | 260 of WT, | LSVSYDQATFLRILNNGHAFNVEFDDSQDKAVLKGGPLDGTYRLI | | 210509 |
| | S56F) | QFHFHWGSLDGQGSEHTVDKKKYAAELHLVHWNTKYGDFGKAV | | |
| | | QQPDGLAVLGIFLKVGSAKPGLQKVVDVLDSIKTKGKSADFTNFD | | |
| | | PRGLLPESLDYWTYPGSLTTPPLLECVTWIVLKEPISVSSEQVLKFR | | |
| | | KLNFNGEGEPEELMVDNWRPAQPLKNRQIKASFK | | |
| LibC000073 | CA2 (aa 2- | SHHWGYGKHNGPEHWHKDFPIAKGERQSPVDIDTHTAKYDPSLKP | 210510 | 210511 |
| | 260 of WT, | LSVSYDQATSLRILNNGHAFNVEFLDSQDKAVLKGGPLDGNYRLI | | |
| | D71L, T87N, | QFHFHWGSLDGQGSEHTVDKKKYAAELHLVHWNTKYGDFGKAV | | |
| | L250R) | QQPDGLAVLGIFLKVGSAKPGLQKVVDVLDSIKTKGKSADFTNFD | | |
| | | PRGLLPESLDYWTYPGSLTTPPLLECVTWIVLKEPISVSSEQVLKFR | | |
| | | KLNFNGEGEPEELMVDNWRPAQPRKNRQIKASFK | | |
| LibC000090 | CA2 (aa 2- | SHHWGYGKHNGPEHWHKDFPIAKGERQSPVDIDTHTAKYDPSLKP | 210512 | 210513 |
| | 260 of WT, | LSVSYDQATSLRILNNGHAFNVEFDDSQDKAVLKGGPLDGTYRLI | | |
| | L183S) | QFHFHWGSLDGQGSEHTVDKKKYAAELHLVHWNTKYGDFGKAV | | |
| | | QQPDGLAVLGIFLKVGSAKPGLQKVVDVLDSIKTKGKSADFTNFD | | |
| | | PRGSLPESLDYWTYPGSLTTPPLLECVTWIVLKEPISVSSEQVLKFR | | |
| | | KLNFNGEGEPEELMVDNWRPAQPLKNRQIKASFK | | |
| LibC000076 | CA2 (aa 2- | SHHWGYGKHNGPEHWHKDFPIAKGERQSPVDIDTHTAKYDPSLKP | 210514 | 210515 |
| | 260 of WT, | LSVSYDQATSLRILNNGHAFNVEFDDSQDKIVLKGGPLDGTYRLIQ | | |
| | A77I, P249F) | FHFHWGSLDGQGSEHTVDKKKYAAELHLVHWNTKYGDFGKAVQ | | |
| | | QPDGLAVLGIFLKVGSAKPGLQKVVDVLDSIKTKGKSADFTNFDP | | |
| | | RGLLPESLDYWTYPGSLTTPPLLECVTWIVLKEPISVSSEQVLKFRK | | |
| | | LNFNGEGEPEELMVDNWRPAQFLKNRQIKASFK | | |
| LibC000099 | CA2 (aa 2- | SHHWGYGKHNGPEHWHKDFPIAKGERQSPVDIDTHTAKYDPSLKP | 210516 | 210517 |
| | 260 of WT, | LSVSYDQATSLRILNNGHAFNVEFKDSQDKAVLKGGPLDGTYRLI | | |
| | D71K, | QFHFHWGSLDGQGSEHTVDKKKYAAELHLVHWNTKYGDFGKAV | | |
| | P249H) | QQPDGLAVLGIFLKVGSAKPGLQKVVDVLDSIKTKGKSADFTNFD | | |
| | | PRGLLPESLDYWTYPGSLTTPPLLECVTWIVLKEPISVSSEQVLKFR | | |
| | | KLNFNGEGEPEELMVDNWRPAQHLKNRQIKASFK | | |
| LibC000081 | CA2 (aa 2- | SHHWGYGKHNGPEHWHKDFPIAKGERQSPVDIDTHTAKYDPSLKP | 210518 | 210519 |
| LibC000065 | 260 of WT, | LSVSYDQATSLRILNNGHAFNVEFDFSQDKAVLKGGPLDGTYRLIQ | | 210520 |
| | D72F, | FHFHWGSLDGQGSEHTVDKKKYAAELHLVHWNTKYGDFGKAVQ | | |
| | P249H) | QPDGLAVLGIFLKVGSAKPGLQKVVDVLDSIKTKGKSADFTNFDP | | |
| | | RGLLPESLDYWTYPGSLTTPPLLECVTWIVLKEPISVSSEQVLKFRK | | |
| | | LNFNGEGEPEELMVDNWRPAQFLKNRQIKASFK | | |
| LibC000082 | CA2 (aa 2- | SHHWGYGKHNGPEHWHKDFPIAKGERQSPVDIDTHTAKYDPSLKP | 210521 | 210522 |
| | 260 of WT, | LSVSYDNATSLRILYNGHAFNVEFDDSQDKAVLKGGPLDGTYRLI | | |
| | Q53N, N61Y) | QFHFHWGSLDGQGSEHTVDKKKYAAELHLVHWNTKYGDFGKAV | | |
| | | QQPDGLAVLGIFLKVGSAKPGLQKVVDVLDSIKTKGKSADFTNFD | | |
| | | PRGLLPESLDYWTYPGSLTTPPLLECVTWIVLKEPISVSSEQVLKFR | | |
| | | KLNFNGEGEPEELMVDNWRPAQPLKNRQIKASFK | | |
| — | CA2 (aa 2- | SHHWGYGKHNGPEHWHKDFPIAKGERQSPVDIDTHTAKYDPSLKP | 210523 | 210524 |
| | 260 of WT, | LSVSYDQATSLRILNNGHAFNVEFDDSQDKAVLKGGPLDGTYRLI | | |
| | E106D, | QFHFHWGSLDGQGSDHTVDKKKYAAELHLVHWNTKYGDFGKAV | | |
| | C205S) | QQPDGLAVLGIFLKVGSAKPGLQKVVDVLDSIKTKGKSADFTNFD | | |
| | | PRGLLPESLDYWTYPGSLTTPPLLESVTWIVLKEPISVSSEQVLKFR | | |
| | | KLNFNGEGEPEELMVDNWRPAQPLKNRQIKASFK | | |
| — | CA2 (aa 2- | SHHWGYGKHNGPEHWHKDFPIAKGERQSPVDIDTHTAKYDPSLKP | 210525 | 210526 |
| | 260 of WT, | LSVSYDQATSLRILNNGHAFNVEFDDSQDKAVLKGGPLDGTYRLI | | |
| | C205S, | QFHFHWGSLDGQGSEHTVDKKKYAAELHLVHWNTKYGDFGKAV | | |
| | W208S) | QQPDGLAVLGIFLKVGSAKPGLQKVVDVLDSIKTKGKSADFTNFD | | |
| | | PRGLLPESLDYWTYPGSLTTPPLLESVTSIVLKEPISVSSEQVLKFRK | | |
| | | LNFNGEGEPEELMVDNWRPAQPLKNRQIKASFK | | |
| — | CA2 (aa 2- | SHHWGYGKHNGPEHWHKDFPIAKGERQSPVDIDTHTAKYDPSLKP | 210527 | 210528 |
| | 260 of WT, | LSVSYDQATSLRILNNGHAFNVEFDDSQDKAVLKGGPLDGTYRLI | | |
| | C205S) | QFHFHWGSLDGQGSEHTVDKKKYAAELHLVHWNTKYGDFGKAV | | |
| | | QQPDGLAVLGIFLKVGSAKPGLQKVVDVLDSIKTKGKSADFTNFD | | |
| | | PRGLLPESLDYWTYPGSLTTPPLLESVTWIVLKEPISVSSEQVLKFR | | |
| | | KLNFNGEGEPEELMVDNWRPAQPLKNRQIKASFK | | |
| LibC000066 | CA2 (aa 2- | SHHWGYGKHNGPEHWHKDFPIAKGERQSPVDIDTHTAKYDPSLKP | 210529 | 210530 |
| LibC000069 | 260 of WT, | LSVSYDQATSLRILNNGHAFNVEFDDSQDKAVLKGGPLDGTYRLI | | 210531 |
| | Y193I) | QFHFHWGSLDGQGSEHTVDKKKYAAELHLVHWNTKYGDFGKAV | | |
| | | QQPDGLAVLGIFLKVGSAKPGLQKVVDVLDSIKTKGKSADFTNFD | | |
| | | PRGLLPESLDYWTIPGSLTTPPLLECVTWIVLKEPISVSSEQVLKFRK | | |
| | | LNFNGEGEPEELMVDNWRPAQPLKNRQIKASFK | | |
| LibC000056 | CA2 (aa 2- | SHHWGYGKHNGPEHWHKDFPIAKGERQSPVDIDTHTAKYDPSLKP | 210532 | 210533 |
| | 260 of WT, | LSVSYDQATSLRILNNGHAFNVEFDDNQDKAVLKGGPLDGTYYLI | | |
| | S73N, R89Y) | QFHFHWGSLDGQGSEHTVDKKKYAAELHLVHWNTKYGDFGKAV | | |
| | | QQPDGLAVLGIFLKVGSAKPGLQKVVDVLDSIKTKGKSADFTNFD | | |
| | | PRGLLPESLDYWTYPGSLTTPPLLECVTWIVLKEPISVSSEQVLKFR | | |
| | | KLNFNGEGEPEELMVDNWRPAQPLKNRQIKASFK | | |
| LibC000057 | CA2 (aa 2- | SHHWGYGKHNGPEHWHKDFPIAKGERQSPVDIDTHTAKYDPSLKP | 210534 | 210535 |
| | 260 of WT, | LSVSYDQATSLRILNNGHAFNVEFKDSQDKAVLKGGPLDGTYRLI | | |
| | D71K, | QFHFHWGSLDGQGSEHTVDKKKYAAELHLVHWNTKYGDFGKAV | | |
| | T192F) | QQPDGLAVLGIFLKVGSAKPGLQKVVDVLDSIKTKGKSADFTNFD | | |
| | | PRGLLPESLDYWFYPGSLTTPPLLECVTWIVLKEPISVSSEQVLKFR | | |
| | | KLNFNGEGEPEELMVDNWRPAQPLKNRQIKASFK | | |
| LibC000061 | CA2 (aa 2- | SHHWGYGKHNGPEHWHKDFPIAKGERQSPVDIDTHTAKYDPSLKP | 210536; | 210537 |
| | 260 of WT, | LSVSYDQATSLRILNNGHAFNVEFDDSQDKAVLKGGPLDGTYRLI | 210696 | |
| | E238*) | QFHFHWGSLDGQGSEHTVDKKKYAAELHLVHWNTKYGDFGKAV | | |
| | | QQPDGLAVLGIFLKVGSAKPGLQKVVDVLDSIKTKGKSADFTNFD | | |
| | | PRGLLPESLDYWTYPGSLTTPPLLECVTWIVLKEPISVSSEQVLKFR | | |
| | | KLNFNGEGEPE*LMVDNWRPAQPLKNRQIKASFK | | |
| LibC000061 | CA2 (aa 2- | SHHWGYGKHNGPEHWHKDFPIAKGERQSPVDIDTHTAKYDPSLKP | 210538 | 210539 |
| | 260 of WT, | LSVSYDQATSLRILNNGHAFNVEFDDSQDKAVLKGGPLDGTYRLI | | |
| | G144D) | QFHFHWGSLDGQGSEHTVDKKKYAAELHLVHWNTKYGDFGKAV | | |
| | | QQPDGLAVLDIFLKVGSAKPGLQKVVDVLDSIKTKGKSADFTNFD | | |
| | | PRGLLPESLDYWTYPGSLTTPPLLECVTWIVLKEPISVSSEQVLKFR | | |
| | | KLNFNGEGEPEELMVDNWRPAQPLKNRQIKASFK | | |
| LibC000092 | CA2 (aa 2- | SHHWGYGKHNGPEHWHKDFPIAKGERQSPVDIDTHTAKYDPSLKP | 210540 | 210541 |
| | 260 of WT, | LSVSYDQATSLRILNNGHAFNVEFDDSQDKAVLKGGPLDGTYRLI | | |
| | Y193L, | QFHFHWGSLDGQGSEHTVDKKKYAAELHLVHWNTKYGDFGKAV | | |
| | K260L) | QQPDGLAVLGIFLKVGSAKPGLQKVVDVLDSIKTKGKSADFTNFD | | |
| | | PRGLLPESLDYWTLPGSLTTPPLLECVTWIVLKEPISVSSEQVLKFR | | |
| | | KLNFNGEGEPEELMVDNWRPAQPLKNRQIKASFL | | |
| LibC000053 | CA2 (aa 2- | SHHWGYGKHNGPEHWHKDFPIAKGERQSPVDIDTHTAKYDPSLKP | 210542 | 210543 |
| | 260 of WT, | LSVSYDQATSLRILNNGHAFNVEFDDSQDKAVLKGGPLDGTYRLI | | |
| | V206M) | QFHFHWGSLDGQGSEHTVDKKKYAAELHLVHWNTKYGDFGKAV | | |
| | | QQPDGLAVLGIFLKVGSAKPGLQKVVDVLDSIKTKGKSADFTNFD | | |
| | | PRGLLPESLDYWTYPGSLTTPPLLECMTWIVLKEPISVSSEQVLKFR | | |
| | | KLNFNGEGEPEELMVDNWRPAQPLKNRQIKASFK | | |
| LibC000054 | CA2 (aa 2- | SHHWGYGKHNGPEHWHKDFPIAKGERQSPVDIDTHTAKYDPSLKP | 210544 | 210545 |
| | 260 of WT, | LSVSYDQATSLRILNNGHAFNVEFFDSQDKAVLKGGPLDGTYRLIQ | | |
| | D71F, V241F, | FHFHWGSLDGQGSEHTVDKKKYAAELHLVHWNTKYGDFGKAVQ | | |
| | P249L) | QPDGLAVLGIFLKVGSAKPGLQKVVDVLDSIKTKGKSADFTNFDP | | |
| | | RGLLPESLDYWTYPGSLTTPPLLECVTWIVLKEPISVSSEQVLKFRK | | |
| | | LNFNGEGEPEELMFDNWRPAQLLKNRQIKASFK | | |
| LibC000055 | CA2 (aa 2- | SHHWGYGKHNGPEHWHKDFPIAKGERQSPVDIDTHTAKYDPSLKP | 210546 | 210547 |
| | 260 of WT, | LSVSYDQATSLRILNNGHAFNVEFDDSQDKAVLKGGPLDGTYRLI | | |
| | Y193F) | QFHFHWGSLDGQGSEHTVDKKKYAAELHLVHWNTKYGDFGKAV | | |
| | | QQPDGLAVLGIFLKVGSAKPGLQKVVDVLDSIKTKGKSADFTNFD | | |
| | | PRGLLPESLDYWTFPGSLTTPPLLECVTWIVLKEPISVSSEQVLKFR | | |
| | | KLNFNGEGEPEELMVDNWRPAQPLKNRQIKASFK | | |
| LibC000058 | CA2 (aa 2- | SHHWGYGKHNGPEHWHKDFPIAKGERQSPVDIDTHTAKYDPSLKP | 210548 | 210549 |
| | 260 of WT, | LSVSYDQATSLRILNNGHAFNVEFDDSQDKAVLKGGPLDGTYRLI | | |
| | L147F, | QFHFHWGSLDGQGSEHTVDKKKYAAELHLVHWNTKYGDFGKAV | | |
| | Q248F) | QQPDGLAVLGIFFKVGSAKPGLQKVVDVLDSIKTKGKSADFTNFD | | |
| | | PRGLLPESLDYWTYPGSLTTPPLLECVTWIVLKEPISVSSEQVLKFR | | |
| | | KLNFNGEGEPEELMVDNWRPAFPLKNRQIKASFK | | |
| LibC000059 | CA2 (aa 2- | SHHWGYGKHNGPEHWHKDFPIAKGERQSPVDIDTHTAKYDPSLKP | 210550 | 210551 |
| | 260 of WT, | LSVSYIQATSLRILNNGHAFNVEFDDSQDKAVLKGGPLDGTYRLIQ | | |
| | D52I, S258P) | FHFHWGSLDGQGSEHTVDKKKYAAELHLVHWNTKYGDFGKAVQ | | |
| | | QPDGLAVLGIFLKVGSAKPGLQKVVDVLDSIKTKGKSADFTNFDP | | |
| | | RGLLPESLDYWTYPGSLTTPPLLECVTWIVLKEPISVSSEQVLKFRK | | |
| | | LNFNGEGEPEELMVDNWRPAQPLKNRQIKAPFK | | |
| LibC000060 | CA2 (aa 2- | SHHWGYGKHNGPEHWHKDFPIAKGERQSPVDIDTHTAKYDPSLKP | 210552 | 210553 |
| | 260 of WT, | LSVSYDQATSLRILNNGHAFNVEFDSSQDKAVLKGGPLDGTYRLIQ | | |
| | D72S, | FHFHWGSLDGQGSEHTVDKKKYAAELHLVHWNTKYGDFGKAVQ | | |
| | T192N) | QPDGLAVLGIFLKVGSAKPGLQKVVDVLDSIKTKGKSADFTNFDP | | |
| | | RGLLPESLDYWNYPGSLTTPPLLECVTWIVLKEPISVSSEQVLKFRK | | |
| | | LNFNGEGEPEELMVDNWRPAQPLKNRQIKASFK | | |
| LibC000062 | CA2 (aa 2- | SHHWGYGKHNGPEHWHKDFPIAKGERQSPVDIDTHTAKYDPSLKP | 210554 | 210555 |
| | 260 of WT, | LSVSYDQATSLRILNNGHAFNVEFDDSQDKAVLKGGPLDGTYRLI | | |
| | D179E, | QFHFHWGSLDGQGSEHTVDKKKYAAELHLVHWNTKYGDFGKAV | | |
| | T192I) | QQPDGLAVLGIFLKVGSAKPGLQKVVDVLDSIKTKGKSADFTNFEP | | |
| | | RGLLPESLDYWIYPGSLTTPPLLECVTWIVLKEPISVSSEQVLKFRK | | |
| | | LNFNGEGEPEELMVDNWRPAQPLKNRQIKASFK | | |
| LibC000063 | CA2 (aa 2- | SHHWGYGKHNGPEHWHKDFPIAKGERQSPVDIDTHTAKYDPSLKP | 210556 | 210557 |
| | 260 of WT, | LSVSYDQATSLRILNNGHAFNVEFDDSQDKAVLKGGPLDGTYRLI | | |
| | Y193L) | QFHFHWGSLDGQGSEHTVDKKKYAAELHLVHWNTKYGDFGKAV | | |
| | | QQPDGLAVLGIFLKVGSAKPGLQKVVDVLDSIKTKGKSADFTNFD | | |
| | | PRGLLPESLDYWTLPGSLTTPPLLECVTWIVLKEPISVSSEQVLKFR | | |
| | | KLNFNGEGEPEELMVDNWRPAQPLKNRQIKASFK | | |
| LibC000064 | CA2 (aa 2- | SHHWGYGKHNGPEHWHKDFPIAKGERQSPVDIDTHTAKYDPSLKP | 210558 | 210559 |
| | 260 of WT, | LSVSYDQATNLRILNNGHAFNVEFDDSQDKAVLKGGPLDGTYRLI | | |
| | S56N, | QFHFHWGSLDGKGSEHTVDKKKYAAELHLVHWNTKYGDFGKAV | | |
| | Q103K) | QQPDGLAVLGIFLKVGSAKPGLQKVVDVLDSIKTKGKSADFTNFD | | |
| | | PRGLLPESLDYWTYPGSLTTPPLLECVTWIVLKEPISVSSEQVLKFR | | |
| | | KLNFNGEGEPEELMVDNWRPAQPLKNRQIKASFK | | |
| LibC000067 | CA2 (aa 2- | SHHWGYGKHNGPEHWHKDFPIAKGERQSPVDIDTHTAKYDPSLKP | 210560 | 210561 |
| | 260 of WT, | LSVSYDQATSLRILNNGHAFNVEFYDSQDKAVLKGGPLDGTYRLI | | |
| | D71Y, | QFHFHWGSLDGQGSEHTVDKKKYAAELHLVHWNTKYGDFGKAV | | |
| | Q248L) | QQPDGLAVLGIFLKVGSAKPGLQKVVDVLDSIKTKGKSADFTNFD | | |
| | | PRGLLPESLDYWTYPGSLTTPPLLECVTWIVLKEPISVSSEQVLKFR | | |
| | | KLNFNGEGEPEELMVDNWRPALPLKNRQIKASFK | | |
| LibC000068 | CA2 (aa 2- | SHHWGYGKHNGPEHWHKDFPIAKGERQSPVDIDTHTAKYDPSLKP | 210562 | 210563 |
| | 260 of WT, | LSVSYDQATSLRILNNGHAFNVEFDDNQDKAVLKGGPLDGTYFLI | | |
| | S73N, R89F) | QFHFHWGSLDGQGSEHTVDKKKYAAELHLVHWNTKYGDFGKAV | | |
| | | QQPDGLAVLGIFLKVGSAKPGLQKVVDVLDSIKTKGKSADFTNFD | | |
| | | PRGLLPESLDYWTYPGSLTTPPLLECVTWIVLKEPISVSSEQVLKFR | | |
| | | KLNFNGEGEPEELMVDNWRPAQPLKNRQIKASFK | | |
| LibC000070 | CA2 (aa 2- | SHHWGYGKHNGPEHWHKDFPIAKGERQSPVDIDTHTAKYDPSLKP | 210564 | 210565 |
| | 260 of WT, | LSVSYDQATSLRILNNGHAFNVEFKDSQDKAVLKGGPLDGTYRLI | | |
| | D71K, | QFHFHWGSLDGQGSEHTVDKKKYAAELHLVHWNTKYGDFGKAV | | |
| | N231L, | QQPDGLAVLGIFLKVGSAKPGLQKVVDVLDSIKTKGKSADFTNFD | | |
| | E235G, | PRGLLPESLDYWTYPGSLTTPPLLECVTWIVLKEPISVSSEQVLKFR | | |
| | L239F) | KLNFLGEGGPEEFMVDNWRPAQPLKNRQIKASFK | | |
| LibC000071 | CA2 (aa 2- | SHHWGYGKHNGPEHWHKDFPIAKGERQSPVDIDTHTAKYDPSLKP | 210566 | 210567 |
| | 260 of WT, | LSVSYDQATSLRILNNGHAFNVEFFDSQDKAVLKGGPLDGTYRLIQ | | |
| | D71F) | FHFHWGSLDGQGSEHTVDKKKYAAELHLVHWNTKYGDFGKAVQ | | |
| | | QPDGLAVLGIFLKVGSAKPGLQKVVDVLDSIKTKGKSADFTNFDP | | |
| | | RGLLPESLDYWTYPGSLTTPPLLECVTWIVLKEPISVSSEQVLKFRK | | |
| | | LNFNGEGEPEELMVDNWRPAQPLKNRQIKASFK | | |
| LibC000072 | CA2 (aa 2- | SHHWGYGKHNGPEHWHKDFPIAKGERQSPVDIDTHTAKYDPSLKP | 210568 | 210569 |
| | 260 of WT, | LSVSYDQATSLRILNNGHAFNVEFDFSQDKAVLKGGPLDGTYRLIQ | | |
| | D72F, P249I) | FHFHWGSLDGQGSEHTVDKKKYAAELHLVHWNTKYGDFGKAVQ | | |
| | | QPDGLAVLGIFLKVGSAKPGLQKVVDVLDSIKTKGKSADFTNFDP | | |
| | | RGLLPESLDYWTYPGSLTTPPLLECVTWIVLKEPISVSSEQVLKFRK | | |
| | | LNFNGEGEPEELMVDNWRPAQILKNRQIKASFK | | |
| LibC000074 | CA2 (aa 2- | SHHWGYGKHNGPEHWHKDFPIAKGERQSPVDIDTHTAKYDPSLKP | 210570 | 210571 |
| | 260 of WT, | LSVSYDQATSLRILNNGHAFNVEFDDSQDKAVLKGGPLDGTYRLI | | |
| | T192N) | QFHFHWGSLDGQGSEHTVDKKKYAAELHLVHWNTKYGDFGKAV | | |
| | | QQPDGLAVLGIFLKVGSAKPGLQKVVDVLDSIKTKGKSADFTNFD | | |
| | | PRGLLPESLDYWNYPGSLTTPPLLECVTWIVLKEPISVSSEQVLKFR | | |
| | | KLNFNGEGEPEELMVDNWRPAQPLKNRQIKASFK | | |
| LibC000075 | CA2 (aa 2- | SHHWGYGKHNGPEHWHKDFPIAKGERQSPVDIDTHTAKYDPSLKP | 210572 | 210573 |
| | 260 of WT, | LSVSYDQATSLRILNNGHAFNVEFDXSQDKAVLKGGPLDGTYRLI | | |
| | D72X, | QFHFHWGSLDGQGSEHTVDKKKYAAELHLVHWNTKYGDFGKAV | | |
| | V241X, | QQPDGLAVLGIFLKVGSAKPGLQKVVDVLDSIKTKGKSADFTNFD | | |
| | P249X) | PRGLLPESLDYWTYPGSLTTPPLLECVTWIVLKEPISVSSEQVLKFR | | |
| | | KLNFNGEGEPEELMXDNWRPAQXLKNRQIKASFK | | |
| LibC000077 | CA2 (aa 2- | SHHWGYGKHNGPEHWHKDFPIAKGERQSPVDIDTHTAKYDPSLKP | 210574 | 210575 |
| | 260 of WT, | LSVSYDQXTXXRILNNGHAFNVEFDDSQDKAVLKGGPLDGTYRLI | | |
| | A54X, S56X, | QFHFHWGSLDGQGSEHTVDKKKYAAELHLVHWNTKYGDFGKAV | | |
| | L57X, | QQPDGLAVLGIFLKVGSAKPGLQKVVDVLDSIKTKGKSADFTNFD | | |
| | T192X) | PRGLLPESLDYWXYPGSLTTPPLLECVTWIVLKEPISVSSEQVLKFR | | |
| | | KLNFNGEGEPEELMVDNWRPAQPLKNRQIKASFK | | |
| LibC000080 | CA2 (aa 2- | SHHWGYGKHNGPEHWHKDFPIAKGERQSPVDIDTHTAKYDPSLKP | 210576 | 210577 |
| | 260 of WT, | LSVSYDQATSLRILNNGHAFNVEFDDSQDKAVLKGGPLDGTYRLI | | |
| | Y193V, | QFHFHWGSLDGQGSEHTVDKKKYAAELHLVHWNTKYGDFGKAV | | |
| | K260F) | QQPDGLAVLGIFLKVGSAKPGLQKVVDVLDSIKTKGKSADFTNFD | | |
| | | PRGLLPESLDYWTVPGSLTTPPLLECVTWIVLKEPISVSSEQVLKFR | | |
| | | KLNFNGEGEPEELMVDNWRPAQPLKNRQIKASFF | | |
| LibC000085 | CA2 (aa 2- | SHHWGYGKHNGPEHWHKDFPIAKGERQSPVDIDTHTAKYDPSLKP | 210578 | 210579 |
| | 260 of WT, | LSVSYDQATSLRILNNDHAFNVEFDDSQDKAVLKGGPLDGTYRLI | | |
| | G63D, | QFHFHWGSLDGQGSEHTVDKKKYAAELHLVHWNTKYGDFGKAV | | |
| | M240L) | QQPDGLAVLGIFLKVGSAKPGLQKVVDVLDSIKTKGKSADFTNFD | | |
| | | PRGLLPESLDYWTYPGSLTTPPLLECVTWIVLKEPISVSSEQVLKFR | | |
| | | KLNFNGEGEPEELLVDNWRPAQPLKNRQIKASFK | | |
| LibC000086 | CA2 (aa 2- | SHHWGYGKHNGPEHWHKDFPIAKGERQSPVDIDTHTAKYDPSLKP | 210580 | 210581 |
| | 260 of WT, | LSVSYDQATSLRILNNGHAFNVEFDDSQDKAVLKGGPLDGTYRLI | | |
| | V134F, | QFHFHWGSLDGQGSEHTVDKKKYAAELHLVHWNTKYGDFGKAF | | |
| | L228F) | QQPDGLAVLGIFLKVGSAKPGLQKVVDVLDSIKTKGKSADFTNFD | | |
| | | PRGLLPESLDYWTYPGSLTTPPLLECVTWIVLKEPISVSSEQVLKFR | | |
| | | KFNFNGEGEPEELMVDNWRPAQPLKNRQIKASFK | | |
| LibC000087 | CA2 (aa 2- | SHHWGYGKHNGPEHWHKDFPIAKGERQSPVDIDTHTAKYDPSLKP | 210582 | 210583 |
| | 260 of WT, | LSVSYDQATSLRILNNGHAFNVEFGDSQDKAVLKGGPLDGTYRLI | | |
| | D71G, | QFHFHWGSLDGQGSEHTVDKKKYAAELHLVHWNTKYGDFGKAV | | |
| | N231K) | QQPDGLAVLGIFLKVGSAKPGLQKVVDVLDSIKTKGKSADFTNFD | | |
| | | PRGLLPESLDYWTYPGSLTTPPLLECVTWIVLKEPISVSSEQVLKFR | | |
| | | KLNFKGEGEPEELMVDNWRPAQPLKNRQIKASFK | | |
| LibC000088 | CA2 (aa 2- | SHHWGYGKHNGPEHWHKDFPIAKGERQSPVDIDTHTAKYDPSLKP | 210584 | 210585 |
| | 260 of WT, | LSVSYDQATFLRILNNGHAFNVEFSDSQDKAVLKGGPLDGTYRLIQ | | |
| | S56F, D71S) | FHFHWGSLDGQGSEHTVDKKKYAAELHLVHWNTKYGDFGKAVQ | | |
| | | QPDGLAVLGIFLKVGSAKPGLQKVVDVLDSIKTKGKSADFTNFDP | | |
| | | RGLLPESLDYWTYPGSLTTPPLLECVTWIVLKEPISVSSEQVLKFRK | | |
| | | LNFNGEGEPEELMVDNWRPAQPLKNRQIKASFK | | |
| LibC000089 | CA2 (aa 2- | SHHWGYGKHNGPEHWHKDFPIAKGERQSPVDIDTHTAKYDPSLKP | 210586 | 210587 |
| | 260 of WT, | LSVSYLQATSLRILNNGHAFNVEFDDSQDKAVLKGGPLDGTYRLIQ | | |
| | D52L, | FHFHWGSLDGQGSEHTVDKKKYAAELHLVHWNTKYRDFGKAVQ | | |
| | G128R, | QPDGLAVLGIFLKVGSAKPGLQKVVDVLDSIKTKGKSADFTNFDP | | |
| | Q248F) | RGLLPESLDYWTYPGSLTTPPLLECVTWIVLKEPISVSSEQVLKFRK | | |
| | | LNFNGEGEPEELMVDNWRPAFPLKNRQIKASFK | | |
| LibC000091 | CA2 (aa 2- | SHHWGYGKHNGPEHWHKDFPIAKGERQSPVDIDTHTAKYDPSLKP | 210588 | 210589 |
| | 260 of WT, | LSVSYDQATSLRILNNGHAFNVEFDDXQDKAVLKGGPLDGTYXLI | | |
| | S73X, R89X) | QFHFHWGSLDGQGSEHTVDKKKYAAELHLVHWNTKYGDFGKAV | | |
| | | QQPDGLAVLGIFLKVGSAKPGLQKVVDVLDSIKTKGKSADFTNFD | | |
| | | PRGLLPESLDYWTYPGSLTTPPLLECVTWIVLKEPISVSSEQVLKFR | | |
| | | KLNFNGEGEPEELMVDNWRPAQPLKNRQIKASFK | | |
| LibC000093 | CA2 (aa 2- | SHHWGYGKHNGPEHWHKDFPIAKGERQSPVDIDTHTAKYDPSLKP | 210590 | 210591 |
| | 260 of WT, | LSVSYDQATSLRILNNGHAFNVEFDDSQDKAVLKGGPLDGTYRLI | | |
| | Y193X) | QFHFHWGSLDGQGSEHTVDKKKYAAELHLVHWNTKYGDFGKAV | | |
| | | QQPDGLAVLGIFLKVGSAKPGLQKVVDVLDSIKTKGKSADFTNFD | | |
| | | PRGLLPESLDYWTXPGSLTTPPLLECVTWIVLKEPISVSSEQVLKFR | | |
| | | KLNFNGEGEPEELMVDNWRPAQPLKNRQIKASFK | | |
| LibC000096 | CA2 (aa 2- | SHHWGYGKHNGPEHWHKDFPIAKGERQSPVDIDTHTAKYDPSLKP | 210592 | 210593 |
| | 260 of WT, | LSVSXDQATSLRILNNGHAFNVEFDXSQDKAVLKGGPLDGTYRLI | | |
| | Y51X, D72X, | QFHFHWGSLDGQGSEHTVDKKKYAAELHLVHWNTKYGDFGKAV | | |
| | V241X, | QQPDGLAVLGIFLKVGSAKPGLQKVVDVLDSIKTKGKSADFTNFD | | |
| | P249X) | PRGLLPESLDYWTYPGSLTTPPLLECVTWIVLKEPISVSSEQVLKFR | | |
| | | KLNFNGEGEPEELMXDNWRPAQXLKNRQIKASFK | | |
| LibC000100 | CA2 (aa 2- | SHHWGYGKHNGPEHWHKDFPIAKGERQSPVDIDTHTAKYDPSLKP | 210594 | 210595 |
| | 260 of WT, | LSVSYDQATSLRILNNGHAFNVEFDISQDKAVLKGGPLDGTYRLIQ | | |
| | D72I, W97C) | FHFHCGSLDGQGSEHTVDKKKYAAELHLVHWNTKYGDFGKAVQ | | |
| | | QPDGLAVLGIFLKVGSAKPGLQKVVDVLDSIKTKGKSADFTNFDP | | |
| | | RGLLPESLDYWTYPGSLTTPPLLECVTWIVLKEPISVSSEQVLKFRK | | |
| | | LNFNGEGEPEELMVDNWRPAQPLKNRQIKASFK | | |
| LibC000102 | CA2 (aa 2- | SHHWGYGKHNGPEHWHKDFPIAKGERQSPVDIDTHTAKYDPSLKP | 210596 | 210597 |
| | 260 of WT, | LSVSYDQATSLRILNNGHAFNVEFKDSQDKAVLKGGPLDGTYRLI | | |
| | D71K, T192F, | QFHFHWGSLDGQGSEHTVDKKKYAAELHLVHWNTKYGDFGKAV | | |
| | N231F) | QQPDGLAVLGIFLKVGSAKPGLQKVVDVLDSIKTKGKSADFTNFD | | |
| | | PRGLLPESLDYWFYPGSLTTPPLLECVTWIVLKEPISVSSEQVLKFR | | |
| | | KLNFFGEGEPEELMVDNWRPAQPLKNRQIKASFK | | |
| — | CA2 (aa 2- | SHHWGYGKHNGPEHWHKDFPIAKGERQSPVDIDTHTAKYDPSLKP | 210598 | 210599 |
| LibC000210 | 260 of WT, | LSVSYDQATSLRNLNNGHAFNVEFDDSQDKAVLKGGPLDGTYRLI | | 210847 |
| LibC000184 | I59N, G102R) | QFHFHWGSLDRQGSEHTVDKKKYAAELHLVHWNTKYGDFGKAV | | 210848 |
| LibC000187 | | QQPDGLAVLGIFLKVGSAKPGLQKVVDVLDSIKTKGKSADFTNFD | | 210849 |
| | | PRGLLPESLDYWTYPGSLTTPPLLECVTWIVLKEPISVSSEQVLKFR | | |
| | | KLNFNGEGEPEELMVDNWRPAQPLKNRQIKASFK | | |
| — | CA2 (aa 2- | SHHWGYGKHNGPEHWHKDFPIAKGERQSPVDIDTHTAKYDPSLKP | 210600 | 210601 |
| LibC000208 | 260 of WT, | LSVSYDQATSLRILNNGHAFNVEFDDSQDKAVLKGGPLDGTYRLI | | 210850 |
| | L156H) | QFHFHWGSLDGQGSEHTVDKKKYAAELHLVHWNTKYGDFGKAV | | |
| | | QQPDGLAVLGIFLKVGSAKPGHQKVVDVLDSIKTKGKSADFTNFD | | |
| | | PRGLLPESLDYWTYPGSLTTPPLLECVTWIVLKEPISVSSEQVLKFR | | |
| | | KLNFNGEGEPEELMVDNWRPAQPLKNRQIKASFK | | |
| — | CA2 (L156H) | MSHHWGYGKHNGPEHWHKDFPIAKGERQSPVDIDTHTAKYDPSL | 210602 | 210603 |
| | | KPLSVSYDQATSLRILNNGHAFNVEFDDSQDKAVLKGGPLDGTYR | | |
| | | LIQFHFHWGSLDGQGSEHTVDKKKYAAELHLVHWNTKYGDFGK | | |
| | | AVQQPDGLAVLGIFLKVGSAKPGHQKVVDVLDSIKTKGKSADFTN | | |
| | | FDPRGLLPESLDYWTYPGSLTTPPLLECVTWIVLKEPISVSSEQVLK | | |
| | | FRKLNFNGEGEPEELMVDNWRPAQPLKNRQIKASFK | | |
| LibC000061 | CA2 (aa 2- | SHHWGYGKHNGPEHWHKDFPIAKGERQSPVDIDTHTAKYDPSLKP | 210536 | 210697 |
| truncated | 237 of WT) | LSVSYDQATSLRILNNGHAFNVEFDDSQDKAVLKGGPLDGTYRLI | | |
| | | QFHFHWGSLDGQGSEHTVDKKKYAAELHLVHWNTKYGDFGKAV | | |
| | | QQPDGLAVLGIFLKVGSAKPGLQKVVDVLDSIKTKGKSADFTNFD | | |
| | | PRGLLPESLDYWTYPGSLTTPPLLECVTWIVLKEPISVSSEQVLKFR | | |
| | | KLNFNGEGEPE | | |

[0071] Additional CA2 destabilizing domains are provided in Table 2.

TABLE 2
CA2 DDs

| | | | AA | NA |
|---|---|---|---|---|
| Library | | | SEQ ID | SEQ ID |
| ID | Description | AA SEQUENCE | NO. | NO. |
| LibC000229 | CA2 (aa 2-260 of | SHHWGYGKHNGPEHWHKDFPIAKGERQSPVDIDTQTAKYDPT | 210698 | 210699 |
| | WT, H36Q, | LKPLSVSFDQATSLRILNNGHAFDVEFDDSQDKAVLKGGPLDG | | |
| | S43T, Y51F, | TYRLIQFHFHWGSLDGQGSEHTVDKKKYAAELHLVHWNTKY | | |
| | N67D, G131W, | GDFWKAVQQPDGLAVLGIFLKVGSAKPGLQKVVDVLDSIKTK | | |
| | R226H) | GKSADFTNFDPRGLLPESLDYWTYPGSLTTPPLLECVTWIVLKE | | |
| | | PISVSSEQVLKFHKLNFNGEGEPEELMVDNWRPAQPLKNRQIK | | |
| | | ASFK | | |
| LibC000228 | CA2 (aa 2-260 of | SHHWGYGKHNGPEHWHKDFPIAKGERQSPVDIDTHTAKYDPS | 210700 | 210701 |
| | WT, F70I, | LKPLSVSYDQATSLRILNNGHAFNVEIDDSQDKAVLKGGPLDG | | |
| | F146V) | TYRLIQFHFHWGSLDGQGSEHTVDKKKYAAELHLVHWNTKY | | |
| | | GDFGKAVQQPDGLAVLGIVLKVGSAKPGLQKVVDVLDSIKTK | | |
| | | GKSADFTNFDPRGLLPESLDYWTYPGSLTTPPLLECVTWIVLKE | | |
| | | PISVSSEQVLKFRKLNFNGEGEPEELMVDNWRPAQPLKNRQIK | | |
| | | ASFK | | |
| LibC000226 | CA2 (aa 2-260 of | SHHWGYGKHNGPEHWHKDFPIAKGELQSPVDIDTHTAKYDPS | 210702 | 210703 |
| | WT, R27L, T87I, | LKPLSVSYDQATSLRILNNGHAFNVEFDDSQDKAVLKGGPLDG | | |
| | H122Y, N252D) | IYRLIQFHFHWGSLDGQGSEHTVDKKKYAAELHLVYWNTKYG | | |
| | | DFGKAVQQPDGLAVLGIFLKVGSAKPGLQKVVDVLDSIKTKG | | |
| | | KSADFTNFDPRGLLPESLDYWTYPGSLTTPPLLECVTWIVLKEP | | |
| | | ISVSSEQVLKFRKLNFNGEGEPEELMVDNWRPAQPLKDRQIKA | | |
| | | SFK | | |
| LibC000225 | CA2 (aa 2-260 of | SHHWGYGKHNGPEHWHKDFPIAKGERQSPVDIDTHTAKYDPS | 210704 | 210705 |
| | WT, K45N, | LNPLSVSYDQATSLRILNNGHAFNLEFDDSQDKAVLKGGPLDG | | |
| | V68L, H119Y, | TYRLIQFHFHWGSLDGQGSEHTVDKKKYAAELYLVHWNTKY | | |
| | K169R, D179E) | GDFGKAVQQPDGLAVLGIFLKVGSAKPGLQKVVDVLDSIKTR | | |
| | | GKSADFTNFEPRGLLPESLDYWTYPGSLTTPPLLECVTWIVLKE | | |
| | | PISVSSEQVLKFRKLNFNGEGEPEELMVDNWRPAQPLKNRQIK | | |
| | | ASFK | | |
| LibC000224 | CA2 (aa 2-260 of | SHHWGYGKHNGPELWHKDFPIAKGERQSPVDIDTHTAKYDPS | 210706 | 210707 |
| | WT, H15L, | LKPLSVSYDQVTSLRILNNGHAFNVEFDDSQDKAVLKGGPLDG | | |
| | A54V, K111E, | TYRLIQFHFHWGSLDGQGSEHTVDEKKYAAELHLVHWNTKY | | |
| | E220K, F225I) | GDFGKAVQQPDGLAVLGIFLKVGSAKPGLQKVVDVLDSIKTK | | |
| | | GKSADFTNFDPRGLLPESLDYWTYPGSLTTPPLLECVTWIVLKE | | |
| | | PISVSSKQVLKIRKLNFNGEGEPEELMVDNWRPAQPLKNRQIK | | |
| | | ASFK | | |
| LibC000221 | CA2 (aa 2-260 of | SHHWGYGKHNGSEHWHKDFPIAKGERQSPVDIDTHTAKYDPS | 210708 | 210709 |
| | WT, P13S, | LKPLSVSYDQATSLRILNNGHAFNVEFDDSQDKAVLKGGALD | | |
| | P83A, D101G, | GTYRLIQFHFHWGSLGGQGSEHTVDNKKYAAELHLVHWNTK | | |
| | K111N, F230I) | YGDFGKAVQQPDGLAVLGIFLKVGSAKPGLQKVVDVLDSIKT | | |
| | | KGKSADFTNFDPRGLLPESLDYWTYPGSLTTPPLLECVTWIVL | | |
| | | KEPISVSSEQVLKFRKLNINGEGEPEELMVDNWRPAQPLKNRQI | | |
| | | KASFK | | |
| LibC000220 | CA2 (aa 2-260 of | SHHWGYGKHNGPEHWHKDFPIAKGERQSPVDIDTHTAKYDPS | 210710 | 210711 |
| | WT, L47R) | LKPRSVSYDQATSLRILNNGHAFNVEFDDSQDKAVLKGGPLD | | |
| | | GTYRLIQFHFHWGSLDGQGSEHTVDKKKYAAELHLVHWNTK | | |
| | | YGDFGKAVQQPDGLAVLGIFLKVGSAKPGLQKVVDVLDSIKT | | |
| | | KGKSADFTNFDPRGLLPESLDYWTYPGSLTTPPLLECVTWIVL | | |
| | | KEPISVSSEQVLKFRKLNFNGEGEPEELMVDNWRPAQPLKNRQ | | |
| | | IKASFK | | |
| LibC000219 | CA2 (aa 2-260 of | SHHWGYGKHNGPEHWHKDFPIAKGERQSPVDIDTHTAKYDPS | 210712 | 210713 |
| | WT, G63D, | LKPLSVSYDQATSLRILNNDHAFNVEFDDSQDKAVLKGGPLDG | | |
| | W123R, E220K) | TYRLIQFHFHWGSLDGQGSEHTVDKKKYAAELHLVHRNTKYG | | |
| | | DFGKAVQQPDGLAVLGIFLKVGSAKPGLQKVVDVLDSIKTKG | | |
| | | KSADFTNFDPRGLLPESLDYWTYPGSLTTPPLLECVTWIVLKEP | | |
| | | ISVSSKQVLKFRKLNFNGEGEPEELMVDNWRPAQPLKNRQIKA | | |
| | | SFK | | |
| LibC000217 | CA2 (aa 2-260 of | SHHWGYGKHDGPEHWHKDFPIAKGERQSPVDIDTHTAKYDPS | 210714 | 210715 |
| | WT, N11D, | LKPLSVSYDQATSLRILNNGHAFNVKFDDSQDKAVLKGGPLD | | |
| | E69K, G86D, | DTYRLIQFHFHWGSLDGQGSEHTMDKKIYAAELHLVHWNIKY | | |
| | V109M, K113I, | GDFGKAVQQPGGLAVLGIFLKVGSAKPSLQKVVDVLDSIKTK | | |
| | T125I, D138G, | GKSADFTNFDPRGLLPESLDYWTYPGSLTTPPLLECVTWIVLKE | | |
| | G155S) | PISVSSEQVLKFRKLNFNGEGEPEELMVDNWRPAQPLKNRQIK | | |
| | | ASFK | | |
| LibC000214 | CA2 (aa 2-260 of | SHHWGYGKHNGPEHWHKDFPIAKGERQSPVDIDTHTAKYDPS | 210716 | 210717 |
| | WT, I59N, | LKPLSVSYDQATSLRNLNNGHAFNVEFDDSQDKAVLKGGPLD | | |
| | G102R, A173T) | GTYRLIQFHFHWGSLDRQGSEHTVDKKKYAAELHLVHWNTK | | |
| | | YGDFGKAVQQPDGLAVLGIFLKVGSAKPGLQKVVDVLDSIKT | | |
| | | KGKSTDFTNFDPRGLLPESLDYWTYPGSLTTPPLLECVTWIVLK | | |
| | | EPISVSSEQVLKFRKLNFNGEGEPEELMVDNWRPAQPLKNRQI | | |
| | | KASFK | | |
| LibC000213 | CA2 (aa 2-260 of | SHHWGYGKHNGPEHWHKDFPIAKGERQSPVDIDTHTAKYDPS | 210718 | 210719 |
| | WT, L79F, | LKPLSVSYDQATSLRILNNGHAFNVEFDDSQDKAVFKGGPLDG | | |
| | P180S) | TYRLIQFHFHWGSLDGQGSEHTVDKKKYAAELHLVHWNTKY | | |
| | | GDFGKAVQQPDGLAVLGIFLKVGSAKPGLQKVVDVLDSIKTK | | |
| | | GKSADFTNFDSRGLLPESLDYWTYPGSLTTPPLLECVTWIVLKE | | |
| | | PISVSSEQVLKFRKLNFNGEGEPEELMVDNWRPAQPLKNRQIK | | |
| | | ASFK | | |
| LibC000212 | CA2 (aa 2-260 of | SHHWGYGKHNGPEHWHKDFPIAKGERQSPVDIDTHTAKYDPS | 210720 | 210721 |
| | WT, S73F) | LKPLSVSYDQATSLRILNNGHAFNVEFDDFQDKAVLKGGPLDG | | |
| | | TYRLIQFHFHWGSLDGQGSEHTVDKKKYAAELHLVHWNTKY | | |
| | | GDFGKAVQQPDGLAVLGIFLKVGSAKPGLQKVVDVLDSIKTK | | |
| | | GKSADFTNFDPRGLLPESLDYWTYPGSLTTPPLLECVTWIVLKE | | |
| | | PISVSSEQVLKFRKLNFNGEGEPEELMVDNWRPAQPLKNRQIK | | |
| | | ASFK | | |
| LibC000211 | CA2 (aa 2-260 of | SHHWGYGKHNRPEHWHKDFPIAKGERQSPVDIDTHTAKYDPS | 210722 | 210723 |
| | WT, G12R) | LKPLSVSYDQATSLRILNNGHAFNVEFDDSQDKAVLKGGPLDG | | |
| | | TYRLIQFHFHWGSLDGQGSEHTVDKKKYAAELHLVHWNTKY | | |
| | | GDFGKAVQQPDGLAVLGIFLKVGSAKPGLQKVVDVLDSIKTK | | |
| | | GKSADFTNFDPRGLLPESLDYWTYPGSLTTPPLLECVTWIVLKE | | |
| | | PISVSSEQVLKFRKLNFNGEGEPEELMVDNWRPAQPLKNRQIK | | |
| | | ASFK | | |
| LibC000209 | CA2 (aa 2-260 of | SHHWGYGKHNGPEHWHKDFPIAKGERQSPVDIDTHTAKYDPS | 210724 | 210725 |
| | WT, A77P, | LKPLSVSYDQATSLRILNNGHAFNVEFDDSQDKPVLKGGPLDG | | |
| | G102R, D138N) | TYRLIQFHFHWGSLDRQGSEHTVDKKKYAAELHLVHWNTKY | | |
| | | GDFGKAVQQPNGLAVLGIFLKVGSAKPGLQKVVDVLDSIKTK | | |
| | | GKSADFTNFDPRGLLPESLDYWTYPGSLTTPPLLECVTWIVLKE | | |
| | | PISVSSEQVLKFRKLNFNGEGEPEELMVDNWRPAQPLKNRQIK | | |
| | | ASFK | | |
| LibC000183 | CA2 (aa 2-260 of | SHHWGYGKHNGPEHWHKDLPIAKGERQSPVDIDTHTAKYDPS | 210726 | 210727 |
| | WT, F20L, | LNPLSVSYDQATSLRILNNDHAFNVVFDDSQDKAVLKGGPLD | | |
| | K45N, G63D, | GTYRLIQFHFHWGSLDGQGSEHTVDKKKYAAELHLVHWNTK | | |
| | E69V, N231I) | YGDFGKAVQQPDGLAVLGIFLKVGSAKPGLQKVVDVLDSIKT | | |
| | | KGKSADFTNFDPRGLLPESLDYWTYPGSLTTPPLLECVTWIVL | | |
| | | KEPISVSSEQVLKFRKLNFIGEGEPEELMVDNWRPAQPLKNRQI | | |
| | | KASFK | | |
| LibC000207 | CA2 (aa 2-260 of | SHHWGYGKHNGPEHWHKDFPIAKGERQSPVDIDTHTAKYDPS | 210728 | 210729 |
| | WT, T199N, | LKPLSVSYDQATSLRILNNGHAFNVEFDDSQDKAVLKGGPLDG | | |
| | L202P, L228F) | TYRLIQFHFHWGSLDGQGSEHTVDKKKYAAELHLVHWNTKY | | |
| | | GDFGKAVQQPDGLAVLGIFLKVGSAKPGLQKVVDVLDSIKTK | | |
| | | GKSADFTNFDPRGLLPESLDYWTYPGSLTNPPPLECVTWIVLK | | |
| | | EPISVSSEQVLKFRKFNFNGEGEPEELMVDNWRPAQPLKNRQI | | |
| | | KASFK | | |
| LibC000206 | CA2 (aa 2-260 of | SHHWGYGNHNGPEHWHKDFPIAKGERQSPVDIDTHTAKYDPS | 210730 | 210731 |
| | WT, K9N, | LKPLSVSYDQATSLRILNNGHAFNVEFDDSQDKAVLKGGPLDG | | |
| | H122Y, T168K) | TYRLIQFHFHWGSLDGQGSEHTVDKKKYAAELHLVYWNTKY | | |
| | | GDFGKAVQQPDGLAVLGIFLKVGSAKPGLQKVVDVLDSIKKK | | |
| | | GKSADFTNFDPRGLLPESLDYWTYPGSLTTPPLLECVTWIVLKE | | |
| | | PISVSSEQVLKFRKLNFNGEGEPEELMVDNWRPAQPLKNRQIK | | |
| | | ASFK | | |
| LibC000205 | CA2 (aa 2-260 of | SHHWGYGKHNGPEHWHKDFPIAKGERQSPVDIDTHTAKYDPS | 210732 | 210733 |
| | WT, Q53H, | LKPLSVSYDHATSLRILNNGHAFNVEFDDSQDKAVLKGGPLDG | | |
| | L90V, Q92H, | TYRVIHFHFHWGSLDGQGSEHTVDKKKYAAELHLVHWNTKY | | |
| | G131E) | GDFEKAVQQPDGLAVLGIFLKVGSAKPGLQKVVDVLDSIKTK | | |
| | | GKSADFTNFDPRGLLPESLDYWTYPGSLTTPPLLECVTWIVLKE | | |
| | | PISVSSEQVLKFRKLNFNGEGEPEELMVDNWRPAQPLKNRQIK | | |
| | | ASFK | | |
| LibC000204 | CA2 (aa 2-260 of | SHHWGYGKHNGPEHWHKDFPIAKGERQSPVDIDTHTAKYDPS | 210734 | 210735 |
| | WT, L44M, | MKPVSVSYDQATSLRILNKGHAFNVDFDDSQDKAVLKGGPLD | | |
| | L47V, N62K, | GTYRLIQFHFHWGSLDGQGSEHTVDKKKYAAELHLVHWNTK | | |
| | E69D) | YGDFGKAVQQPDGLAVLGIFLKVGSAKPGLQKVVDVLDSIKT | | |
| | | KGKSADFTNFDPRGLLPESLDYWTYPGSLTTPPLLECVTWIVL | | |
| | | KEPISVSSEQVLKFRKLNFNGEGEPEELMVDNWRPAQPLKNRQ | | |
| | | IKASFK | | |
| LibC000203 | CA2 (aa 2-260 of | SHHWGYGKHNGPEHWHKDLPIAKGERQSPVDIDTHTAKYDPS | 210736 | 210737 |
| | WT, F20L, | LNPLSVSYDQATSLRILNNGHAFNVEFDDSQDKAVLKGGPLDG | | |
| | K45N, G104R, | TYRLIQFHFHWGSLDGQRSEHTVDKKKYAVELHLVHWNTKY | | |
| | A116V) | GDFGKAVQQPDGLAVLGIFLKVGSAKPGLQKVVDVLDSIKTK | | |
| | | GKSADFTNFDPRGLLPESLDYWTYPGSLTTPPLLECVTWIVLKE | | |
| | | PISVSSEQVLKFRKLNFNGEGEPEELMVDNWRPAQPLKNRQIK | | |
| | | ASFK | | |
| LibC000202 | CA2 (aa 2-260 of | SHHWGYGKHNGPEHWHKDFPIAKGERQSPVDIDTHTAKYDPS | 210738 | 210739 |
| | WT, D75V, | LKPLSVSYDQATSLRILNNGHAFNVEFDDSQVKAVLKGGPLDG | | |
| | K169N, F259L) | TYRLIQFHFHWGSLDGQGSEHTVDKKKYAAELHLVHWNTKY | | |
| | | GDFGKAVQQPDGLAVLGIFLKVGSAKPGLQKVVDVLDSIKTN | | |
| | | GKSADFTNFDPRGLLPESLDYWTYPGSLTTPPLLECVTWIVLKE | | |
| | | PISVSSEQVLKFRKLNFNGEGEPEELMVDNWRPAQPLKNRQIK | | |
| | | ASLK | | |
| LibC000182 | CA2 (aa 2-260 of | SHHWGYGKHNGPEHWHKDFPIAKGERQSPVDIDTHTAKYDPS | 210740 | 210741 |
| | WT, T207S, | LKPLSVSYDQATSLRILNNGHAFNVEFDDSQDKAVLKGGPLDG | | |
| | V222A, N231D) | TYRLIQFHFHWGSLDGQGSEHTVDKKKYAAELHLVHWNTKY | | |
| | | GDFGKAVQQPDGLAVLGIFLKVGSAKPGLQKVVDVLDSIKTK | | |
| | | GKSADFTNFDPRGLLPESLDYWTYPGSLTTPPLLECVSWIVLKE | | |
| | | PISVSSEQALKFRKLNFDGEGEPEELMVDNWRPAQPLKNRQIK | | |
| | | ASFK | | |
| LibC000201 | CA2 (aa 2-260 of | SHHWGYGKHNGPEHWHKDFPIAKGERQSPVDIDTHTAKYDPS | 210742 | 210743 |
| | WT, I59F, | LKPLSVSYDQATSLRFLNNGHAFNVEFDDSQDKAVLKGGPLD | | |
| | V206M, G232R) | GTYRLIQFHFHWGSLDGQGSEHTVDKKKYAAELHLVHWNTK | | |
| | | YGDFGKAVQQPDGLAVLGIFLKVGSAKPGLQKVVDVLDSIKT | | |
| | | KGKSADFTNFDPRGLLPESLDYWTYPGSLTTPPLLECMTWIVL | | |
| | | KEPISVSSEQVLKFRKLNFNREGEPEELMVDNWRPAQPLKNRQ | | |
| | | IKASFK | | |
| LibC000199 | CA2 (aa 2-260 of | SHHWGYGKHNGAEHWHKDFPIAKGERQSPVDIDTHTAKYDPS | 210744 | 210745 |
| | WT, P13A, | LKPLSVSYDQATSLRILNNGHAFNVEFDDSQDKAVLKGGPLDG | | |
| | A133T) | TYRLIQFHFHWGSLDGQGSEHTVDKKKYAAELHLVHWNTKY | | |
| | | GDFGKTVQQPDGLAVLGIFLKVGSAKPGLQKVVDVLDSIKTK | | |
| | | GKSADFTNFDPRGLLPESLDYWTYPGSLTTPPLLECVTWIVLKE | | |
| | | PISVSSEQVLKFRKLNFNGEGEPEELMVDNWRPAQPLKNRQIK | | |
| | | ASFK | | |
| LibC000198 | CA2 (aa 2-260 of | SHHWGYGKHNGPEHWHKDFPIAKGERQSPVDIDTHTAKYDPS | 210746 | 210747 |
| | WT, N61R, | LKPLSVSYDQATSLRILRNGHAFNVEFDDSQDKAVLMGGPLD | | |
| | K80M, K212N, | GTYRLIQFHFHWGSLDGQGSEHTVDKKKYAAELHLVHWNTK | | |
| | N231T, L250P) | YGDFGKAVQQPDGLAVLGIFLKVGSAKPGLQKVVDVLDSIKT | | |
| | | KGKSADFTNFDPRGLLPESLDYWTYPGSLTTPPLLECVTWIVL | | |
| | | NEPISVSSEQVLKFRKLNFTGEGEPEELMVDNWRPAQPPKNRQ | | |
| | | IKASFK | | |
| LibC000196 | CA2 (aa 2-260 of | SHHWGYGKHNGPEHWHKDFPIAKGERQSPVDIDTHTAKYDPS | 210748 | 210749 |
| | WT, G63D, | LKPLSVSYDQATSLRILNNDHAFNVVFDDSQDKAVLKGGPLD | | |
| | E69V, N231I) | GTYRLIQFHFHWGSLDGQGSEHTVDKKKYAAELHLVHWNTK | | |
| | | YGDFGKAVQQPDGLAVLGIFLKVGSAKPGLQKVVDVLDSIKT | | |
| | | KGKSADFTNFDPRGLLPESLDYWTYPGSLTTPPLLECVTWIVL | | |
| | | KEPISVSSEQVLKFRKLNFIGEGEPEELMVDNWRPAQPLKNRQI | | |
| | | KASFK | | |
| LibC000181 | CA2 (aa 2-260 of | SHHWGYGKHNGPEHWHKDFPIAKGERQSPVDIDTHTAKYDPS | 210750 | 210751 |
| | WT, I59N, R89I) | LKPLSVSYDQATSLRNLNNGHAFNVEFDDSQDKAVLKGGPLD | | |
| | | GTYILIQFHFHWGSLDGQGSEHTVDKKKYAAELHLVHWNTKY | | |
| | | GDFGKAVQQPDGLAVLGIFLKVGSAKPGLQKVVDVLDSIKTK | | |
| | | GKSADFTNFDPRGLLPESLDYWTYPGSLTTPPLLECVTWIVLKE | | |
| | | PISVSSEQVLKFRKLNFNGEGEPEELMVDNWRPAQPLKNRQIK | | |
| | | ASFK | | |
| LibC000194 | CA2 (aa 2-260 of | SHHWGYGKHNGPEHWHKDFPIAKGERQSPVDIDTHTAKYDPS | 210752 | 210753 |
| | WT, A65N, | LKPLSVSYDQATSLRILNNGHNFNVEFDDSQDKAVLKGGPLDD | | |
| | G86D, G131R, | TYRLIQFHFHWGSLDGQGSEHTVDKKKYAAELHLVHWNTKY | | |
| | G155D, K158N, | GDFRKAVQQPDGLAVLGIFLKVGSAKPDLQNVVDALDSIKTK | | |
| | V162A, G170D, | DKSADFTNFDPRGLLPESLDYWTYPGSLTTPPLLECVTWIVLKE | | |
| | P236L) | PISVSSEQVLKFRKLNFNGEGELEELMVDNWRPAQPLKNRQIK | | |
| | | ASFK | | |
| LibC000192 | CA2 (aa 2-260 of | SHHWGYGKHNRPEYWHKVFPIAKGERQSPVDIDTHTAKYDPS | 210754 | 210755 |
| | WT, G12R, | LKPLSVSYDQATSLRILNNGHAFNVEFDDSQDKAVLKGGPLDG | | |
| | H15Y, D19V) | TYRLIQFHFHWGSLDGQGSEHTVDKKKYAAELHLVHWNTKY | | |
| | | GDFGKAVQQPDGLAVLGIFLKVGSAKPGLQKVVDVLDSIKTK | | |
| | | GKSADFTNFDPRGLLPESLDYWTYPGSLTTPPLLECVTWIVLKE | | |
| | | PISVSSEQVLKFRKLNFNGEGEPEELMVDNWRPAQPLKNRQIK | | |
| | | ASFK | | |
| LibC000193 | CA2 (aa 2-260 of | SHHWGYGKHNGPEHWHKDFPIAKGERQSPVDIDTHTAKYDPS | 210756 | 210757 |
| | WT, L156H, | LKPLSVSYDQATSLRILNNGHAFNVEFDDSQDKAVLKGGPLDG | | |
| | S172C, F178Y, | TYRLIQFHFHWGSLDGQGSEHTVDKKKYAAELHLVHWNTKY | | |
| | E186D) | GDFGKAVQQPDGLAVLGIFLKVGSAKPGHQKVVDVLDSIKTK | | |
| | | GKCADFTNYDPRGLLPDSLDYWTYPGSLTTPPLLECVTWIVLK | | |
| | | EPISVSSEQVLKFRKLNFNGEGEPEELMVDNWRPAQPLKNRQI | | |
| | | KASFK | | |
| LibC000189 | CA2 (aa 2-260 of | SHHWGYGKHNGPEHWHKDFPIAKGERQSPVDIDTHTAKYDPS | 210758 | 210759 |
| | WT, A65V, | LKPLSVSYDQATSLRILNNGHVFNVEFDDSQDKAVLKGGPLDG | | |
| | F95Y, E106G, | TYRLIQFHYHWGSLDGQGSGQTVDKKKYAAELHLVHWNTKY | | |
| | H107Q, I145M, | GDFGKAVQQPDGLAVLGMFLKVGSAKPGLQKVVDVLDSIKT | | |
| | F175I) | KGKSADITNFDPRGLLPESLDYWTYPGSLTTPPLLECVTWIVLK | | |
| | | EPISVSSEQVLKFRKLNFNGEGEPEELMVDNWRPAQPLKNRQI | | |
| | | KASFK | | |
| LibC000186 | CA2 (aa 2-260 of | SHHWGYGKHNGPEHWHKDFPIAKGERQSPVDIDTHTAKYDPS | 210760 | 210761 |
| | WT, L197P) | LKPLSVSYDQATSLRILNNGHAFNVEFDDSQDKAVLKGGPLDG | | |
| | | TYRLIQFHFHWGSLDGQGSEHTVDKKKYAAELHLVHWNTKY | | |
| | | GDFGKAVQQPDGLAVLGIFLKVGSAKPGLQKVVDVLDSIKTK | | |
| | | GKSADFTNFDPRGLLPESLDYWTYPGSPTTPPLLECVTWIVLKE | | |
| | | PISVSSEQVLKFRKLNFNGEGEPEELMVDNWRPAQPLKNRQIK | | |
| | | ASFK | | |
| — | CA2 (aa 2-260 of | SHHWGYGKHNGPEHWHKDFPIAKGERQSPVDIDTHTAKYDPS | 210851 | 210852 |
| | WT, G63D, | LKPLSVSYDQATSLRILNNDHAFNVVFDDSQDKAVLKGGPLD | | |
| | E69V, N231I) | GTYRLIQFHFHWGSLDGQGSEHTVDKKKYAAELHLVHWNTK | | |
| | | YGDFGKAVQQPDGLAVLGIFLKVGSAKPGLQKVVDVLDSIKT | | |
| | | KGKSADFTNFDPRGLLPESLDYWTYPGSLTTPPLLECVTWIVL | | |
| | | KEPISVSSEQVLKFRKLNFIGEGEPEELMVDNWRPAQPLKNRQI | | |
| | | KASFK | | |

[0072] In some embodiments, the CA2 DDs described herein may include any of the sequences provided in Table 3. In Table 3 “*” represents the translation of stop codon. When the amino acid sequence in Table 3 contains one or more stop codons, the “AA SEQ ID” column provides the SEQ ID NO. of the individual components preceding and following the stop codon in the order in which they occur in the amino acid sequence.

TABLE 3
CA2 DDs

| | | | AA | NA |
|---|---|---|---|---|
| Library | | | SEQ ID | SEQ ID |
| ID | Description | AA SEQUENCE | NO. | NO. |
| LibC000223 | CA2 (aa 2-260 of WT, G12E, A38V, | SHHWGYGKHNEPEHWHKDFPIAKGE | 210762; | 210764 |
| | A65V, G98V, S99H, D101M, G102D, | RQSPVDIDTHTVKYDPSLKPLSVSYDQ | 210763 | |
| | Q103K, G104V, S105Q, E106S, H107I, | ATSLRILNNGHVFNVEFDDSQDKAVL | | |
| | T108L, V109W, D110I, K112R, K113N, | KGGPLDGTYRLIQFHFHWVHLMDKV | | |
| | Y114M, A115L, A116Q, E117N, L118F, | QSILWIKRNMLQNFTWFTGTPNMGIL | | |
| | H119T, L120W, V121F, H122T, W123G, | GELCSNLMDWPF*VFFLKVGSAKPGQ | | |
| | N124T, T125P, K126N, Y127M, D129I, | QKVVDALDSIKTKGKSADFTNFDPRG | | |
| | F130L, K132E, A133L, V134C, Q135S, | LLPESLDYWTYPGSLTTPPLLECVTWI | | |
| | Q136N, P137L, D138M, G139D, L140W, | VLKEPISVSSEQVLKFRKLNFNGEGEP | | |
| | A141P, V142F, L143*, G144V, I145F, | EELMVDNWRPAQPLKNRQIKASFK | | |
| | L156Q, V162A) | | | |
| LibC000185 | CA2 (aa 2-260 of WT, F20L, K45N, | SHHWGYGKHNGPEHWHKDLPIAKGE | 210765; | 210767 |
| | G104R, A116V, A173G, W191*) | RQSPVDIDTHTAKYDPSLNPLSVSYDQ | 210766 | |
| | | ATSLRILNNGHAFNVEFDDSQDKAVL | | |
| | | KGGPLDGTYRLIQFHFHWGSLDGQRS | | |
| | | EHTVDKKKYAVELHLVHWNTKYGDF | | |
| | | GKAVQQPDGLAVLGIFLKVGSAKPGL | | |
| | | QKVVDVLDSIKTKGKSGDFTNFDPRG | | |
| | | LLPESLDY*TYPGSLTTPPLLECVTWIV | | |
| | | LKEPISVSSEQVLKFRKLNFNGEGEPEE | | |
| | | LMVDNWRPAQPLKNRQIKASFK | | |
| LibC000215 | CA2 (aa 2-260 of WT, H17D, P30S, G81V, | SHHWGYGKHNGPEHWDKDFPIAKGE | 210768; | 210769 |
| | K132R, S151I, A152D, A173G, W191*) | RQSSVDIDTHTAKYDPSLKPLSVSYDQ | 210766 | |
| | | ATSLRILNNGHAFNVEFDDSQDKAVL | | |
| | | KVGPLDGTYRLIQFHFHWGSLDGQGS | | |
| | | EHTVDKKKYAAELHLVHWNTKYGDF | | |
| | | GRAVQQPDGLAVLGIFLKVGIDKPGL | | |
| | | QKVVDVLDSIKTKGKSGDFTNFDPRG | | |
| | | LLPESLDY*TYPGSLTTPPLLECVTWIV | | |
| | | LKEPISVSSEQVLKFRKLNFNGEGEPEE | | |
| | | LMVDNWRPAQPLKNRQIKASFK | | |
| LibC000191 | CA2 (aa 2-260 of WT, H17D, P30S, G81V, | SHHWGYGKHNGPEHWDKDFPIAKGE | 210768; | 210770 |
| | K132R, S151I, A152D, A173G, W191*) | RQSSVDIDTHTAKYDPSLKPLSVSYDQ | 210766 | |
| | | ATSLRILNNGHAFNVEFDDSQDKAVL | | |
| | | KVGPLDGTYRLIQFHFHWGSLDGQGS | | |
| | | EHTVDKKKYAAELHLVHWNTKYGDF | | |
| | | GRAVQQPDGLAVLGIFLKVGIDKPGL | | |
| | | QKVVDVLDSIKTKGKSGDFTNFDPRG | | |
| | | LLPESLDY*TYPGSLTTPPLLECVTWIV | | |
| | | LKEPISVSSEQVLKFRKLNFNGEGEPEE | | |
| | | LMVDNWRPAQPLKNRQIKASFK | | |
| LibC000200 | CA2 (aa 2-260 of WT, I59N, L90*, | SHHWGYGKHNGPEHWHKDFPIAKGE | 210771; | 210773 |
| | G102R) | RQSPVDIDTHTAKYDPSLKPLSVSYDQ | 210772 | |
| | | ATSLRNLNNGHAFNVEFDDSQDKAVL | | |
| | | KGGPLDGTYR*IQFHFHWGSLDRQGS | | |
| | | EHTVDKKKYAAELHLVHWNTKYGDF | | |
| | | GKAVQQPDGLAVLGIFLKVGSAKPGL | | |
| | | QKVVDVLDSIKTKGKSADFTNFDPRG | | |
| | | LLPESLDYWTYPGSLTTPPLLECVTWI | | |
| | | VLKEPISVSSEQVLKFRKLNFNGEGEP | | |
| | | EELMVDNWRPAQPLKNRQIKASFK | | |
| LibC000197 | CA2 (aa 2-260 of WT, T35I, Y114H, | SHHWGYGKHNGPEHWHKDFPIAKGE | 210774; | 210776 |
| | P154L, D161V, P200A, Q221R, F225L, | RQSPVDIDIHTAKYDPSLKPLSVSYDQ | 210775 | |
| | E233D, W244*) | ATSLRILNNGHAFNVEFDDSQDKAVL | | |
| | | KGGPLDGTYRLIQFHFHWGSLDGQGS | | |
| | | EHTVDKKKHAAELHLVHWNTKYGDF | | |
| | | GKAVQQPDGLAVLGIFLKVGSAKLGL | | |
| | | QKVVVVLDSIKTKGKSADFTNFDPRG | | |
| | | LLPESLDYWTYPGSLTTAPLLECVTWI | | |
| | | VLKEPISVSSERVLKLRKLNFNGDGEP | | |
| | | EELMVDN*RPAQPLKNRQIKASFK | | |
| LibC000195 | CA2 (aa 2-260 of WT, S105L, L140V, | SHHWGYGKHNGPEHWHKDFPIAKGE | 210777; | 210779 |
| | G155C, Y190*) | RQSPVDIDTHTAKYDPSLKPLSVSYDQ | 210778 | |
| | | ATSLRILNNGHAFNVEFDDSQDKAVL | | |
| | | KGGPLDGTYRLIQFHFHWGSLDGQGL | | |
| | | EHTVDKKKYAAELHLVHWNTKYGDF | | |
| | | GKAVQQPDGVAVLGIFLKVGSAKPCL | | |
| | | QKVVDVLDSIKTKGKSADFTNFDPRG | | |
| | | LLPESLD*WTYPGSLTTPPLLECVTWIV | | |
| | | LKEPISVSSEQVLKFRKLNFNGEGEPEE | | |
| | | LMVDNWRPAQPLKNRQIKASFK | | |
| LibC000188 | CA2 (aa 2-260 of WT, T35I, Y114H, | SHHWGYGKHNGPEHWHKDFPIAKGE | 210780; | 210781 |
| | P154L, D161V, P200A, F225L, E233D, | RQSPVDIDIHTAKYDPSLKPLSVSYDQ | 210775 | |
| | W244*) | ATSLRILNNGHAFNVEFDDSQDKAVL | | |
| | | KGGPLDGTYRLIQFHFHWGSLDGQGS | | |
| | | EHTVDKKKHAAELHLVHWNTKYGDF | | |
| | | GKAVQQPDGLAVLGIFLKVGSAKLGL | | |
| | | QKVVVVLDSIKTKGKSADFTNFDPRG | | |
| | | LLPESLDYWTYPGSLTTAPLLECVTWI | | |
| | | VLKEPISVSSEQVLKLRKLNFNGDGEP | | |
| | | EELMVDN*RPAQPLKNRQIKASFK | | |
| LibC000180 | CA2 (aa 2-260 of WT, K167*, R181H, | SHHWGYGKHNGPEHWHKDFPIAKGE | 210782; | 210785 |
| | E213*, V217L, L228H) | RQSPVDIDTHTAKYDPSLKPLSVSYDQ | 210783; | |
| | | ATSLRILNNGHAFNVEFDDSQDKAVL | 210784 | |
| | | KGGPLDGTYRLIQFHFHWGSLDGQGS | | |
| | | EHTVDKKKYAAELHLVHWNTKYGDF | | |
| | | GKAVQQPDGLAVLGIFLKVGSAKPGL | | |
| | | QKVVDVLDSI*TKGKSADFTNFDPHGL | | |
| | | LPESLDYWTYPGSLTTPPLLECVTWIV | | |
| | | LK*PISLSSEQVLKFRKHNFNGEGEPEE | | |
| | | LMVDNWRPAQPLKNRQIKASFK | | |
| LibC000190 | CA2 (aa 2-259 of WT, K167*, R181H, | SHHWGYGKHNGPEHWHKDFPIAKGE | 210782; | 210792 |
| | P194Q, G195A, S196H, L197*, T198P, | RQSPVDIDTHTAKYDPSLKPLSVSYDQ | 210786; | |
| | T199P, P200L, P201L, L202F, L203W, | ATSLRILNNGHAFNVEFDDSQDKAVL | 210787; | |
| | E204N, C205V, V206*, T207P, W208G, | KGGPLDGTYRLIQFHFHWGSLDGQGS | 210788; | |
| | I209L, V210C, L211S, K212R, E213N, | EHTVDKKKYAAELHLVHWNTKYGDF | 210789; | |
| | I215S, S216A, V217S, S218A, S219A, | GKAVQQPDGLAVLGIFLKVGSAKPGL | 210790; | |
| | E220S, Q221R, V222C, L223*, K224N, | QKVVDVLDSI*TKGKSADFTNFDPHGL | 210791 | |
| | F225S, R226V, K227N, N229T, F230S, | LPESLDYWTYQAH*PPLLFWNV*PGLC | | |
| | N231M, E233R, G234L, E235N, E237K, | SRNPSASAASRC*NSVNLTSMGRLNPK | | |
| | E238N, L239*, M240W, V241W, D242T, | N*WWTTGAQLSH*RTGKSKLPS | | |
| | N243T, W244G, R245A, P246Q, A247L, | | | |
| | Q248S, P249H, L250*, K251R, N252T, | | | |
| | R253G, Q254K, I255S, A257L, S258P, | | | |
| | F259S) | | | |
| LibC000227 | CA2 (aa 2-259 of WT, P13H, E117*, | SHHWGYGKHNGHEHWHKDFPIAKGE | 210793; | 210798 |
| | G150S, L184F, P185L, E186N, S187P, | RQSPVDIDTHTAKYDPSLKPLSVSYDQ | 210794; | |
| | L188W, D189I, Y190T, W191G, T192P, | ATSLRILNNGHAFNVEFDDSQDKAVL | 210787; | |
| | Y193T, P194Q, G195A, S196H, L197*, | KGGPLDGTYRLIQFHFHWGSLDGQGS | 210795; | |
| | T198P, T199P, P200L, P201L, L202F, | EHTVDKKKYAA*LHLVHWNTKYGDF | 210796; | |
| | L203W, E204N, C205V, V206*, T207P, | GKAVQQPDGLAVLGIFLKVSSAKPGL | 210797; | |
| | W208G, I209L, V210C, L211*, K212R, | QKVVDVLDSIKTKGKSADFTNFDPRG | 210790; | |
| | E213N, I215S, S216A, V217S, S218A, | LFLNPWITGPTQAH*PPLLFWNV*PGL | 210791 | |
| | S219A, E220S, Q221R, V222C, L223*, | C*RNPSASAASRC*NSVNLTSMGRVNP | | |
| | K224N, F225S, R226V, K227N, N229T, | KN*WWTTGAQLSH*RTGKSKLPS | | |
| | F230S, N231M, E233R, G234V, E235N, | | | |
| | E237K, E238N, L239*, M240W, V241W, | | | |
| | D242T, N243T, W244G, R245A, P246Q, | | | |
| | A247L, Q248S, P249H, L250*, K251R, | | | |
| | N252T, R253G, Q254K, I255S, A257L, | | | |
| | S258P, F259S) | | | |
| LibC000218 | CA2 (aa 2-260 of WT, A133T, L147F, | SHHWGYGKHNGPEHWHKDFPIAKGE | 210799; | 210807 |
| | K148E, V149G, G150W, S151Q, A152R, | RQSPVDIDTHTAKYDPSLKPLSVSYDQ | 210800; | |
| | K153*, P154T, L156P, Q157S, K158E, | ATSLRILNNGHAFNVEFDDSQDKAVL | 210801; | |
| | V159S, V160C, D161*, V162C, L163A, | KGGPLDGTYRLIQFHFHWGSLDGQGS | 210802; | |
| | D164G, S165F, I166H, K167*, T168N, | EHTVDKKKYAAELHLVHWNTKYGDF | LH; | |
| | K171Q, S172E, A173C, D174*, F175L, | GKTVQQPDGLAVLGIFFEGWQR*TGPS | 210803; | |
| | T176H, N177*, F178L, D179R, P180S, | ESC*CAGFH*NKGQEC*LH*LRSSWPP | 210804; | |
| | R181S, G182W, L183P, L184P, P185S, | S*IPGLLDLPRLTDHPSSSGMCDLDCA | T; | |
| | E186*, S187I, L188P, D189G, Y190L, | QGTHQRQQRAGVEIP*T*LQWGG*TR | 210805; | |
| | W191L, T192D, Y193L, G195R, S196L, | RTDGGQLAPSSATEEQANQSFLQ | 210806 | |
| | L197T, T198D, T199H, P201S, L202S, | | | |
| | L203S, E204G, C205M, V206C, T207D, | | | |
| | W208L, I209D, V210C, L211A, K212Q, | | | |
| | E213G, P214T, I215H, S216Q, V217R, | | | |
| | S218Q, S219Q, E220R, Q221A, V222G, | | | |
| | L223V, K224E, F225I, R226P, K227*, | | | |
| | L228T, N229*, F230L, N231Q, G232W, | | | |
| | E233G, E235*, P236T, E237R, E238R, | | | |
| | L239T, M240D, V241G, D242G, N243Q, | | | |
| | W244L, R245A, A247S, Q248S, P249A, | | | |
| | L250T, K251E, N252E, R253Q, Q254A, | | | |
| | I255N, K256Q, A257S, S258F, F259L, | | | |
| | K260Q) | | | |
| LibC000216 | CA2 (aa 2-260 of WT, F20L, K45N, | SHHWGYGKHNGPEHWHKDLPIAKGE | 210808; | 210810 |
| | G104R, A116V, L147F, K148E, V149G, | RQSPVDIDTHTAKYDPSLNPLSVSYDQ | 210800; | |
| | G150W, S151Q, A152R, K153*, P154T, | ATSLRILNNGHAFNVEFDDSQDKAVL | 210801; | |
| | L156P, Q157S, K158E, V159S, V160C, | KGGPLDGTYRLIQFHFHWGSLDGQRS | 210802; | |
| | D161*, V162C, L163A, D164G, S165F, | EHTVDKKKYAVELHLVHWNTKYGDF | LH; | |
| | I166H, K167*, T168N, K171Q, S172E, | GKAVQQPDGLAVLGIFFEGWQR*TGP | 210803; | |
| | A173C, D174*, F175L, T176H, N177*, | SESC*CAGFH*NKGQEC*LH*LRSSWP | 210809; | |
| | F178L, D179R, P180S, R181S, G182W, | PS*IPGLLDLPRLTDHPSSSGMCDLDCA | T; | |
| | L183P, L184P, P185S, E186*, S187I, | QGTHQRQQRAGIEIP*T*LQWGG*TRR | 210805; | |
| | L188P, D189G, Y190L, W191L, T192D, | TDGGQLAPSSATEEQANQSFLQ | 210806 | |
| | Y193L, G195R, S196L, L197T, T198D, | | | |
| | T199H, P201S, L202S, L203S, E204G, | | | |
| | C205M, V206C, T207D, W208L, I209D, | | | |
| | V210C, L211A, K212Q, E213G, P214T, | | | |
| | I215H, S216Q, V217R, S218Q, S219Q, | | | |
| | E220R, Q221A, V222G, L223I, K224E, | | | |
| | F225I, R226P, K227*, L228T, N229*, | | | |
| | F230L, N231Q, G232W, E233G, E235*, | | | |
| | P236T, E237R, E238R, L239T, M240D, | | | |
| | V241G, D242G, N243Q, W244L, R245A, | | | |
| | A247S, Q248S, P249A, L250T, K251E, | | | |
| | N252E, R253Q, Q254A, I255N, K256Q, | | | |
| | A257S, S258F, F259L, K260Q) | | | |
| LibC000222 | CA2 (aa 2-259 of WT, N11K, G12D, P13L, | SHHWGYGKHKDLNTGIRTSPLPRESAS | 210811; | 210819 |
| | E14N, H15T, W16G, H17I, K18R, D19T, | PLLTSTLIQPSMTLP*SPCLFPMIKQLP* | 210812; | |
| | F20S, I22L, A23P, K24R, G25E, E26S, | GSSTMVMLSTWSLMTLRTKQCSREDP | 210813; | |
| | R27A, Q28S, S29P, P30L, V31L, D32T, | WMALTD*FSFTFTGVHLMDKVQSILW | 210814; | |
| | I33S, D34T, T35L, H36I, T37Q, A38P, | IKRNMLQNFTWFTGTPNMGILGKLCS | VFF; | |
| | K39S, Y40M, D41T, P42L, S43P, L44*, | NLMDWPF*VFF*RLAALNRAFRKLLM | 210815; | |
| | K45S, L47C, S48L, V49F, S50P, Y51M, | CWIPLKQRARVLTSLTSILVASFVNPWI | 210787; | |
| | D52I, Q53K, A54Q, T55L, S56P, L57*, | TGPTQAH*PPLLFWNV*PGLCSWNPSA | 210816; | |
| | R58G, I59S, L60S, N61T, N62M, G63V, | SAASRC*NYVNLTSMGRVNPKN*RWT | 210817; | |
| | H64M, A65L, F66S, N67T, V68W, E69S, | TGALLSH*RTGKSKLPS | 210818; | |
| | F70L, D71M, D72T, S73L, Q74R, D75T, | | 210791; | |
| | A77Q, V78C, L79S, K80R, G81E, G82D, | | | |
| | L84W, D85M, G86A, T87L, Y88T, R89D, | | | |
| | L90*, I91F, Q92S, H94T, H96T, W97G, | | | |
| | G98V, S99H, D101M, G102D, Q103K, | | | |
| | G104V, S105Q, E106S, H107I, T108L, | | | |
| | V109W, D110I, K112R, K113N, Y114M, | | | |
| | A115L, A116Q, E117N, L118F, H119T, | | | |
| | L120W, V121F, H122T, W123G, N124T, | | | |
| | T125P, K126N, Y127M, D129I, F130L, | | | |
| | A133L, V134C, Q135S, Q136N, P137L, | | | |
| | D138M, G139D, L140W, A141P, V142F, | | | |
| | L143*, G144V, I145F, L147*, K148R, | | | |
| | V149L, G150A, S151A, A152L, K153N, | | | |
| | P154R, G155A, L156F, Q157R, V159L, | | | |
| | V160L, D161M, V162C, L163W, D164I, | | | |
| | S165P, I166L, T168Q, K169R, G170A, | | | |
| | K171R, S172V, A173L, D174T, F175S, | | | |
| | T176L, N177T, F178S, D179I, P180L, | | | |
| | R181V, G182A, L183S, L184F, P185V, | | | |
| | E186N, S187P, L188W, D1891, Y190T, | | | |
| | W191G, T192P, Y193T, P194Q, G195A, | | | |
| | S196H, L197*, T198P, T199P, P200L, | | | |
| | P201L, L202F, L203W, E204N, C205V, | | | |
| | V206*, T207P, W208G, I209L, V210C, | | | |
| | L211S, K212W, E213N, I215S, S216A, | | | |
| | V217S, S218A, S219A, E220S, Q221R, | | | |
| | V222C, L223*, K224N, F225Y, R226V, | | | |
| | K227N, N229T, F230S, N231M, E233R, | | | |
| | G234V, E235N, E237K, E238N, L239*, | | | |
| | M240R, V241W, D242T, N243T, W244G, | | | |
| | R245A, P246L, A247L, Q248S, P249H, | | | |
| | L250*, K251R, N252T, R253G, Q254K, | | | |
| | I255S, A257L, S258P, F259S) | | | |

[0073] Additional CA2 destabilizing domains are provided in Table 4. CA2 destabilizing mutants provided in Table 3B are identified as described above, such as by structure guided mutagenesis or by combining single mutants.

TABLE 4
CA2 DDs

| | | AA SEQ | NA SEQ |
|---|---|---|---|
| Description | AA Sequence | ID NO. | ID NO. |
| CA2 (M1del, | SHHWGYGKHNGPEHWHKDFPIAKGERQSPVDIDTHTAKYDPSLKPLSV | 210968 | 211004 |
| E106D)-variant | SYDQATSLRILNNGHAFNVEFDDSQDKAVLKGGPLDGTYRLIQFHFHW | | |
| 1 | GSLDGQGSDHTVDKKKYAAELHLVHWNTKYGDFGKAVQQPDGLAVL | | |
| | GIFLKVGSAKPGLQKVVDVLDSIKTKGKSADFTNFDPRGLLPESLDYWT | | |
| | YPGSLTTPPLLECVTWIVLKEPISVSSEQVLKFRKLNFNGEGEPEELMVD | | |
| | NWRPAQPLKNRQIKASFK | | |
| CA2 (M1del, | SHHWGYGKHNGPEHWHKDFPIAKGERQSPVDIDTHTAKYDPSLKPLSV | 210969 | 211005 |
| I59N, G102R)- | SYDQATSLRNLNNGHAFNVEFDDSQDKAVLKGGPLDGTYRLIQFHFHW | | |
| variant 2 | GSLDRQGSEHTVDKKKYAAELHLVHWNTKYGDFGKAVQQPDGLAVL | | |
| | GIFLKVGSAKPGLQKVVDVLDSIKTKGKSADFTNFDPRGLLPESLDYWT | | |
| | YPGSLTTPPLLECVTWIVLKEPISVSSEQVLKFRKLNFNGEGEPEELMVD | | |
| | NWRPAQPLKNRQIKASFK | | |
| CA2 (M1del, | SHHWGYGKHNGPEHWHKDFPIAKGERQSPVDIDTHTAKYDPSLKPLSV | 210970 | 211006 |
| L197P)-variant | SYDQATSLRILNNGHAFNVEFDDSQDKAVLKGGPLDGTYRLIQFHFHW | | |
| 1 | GSLDGQGSEHTVDKKKYAAELHLVHWNTKYGDFGKAVQQPDGLAVL | | |
| | GIFLKVGSAKPGLQKVVDVLDSIKTKGKSADFTNFDPRGLLPESLDYWT | | |
| | YPGSPTTPPLLECVTWIVLKEPISVSSEQVLKFRKLNFNGEGEPEELMVD | | |
| | NWRPAQPLKNRQIKASFK | | |
| CA2 (M1del, | SHHWGYGKHNGPEHWHKDFPIAKGERQSPVDIDTHTAKYDPSLKPLSV | 210971 | 211007 |
| L156H, S172C, | SYDQATSLRILNNGHAFNVEFDDSQDKAVLKGGPLDGTYRLIQFHFHW | | |
| F178Y, E186D)- | GSLDGQGSEHTVDKKKYAAELHLVHWNTKYGDFGKAVQQPDGLAVL | | |
| variant 1 | GIFLKVGSAKPGHQKVVDVLDSIKTKGKCADFTNYDPRGLLPDSLDYW | | |
| | TYPGSLTTPPLLECVTWIVLKEPISVSSEQVLKFRKLNFNGEGEPEELMV | | |
| | DNWRPAQPLKNRQIKASFK | | |
| CA2 (M1del, | SHHWGYGKHNGPEHWHKDFPIAKGERQSPVDIDTHTAKYDPSLKPLSV | 210972 | 211008 |
| L156H)-variant | SYDQATSLRILNNGHAFNVEFDDSQDKAVLKGGPLDGTYRLIQFHFHW | | |
| 2 | GSLDGQGSEHTVDKKKYAAELHLVHWNTKYGDFGKAVQQPDGLAVL | | |
| | GIFLKVGSAKPGHQKVVDVLDSIKTKGKSADFTNFDPRGLLPESLDYWT | | |
| | YPGSLTTPPLLECVTWIVLKEPISVSSEQVLKFRKLNFNGEGEPEELMVD | | |
| | NWRPAQPLKNRQIKASFK | | |
| CA2 (M1del, | SHHWGYGKHNGPEHWHKDFPIAKGELQSPVDIDTHTAKYDPSLKPLSV | 210973 | 211009 |
| R27L, T87I, | SYDQATSLRILNNGHAFNVEFDDSQDKAVLKGGPLDGIYRLIQFHFHW | | |
| H122Y, N252D)- | GSLDGQGSEHTVDKKKYAAELHLVYWNTKYGDFGKAVQQPDGLAVL | | |
| variant 1 | GIFLKVGSAKPGLQKVVDVLDSIKTKGKSADFTNFDPRGLLPESLDYWT | | |
| | YPGSLTTPPLLECVTWIVLKEPISVSSEQVLKFRKLNFNGEGEPEELMVD | | |
| | NWRPAQPLKDRQIKASFK | | |
| CA2 (I59N)- | SHHWGYGKHNGPEHWHKDFPIAKGERQSPVDIDTHTAKYDPSLKPLSV | 210974 | 211010 |
| variant 1 | SYDQATSLRNLNNGHAFNVEFDDSQDKAVLKGGPLDGTYRLIQFHFHW | | |
| | GSLDGQGSEHTVDKKKYAAELHLVHWNTKYGDFGKAVQQPDGLAVL | | |
| | GIFLKVGSAKPGLQKVVDVLDSIKTKGKSADFTNFDPRGLLPESLDYWT | | |
| | YPGSLTTPPLLECVTWIVLKEPISVSSEQVLKFRKLNFNGEGEPEELMVD | | |
| | NWRPAQPLKNRQIKASFK | | |
| CA2 (G63D)- | SHHWGYGKHNGPEHWHKDFPIAKGERQSPVDIDTHTAKYDPSLKPLSV | 210975 | 211011 |
| variant 1 | SYDQATSLRILNNDHAFNVEFDDSQDKAVLKGGPLDGTYRLIQFHFHW | | |
| | GSLDGQGSEHTVDKKKYAAELHLVHWNTKYGDFGKAVQQPDGLAVL | | |
| | GIFLKVGSAKPGLQKVVDVLDSIKTKGKSADFTNFDPRGLLPESLDYWT | | |
| | YPGSLTTPPLLECVTWIVLKEPISVSSEQVLKFRKLNFNGEGEPEELMVD | | |
| | NWRPAQPLKNRQIKASFK | | |
| CA2 (M1del, | SHHWGYGKHNGPEHWHKDFPIAKGERQSPVDIDTHTAKYDPSLKPLSV | 210976 | 211012 |
| H122Y)- | SYDQATSLRILNNGHAFNVEFDDSQDKAVLKGGPLDGTYRLIQFHFHW | | |
| variant 1 | GSLDGQGSEHTVDKKKYAAELHLVYWNTKYGDFGKAVQQPDGLAVL | | |
| | GIFLKVGSAKPGLQKVVDVLDSIKTKGKSADFTNFDPRGLLPESLDYWT | | |
| | YPGSLTTPPLLECVTWIVLKEPISVSSEQVLKFRKLNFNGEGEPEELMVD | | |
| | NWRPAQPLKNRQIKASFK | | |
| CA2 (M1del, | SHHWGYGKHNGPEHWHKDFPIAKGERQSPVDIDTHTAKYDPSLKPLSV | 210977 | 211013 |
| G63D, M240L)- | SYDQATSLRILNNDHAFNVEFDDSQDKAVLKGGPLDGTYRLIQFHFHW | | |
| variant 1 | GSLDGQGSEHTVDKKKYAAELHLVHWNTKYGDFGKAVQQPDGLAVL | | |
| | GIFLKVGSAKPGLQKVVDVLDSIKTKGKSADFTNFDPRGLLPESLDYWT | | |
| | YPGSLTTPPLLECVTWIVLKEPISVSSEQVLKFRKLNFNGEGEPEELLVD | | |
| | NWRPAQPLKNRQIKASFK | | |
| CA2 (M1del, | SHHWGYGKHNGPEHWHKDFPIAKGERQSPVDIDTHTAKYDPSLKPLSV | 210978 | 211014 |
| A77I, P249F)- | SYDQATSLRILNNGHAFNVEFDDSQDKIVLKGGPLDGTYRLIQFHFHWG | | |
| variant 1 | SLDGQGSEHTVDKKKYAAELHLVHWNTKYGDFGKAVQQPDGLAVLGI | | |
| | FLKVGSAKPGLQKVVDVLDSIKTKGKSADFTNFDPRGLLPESLDYWTY | | |
| | PGSLTTPPLLECVTWIVLKEPISVSSEQVLKFRKLNFNGEGEPEELMVDN | | |
| | WRPAQFLKNRQIKASFK | | |
| CA2 (M1del, | SHHWGYGKHNGPEHWHKDFPIAKGERQSPVDIDTHTAKYDPSLKPLSV | 210979 | 211015 |
| D71K, T192F)- | SYDQATSLRILNNGHAFNVEFKDSQDKAVLKGGPLDGTYRLIQFHFHW | | |
| variant 1 | GSLDGQGSEHTVDKKKYAAELHLVHWNTKYGDFGKAVQQPDGLAVL | | |
| | GIFLKVGSAKPGLQKVVDVLDSIKTKGKSADFTNFDPRGLLPESLDYWF | | |
| | YPGSLTTPPLLECVTWIVLKEPISVSSEQVLKFRKLNFNGEGEPEELMVD | | |
| | NWRPAQPLKNRQIKASFK | | |
| CA2 (M1del, | SHHWGYGKHNGPEHWHKDFPIAKGERQSPVDIDTHTAKYDPSLKPLSV | 210980 | 211016 |
| L156H) | SYDQATSLRILNNGHAFNVEFDDSQDKAVLKGGPLDGTYRLIQFHFHW | | |
| | GSLDGQGSEHTVDKKKYAAELHLVHWNTKYGDFGKAVQQPDGLAVL | | |
| | GIFLKVGSAKPGHQKVVDVLDSIKTKGKSADFTNFDPRGLLPESLDYWT | | |
| | YPGSLTTPPLLECVTWIVLKEPISVSSEQVLKFRKLNFNGEGEPEELMVD | | |
| | NWRPAQPLKNRQIKASFK | | |
| CA2 (M1del, | SHHWGYGKHNGPEHWHKDFPIAKGELQSPVDIDTHTAKYDPSLKPLSV | 210981 | 211017 |
| R27L, H122Y)- | SYDQATSLRILNNGHAFNVEFDDSQDKAVLKGGPLDGTYRLIQFHFHW | | |
| variant 1 | GSLDGQGSEHTVDKKKYAAELHLVYWNTKYGDFGKAVQQPDGLAVL | | |
| | GIFLKVGSAKPGLQKVVDVLDSIKTKGKSADFTNFDPRGLLPESLDYWT | | |
| | YPGSLTTPPLLECVTWIVLKEPISVSSEQVLKFRKLNFNGEGEPEELMVD | | |
| | NWRPAQPLKNRQIKASFK | | |
| CA2 (M1del, | SHHWGYGKHNGPEHWHKDFPIAKGERQSPVDIDTHTAKYDPSLKPLSV | 210982 | 211018 |
| T87I, H122Y)- | SYDQATSLRILNNGHAFNVEFDDSQDKAVLKGGPLDGIYRLIQFHFHW | | |
| variant 1 | GSLDGQGSEHTVDKKKYAAELHLVYWNTKYGDFGKAVQQPDGLAVL | | |
| | GIFLKVGSAKPGLQKVVDVLDSIKTKGKSADFTNFDPRGLLPESLDYWT | | |
| | YPGSLTTPPLLECVTWIVLKEPISVSSEQVLKFRKLNFNGEGEPEELMVD | | |
| | NWRPAQPLKNRQIKASFK | | |
| CA2 (M1del, | SHHWGYGKHNGPEHWHKDFPIAKGERQSPVDIDTHTAKYDPSLKPLSV | 210983 | 211019 |
| H122Y, N252D)- | SYDQATSLRILNNGHAFNVEFDDSQDKAVLKGGPLDGTYRLIQFHFHW | | |
| variant 1 | GSLDGQGSEHTVDKKKYAAELHLVYWNTKYGDFGKAVQQPDGLAVL | | |
| | GIFLKVGSAKPGLQKVVDVLDSIKTKGKSADFTNFDPRGLLPESLDYWT | | |
| | YPGSLTTPPLLECVTWIVLKEPISVSSEQVLKFRKLNFNGEGEPEELMVD | | |
| | NWRPAQPLKDRQIKASFK | | |
| CA2 (M1del, | SHHWGYGKHNGPEHWHKDFPIAKGERQSPVDIDTHTAKYDPSLKPLSV | 210984 | 211020 |
| D72F, V241F)- | SYDQATSLRILNNGHAFNVEFDFSQDKAVLKGGPLDGTYRLIQFHFHW | | |
| variant 1 | GSLDGQGSEHTVDKKKYAAELHLVHWNTKYGDFGKAVQQPDGLAVL | | |
| | GIFLKVGSAKPGLQKVVDVLDSIKTKGKSADFTNFDPRGLLPESLDYWT | | |
| | YPGSLTTPPLLECVTWIVLKEPISVSSEQVLKFRKLNFNGEGEPEELMFD | | |
| | NWRPAQPLKNRQIKASFK | | |
| CA2 (M1del, | SHHWGYGKHNGPEHWHKDFPIAKGERQSPVDIDTHTAKYDPSLKPLSV | 210985 | 211021 |
| V241F, P249L)- | SYDQATSLRILNNGHAFNVEFDDSQDKAVLKGGPLDGTYRLIQFHFHW | | |
| variant 1 | GSLDGQGSEHTVDKKKYAAELHLVHWNTKYGDFGKAVQQPDGLAVL | | |
| | GIFLKVGSAKPGLQKVVDVLDSIKTKGKSADFTNFDPRGLLPESLDYWT | | |
| | YPGSLTTPPLLECVTWIVLKEPISVSSEQVLKFRKLNFNGEGEPEELMFD | | |
| | NWRPAQLLKNRQIKASFK | | |
| CA2 (M1del, | SHHWGYGKHNGPEHWHKDFPIAKGERQSPVDIDTHTAKYDPSLKPLSV | 210986 | 211022 |
| D72F, P249L)- | SYDQATSLRILNNGHAFNVEFDFSQDKAVLKGGPLDGTYRLIQFHFHW | | |
| variant 1 | GSLDGQGSEHTVDKKKYAAELHLVHWNTKYGDFGKAVQQPDGLAVL | | |
| | GIFLKVGSAKPGLQKVVDVLDSIKTKGKSADFTNFDPRGLLPESLDYWT | | |
| | YPGSLTTPPLLECVTWIVLKEPISVSSEQVLKFRKLNFNGEGEPEELMVD | | |
| | NWRPAQLLKNRQIKASFK | | |
| CA2 (M1del, | SHHWGYGKHNGPEHWHKDFPIAKGERQSPVDIDTHTAKYDPSLKPLSV | 210987 | 211023 |
| D71L, T87N)- | SYDQATSLRILNNGHAFNVEFLDSQDKAVLKGGPLDGNYRLIQFHFHW | | |
| variant 1 | GSLDGQGSEHTVDKKKYAAELHLVHWNTKYGDFGKAVQQPDGLAVL | | |
| | GIFLKVGSAKPGLQKVVDVLDSIKTKGKSADFTNFDPRGLLPESLDYWT | | |
| | YPGSLTTPPLLECVTWIVLKEPISVSSEQVLKFRKLNFNGEGEPEELMVD | | |
| | NWRPAQPLKNRQIKASFK | | |
| CA2 (M1del, | SHHWGYGKHNGPEHWHKDFPIAKGERQSPVDIDTHTAKYDPSLKPLSV | 210988 | 211024 |
| D71L, L250R)- | SYDQATSLRILNNGHAFNVEFLDSQDKAVLKGGPLDGTYRLIQFHFHW | | |
| variant 1 | GSLDGQGSEHTVDKKKYAAELHLVHWNTKYGDFGKAVQQPDGLAVL | | |
| | GIFLKVGSAKPGLQKVVDVLDSIKTKGKSADFTNFDPRGLLPESLDYWT | | |
| | YPGSLTTPPLLECVTWIVLKEPISVSSEQVLKFRKLNFNGEGEPEELMVD | | |
| | NWRPAQPRKNRQIKASFK | | |
| CA2 (Y51T)- | SHHWGYGKHNGPEHWHKDFPIAKGERQSPVDIDTHTAKYDPSLKPLSV | 210989 | 211025 |
| variant 1 | STDQATSLRILNNGHAFNVEFDDSQDKAVLKGGPLDGTYRLIQFHFHW | | |
| | GSLDGQGSEHTVDKKKYAAELHLVHWNTKYGDFGKAVQQPDGLAVL | | |
| | GIFLKVGSAKPGLQKVVDVLDSIKTKGKSADFTNFDPRGLLPESLDYWT | | |
| | YPGSLTTPPLLECVTWIVLKEPISVSSEQVLKFRKLNFNGEGEPEELMVD | | |
| | NWRPAQPLKNRQIKASFK | | |
| CA2 (S73N, | SHHWGYGKHNGPEHWHKDFPIAKGERQSPVDIDTHTAKYDPSLKPLSV | 210990 | 211026 |
| R89F)-variant | SYDQATSLRILNNGHAFNVEFDDNQDKAVLKGGPLDGTYFLIQFHFHW | | |
| 1 | GSLDGQGSEHTVDKKKYAAELHLVHWNTKYGDFGKAVQQPDGLAVL | | |
| | GIFLKVGSAKPGLQKVVDVLDSIKTKGKSADFTNFDPRGLLPESLDYWT | | |
| | YPGSLTTPPLLECVTWIVLKEPISVSSEQVLKFRKLNFNGEGEPEELMVD | | |
| | NWRPAQPLKNRQIKASFK | | |
| CA2 (D72F, | SHHWGYGKHNGPEHWHKDFPIAKGERQSPVDIDTHTAKYDPSLKPLSV | 210991 | 211027 |
| P249F)-variant | SYDQATSLRILNNGHAFNVEFDFSQDKAVLKGGPLDGTYRLIQFHFHW | | |
| 1 | GSLDGQGSEHTVDKKKYAAELHLVHWNTKYGDFGKAVQQPDGLAVL | | |
| | GIFLKVGSAKPGLQKVVDVLDSIKTKGKSADFTNFDPRGLLPESLDYWT | | |
| | YPGSLTTPPLLECVTWIVLKEPISVSSEQVLKFRKLNFNGEGEPEELMVD | | |
| | NWRPAQPLKNRQIKASFK | | |
| CA2 (T55K, | SHHWGYGKHNGPEHWHKDFPIAKGERQSPVDIDTHTAKYDPSLKPLSV | 210992 | 211028 |
| G63N, Q248N)- | SYDQAKSLRILNNNHAFNVEFDDSQDKAVLKGGPLDGTYRLIQFHFHW | | |
| variant 1 | GSLDGQGSEHTVDKKKYAAELHLVHWNTKYGDFGKAVQQPDGLAVL | | |
| | GIFLKVGSAKPGLQKVVDVLDSIKTKGKSADFTNFDPRGLLPESLDYWT | | |
| | YPGSLTTPPLLECVTWIVLKEPISVSSEQVLKFRKLNFNGEGEPEELMVD | | |
| | NWRPANPLKNRQIKASFK | | |
| CA2 (Y193I)- | SHHWGYGKHNGPEHWHKDFPIAKGERQSPVDIDTHTAKYDPSLKPLSV | 210993 | 211029 |
| variant 1 | SYDQATSLRILNNGHAFNVEFDDSQDKAVLKGGPLDGTYRLIQFHFHW | | |
| | GSLDGQGSEHTVDKKKYAAELHLVHWNTKYGDFGKAVQQPDGLAVL | | |
| | GIFLKVGSAKPGLQKVVDVLDSIKTKGKSADFTNFDPRGLLPESLDYWT | | |
| | IPGSLTTPPLLECVTWIVLKEPISVSSEQVLKFRKLNFNGEGEPEELMVD | | |
| | NWRPAQPLKNRQIKASFK | | |
| CA2 (S56F)- | SHHWGYGKHNGPEHWHKDFPIAKGERQSPVDIDTHTAKYDPSLKPLSV | 210994 | 211030 |
| variant 1 | SYDQATFLRILNNGHAFNVEFDDSQDKAVLKGGPLDGTYRLIQFHFHW | | |
| | GSLDGQGSEHTVDKKKYAAELHLVHWNTKYGDFGKAVQQPDGLAVL | | |
| | GIFLKVGSAKPGLQKVVDVLDSIKTKGKSADFTNFDPRGLLPESLDYWT | | |
| | YPGSLTTPPLLECVTWIVLKEPISVSSEQVLKFRKLNFNGEGEPEELMVD | | |
| | NWRPAQPLKNRQIKASFK | | |
| CA2 (S56F, | SHHWGYGKHNGPEHWHKDFPIAKGERQSPVDIDTHTAKYDPSLKPLSV | 210995 | 211031 |
| D71S)-variant | SYDQATFLRILNNGHAFNVEFSDSQDKAVLKGGPLDGTYRLIQFHFHW | | |
| 1 | GSLDGQGSEHTVDKKKYAAELHLVHWNTKYGDFGKAVQQPDGLAVL | | |
| | GIFLKVGSAKPGLQKVVDVLDSIKTKGKSADFTNFDPRGLLPESLDYWT | | |
| | YPGSLTTPPLLECVTWIVLKEPISVSSEQVLKFRKLNFNGEGEPEELMVD | | |
| | NWRPAQPLKNRQIKASFK | | |
| CA2 (S73N, | SHHWGYGKHNGPEHWHKDFPIAKGERQSPVDIDTHTAKYDPSLKPLSV | 210996 | 211032 |
| R89Y)-variant | SYDQATSLRILNNGHAFNVEFDDNQDKAVLKGGPLDGTYYLIQFHFHW | | |
| 1 | GSLDGQGSEHTVDKKKYAAELHLVHWNTKYGDFGKAVQQPDGLAVL | | |
| | GIFLKVGSAKPGLQKVVDVLDSIKTKGKSADFTNFDPRGLLPESLDYWT | | |
| | YPGSLTTPPLLECVTWIVLKEPISVSSEQVLKFRKLNFNGEGEPEELMVD | | |
| | NWRPAQPLKNRQIKASFK | | |
| CA2 (V134F, | SHHWGYGKHNGPEHWHKDFPIAKGERQSPVDIDTHTAKYDPSLKPLSV | 210997 | 211033 |
| L228F)-variant | SYDQATSLRILNNGHAFNVEFDDSQDKAVLKGGPLDGTYRLIQFHFHW | | |
| 1 | GSLDGQGSEHTVDKKKYAAELHLVHWNTKYGDFGKAFQQPDGLAVL | | |
| | GIFLKVGSAKPGLQKVVDVLDSIKTKGKSADFTNFDPRGLLPESLDYWT | | |
| | YPGSLTTPPLLECVTWIVLKEPISVSSEQVLKFRKFNFNGEGEPEELMVD | | |
| | NWRPAQPLKNRQIKASFK | | |
| CA2 (M1del, | SHHWGYGKHNGPEHWHKDFPIAKGERQSPVDIDTHTAKYDPSLKPLSV | 210998 | 211034 |
| L156H, A256del, | SYDQATSLRILNNGHAFNVEFDDSQDKAVLKGGPLDGTYRLIQFHFHW | | |
| S257del, | GSLDGQGSEHTVDKKKYAAELHLVHWNTKYGDFGKAVQQPDGLAVL | | |
| F258del, | GIFLKVGSAKPGHQKVVDVLDSIKTKGKSADFTNFDPRGLLPESLDYWT | | |
| K259del)- | YPGSLTTPPLLECVTWIVLKEPISVSSEQVLKFRKLNFNGEGEPEELMVD | | |
| variant 1 | NWRPAQPLKNRQIK | | |
| CA2 (M1del, | GYGKHNGPEHWHKDFPIAKGERQSPVDIDTHTAKYDPSLKPLSVSYDQ | 210999 | 211035 |
| S2del, H3del, | ATSLRILNNGHAFNVEFDDSQDKAVLKGGPLDGTYRLIQFHFHWGSLD | | |
| H4del, W5del, | GQGSEHTVDKKKYAAELHLVHWNTKYGDFGKAVQQPDGLAVLGIFLK | | |
| L156H)-variant | VGSAKPGHQKVVDVLDSIKTKGKSADFTNFDPRGLLPESLDYWTYPGS | | |
| 1 | LTTPPLLECVTWIVLKEPISVSSEQVLKFRKLNFNGEGEPEELMVDNWR | | |
| | PAQPLKNRQIKASFK | | |
| CA2 (M1del, | SHHYGYGKHNGPEHWHKDFPIAKGERQSPVDIDTHTAKYDPSLKPLSV | 211000 | 211036 |
| W5Y, L156H)- | SYDQATSLRILNNGHAFNVEFDDSQDKAVLKGGPLDGTYRLIQFHFHW | | |
| variant 1 | GSLDGQGSEHTVDKKKYAAELHLVHWNTKYGDFGKAVQQPDGLAVL | | |
| | GIFLKVGSAKPGHQKVVDVLDSIKTKGKSADFTNFDPRGLLPESLDYWT | | |
| | YPGSLTTPPLLECVTWIVLKEPISVSSEQVLKFRKLNFNGEGEPEELMVD | | |
| | NWRPAQPLKNRQIKASFK | | |
| CA2 (M1del, | SHHWGYGKHNGPEHWHKDFPIAKGERQSPVDIDTHTAKYDPSLKPLSV | 211001 | 211037 |
| L156H, | SYDQATSLRILNNGHAFNVEFDDSQDKAVLKGGPLDGTYRLIQFHFHW | | |
| G234del, | GSLDGQGSEHTVDKKKYAAELHLVHWNTKYGDFGKAVQQPDGLAVL | | |
| E235del, | GIFLKVGSAKPGHQKVVDVLDSIKTKGKSADFTNFDPRGLLPESLDYWT | | |
| P236del)- | YPGSLTTPPLLECVTWIVLKEPISVSSEQVLKFRKLNFNGEEELMVDNW | | |
| variant 1 | RPAQPLKNRQIKASFK | | |
| CA2 (M1del, | SHHWGYGKHNGPEHWHKDFPIAKGERQSPVDIDTHTAKYDPSLKPLSV | 211002 | 211038 |
| L156H, F225L)- | SYDQATSLRILNNGHAFNVEFDDSQDKAVLKGGPLDGTYRLIQFHFHW | | |
| variant 1 | GSLDGQGSEHTVDKKKYAAELHLVHWNTKYGDFGKAVQQPDGLAVL | | |
| | GIFLKVGSAKPGHQKVVDVLDSIKTKGKSADFTNFDPRGLLPESLDYWT | | |
| | YPGSLTTPPLLECVTWIVLKEPISVSSEQVLKLRKLNFNGEGEPEELMVD | | |
| | NWRPAQPLKNRQIKASFK | | |
| CA2 (M1del, | SHHWGYGKHNGPEHWHKDFPIAKGERQSPVDIDTHTAKYDPSLKPLSV | 211003 | 211039 |
| D71N, D75N, | SYDQATSLRILNNGHAFNVEFNDSQNKAVLKGGPLDGTYRLIQFHFHW | | |
| D101N, L156H)- | GSLNGQGSEHTVDKKKYAAELHLVHWNTKYGDFGKAVQQPDGLAVL | | |
| variant 1 | GIFLKVGSAKPGHQKVVDVLDSIKTKGKSADFTNFDPRGLLPESLDYWT | | |
| | YPGSLTTPPLLECVTWIVLKEPISVSSEQVLKFRKLNFNGEGEPEELMVD | | |
| | NWRPAQPLKNRQIKASFK | | |

[0074] In some embodiments a region or a portion of the CA2 WT may be used as template for generating CA2 DDs. In some embodiments, the CA2 DDs may exclude the lysine at position 260 of SEQ ID NO. 11717. In some aspects, the CA2 regions may include but are not limited to those described in Table 5.

TABLE 5
CA2 regions

| | | AA | NA |
|---|---|---|---|
| | | SEQ | SEQ |
| | | ID | ID |
| Description | AA SEQUENCE | NO. | NO. |
| CA2 (aa 1-142 of | MSHHWGYGKHNGPEHWHKDFPIAKGERQSPVDIDTHTAKYDPSLKPLSVSYD | 210820 | — |
| WT) | QATSLRILNNGHAFNVEFDDSQDKAVLKGGPLDGTYRLIQFHFHWGSLDGQGS | | |
| | EHTVDKKKYAAELHLVHWNTKYGDFGKAVQQPDGLAV | | |
| CA2 (aa 2-142 of | SHHWGYGKHNGPEHWHKDFPIAKGERQSPVDIDTHTAKYDPSLKPLSVSYDQ | 210821 | — |
| WT) | ATSLRILNNGHAFNVEFDDSQDKAVLKGGPLDGTYRLIQFHFHWGSLDGQGSE | | |
| | HTVDKKKYAAELHLVHWNTKYGDFGKAVQQPDGLAV | | |
| CA2 (aa 1-190 of | MSHHWGYGKHNGPEHWHKDFPIAKGERQSPVDIDTHTAKYDPSLKPLSVSYD | 210822 | — |
| WT) | QATSLRILNNGHAFNVEFDDSQDKAVLKGGPLDGTYRLIQFHFHWGSLDGQGS | | |
| | EHTVDKKKYAAELHLVHWNTKYGDFGKAVQQPDGLAVLGIFLKVGSAKPGL | | |
| | QKVVDVLDSIKTKGKSADFTNFDPRGLLPESLDY | | |
| CA2 (aa 2-190 of | SHHWGYGKHNGPEHWHKDFPIAKGERQSPVDIDTHTAKYDPSLKPLSVSYDQ | 210823 | — |
| WT) | ATSLRILNNGHAFNVEFDDSQDKAVLKGGPLDGTYRLIQFHFHWGSLDGQGSE | | |
| | HTVDKKKYAAELHLVHWNTKYGDFGKAVQQPDGLAVLGIFLKVGSAKPGLQ | | |
| | KVVDVLDSIKTKGKSADFTNFDPRGLLPESLDY | | |
| CA2 (aa 1-89 of | MSHHWGYGKHNGPEHWHKDFPIAKGERQSPVDIDTHTAKYDPSLKPLSVSYD | 210824 | — |
| WT) | QATSLRILNNGHAFNVEFDDSQDKAVLKGGPLDGTYR | | |
| CA2 (aa 2-89 of | SHHWGYGKHNGPEHWHKDFPIAKGERQSPVDIDTHTAKYDPSLKPLSVSYDQ | 210825 | — |
| WT) | ATSLRILNNGHAFNVEFDDSQDKAVLKGGPLDGTYR | | |
| CA2 (aa 1-243 of | MSHHWGYGKHNGPEHWHKDFPIAKGERQSPVDIDTHTAKYDPSLKPLSVSYD | 210826 | — |
| WT) | QATSLRILNNGHAFNVEFDDSQDKAVLKGGPLDGTYRLIQFHFHWGSLDGQGS | | |
| | EHTVDKKKYAAELHLVHWNTKYGDFGKAVQQPDGLAVLGIFLKVGSAKPGL | | |
| | QKVVDVLDSIKTKGKSADFTNFDPRGLLPESLDYWTYPGSLTTPPLLECVTWIV | | |
| | LKEPISVSSEQVLKFRKLNFNGEGEPEELMVDN | | |
| CA2 (aa 2-243 of | SHHWGYGKHNGPEHWHKDFPIAKGERQSPVDIDTHTAKYDPSLKPLSVSYDQ | 210827 | — |
| WT) | ATSLRILNNGHAFNVEFDDSQDKAVLKGGPLDGTYRLIQFHFHWGSLDGQGSE | | |
| | HTVDKKKYAAELHLVHWNTKYGDFGKAVQQPDGLAVLGIFLKVGSAKPGLQ | | |
| | KVVDVLDSIKTKGKSADFTNFDPRGLLPESLDYWTYPGSLTTPPLLECVTWIVL | | |
| | KEPISVSSEQVLKFRKLNFNGEGEPEELMVDN | | |
| CA2 (aa 1-166 of | MSHHWGYGKHNGPEHWHKDFPIAKGERQSPVDIDTHTAKYDPSLKPLSVSYD | 210828 | — |
| WT) | QATSLRILNNGHAFNVEFDDSQDKAVLKGGPLDGTYRLIQFHFHWGSLDGQGS | | |
| | EHTVDKKKYAAELHLVHWNTKYGDFGKAVQQPDGLAVLGIFLKVGSAKPGL | | |
| | QKVVDVLDSI | | |
| CA2 (aa 2-166 of | SHHWGYGKHNGPEHWHKDFPIAKGERQSPVDIDTHTAKYDPSLKPLSVSYDQ | 210782 | 210829 |
| WT) | ATSLRILNNGHAFNVEFDDSQDKAVLKGGPLDGTYRLIQFHFHWGSLDGQGSE | | |
| | HTVDKKKYAAELHLVHWNTKYGDFGKAVQQPDGLAVLGIFLKVGSAKPGLQ | | |
| | KVVDVLDSI | | |
| CA2 (aa 1-116 of | MSHHWGYGKHNGPEHWHKDFPIAKGERQSPVDIDTHTAKYDPSLKPLSVSYD | 210830 | — |
| WT) | QATSLRILNNGHAFNVEFDDSQDKAVLKGGPLDGTYRLIQFHFHWGSLDGQGS | | |
| | EHTVDKKKYAA | | |
| CA2 (aa 2-116 of | SHHWGYGKHNGPEHWHKDFPIAKGERQSPVDIDTHTAKYDPSLKPLSVSYDQ | 210831 | — |
| WT) | ATSLRILNNGHAFNVEFDDSQDKAVLKGGPLDGTYRLIQFHFHWGSLDGQGSE | | |
| | HTVDKKKYAA | | |
| CA2 (aa 1-152 of | MSHHWGYGKHNGPEHWHKDFPIAKGERQSPVDIDTHTAKYDPSLKPLSVSYD | 210832 | — |
| WT) | QATSLRILNNGHAFNVEFDDSQDKAVLKGGPLDGTYRLIQFHFHWGSLDGQGS | | |
| | EHTVDKKKYAAELHLVHWNTKYGDFGKAVQQPDGLAVLGIFLKVGSA | | |
| CA2 (aa 2-152 of | SHHWGYGKHNGPEHWHKDFPIAKGERQSPVDIDTHTAKYDPSLKPLSVSYDQ | 210833 | — |
| WT) | ATSLRILNNGHAFNVEFDDSQDKAVLKGGPLDGTYRLIQFHFHWGSLDGQGSE | | |
| | HTVDKKKYAAELHLVHWNTKYGDFGKAVQQPDGLAVLGIFLKVGSA | | |
| CA2 (aa 1-43 of WT) | MSHHWGYGKHNGPEHWHKDFPIAKGERQSPVDIDTHTAKYDPS | 210834 | — |
| CA2 (aa 2-43 of WT) | SHHWGYGKHNGPEHWHKDFPIAKGERQSPVDIDTHTAKYDPS | 210835 | — |

[0075] Any of the CA2 regions described herein may be utilized to generate CA2 DD. Table 6 provides CA2 DDs derived from CA2 regions.

TABLE 6
CA2 DDs derived from CA2 regions

| | | AA | NA |
|---|---|---|---|
| | | SEQ ID | SEQ ID |
| Description | AA SEQUENCE | NO. | NO. |
| CA2 (aa 2-142 of WT, G12E, A38V, | SHHWGYGKHNEPEHWHKDFPIAKGERQSPVDIDTHTVKYDPSL | 210762 | 210836 |
| A65V, G98V, S99H, D101M, | KPLSVSYDQATSLRILNNGHVFNVEFDDSQDKAVLKGGPLDGT | | |
| G102D, Q103K, G104V, S105Q, | YRLIQFHFHWVHLMDKVQSILWIKRNMLQNFTWFTGTPNMGIL | | |
| E106S, H107I, T108L, V109W, | GELCSNLMDWPF | | |
| D110I, K112R, K113N, Y114M, | | | |
| A115L, A116Q, E117N, L118F, | | | |
| H119T, L120W, V121F, H122T, | | | |
| W123G, N124T, T125P, K126N, | | | |
| Y127M, D129I, F130L, K132E, | | | |
| A133L, V134C, Q135S, Q136N, | | | |
| P137L, D138M, G139D, L140W, | | | |
| A141P, V142F) | | | |
| CA2 (aa 2-190 of WT, F20L, K45N, | SHHWGYGKHNGPEHWHKDLPIAKGERQSPVDIDTHTAKYDPSL | 210765 | 210837 |
| G104R, A116V, A173G) | NPLSVSYDQATSLRILNNGHAFNVEFDDSQDKAVLKGGPLDGT | | |
| | YRLIQFHFHWGSLDGQRSEHTVDKKKYAVELHLVHWNTKYGD | | |
| | FGKAVQQPDGLAVLGIFLKVGSAKPGLQKVVDVLDSIKTKGKS | | |
| | GDFTNFDPRGLLPESLDY | | |
| CA2 (aa 2-190 of WT, H17D, P30S, | SHHWGYGKHNGPEHWDKDFPIAKGERQSSVDIDTHTAKYDPSL | 210768 | 210838 |
| G81V, K132R, S151I, A152D, | KPLSVSYDQATSLRILNNGHAFNVEFDDSQDKAVLKVGPLDGT | | |
| A173G) | YRLIQFHFHWGSLDGQGSEHTVDKKKYAAELHLVHWNTKYGD | | |
| | FGRAVQQPDGLAVLGIFLKVGIDKPGLQKVVDVLDSIKTKGKSG | | |
| | DFTNFDPRGLLPESLDY | | |
| CA2 (aa 2-89 of WT, I59N) | SHHWGYGKHNGPEHWHKDFPIAKGERQSPVDIDTHTAKYDPSL | 210771 | 210839 |
| | KPLSVSYDQATSLRNLNNGHAFNVEFDDSQDKAVLKGGPLDGT | | |
| | YR | | |
| CA2 (aa 2-243 of WT, T35I, | SHHWGYGKHNGPEHWHKDFPIAKGERQSPVDIDIHTAKYDPSL | 210774 | 210840 |
| Y114H, P154L, D161V, P200A, | KPLSVSYDQATSLRILNNGHAFNVEFDDSQDKAVLKGGPLDGT | | |
| Q221R, F225L, E233D) | YRLIQFHFHWGSLDGQGSEHTVDKKKHAAELHLVHWNTKYGD | | |
| | FGKAVQQPDGLAVLGIFLKVGSAKLGLQKVVVVLDSIKTKGKS | | |
| | ADFTNFDPRGLLPESLDYWTYPGSLTTAPLLECVTWIVLKEPI | | |
| | SVSSERVLKLRKLNFNGDGEPEELMVDN | | |
| CA2 (aa 2-189 of WT, S105L, | SHHWGYGKHNGPEHWHKDFPIAKGERQSPVDIDTHTAKYDPSL | 210777 | 210841 |
| L140V, G155C) | KPLSVSYDQATSLRILNNGHAFNVEFDDSQDKAVLKGGPLDGT | | |
| | YRLIQFHFHWGSLDGQGLEHTVDKKKYAAELHLVHWNTKYGD | | |
| | FGKAVQQPDGVAVLGIFLKVGSAKPCLQKVVDVLDSIKTKGKS | | |
| | ADFTNFDPRGLLPESLD | | |
| CA2 (aa 2-243 of WT, T35I, | SHHWGYGKHNGPEHWHKDFPIAKGERQSPVDIDIHTAKYDPSL | 210780 | 210842 |
| Y114H, P154L, D161V, P200A, | KPLSVSYDQATSLRILNNGHAFNVEFDDSQDKAVLKGGPLDGT | | |
| F225L, E233D) | YRLIQFHFHWGSLDGQGSEHTVDKKKHAAELHLVHWNTKYGD | | |
| | FGKAVQQPDGLAVLGIFLKVGSAKLGLQKVVVVLDSIKTKGKS | | |
| | ADFTNFDPRGLLPESLDYWTYPGSLTTAPLLECVTWIVLKEPI | | |
| | SVSSEQVLKLRKLNFNGDGEPEELMVDN | | |
| CA2 (aa 2-116 of WT, P13H) | SHHWGYGKHNGHEHWHKDFPIAKGERQSPVDIDTHTAKYDPSL | 210793 | 210843 |
| | KPLSVSYDQATSLRILNNGHAFNVEFDDSQDKAVLKGGPLDGT | | |
| | YRLIQFHFHWGSLDGQGSEHTVDKKKYAA | | |
| CA2 (aa 2-152 of WT, A133T, | SHHWGYGKHNGPEHWHKDFPIAKGERQSPVDIDTHTAKYDPSL | 210799 | 210844 |
| L147F, K148E, V149G, G150W, | KPLSVSYDQATSLRILNNGHAFNVEFDDSQDKAVLKGGPLDGT | | |
| S151Q, A152R) | YRLIQFHFHWGSLDGQGSEHTVDKKKYAAELHLVHWNTKYGD | | |
| | FGKTVQQPDGLAVLGIFFEGWQR | | |
| CA2 (aa 2-152 of WT, F20L, K45N, | SHHWGYGKHNGPEHWHKDLPIAKGERQSPVDIDTHTAKYDPSL | 210808 | 210845 |
| G104R, A116V, L147F, K148E, | NPLSVSYDQATSLRILNNGHAFNVEFDDSQDKAVLKGGPLDGT | | |
| V149G, G150W, S151Q, A152R) | YRLIQFHFHWGSLDGQRSEHTVDKKKYAVELHLVHWNTKYGD | | |
| | FGKAVQQPDGLAVLGIFFEGWQR | | |
| CA2 (aa 2-43 of WT, N11K, G12D, | SHHWGYGKHKDLNTGIRTSPLPRESASPLLTSTLIQPSMTLP | 210811 | 210846 |
| P13L, E14N, H15T, W16G, H17I, | | | |
| K18R, D19T, F20S, I22L, A23P, | | | |
| K24R, G25E, E26S, R27A, Q28S, | | | |
| S29P, P30L, V31L, D32T, I33S, | | | |
| D34T, T35L, H36I, T37Q, A38P, | | | |
| K39S, Y40M, D41T, P42L, S43P) | | | |

[0076] In some embodiments, DDs derived from CA2 may include one, two, three, four, five, or more of the mutations described in the previous Tables.

[0077] In some embodiments, the mutation may be a conserved (with similar physicochemical properties as the amino acid at the mutation site), a semi conserved (e.g., negatively to positively charge amino acid) or a non-conserved (amino acid with different physicochemical properties than the amino acid at the mutation site). In some embodiments, the amino acid lysine may be mutated to glutamic acid or arginine; the amino acid phenylalanine may be mutated to leucine; the amino acid leucine may be mutated to phenylalanine; or the amino acid asparagine may be mutated to serine. Regions or portions or domains of wild type proteins may be utilized as SREs/DDs in whole or in part. They may be combined or rearranged to create new peptides, proteins, regions or domains of which any may be used as SREs/DDs or the starting point for the design of further SREs and/or DDs.

[0078] The destabilization domains described herein may also include amino acid and nucleotide substitutions that do not affect stability, including conservative, non-conservative substitutions and or polymorphisms. In some embodiments, CA2 DDs described herein may also be fragments of the above destabilizing domains, including fragments containing variant amino acid sequences. Preferred fragments are unstable in the absence of the stimulus and stabilized upon addition of the stimulus. Preferred fragments retain the ability to interact with the stimulus with similar efficiency as the DDs described herein.

[0079] In one embodiment, the SRE comprises a region of the CA2 protein. The region of the CA2 protein may be 10, 11, 12, 13, 14, 15, 16, 17, 18, 19, 20, 21, 22, 23, 24, 25, 26, 27, 28, 29, 30, 31, 32, 33, 34, 35, 36, 37, 38, 39, 40, 41, 42, 43, 44, 45, 46, 47, 48, 49, 50, 51, 52, 53, 54, 55, 56, 57, 58, 59, 60, 61, 62, 63, 64, 65, 66, 67, 68, 69, 70, 71, 72, 73, 74, 75, 76, 77, 78, 79, 80, 81, 82, 83, 84, 85, 86, 87, 88, 89, 90, 91, 92, 93, 94, 95, 96, 97, 98, 99, 100, 101, 102, 103, 104, 105, 106, 107, 108, 109, 110, 111, 112, 113, 114, 115, 116, 117, 118, 119, 120, 121, 122, 123, 124, 125, 126, 127, 128, 129, 130, 131, 132, 133, 134, 135, 136, 137, 138, 139, 140, 141, 142, 143, 144, 145, 146, 147, 148, 149, 150, 151, 152, 153, 154, 155, 156, 157, 158, 159, 160, 161, 162, 163, 164, 165, 166, 167, 168, 169, 170, 171, 172, 173, 174, 175, 176, 177, 178, 179, 180, 181, 182, 183, 184, 185, 186, 187, 188, 189, 190, 191, 192, 193, 194, 195, 196, 197, 198, 199, 200, 201, 202, 203, 204, 205, 206, 207, 208, 209, 210, 211, 212, 213, 214, 215, 216, 217, 218, 219, 220, 221, 222, 223, 224, 225, 226, 227, 228, 229, 230, 231, 232, 233, 234, 235, 236, 237, 238, 239, 240, 241, 242, 243, 244, 245, 246, 247, 248, 249, 250, 251, 252, 253, 254, 255, 256, 257, 258, 259, 260 or more than 260 amino acids in length. The region of the parent protein may be 5-50, 25-75, 50-100, 75-125, 100-150, 125-175, 150-200, 175-225, 200-250, 225-260 amino acids in length.

[0080] In some embodiments, CA2 DDs described herein may include one or more mutations that are relative to Uniprot ID: P00918 (SEQ ID NO. 11717). Those mutations may include, but are not limited to, A115L, A116Q, A116V, A133L, A133T, A141P, A152D, A152L, A152R, A173C, A173G, A173L, A173T, A23P, A247L, A247S, A257L, A257S, A38P, A38V, A54Q, A54V, A54X, A65L, A65N, A65V, A77I, A77P, A77Q, C205M, C205R, C205V, C205W, C205Y, D101G, D101M, D110I, D129I, D138G, D138M, D138N, D161*, D161M, D161V, D164G, D164I, D174*, D174T, D179E, D179I, D179R, D189G, D189I, D19T, D19V, D242G, D242T, D32T, D34T, D41T, D52I, D52L, D71F, D71G, D71K, D71M, D71S, D71Y, D72I, D72S, D72T, D72X, D75T, D75V, D85M, E106D, E106G, E106S, E117*, E117N, E14N, E186*, E186N, E204A, E204D, E204G, E204N, E213*, E213G, E213N, E220K, E220R, E220S, E233D, E233G, E233R, E235*, E235G, E235N, E237K, E237R, E238*, E238N, E238R, E26S, E69D, E69K, E69S, F130L, F146V, F175I, F175L, F175S, F178L, F178S, F20L, F20S, F225I, F225L, F225S, F225Y, F230I, F230L, F230S, F259L, F259S, F66S, F70I, F70L, F95Y, G102D, G104R, G104V, G128R, G12D, G12E, G131E, G131R, G131W, G139D, G144D, G144V, G150A, G150S, G150W, G155A, G155C, G155D, G155S, G170A, G170D, G182A, G182W, G195A, G195R, G232R, G232W, G234L, G234V, G25E, G63D, G63V, G81E, G81V, G82D, G86A, G86D, G98V, H107I, H107Q, H119T, H119Y, H122T, H122Y, H15L, H15T, H15Y, H17D, H17I, H36I, H36Q, H64M, H94T, H96T, I145F, I145M, I166H, I166L, I209D, I209L, I215H, I215S, I22L, I255N, I255S, I33S, I59F, I59N, I59S, I91F, K111E, K111N, K112R, K113I, K113N, K126N, K132E, K132R, K148E, K148R, K153*, K153N, K158E, K158N, K167*, K169N, K169R, K171Q, K171R, K18R, K212N, K212Q, K212R, K212W, K224E, K224N, K227*, K227N, K24R, K251E, K251R, K256Q, K260F, K260L, K260Q, K39S, K45N, K45S, K80M, K80R, L118F, L120W, L140V, L140W, L143*, L147*, L147F, L156F, L156H, L156P, L156Q, L163A, L163W, L183P, L183S, L184F, L184P, L188P, L188W, L197*, L197M, L197P, L197R, L197T, L202F, L202H, L202I, L202P, L202R, L202S, L203P, L203S, L203W, L211*, L211A, L211S, L223*, L223I, L223V, L228F, L228H, L228T, L239*, L239F, L239T, L250*, L250P, L250T, L44*, L44M, L47C, L47V, L57*, L57X, L60S, L79F, L79S, L84W, L90*, L90V, M240D, M240L, M240R, M240W, N11D, N11K, N124T, N177*, N177T, N229*, N229T, N231D, N231F, N231K, N231L, N231M, N231Q, N231T, N243Q, N243T, N252E, N252T, N61R, N61T, N61Y, N62K, N62M, N67D, N67T, P137L, P13A, P13H, P13L, P13S, P154L, P154R, P154T, P180L, P180S, P185L, P185S, P185V, P194Q, P200A, P200L, P200S, P200T, P201A, P201L, P201R, P201S, P214T, P236L, P236T, P246L, P246Q, P249A, P249F, P249H, P249I, P249X, P30L, P30S, P42L, P83A, Q103K, Q135S, Q136N, Q157R, Q157S, Q221A, Q221R, Q248F, Q248L, Q248S, Q254A, Q254K, Q28S, Q53H, Q53K, Q53N, Q74R, Q92H, Q92S, R181H, R181S, R181V, R226H, R226P, R226V, R245A, R253G, R253Q, R27A, R58G, R89D, R89F, R89I, R89X, R89Y, S105L, S105Q, S151A, S151I, S151Q, S165F, S165P, S172E, S172V, S187I, S187P, S196H, S196L, S216A, S216Q, S218A, S218Q, S219A, S219Q, S258F, S258P, S29C, S29P, S43P, S43T, S48L, S50P, S56F, S56N, S56P, S56X, S73L, S73N, S73X, S99H, T108L, T125I, T125P, T168K, T168N, T168Q, T176H, T176L, T192D, T192F, T192I, T192N, T192P, T192X, T198D, T198I, T198P, T199A, T199H, T199P, T207D, T207I, T207P, T207S, T35I, T35L, T37Q, T55L, T87L, V109M, V109W, V121F, V134C, V134F, V142F, V149G, V149L, V159L, V159S, V160C, V160L, V162A, V162C, V206*, V206C, V206M, V210C, V217L, V217R, V217S, V222A, V222C, V222G, V241G, V241W, V241X, V31L, V49F, V68L, V68W, V78C, W123G, W123R, W16G, W191*, W191G, W191L, W208G, W208L, W208S, W244*, W244G, W244L, W97C, W97G, Y114H, Y114M, Y127M, Y190*, Y190L, Y190T, Y193C, Y193F, Y193I, Y193L, Y193T, Y193V, Y193X, Y40M, Y51F, Y51M, Y51T, Y51X, Y88T, K9N, S29A. As used herein “*” indicates the translation of the stop codon and X indicates any amino acid.

[0081] In one embodiment, a CA2 DD described herein comprises a mutation that is relative to Uniprot ID: P00918 (SEQ ID NO. 11717), selected from E106D, G63D, H122Y, I59N, L156H, L183S, L197P, S56F, S56N, W208S, Y193I, and Y51T.

[0082] In some embodiments, CA2 DDs described herein may include mutations that are relative to Uniprot ID: P00918 (SEQ ID NO. 11717). Those mutations may include, but are not limited to, CA2 (aa 2-260 of WT, R27L, H122Y), CA2 (aa 2-260 of WT, T87I, H122Y), CA2 (aa 2-260 of WT, H122Y, N252D), CA2 (aa 2-260 of WT, D72F, V241F), CA2 (aa 2-260 of WT, V241F, P249L), CA2 (aa 2-260 of WT, D72F, P249L), CA2 (aa 2-260 of WT, D71L, L250R), CA2 (aa 2-260 of WT, D72F, P249F), CA2 (aa 2-260 of WT, T55K, G63N, Q248N), CA2 (aa 2-260 of WT, L156H, A257de1, S258de1, F259de1, K260de1), CA2 (aa 2-260 of WT, L156H, S2de1, H3de1, H4de1, W5de1), CA2 (aa 2-260 of WT, W4Y, L156H), CA2 (aa 2-260 of WT, L156H, G234de1, E235de1, P236de1), CA2 (aa 2-260 of WT, L156H, F225L), CA2 (aa 2-260 of WT, D70N, D74N, D100N, L156H), (CA2 (aa 2-260 of WT, 159N, G102R)(SEQ ID NO. 210598), CA2 (aa 2-260 of WT, G63D, E69V, N231I)(SEQ ID NO. 210748), CA2 (aa 2-260 of WT, R27L, T87I, H122Y, N252D)(SEQ ID NO. 210702), CA2 (aa 2-260 of WT, D72F, V241F, P249L)(SEQ ID NO. 210503), CA2 (aa 2-260 of WT, D71L, T87N, L250R)(SEQ ID NO. 210510), CA2 (aa 2-260 of WT, L156H, S172C, F178Y, E186D)(SEQ ID NO. 210756), CA2 (aa 2-260 of WT, D71F, N231F)(SEQ ID NO. 210505), CA2 (aa 2-260 of WT, A77I, P249F)(SEQ ID NO. 210514), CA2 (aa 2-260 of WT, D71K, P249H)(SEQ ID NO. 210516), CA2 (aa 2-260 of WT, D72F, P249H)(SEQ ID NO. 210518), CA2 (aa 2-260 of WT, Q53N, N61Y)(SEQ ID NO. 210521), CA2 (aa 2-260 of WT, E106D, C205S)(SEQ ID NO. 210523), CA2 (aa 2-260 of WT, C205S, W208S)(SEQ ID NO. 210525), CA2 (aa 2-260 of WT, S73N, R89Y)(SEQ ID NO. 210532), CA2 (aa 2-260 of WT, D71K, T192F)(SEQ ID NO. 210534), CA2 (aa 2-260 of WT, Y193L, K260L)(SEQ ID NO. 210540), CA2 (aa 2-260 of WT, D71F, V241F, P249L)(SEQ ID NO. 210544), CA2 (aa 2-260 of WT, L147F, Q248F)(SEQ ID NO. 210548), CA2 (aa 2-260 of WT, D52I, S258P)(SEQ ID NO. 210550), CA2 (aa 2-260 of WT, D72S, T192N)(SEQ ID NO. 210552), CA2 (aa 2-260 of WT, D179E, T192I)(SEQ ID NO. 210554), CA2 (aa 2-260 of WT, S56N, Q103K)(SEQ ID NO. 210558), CA2 (aa 2-260 of WT, D71Y, Q248L)(SEQ ID NO. 210560), CA2 (aa 2-260 of WT, S73N, R89F)(SEQ ID NO. 210562), CA2 (aa 2-260 of WT, D71K, N231L, E235G, L239F)(SEQ ID NO. 210564), CA2 (aa 2-260 of WT, D72F, P249I)(SEQ ID NO. 210568), CA2 (aa 2-260 of WT, D72X, V241X, P249X)(SEQ ID NO. 210572), CA2 (aa 2-260 of WT, A54X, S56X, L57X, T192X)(SEQ ID NO. 210574), CA2 (aa 2-260 of WT, Y193V, K260F)(SEQ ID NO. 210576), CA2 (aa 2-260 of WT, G63D, M240L)(SEQ ID NO. 210578), CA2 (aa 2-260 of WT, V134F, L228F)(SEQ ID NO. 210580), CA2 (aa 2-260 of WT, D71G, N231K)(SEQ ID NO. 210582), CA2 (aa 2-260 of WT, S56F, D71S)(SEQ ID NO. 210584), CA2 (aa 2-260 of WT, D52L, G128R, Q248F)(SEQ ID NO. 210586), CA2 (aa 2-260 of WT, S73X, R89X)(SEQ ID NO. 210588), CA2 (aa 2-260 of WT, Y51X, D72X, V241X, P249X)(SEQ ID NO. 210592), CA2 (aa 2-260 of WT, D72I, W97C)(SEQ ID NO. 210594), CA2 (aa 2-260 of WT, D71K, T192F, N231F)(SEQ ID NO. 210596), CA2 (aa 2-260 of WT, H36Q, S43T, Y51F, N67D, G131W, R226H)(SEQ ID NO. 210698), CA2 (aa 2-260 of WT, F70I, F146V)(SEQ ID NO. 210700), CA2 (aa 2-260 of WT, K45N, V68L, H119Y, K169R, D179E)(SEQ ID NO. 210704), CA2 (aa 2-260 of WT, H15L, A54V, K111E, E220K, F225I)(SEQ ID NO. 210706), CA2 (aa 2-260 of WT, P13S, P83A, D101G, K111N, F230I)(SEQ ID NO. 210708), CA2 (aa 2-260 of WT, G63D, W123R, E220K)(SEQ ID NO. 210712), CA2 (aa 2-260 of WT, N11D, E69K, G86D, V109M, K113I, T125I, D138G, G155S)(SEQ ID NO. 210714), CA2 (aa 2-260 of WT, I59N, G102R, A173T)(SEQ ID NO. 210716), CA2 (aa 2-260 of WT, L79F, P180S)(SEQ ID NO. 210718), CA2 (aa 2-260 of WT, A77P, G102R, D138N)(SEQ ID NO. 210724), CA2 (aa 2-260 of WT, F20L, K45N, G63D, E69V, N231I)(SEQ ID NO. 210726), CA2 (aa 2-260 of WT, T199N, L202P, L228F)(SEQ ID NO. 210728), CA2 (aa 2-260 of WT, K9N, H122Y, T168K)(SEQ ID NO. 210730), CA2 (aa 2-260 of WT, Q53H, L90V, Q92H, G131E)(SEQ ID NO. 210732), CA2 (aa 2-260 of WT, L44M, L47V, N62K, E69D)(SEQ ID NO. 210734), CA2 (aa 2-260 of WT, D75V, K169N, F259L)(SEQ ID NO. 210738), CA2 (aa 2-260 of WT, T207S, V222A, N231D)(SEQ ID NO. 210740), CA2 (aa 2-260 of WT, I59F, V206M, G232R)(SEQ ID NO. 210742), CA2 (aa 2-260 of WT, P13A, A133T)(SEQ ID NO. 210744), CA2 (aa 2-260 of WT, I59N, R89I)(SEQ ID NO. 210750), CA2 (aa 2-260 of WT, A65N, G86D, G131R, G155D, K158N, V162A, G170D, P236L)(SEQ ID NO. 210752), CA2 (aa 2-260 of WT, G12R, H15Y, D19V)(SEQ ID NO. 210754), CA2 (aa 2-260 of WT, A65V, F95Y, E106G, H107Q, I145M, F175I)(SEQ ID NO. 210758), and/or CA2 (aa 2-260 of WT, G63D, E69V, N231I)(SEQ ID NO. 210851 or 210847).

[0083] In one embodiment, a CA2 DD described herein comprises multiple mutations that are relative to Uniprot ID: P00918 (SEQ ID NO. 11717), selected from CA2 (aa 2-260 of WT, R27L, H122Y), CA2 (aa 2-260 of WT, T87I, H122Y), CA2 (aa 2-260 of WT, H122Y, N252D), CA2 (aa 2-260 of WT, D72F, V241F), CA2 (aa 2-260 of WT, V241F, P249L), CA2 (aa 2-260 of WT, D72F, P249L), CA2 (aa 2-260 of WT, D71L, L250R), CA2 (aa 2-260 of WT, D72F, P249F), CA2 (aa 2-260 of WT, T55K, G63N, Q248N), CA2 (aa 2-260 of WT, L156H, A257de1, S258de1, F259de1, K260de1), CA2 (aa 2-260 of WT, L156H, S2de1, H3de1, H4de1, W5de1), CA2 (aa 2-260 of WT, W4Y, L156H), CA2 (aa 2-260 of WT, L156H, G234de1, E235de1, P236de1), CA2 (aa 2-260 of WT, L156H, F225L), CA2 (aa 2-260 of WT, D70N, D74N, D100N, L156H), (CA2 (aa 2-260 of WT, I59N, G102R)(SEQ ID NO. 210598), CA2 (aa 2-260 of WT, G63D, E69V, N231I)(SEQ ID NO. 210748), CA2 (aa 2-260 of WT, R27L, T87I, H122Y, N252D)(SEQ ID NO. 210702), CA2 (aa 2-260 of WT, D72F, V241F, P249L)(SEQ ID NO. 210503), CA2 (aa 2-260 of WT, D71L, T87N, L250R)(SEQ ID NO. 210510), CA2 (aa 2-260 of WT, L156H, S172C, F178Y, E186D)(SEQ ID NO. 210756), CA2 (aa 2-260 of WT, A77I, P249F)(SEQ ID NO. 210514), CA2 (aa 2-260 of WT, E106D, C205S)(SEQ ID NO. 210523), CA2 (aa 2-260 of WT, C205S, W208S)(SEQ ID NO. 210525), CA2 (aa 2-260 of WT, S73N, R89Y)(SEQ ID NO. 210532), CA2 (aa 2-260 of WT, D71K, T192F)(SEQ ID NO. 210534), CA2 (aa 2-260 of WT, S73N, R89F)(SEQ ID NO. 210562), CA2 (aa 2-260 of WT, G63D, M240L)(SEQ ID NO. 210578), CA2 (aa 2-260 of WT, V134F, L228F)(SEQ ID NO. 210580), and/or CA2 (aa 2-260 of WT, S56F, D71S)(SEQ ID NO. 210584).

[0084] In some embodiments, the CA2 may be derived from carbonic anhydrases of Homo sapiens. In some embodiments, the CA2 DDs described herein may have at least 40%, 45%, 50%, 55%, 60%, 65%, 70%, 75%, 80%, 85%, 90%, 91%, 92%, 93%, 94%, 95%, 96%, 97%, 98%, 99% but less than 100% sequence identity to a particular reference polynucleotide or polypeptide as determined by sequence alignment programs and parameters described herein and known to those skilled in the art. In some embodiments the reference polypeptide may be SEQ ID NO. 11717. Tools for alignment may include those of the BLAST suite (Stephen F. Altschul, et al. (1997), “Gapped BLAST and PSI-BLAST: a new generation of protein database search programs”, Nucleic Acids Res. 25:3389-3402).

[0085] In some embodiments, the CA2 DDs may be derived from carbonic anhydrases of species other than Homo sapiens. In some embodiments, the CA2 DDs may be derived from carbonic anhydrases of species such but not limited to Acinonyx jubatus, Ailuropoda melanoleuca, Balaenoptera acutorostrata scammoni, Callithrix jacchus, Callorhinus ursinus, Camelus bactrianus, Camelus dromedarius, Camelus ferns, Canis lupus dingo, Canis lupus familiaris, Carlito syrichta, Castor canadensis, Cebus capucinus imitator, Ceratotherium simum, Cercocebus atys, Chinchilla lanigera, Chlorocebus sabaeus, Colobus angolensis palliatus, Delphinapterus leucas, Dipodomys ordii, Enhydralutris kenyoni, Equus asinus, Equus caballus, Equus przewalskii, Erinaceus europaeus, Eumetopias jubatus, Felis catus, Galeopterus variegatus, Gorilla, Homo sapiens, Ictidomys tridecemlineatus, Jaculus, Lagenorhynchus obliquidens, Lemur catta, Leptonychotes weddellii, Lipotes vexillifer, Loxodonta africana, Macaca fascicularis, Macaca mulatta, Macaca nemestrina, Mandrillus leucophaeus, Manis javanica, Marmotaflaviventris, Marmota, Microcebus murinus, Mus caroli, Mus musculus, Mus pahari, Mustela putorius furo, Nannospalax galili, Neomonachus schauinslandi, Neophocaena asiaeorientalis, Nomascus leucogenys, Odobenus rosmarus divergens, Orcinus orca, Oryctolagus cuniculus, Otolemur garnettii, Pan paniscus, Pan troglodytes, Panthera pardus, Panthera tigris altaica, Papio anubis, Physeter catodon, Piliocolobus tephrosceles, Pongo abelii, Propithecus coquereli, Puma concolor, Rhinopithecus bieti, Rhinopithecus roxellana, Saimiri boliviensis, Sus scrofa, Theropithecus gelada, Trichechus manatus latirostris, Tupaia chinensis, Tursiops truncatus, Urocitellus parryii, Ursus arctos horribilis, Ursus maritimus, Vulpes, and/or Zalophus californianus.

[0086] The SRE described herein may include CA2 DDs which include but are not limited to one, two, three or more mutations such as, but not limited to, A115L, A116Q, A116V, A133L, A133T, A141P, A152D, A152L, A152R, A173C, A173G, A173L, A173T, A23P, A247L, A247S, A257L, A257S, A38P, A38V, A54Q, A54V, A54X, A65L, A65N, A65V, A77I, A77P, A77Q, C205M, C205R, C205V, C205W, C205Y, D101G, D101M, D110I, D129I, D138G, D138M, D138N, D161*, D161M, D161V, D164G, D164I, D174*, D174T, D179E, D179I, D179R, D189G, D189I, D19T, D19V, D242G, D242T, D32T, D34T, D41T, D52I, D52L, D71F, D71G, D71K, D71M, D71S, D71Y, D72I, D72S, D72T, D72X, D75T, D75V, D85M, E106D, E106G, E106S, E117*, E117N, E14N, E186*, E186N, E204A, E204D, E204G, E204N, E213*, E213G, E213N, E220K, E220R, E220S, E233D, E233G, E233R, E235*, E235G, E235N, E237K, E237R, E238*, E238N, E238R, E26S, E69D, E69K, E69S, F130L, F146V, F175I, F175L, F175S, F178L, F178S, F20L, F20S, F225I, F225L, F225S, F225Y, F230I, F230L, F230S, F259L, F259S, F66S, F70I, F70L, F95Y, G102D, G104R, G104V, G128R, G12D, G12E, G131E, G131R, G131W, G139D, G144D, G144V, G150A, G150S, G150W, G155A, G155C, G155D, G155S, G170A, G170D, G182A, G182W, G195A, G195R, G232R, G232W, G234L, G234V, G25E, G63D, G63V, G81E, G81V, G82D, G86A, G86D, G98V, H107I, H107Q, H119T, H119Y, H122T, H122Y, H15L, H15T, H15Y, H17D, H17I, H36I, H36Q, H64M, H94T, H96T, I145F, I145M, I166H, I166L, I209D, I209L, I215H, I215S, I22L, I255N, I255S, I33S, I59F, I59N, I59S, I91F, K111E, K111N, K112R, K113I, K113N, K126N, K132E, K132R, K148E, K148R, K153*, K153N, K158E, K158N, K167*, K169N, K169R, K171Q, K171R, K18R, K212N, K212Q, K212R, K212W, K224E, K224N, K227*, K227N, K24R, K251E, K251R, K256Q, K260F, K260L, K260Q, K39S, K45N, K45S, K80M, K80R, L118F, L120W, L140V, L140W, L143*, L147*, L147F, L156F, L156H, L156P, L156Q, L163A, L163W, L183P, L183S, L184F, L184P, L188P, L188W, L197*, L197M, L197P, L197R, L197T, L202F, L202H, L202I, L202P, L202R, L202S, L203P, L203S, L203W, L211*, L211A, L211S, L223*, L223I, L223V, L228F, L228H, L228T, L239*, L239F, L239T, L250*, L250P, L250T, L44*, L44M, L47C, L47V, L57*, L57X, L60S, L79F, L79S, L84W, L90*, L90V, M240D, M240L, M240R, M240W, N11D, N11K, N124T, N177*, N177T, N229*, N229T, N231D, N231F, N231K, N231L, N231M, N231Q, N231T, N243Q, N243T, N252E, N252T, N61R, N61T, N61Y, N62K, N62M, N67D, N67T, P137L, P13A, P13H, P13L, P13S, P154L, P154R, P154T, P180L, P180S, P185L, P185S, P185V, P194Q, P200A, P200L, P200S, P200T, P201A, P201L, P201R, P201S, P214T, P236L, P236T, P246L, P246Q, P249A, P249F, P249H, P249I, P249X, P30L, P30S, P42L, P83A, Q103K, Q135S, Q136N, Q157R, Q157S, Q221A, Q221R, Q248F, Q248L, Q248S, Q254A, Q254K, Q28S, Q53H, Q53K, Q53N, Q74R, Q92H, Q92S, R181H, R181S, R181V, R226H, R226P, R226V, R245A, R253G, R253Q, R27A, R58G, R89D, R89F, R89I, R89X, R89Y, S105L, S105Q, S151A, S151I, S151Q, S165F, S165P, S172E, S172V, S187I, S187P, S196H, S196L, S216A, S216Q, S218A, S218Q, S219A, S219Q, S258F, S258P, S29C, S29P, S43P, S43T, S48L, S50P, S56F, S56N, S56P, S56X, S73L, S73N, S73X, S99H, T108L, T125I, T125P, T168K, T168N, T168Q, T176H, T176L, T192D, T192F, T192I, T192N, T192P, T192X, T198D, T198I, T198P, T199A, T199H, T199P, T207D, T207I, T207P, T207S, T35I, T35L, T37Q, T55L, T87L, V109M, V109W, V121F, V134C, V134F, V142F, V149G, V149L, V159L, V159S, V160C, V160L, V162A, V162C, V206*, V206C, V206M, V210C, V217L, V217R, V217S, V222A, V222C, V222G, V241G, V241W, V241X, V31L, V49F, V68L, V68W, V78C, W123G, W123R, W16G, W191*, W191G, W191L, W208G, W208L, W208S, W244*, W244G, W244L, W97C, W97G, Y114H, Y114M, Y127M, Y190*, Y190L, Y190T, Y193C, Y193F, Y193I, Y193L, Y193T, Y193V, Y193X, Y40M, Y51F, Y51M, Y51T, Y51X, Y88T, K9N, S29A.

[0087] In one embodiment, an SRE described herein may include a CA2 DD which comprises a mutation selected from E106D, G63D, H122Y, I59N, L156H, L183S, L197P, S56F, S56N, W208S, Y193I, and Y51T.

[0088] The SRE described herein may include CA2 DDs which include mutations such as, but not limited to, CA2 (aa 2-260 of WT, R27L, H122Y), CA2 (aa 2-260 of WT, T87I, H122Y), CA2 (aa 2-260 of WT, H122Y, N252D), CA2 (aa 2-260 of WT, D72F, V241F), CA2 (aa 2-260 of WT, V241F, P249L), CA2 (aa 2-260 of WT, D72F, P249L), CA2 (aa 2-260 of WT, D71L, L250R), CA2 (aa 2-260 of WT, D72F, P249F), CA2 (aa 2-260 of WT, T55K, G63N, Q248N), CA2 (aa 2-260 of WT, L156H, A257de1, S258de1, F259de1, K260de1), CA2 (aa 2-260 of WT, L156H, S2de1, H3de1, H4de1, W5de1), CA2 (aa 2-260 of WT, W4Y, L156H), CA2 (aa 2-260 of WT, L156H, G234de1, E235de1, P236de1), CA2 (aa 2-260 of WT, L156H, F225L), CA2 (aa 2-260 of WT, D70N, D74N, D100N, L156H), (CA2 (aa 2-260 of WT, I59N, G102R)(SEQ ID NO. 210598), CA2 (aa 2-260 of WT, G63D, E69V, N231I)(SEQ ID NO. 210748), CA2 (aa 2-260 of WT, R27L, T87I, H122Y, N252D)(SEQ ID NO. 210702), CA2 (aa 2-260 of WT, D72F, V241F, P249L)(SEQ ID NO. 210503), CA2 (aa 2-260 of WT, D71L, T87N, L250R)(SEQ ID NO. 210510), CA2 (aa 2-260 of WT, L156H, S172C, F178Y, E186D)(SEQ ID NO. 210756), CA2 (aa 2-260 of WT, D71F, N231F)(SEQ ID NO. 210505), CA2 (aa 2-260 of WT, A77I, P249F)(SEQ ID NO. 210514), CA2 (aa 2-260 of WT, D71K, P249H)(SEQ ID NO. 210516), CA2 (aa 2-260 of WT, D72F, P249H)(SEQ ID NO. 210518), CA2 (aa 2-260 of WT, Q53N, N61Y)(SEQ ID NO. 210521), CA2 (aa 2-260 of WT, E106D, C205S)(SEQ ID NO. 210523), CA2 (aa 2-260 of WT, C205S, W208S)(SEQ ID NO. 210525), CA2 (aa 2-260 of WT, S73N, R89Y)(SEQ ID NO. 210532), CA2 (aa 2-260 of WT, D71K, T192F)(SEQ ID NO. 210534), CA2 (aa 2-260 of WT, Y193L, K260L)(SEQ ID NO. 210540), CA2 (aa 2-260 of WT, D71F, V241F, P249L)(SEQ ID NO. 210544), CA2 (aa 2-260 of WT, L147F, Q248F)(SEQ ID NO. 210548), CA2 (aa 2-260 of WT, D52I, S258P)(SEQ ID NO. 210550), CA2 (aa 2-260 of WT, D72S, T192N)(SEQ ID NO. 210552), CA2 (aa 2-260 of WT, D179E, T192I)(SEQ ID NO. 210554), CA2 (aa 2-260 of WT, S56N, Q103K)(SEQ ID NO. 210558), CA2 (aa 2-260 of WT, D71Y, Q248L)(SEQ ID NO. 210560), CA2 (aa 2-260 of WT, S73N, R89F)(SEQ ID NO. 210562), CA2 (aa 2-260 of WT, D71K, N231L, E235G, L239F)(SEQ ID NO. 210564), CA2 (aa 2-260 of WT, D72F, P249I)(SEQ ID NO. 210568), CA2 (aa 2-260 of WT, D72X, V241X, P249X)(SEQ ID NO. 210572), CA2 (aa 2-260 of WT, A54X, S56X, L57X, T192X)(SEQ ID NO. 210574), CA2 (aa 2-260 of WT, Y193V, K260F)(SEQ ID NO. 210576), CA2 (aa 2-260 of WT, G63D, M240L)(SEQ ID NO. 210578), CA2 (aa 2-260 of WT, V134F, L228F)(SEQ ID NO. 210580), CA2 (aa 2-260 of WT, D71G, N231K)(SEQ ID NO. 210582), CA2 (aa 2-260 of WT, S56F, D71S)(SEQ ID NO. 210584), CA2 (aa 2-260 of WT, D52L, G128R, Q248F)(SEQ ID NO. 210586), CA2 (aa 2-260 of WT, S73X, R89X)(SEQ ID NO. 210588), CA2 (aa 2-260 of WT, Y51X, D72X, V241X, P249X)(SEQ ID NO. 210592), CA2 (aa 2-260 of WT, D72I, W97C)(SEQ ID NO. 210594), CA2 (aa 2-260 of WT, D71K, T192F, N231F)(SEQ ID NO. 210596), CA2 (aa 2-260 of WT, H36Q, S43T, Y51F, N67D, G131W, R226H)(SEQ ID NO. 210698), CA2 (aa 2-260 of WT, F70I, F146V)(SEQ ID NO. 210700), CA2 (aa 2-260 of WT, K45N, V68L, H119Y, K169R, D179E)(SEQ ID NO. 210704), CA2 (aa 2-260 of WT, H15L, A54V, K111E, E220K, F225I)(SEQ ID NO. 210706), CA2 (aa 2-260 of WT, P13S, P83A, D101G, K111N, F230I)(SEQ ID NO. 210708), CA2 (aa 2-260 of WT, G63D, W123R, E220K)(SEQ ID NO. 210712), CA2 (aa 2-260 of WT, N11D, E69K, G86D, V109M, K113I, T125I, D138G, G155S)(SEQ ID NO. 210714), CA2 (aa 2-260 of WT, I59N, G102R, A173T)(SEQ ID NO. 210716), CA2 (aa 2-260 of WT, L79F, P180S)(SEQ ID NO. 210718), CA2 (aa 2-260 of WT, A77P, G102R, D138N)(SEQ ID NO. 210724), CA2 (aa 2-260 of WT, F20L, K45N, G63D, E69V, N231I)(SEQ ID NO. 210726), CA2 (aa 2-260 of WT, T199N, L202P, L228F)(SEQ ID NO. 210728), CA2 (aa 2-260 of WT, K9N, H122Y, T168K)(SEQ ID NO. 210730), CA2 (aa 2-260 of WT, Q53H, L90V, Q92H, G131E)(SEQ ID NO. 210732), CA2 (aa 2-260 of WT, L44M, L47V, N62K, E69D)(SEQ ID NO. 210734), CA2 (aa 2-260 of WT, D75V, K169N, F259L)(SEQ ID NO. 210738), CA2 (aa 2-260 of WT, T207S, V222A, N231D)(SEQ ID NO. 210740), CA2 (aa 2-260 of WT, I59F, V206M, G232R)(SEQ ID NO. 210742), CA2 (aa 2-260 of WT, P13A, A133T)(SEQ ID NO. 210744), CA2 (aa 2-260 of WT, I59N, R89I)(SEQ ID NO. 210750), CA2 (aa 2-260 of WT, A65N, G86D, G131R, G155D, K158N, V162A, G170D, P236L)(SEQ ID NO. 210752), CA2 (aa 2-260 of WT, G12R, H15Y, D19V)(SEQ ID NO. 210754), CA2 (aa 2-260 of WT, A65V, F95Y, E106G, H107Q, I145M, F175I)(SEQ ID NO. 210758), and/or CA2 (aa 2-260 of WT, G63D, E69V, N231I)(SEQ ID NO. 210851 or 210847).

[0089] In one embodiment, an SRE described herein may include a CA2 DD which comprises mutations selected from CA2 (aa 2-260 of WT, R27L, H122Y), CA2 (aa 2-260 of WT, T87I, H122Y), CA2 (aa 2-260 of WT, H122Y, N252D), CA2 (aa 2-260 of WT, D72F, V241F), CA2 (aa 2-260 of WT, V241F, P249L), CA2 (aa 2-260 of WT, D72F, P249L), CA2 (aa 2-260 of WT, D71L, L250R), CA2 (aa 2-260 of WT, D72F, P249F), CA2 (aa 2-260 of WT, T55K, G63N, Q248N), CA2 (aa 2-260 of WT, L156H, A257de1, S258de1, F259de1, K260de1), CA2 (aa 2-260 of WT, L156H, S2de1, H3de1, H4de1, W5de1), CA2 (aa 2-260 of WT, W4Y, L156H), CA2 (aa 2-260 of WT, L156H, G234de1, E235de1, P236de1), CA2 (aa 2-260 of WT, L156H, F225L), CA2 (aa 2-260 of WT, D70N, D74N, D100N, L156H), (CA2 (aa 2-260 of WT, I59N, G102R)(SEQ ID NO. 210598), CA2 (aa 2-260 of WT, G63D, E69V, N231I)(SEQ ID NO. 210748), CA2 (aa 2-260 of WT, R27L, T87I, H122Y, N252D)(SEQ ID NO. 210702), CA2 (aa 2-260 of WT, D72F, V241F, P249L)(SEQ ID NO. 210503), CA2 (aa 2-260 of WT, D71L, T87N, L250R)(SEQ ID NO. 210510), CA2 (aa 2-260 of WT, L156H, S172C, F178Y, E186D)(SEQ ID NO. 210756), CA2 (aa 2-260 of WT, A77I, P249F)(SEQ ID NO. 210514), CA2 (aa 2-260 of WT, E106D, C205S)(SEQ ID NO. 210523), CA2 (aa 2-260 of WT, C205S, W208S)(SEQ ID NO. 210525), CA2 (aa 2-260 of WT, S73N, R89Y)(SEQ ID NO. 210532), CA2 (aa 2-260 of WT, D71K, T192F)(SEQ ID NO. 210534), CA2 (aa 2-260 of WT, S73N, R89F)(SEQ ID NO. 210562), CA2 (aa 2-260 of WT, G63D, M240L)(SEQ ID NO. 210578), CA2 (aa 2-260 of WT, V134F, L228F)(SEQ ID NO. 210580), and/or CA2 (aa 2-260 of WT, S56F, D71S)(SEQ ID NO. 210584).

[0090] Also provided herein are biocircuit systems that include at least one effector module. The effector module of the biocircuit may include a stimulus response element (SRE), that includes in whole or in part, human carbonic anhydrase 2 (CA2; SEQ ID NO. 11717). The biocircuits may also include at least one payload, which may be attached, appended or associated with the SRE.

[0091] The SRE of the biocircuit system which includes, in whole or in part, human carbonic anhydrase 2 (CA2; SEQ ID NO. 11717), may include one, two, three or more mutations such as but not limited to A115L, A116Q, A116V, A133L, A133T, A141P, A152D, A152L, A152R, A173C, A173G, A173L, A173T, A23P, A247L, A247S, A257L, A257S, A38P, A38V, A54Q, A54V, A54X, A65L, A65N, A65V, A77I, A77P, A77Q, C205M, C205R, C205V, C205W, C205Y, D101G, D101M, D110I, D129I, D138G, D138M, D138N, D161*, D161M, D161V, D164G, D164I, D174*, D174T, D179E, D179I, D179R, D189G, D189I, D19T, D19V, D242G, D242T, D32T, D34T, D41T, D52I, D52L, D71F, D71G, D71K, D71M, D71S, D71Y, D72I, D72S, D72T, D72X, D75T, D75V, D85M, E106D, E106G, E106S, E117*, E117N, E14N, E186*, E186N, E204A, E204D, E204G, E204N, E213*, E213G, E213N, E220K, E220R, E220S, E233D, E233G, E233R, E235*, E235G, E235N, E237K, E237R, E238*, E238N, E238R, E26S, E69D, E69K, E69S, F130L, F146V, F175I, F175L, F175S, F178L, F178S, F20L, F20S, F225I, F225L, F225S, F225Y, F230I, F230L, F230S, F259L, F259S, F66S, F70I, F70L, F95Y, G102D, G104R, G104V, G128R, G12D, G12E, G131E, G131R, G131W, G139D, G144D, G144V, G150A, G150S, G150W, G155A, G155C, G155D, G155S, G170A, G170D, G182A, G182W, G195A, G195R, G232R, G232W, G234L, G234V, G25E, G63D, G63V, G81E, G81V, G82D, G86A, G86D, G98V, H107I, H107Q, H119T, H119Y, H122T, H122Y, H15L, H15T, H15Y, H17D, H17I, H36I, H36Q, H64M, H94T, H96T, I145F, I145M, I166H, I166L, I209D, I209L, I215H, I215S, I22L, I255N, I255S, I33S, I59F, I59N, I59S, I91F, K111E, K111N, K112R, K113I, K113N, K126N, K132E, K132R, K148E, K148R, K153*, K153N, K158E, K158N, K167*, K169N, K169R, K171Q, K171R, K18R, K212N, K212Q, K212R, K212W, K224E, K224N, K227*, K227N, K24R, K251E, K251R, K256Q, K260F, K260L, K260Q, K39S, K45N, K45S, K80M, K80R, L118F, L120W, L140V, L140W, L143*, L147*, L147F, L156F, L156H, L156P, L156Q, L163A, L163W, L183P, L183S, L184F, L184P, L188P, L188W, L197*, L197M, L197P, L197R, L197T, L202F, L202H, L202I, L202P, L202R, L202S, L203P, L203S, L203W, L211*, L211A, L211S, L223*, L223I, L223V, L228F, L228H, L228T, L239*, L239F, L239T, L250*, L250P, L250T, L44*, L44M, L47C, L47V, L57*, L57X, L60S, L79F, L79S, L84W, L90*, L90V, M240D, M240L, M240R, M240W, N11D, N11K, N124T, N177*, N177T, N229*, N229T, N231D, N231F, N231K, N231L, N231M, N231Q, N231T, N243Q, N243T, N252E, N252T, N61R, N61T, N61Y, N62K, N62M, N67D, N67T, P137L, P13A, P13H, P13L, P13S, P154L, P154R, P154T, P180L, P180S, P185L, P185S, P185V, P194Q, P200A, P200L, P200S, P200T, P201A, P201L, P201R, P201S, P214T, P236L, P236T, P246L, P246Q, P249A, P249F, P249H, P249I, P249X, P30L, P30S, P42L, P83A, Q103K, Q135S, Q136N, Q157R, Q157S, Q221A, Q221R, Q248F, Q248L, Q248S, Q254A, Q254K, Q28S, Q53H, Q53K, Q53N, Q74R, Q92H, Q92S, R181H, R181S, R181V, R226H, R226P, R226V, R245A, R253G, R253Q, R27A, R58G, R89D, R89F, R89I, R89X, R89Y, S105L, S105Q, S151A, S151I, S151Q, S165F, S165P, S172E, S172V, S187I, S187P, S196H, S196L, S216A, S216Q, S218A, S218Q, S219A, S219Q, S258F, S258P, S29C, S29P, S43P, S43T, S48L, S50P, S56F, S56N, S56P, S56X, S73L, S73N, S73X, S99H, T108L, T125I, T125P, T168K, T168N, T168Q, T176H, T176L, T192D, T192F, T192I, T192N, T192P, T192X, T198D, T198I, T198P, T199A, T199H, T199P, T207D, T207I, T207P, T207S, T35I, T35L, T37Q, T55L, T87L, V109M, V109W, V121F, V134C, V134F, V142F, V149G, V149L, V159L, V159S, V160C, V160L, V162A, V162C, V206*, V206C, V206M, V210C, V217L, V217R, V217S, V222A, V222C, V222G, V241G, V241W, V241X, V31L, V49F, V68L, V68W, V78C, W123G, W123R, W16G, W191*, W191G, W191L, W208G, W208L, W208S, W244*, W244G, W244L, W97C, W97G, Y114H, Y114M, Y127M, Y190*, Y190L, Y190T, Y193C, Y193F, Y193I, Y193L, Y193T, Y193V, Y193X, Y40M, Y51F, Y51M, Y51T, Y51X, Y88T, K9N, S29A.

[0092] In one embodiment, the SRE of the biocircuit system which includes, in whole or in part, human carbonic anhydrase 2 (CA2; SEQ ID NO. 11717), may include a mutation selected from E106D, G63D, H122Y, I59N, L156H, L183S, L197P, S56F, S56N, W208S, Y193I, and Y51T.

[0093] The SRE of the biocircuit system which includes, in whole or in part, human carbonic anhydrase 2 (CA2; SEQ ID NO. 11717), may include multiple mutations such as but not limited toCA2 (aa 2-260 of WT, R27L, H122Y), CA2 (aa 2-260 of WT, T87I, H122Y), CA2 (aa 2-260 of WT, H122Y, N252D), CA2 (aa 2-260 of WT, D72F, V241F), CA2 (aa 2-260 of WT, V241F, P249L), CA2 (aa 2-260 of WT, D72F, P249L), CA2 (aa 2-260 of WT, D71L, L250R), CA2 (aa 2-260 of WT, D72F, P249F), CA2 (aa 2-260 of WT, T55K, G63N, Q248N), CA2 (aa 2-260 of WT, L156H, A257de1, S258de1, F259de1, K260de1), CA2 (aa 2-260 of WT, L156H, S2de1, H3de1, H4de1, W5de1), CA2 (aa 2-260 of WT, W4Y, L156H), CA2 (aa 2-260 of WT, L156H, G234de1, E235de1, P236de1), CA2 (aa 2-260 of WT, L156H, F225L), CA2 (aa 2-260 of WT, D70N, D74N, D100N, L156H), (CA2 (aa 2-260 of WT, 159N, G102R)(SEQ ID NO. 210598), CA2 (aa 2-260 of WT, G63D, E69V, N231I)(SEQ ID NO. 210748), CA2 (aa 2-260 of WT, R27L, T87I, H122Y, N252D)(SEQ ID NO. 210702), CA2 (aa 2-260 of WT, D72F, V241F, P249L)(SEQ ID NO. 210503), CA2 (aa 2-260 of WT, D71L, T87N, L250R)(SEQ ID NO. 210510), CA2 (aa 2-260 of WT, L156H, S172C, F178Y, E186D)(SEQ ID NO. 210756), CA2 (aa 2-260 of WT, D71F, N231F)(SEQ ID NO. 210505), CA2 (aa 2-260 of WT, A77I, P249F)(SEQ ID NO. 210514), CA2 (aa 2-260 of WT, D71K, P249H)(SEQ ID NO. 210516), CA2 (aa 2-260 of WT, D72F, P249H)(SEQ ID NO. 210518), CA2 (aa 2-260 of WT, Q53N, N61Y)(SEQ ID NO. 210521), CA2 (aa 2-260 of WT, E106D, C205S)(SEQ ID NO. 210523), CA2 (aa 2-260 of WT, C205S, W208S)(SEQ ID NO. 210525), CA2 (aa 2-260 of WT, S73N, R89Y)(SEQ ID NO. 210532), CA2 (aa 2-260 of WT, D71K, T192F)(SEQ ID NO. 210534), CA2 (aa 2-260 of WT, Y193L, K260L)(SEQ ID NO. 210540), CA2 (aa 2-260 of WT, D71F, V241F, P249L)(SEQ ID NO. 210544), CA2 (aa 2-260 of WT, L147F, Q248F)(SEQ ID NO. 210548), CA2 (aa 2-260 of WT, D52I, S258P)(SEQ ID NO. 210550), CA2 (aa 2-260 of WT, D72S, T192N)(SEQ ID NO. 210552), CA2 (aa 2-260 of WT, D179E, T192I)(SEQ ID NO. 210554), CA2 (aa 2-260 of WT, S56N, Q103K)(SEQ ID NO. 210558), CA2 (aa 2-260 of WT, D71Y, Q248L)(SEQ ID NO. 210560), CA2 (aa 2-260 of WT, S73N, R89F)(SEQ ID NO. 210562), CA2 (aa 2-260 of WT, D71K, N231L, E235G, L239F)(SEQ ID NO. 210564), CA2 (aa 2-260 of WT, D72F, P249I)(SEQ ID NO. 210568), CA2 (aa 2-260 of WT, D72X, V241X, P249X)(SEQ ID NO. 210572), CA2 (aa 2-260 of WT, A54X, S56X, L57X, T192X)(SEQ ID NO. 210574), CA2 (aa 2-260 of WT, Y193V, K260F)(SEQ ID NO. 210576), CA2 (aa 2-260 of WT, G63D, M240L)(SEQ ID NO. 210578), CA2 (aa 2-260 of WT, V134F, L228F)(SEQ ID NO. 210580), CA2 (aa 2-260 of WT, D71G, N231K)(SEQ ID NO. 210582), CA2 (aa 2-260 of WT, S56F, D71S)(SEQ ID NO. 210584), CA2 (aa 2-260 of WT, D52L, G128R, Q248F)(SEQ ID NO. 210586), CA2 (aa 2-260 of WT, S73X, R89X)(SEQ ID NO. 210588), CA2 (aa 2-260 of WT, Y51X, D72X, V241X, P249X)(SEQ ID NO. 210592), CA2 (aa 2-260 of WT, D72I, W97C)(SEQ ID NO. 210594), CA2 (aa 2-260 of WT, D71K, T192F, N231F)(SEQ ID NO. 210596), CA2 (aa 2-260 of WT, H36Q, S43T, Y51F, N67D, G131W, R226H)(SEQ ID NO. 210698), CA2 (aa 2-260 of WT, F70I, F146V)(SEQ ID NO. 210700), CA2 (aa 2-260 of WT, K45N, V68L, H119Y, K169R, D179E)(SEQ ID NO. 210704), CA2 (aa 2-260 of WT, H15L, A54V, K111E, E220K, F225I)(SEQ ID NO. 210706), CA2 (aa 2-260 of WT, P13S, P83A, D101G, K111N, F230I)(SEQ ID NO. 210708), CA2 (aa 2-260 of WT, G63D, W123R, E220K)(SEQ ID NO. 210712), CA2 (aa 2-260 of WT, N11D, E69K, G86D, V109M, K113I, T125I, D138G, G155S)(SEQ ID NO. 210714), CA2 (aa 2-260 of WT, I59N, G102R, A173T)(SEQ ID NO. 210716), CA2 (aa 2-260 of WT, L79F, P180S)(SEQ ID NO. 210718), CA2 (aa 2-260 of WT, A77P, G102R, D138N)(SEQ ID NO. 210724), CA2 (aa 2-260 of WT, F20L, K45N, G63D, E69V, N231I)(SEQ ID NO. 210726), CA2 (aa 2-260 of WT, T199N, L202P, L228F)(SEQ ID NO. 210728), CA2 (aa 2-260 of WT, K9N, H122Y, T168K)(SEQ ID NO. 210730), CA2 (aa 2-260 of WT, Q53H, L90V, Q92H, G131E)(SEQ ID NO. 210732), CA2 (aa 2-260 of WT, L44M, L47V, N62K, E69D)(SEQ ID NO. 210734), CA2 (aa 2-260 of WT, D75V, K169N, F259L)(SEQ ID NO. 210738), CA2 (aa 2-260 of WT, T207S, V222A, N231D)(SEQ ID NO. 210740), CA2 (aa 2-260 of WT, I59F, V206M, G232R)(SEQ ID NO. 210742), CA2 (aa 2-260 of WT, P13A, A133T)(SEQ ID NO. 210744), CA2 (aa 2-260 of WT, I59N, R89I)(SEQ ID NO. 210750), CA2 (aa 2-260 of WT, A65N, G86D, G131R, G155D, K158N, V162A, G170D, P236L)(SEQ ID NO. 210752), CA2 (aa 2-260 of WT, G12R, H15Y, D19V)(SEQ ID NO. 210754), CA2 (aa 2-260 of WT, A65V, F95Y, E106G, H107Q, I145M, F175I)(SEQ ID NO. 210758), and/or CA2 (aa 2-260 of WT, G63D, E69V, N231I)(SEQ ID NO. 210851 or 210847).

[0094] In one embodiment, the SRE of the biocircuit system which includes, in whole or in part, human carbonic anhydrase 2 (CA2; SEQ ID NO. 11717), may include multiple mutations selected from CA2 (aa 2-260 of WT, R27L, H122Y), CA2 (aa 2-260 of WT, T87I, H122Y), CA2 (aa 2-260 of WT, H122Y, N252D), CA2 (aa 2-260 of WT, D72F, V241F), CA2 (aa 2-260 of WT, V241F, P249L), CA2 (aa 2-260 of WT, D72F, P249L), CA2 (aa 2-260 of WT, D71L, L250R), CA2 (aa 2-260 of WT, D72F, P249F), CA2 (aa 2-260 of WT, T55K, G63N, Q248N), CA2 (aa 2-260 of WT, L156H, A257de1, S258de1, F259de1, K260de1), CA2 (aa 2-260 of WT, L156H, S2de1, H3de1, H4de1, W5de1), CA2 (aa 2-260 of WT, W4Y, L156H), CA2 (aa 2-260 of WT, L156H, G234de1, E235de1, P236de1), CA2 (aa 2-260 of WT, L156H, F225L), CA2 (aa 2-260 of WT, D70N, D74N, D100N, L156H), (CA2 (aa 2-260 of WT, 159N, G102R)(SEQ ID NO. 210598), CA2 (aa 2-260 of WT, G63D, E69V, N231I)(SEQ ID NO. 210748), CA2 (aa 2-260 of WT, R27L, T87I, H122Y, N252D)(SEQ ID NO. 210702), CA2 (aa 2-260 of WT, D72F, V241F, P249L)(SEQ ID NO. 210503), CA2 (aa 2-260 of WT, D71L, T87N, L250R)(SEQ ID NO. 210510), CA2 (aa 2-260 of WT, L156H, S172C, F178Y, E186D)(SEQ ID NO. 210756), CA2 (aa 2-260 of WT, A77I, P249F)(SEQ ID NO. 210514), CA2 (aa 2-260 of WT, E106D, C205S)(SEQ ID NO. 210523), CA2 (aa 2-260 of WT, C205S, W208S)(SEQ ID NO. 210525), CA2 (aa 2-260 of WT, S73N, R89Y)(SEQ ID NO. 210532), CA2 (aa 2-260 of WT, D71K, T192F)(SEQ ID NO. 210534), CA2 (aa 2-260 of WT, S73N, R89F)(SEQ ID NO. 210562), CA2 (aa 2-260 of WT, G63D, M240L)(SEQ ID NO. 210578), CA2 (aa 2-260 of WT, V134F, L228F)(SEQ ID NO. 210580), and/or CA2 (aa 2-260 of WT, S56F, D71S)(SEQ ID NO. 210584).

### Stabilization and Destabilization Ratio of SRE

[0095] In some embodiments, the present disclosure provides methods for modulating protein, expression, function or level by measuring the stabilization ratio and destabilization ratio. As used herein, the stabilization ratio may be defined as the ratio of expression, function or level of a protein of interest in response to the stimulus to the expression, function or level of the protein of interest in the absence of the stimulus specific to the SRE. In some aspects, the stabilization ratio is at least 1, such as by at least 1-10, 1-20, 1-30, 1-40, 1-50, 1-60, 1-70, 1-80, 1-90, 1-100, 20-30, 20-40, 20-50, 20-60, 20-70, 20-80, 20-90, 20-95, 20-100, 30-40, 30-50, 30-60, 30-70, 30-80, 30-90, 30-95, 30-100, 40-50, 40-60, 40-70, 40-80, 40-90, 40-95, 40-100, 50-60, 50-70, 50-80, 50-90, 50-95, 50-100, 60-70, 60-80, 60-90, 60-95, 60-100, 70-80, 70-90, 70-95, 70-100, 80-90, 80-95, 80-100, 90-95, 90-100 or 95-100. As used herein, the destabilization ratio may be defined as the ratio of expression, function or level of a protein of interest in the absence of the stimulus specific to the effector module to the expression, function or level of the protein of interest, that is expressed constitutively and in the absence of the stimulus specific to the SRE. As used herein “constitutively” refers to the expression, function or level of a protein of interest that is not linked to an SRE and is therefore expressed both in the presence and absence of the stimulus. In some aspects, the destabilization ratio is at least 0, such as by at least 0.1, 0.2, 0.3, 0.4, 0.5, 0.6, 0.7, 0.8, 0.9, or at least, 0-0.1, 0-0.2, 0-0.3, 0-0.4, 0-0.5, 0-0.6, 0-0.7, 0-0.8, 0-0.9, 0.1-0.2, 0.1-0.3, 0.1-0.4, 0.1-0.5, 0.1-0.6, 0.1-0.7, 0.1-0.8, 0.1-0.9, 0.2-0.3, 0.2-0.4, 0.2-0.5, 0.2-0.6, 0.2-0.7, 0.2-0.8, 0.2-0.9, 0.3-0.4, 0.3-0.5, 0.3-0.6, 0.3-0.7, 0.3-0.8, 0.3-0.9, 0.4-0.5, 0.4-0.6, 0.4-0.7, 0.4-0.8, 0.4-0.9, 0.5-0.6, 0.5-0.7, 0.5-0.8, 0.5-0.9, 0.6-0.7, 0.6-0.8, 0.6-0.9, 0.7-0.8, 0.7-0.9 or 0.8-0.9.

[0096] In some embodiments, the SRE of the effector module may stabilize the payload of interest by a stabilization ratio of 1 or more, wherein the stabilization ratio may comprise the ratio of expression, function or level of the payload of interest in the presence of the stimulus to the expression, function or level of the payload of interest in the absence of the stimulus.

[0097] In some embodiments, the SRE may destabilize the payload of interest by a destabilization ratio between 0, and 0.09, wherein the destabilization ratio may comprise the ratio of expression, function or level of the payload of interest in the absence of the stimulus specific to the SRE to the expression, function or level of the payload of interest that is expressed constitutively, and in the absence of the stimulus specific to the SRE.

### Protein-Protein Interactions of SRE

[0098] In some embodiments, the present disclosure provides stimulus response element (SRE) which may comprise a destabilizing domain (DD) derived from human carbonic anhydrase 2 (CA2; SEQ ID NO. 11717) in whole or in part. In one embodiment, the DD may include the whole CA2 (SEQ ID NO. 11717). In some embodiments, the DD may include a portion or region of the human carbonic anhydrase. The portion or region of CA2 may be selected from but not limited to amino acids 2-260 of CA2 (SEQ ID NO. 11717), such as, but not limited to, SEQ ID NO. (210492); amino acids 1-142 of CA2 (SEQ ID NO. 11717), such as, but not limited to, SEQ ID NO. (210820); amino acids 2-142 of CA2 (SEQ ID NO. 11717), such as, but not limited to, SEQ ID NO. (210821); amino acids 1-190 of CA2 (SEQ ID NO. 11717), such as, but not limited to, SEQ ID NO. (210822); amino acids 2-190 of CA2 (SEQ ID NO. 11717), such as, but not limited to, SEQ ID NO. (210823); amino acids 1-89 of CA2 (SEQ ID NO. 11717), such as, but not limited to, SEQ ID NO. (210824); amino acids 2-89 of CA2 (SEQ ID NO. 11717), such as, but not limited to, SEQ ID NO. (210825); amino acids 1-243 of CA2 (SEQ ID NO. 11717), such as, but not limited to, SEQ ID NO. (210826); amino acids 2-243 of CA2 (SEQ ID NO. 11717), such as, but not limited to, SEQ ID NO. (210827); amino acids 1-166 of CA2 (SEQ ID NO. 11717), such as, but not limited to, SEQ ID NO. (210828); amino acids 2-166 of CA2 (SEQ ID NO. 11717), such as, but not limited to, SEQ ID NO. (210782); amino acids 1-116 of CA2 (SEQ ID NO. 11717), such as, but not limited to, SEQ ID NO. (210830); amino acids 2-116 of CA2 (SEQ ID NO. 11717), such as, but not limited to, SEQ ID NO. (210831); amino acids 1-152 of CA2 (SEQ ID NO. 11717) such as, but not limited to, SEQ ID NO. (210832); amino acids 2-152 of CA2 (SEQ ID NO. 11717), such as, but not limited to, SEQ ID NO. (210833); amino acids 1-43 of CA2 (SEQ ID NO. 11717), such as, but not limited to, SEQ ID NO. (210834); or amino acids 2-43 of CA2 (SEQ ID NO. 11717), such as, but not limited to, SEQ ID NO. (210835). In one embodiment, the DD may include amino acids 2 to 260 of CA2 (SEQ ID NO. 11717). In one embodiment, the DD may include amino acids 2 to 260 of CA2 (SEQ ID NO. 11717), such as, but not limited to, SEQ ID NO. 210492.

[0099] In one embodiment, the DD may include amino acids 2 to 260 of CA2 (SEQ ID NO. 11717).

[0100] In some embodiments, the DD may include one, two, three or more mutations such as, but not limited to, A115L, A116Q, A116V, A133L, A133T, A141P, A152D, A152L, A152R, A173C, A173G, A173L, A173T, A23P, A247L, A247S, A257L, A257S, A38P, A38V, A54Q, A54V, A54X, A65L, A65N, A65V, A77I, A77P, A77Q, C205M, C205R, C205V, C205W, C205Y, D101G, D101M, D110I, D129I, D138G, D138M, D138N, D161*, D161M, D161V, D164G, D164I, D174*, D174T, D179E, D179I, D179R, D189G, D189I, D19T, D19V, D242G, D242T, D32T, D34T, D41T, D52I, D52L, D71F, D71G, D71K, D71M, D71S, D71Y, D72I, D72S, D72T, D72X, D75T, D75V, D85M, E106D, E106G, E106S, E117*, E117N, E14N, E186*, E186N, E204A, E204D, E204G, E204N, E213*, E213G, E213N, E220K, E220R, E220S, E233D, E233G, E233R, E235*, E235G, E235N, E237K, E237R, E238*, E238N, E238R, E26S, E69D, E69K, E69S, F130L, F146V, F175I, F175L, F175S, F178L, F178S, F20L, F20S, F225I, F225L, F225S, F225Y, F230I, F230L, F230S, F259L, F259S, F66S, F70I, F70L, F95Y, G102D, G104R, G104V, G128R, G12D, G12E, G131E, G131R, G131W, G139D, G144D, G144V, G150A, G150S, G150W, G155A, G155C, G155D, G155S, G170A, G170D, G182A, G182W, G195A, G195R, G232R, G232W, G234L, G234V, G25E, G63D, G63V, G81E, G81V, G82D, G86A, G86D, G98V, H107I, H107Q, H119T, H119Y, H122T, H122Y, H15L, H15T, H15Y, H17D, H17I, H36I, H36Q, H64M, H94T, H96T, I145F, I145M, I166H, I166L, I209D, I209L, I215H, I215S, I22L, I255N, I255S, I33S, I59F, I59N, I59S, I91F, K111E, K111N, K112R, K113I, K113N, K126N, K132E, K132R, K148E, K148R, K153*, K153N, K158E, K158N, K167*, K169N, K169R, K171Q, K171R, K18R, K212N, K212Q, K212R, K212W, K224E, K224N, K227*, K227N, K24R, K251E, K251R, K256Q, K260F, K260L, K260Q, K39S, K45N, K45S, K80M, K80R, L118F, L120W, L140V, L140W, L143*, L147*, L147F, L156F, L156H, L156P, L156Q, L163A, L163W, L183P, L183S, L184F, L184P, L188P, L188W, L197*, L197M, L197P, L197R, L197T, L202F, L202H, L202I, L202P, L202R, L202S, L203P, L203S, L203W, L211*, L211A, L211S, L223*, L223I, L223V, L228F, L228H, L228T, L239*, L239F, L239T, L250*, L250P, L250T, L44*, L44M, L47C, L47V, L57*, L57X, L60S, L79F, L79S, L84W, L90*, L90V, M240D, M240L, M240R, M240W, N11D, N11K, N124T, N177*, N177T, N229*, N229T, N231D, N231F, N231K, N231L, N231M, N231Q, N231T, N243Q, N243T, N252E, N252T, N61R, N61T, N61Y, N62K, N62M, N67D, N67T, P137L, P13A, P13H, P13L, P13S, P154L, P154R, P154T, P180L, P180S, P185L, P185S, P185V, P194Q, P200A, P200L, P200S, P200T, P201A, P201L, P201R, P201S, P214T, P236L, P236T, P246L, P246Q, P249A, P249F, P249H, P249I, P249X, P30L, P30S, P42L, P83A, Q103K, Q135S, Q136N, Q157R, Q157S, Q221A, Q221R, Q248F, Q248L, Q248S, Q254A, Q254K, Q28S, Q53H, Q53K, Q53N, Q74R, Q92H, Q92S, R181H, R181S, R181V, R226H, R226P, R226V, R245A, R253G, R253Q, R27A, R58G, R89D, R89F, R89I, R89X, R89Y, S105L, S105Q, S151A, S151I, S151Q, S165F, S165P, S172E, S172V, S187I, S187P, S196H, S196L, S216A, S216Q, S218A, S218Q, S219A, S219Q, S258F, S258P, S29C, S29P, S43P, S43T, S48L, S50P, S56F, S56N, S56P, S56X, S73L, S73N, S73X, S99H, T108L, T125I, T125P, T168K, T168N, T168Q, T176H, T176L, T192D, T192F, T192I, T192N, T192P, T192X, T198D, T198I, T198P, T199A, T199H, T199P, T207D, T207I, T207P, T207S, T35I, T35L, T37Q, T55L, T87L, V109M, V109W, V121F, V134C, V134F, V142F, V149G, V149L, V159L, V159S, V160C, V160L, V162A, V162C, V206*, V206C, V206M, V210C, V217L, V217R, V217S, V222A, V222C, V222G, V241G, V241W, V241X, V31L, V49F, V68L, V68W, V78C, W123G, W123R, W16G, W191*, W191G, W191L, W208G, W208L, W208S, W244*, W244G, W244L, W97C, W97G, Y114H, Y114M, Y127M, Y190*, Y190L, Y190T, Y193C, Y193F, Y193I, Y193L, Y193T, Y193V, Y193X, Y40M, Y51F, Y51M, Y51T, Y51X, Y88T, K9N, S29A. As used herein “*” indicates the translation of the stop codon and X indicates any amino acid.

[0101] In one embodiment, the DD may include a E106D, G63D, H122Y, I59N, L156H, L183S, L197P, S56F, S56N, W208S, Y193I, or Y51T mutation.

[0102] In some embodiments, the DD may include multiple mutations such as, but not limited to, CA2 (aa 2-260 of WT, R27L, H122Y), CA2 (aa 2-260 of WT, T87I, H122Y), CA2 (aa 2-260 of WT, H122Y, N252D), CA2 (aa 2-260 of WT, D72F, V241F), CA2 (aa 2-260 of WT, V241F, P249L), CA2 (aa 2-260 of WT, D72F, P249L), CA2 (aa 2-260 of WT, D71L, L250R), CA2 (aa 2-260 of WT, D72F, P249F), CA2 (aa 2-260 of WT, T55K, G63N, Q248N), CA2 (aa 2-260 of WT, L156H, A257de1, S258de1, F259de1, K260de1), CA2 (aa 2-260 of WT, L156H, S2de1, H3de1, H4de1, W5de1), CA2 (aa 2-260 of WT, W4Y, L156H), CA2 (aa 2-260 of WT, L156H, G234de1, E235de1, P236de1), CA2 (aa 2-260 of WT, L156H, F225L), CA2 (aa 2-260 of WT, D70N, D74N, D100N, L156H), (CA2 (aa 2-260 of WT, I59N, G102R)(SEQ ID NO. 210598), CA2 (aa 2-260 of WT, G63D, E69V, N231I)(SEQ ID NO. 210748), CA2 (aa 2-260 of WT, R27L, T87I, H122Y, N252D)(SEQ ID NO. 210702), CA2 (aa 2-260 of WT, D72F, V241F, P249L)(SEQ ID NO. 210503), CA2 (aa 2-260 of WT, D71L, T87N, L250R)(SEQ ID NO. 210510), CA2 (aa 2-260 of WT, L156H, S172C, F178Y, E186D)(SEQ ID NO. 210756), CA2 (aa 2-260 of WT, D71F, N231F)(SEQ ID NO. 210505), CA2 (aa 2-260 of WT, A77I, P249F)(SEQ ID NO. 210514), CA2 (aa 2-260 of WT, D71K, P249H)(SEQ ID NO. 210516), CA2 (aa 2-260 of WT, D72F, P249H)(SEQ ID NO. 210518), CA2 (aa 2-260 of WT, Q53N, N61Y)(SEQ ID NO. 210521), CA2 (aa 2-260 of WT, E106D, C205S)(SEQ ID NO. 210523), CA2 (aa 2-260 of WT, C205S, W208S)(SEQ ID NO. 210525), CA2 (aa 2-260 of WT, S73N, R89Y)(SEQ ID NO. 210532), CA2 (aa 2-260 of WT, D71K, T192F)(SEQ ID NO. 210534), CA2 (aa 2-260 of WT, Y193L, K260L)(SEQ ID NO. 210540), CA2 (aa 2-260 of WT, D71F, V241F, P249L)(SEQ ID NO. 210544), CA2 (aa 2-260 of WT, L147F, Q248F)(SEQ ID NO. 210548), CA2 (aa 2-260 of WT, D52I, S258P)(SEQ ID NO. 210550), CA2 (aa 2-260 of WT, D72S, T192N)(SEQ ID NO. 210552), CA2 (aa 2-260 of WT, D179E, T192I)(SEQ ID NO. 210554), CA2 (aa 2-260 of WT, S56N, Q103K)(SEQ ID NO. 210558), CA2 (aa 2-260 of WT, D71Y, Q248L)(SEQ ID NO. 210560), CA2 (aa 2-260 of WT, S73N, R89F)(SEQ ID NO. 210562), CA2 (aa 2-260 of WT, D71K, N231L, E235G, L239F)(SEQ ID NO. 210564), CA2 (aa 2-260 of WT, D72F, P249I)(SEQ ID NO. 210568), CA2 (aa 2-260 of WT, D72X, V241X, P249X)(SEQ ID NO. 210572), CA2 (aa 2-260 of WT, A54X, S56X, L57X, T192X)(SEQ ID NO. 210574), CA2 (aa 2-260 of WT, Y193V, K260F)(SEQ ID NO. 210576), CA2 (aa 2-260 of WT, G63D, M240L)(SEQ ID NO. 210578), CA2 (aa 2-260 of WT, V134F, L228F)(SEQ ID NO. 210580), CA2 (aa 2-260 of WT, D71G, N231K)(SEQ ID NO. 210582), CA2 (aa 2-260 of WT, S56F, D71S)(SEQ ID NO. 210584), CA2 (aa 2-260 of WT, D52L, G128R, Q248F)(SEQ ID NO. 210586), CA2 (aa 2-260 of WT, S73X, R89X)(SEQ ID NO. 210588), CA2 (aa 2-260 of WT, Y51X, D72X, V241X, P249X)(SEQ ID NO. 210592), CA2 (aa 2-260 of WT, D72I, W97C)(SEQ ID NO. 210594), CA2 (aa 2-260 of WT, D71K, T192F, N231F)(SEQ ID NO. 210596), CA2 (aa 2-260 of WT, H36Q, S43T, Y51F, N67D, G131W, R226H)(SEQ ID NO. 210698), CA2 (aa 2-260 of WT, F70I, F146V)(SEQ ID NO. 210700), CA2 (aa 2-260 of WT, K45N, V68L, H119Y, K169R, D179E)(SEQ ID NO. 210704), CA2 (aa 2-260 of WT, H15L, A54V, K111E, E220K, F225I)(SEQ ID NO. 210706), CA2 (aa 2-260 of WT, P13S, P83A, D101G, K111N, F230I)(SEQ ID NO. 210708), CA2 (aa 2-260 of WT, G63D, W123R, E220K)(SEQ ID NO. 210712), CA2 (aa 2-260 of WT, N11D, E69K, G86D, V109M, K113I, T125I, D138G, G155S)(SEQ ID NO. 210714), CA2 (aa 2-260 of WT, I59N, G102R, A173T)(SEQ ID NO. 210716), CA2 (aa 2-260 of WT, L79F, P180S)(SEQ ID NO. 210718), CA2 (aa 2-260 of WT, A77P, G102R, D138N)(SEQ ID NO. 210724), CA2 (aa 2-260 of WT, F20L, K45N, G63D, E69V, N231I)(SEQ ID NO. 210726), CA2 (aa 2-260 of WT, T199N, L202P, L228F)(SEQ ID NO. 210728), CA2 (aa 2-260 of WT, K9N, H122Y, T168K)(SEQ ID NO. 210730), CA2 (aa 2-260 of WT, Q53H, L90V, Q92H, G131E)(SEQ ID NO. 210732), CA2 (aa 2-260 of WT, L44M, L47V, N62K, E69D)(SEQ ID NO. 210734), CA2 (aa 2-260 of WT, D75V, K169N, F259L)(SEQ ID NO. 210738), CA2 (aa 2-260 of WT, T207S, V222A, N231D)(SEQ ID NO. 210740), CA2 (aa 2-260 of WT, I59F, V206M, G232R)(SEQ ID NO. 210742), CA2 (aa 2-260 of WT, P13A, A133T)(SEQ ID NO. 210744), CA2 (aa 2-260 of WT, I59N, R89I)(SEQ ID NO. 210750), CA2 (aa 2-260 of WT, A65N, G86D, G131R, G155D, K158N, V162A, G170D, P236L)(SEQ ID NO. 210752), CA2 (aa 2-260 of WT, G12R, H15Y, D19V)(SEQ ID NO. 210754), CA2 (aa 2-260 of WT, A65V, F95Y, E106G, H107Q, I145M, F175I)(SEQ ID NO. 210758), and/or CA2 (aa 2-260 of WT, G63D, E69V, N231I)(SEQ ID NO. 210851 or 210847).

[0103] In one embodiment, the DD may include CA2 (aa 2-260 of WT, R27L, H122Y), CA2 (aa 2-260 of WT, T87I, H122Y), CA2 (aa 2-260 of WT, H122Y, N252D), CA2 (aa 2-260 of WT, D72F, V241F), CA2 (aa 2-260 of WT, V241F, P249L), CA2 (aa 2-260 of WT, D72F, P249L), CA2 (aa 2-260 of WT, D71L, L250R), CA2 (aa 2-260 of WT, D72F, P249F), CA2 (aa 2-260 of WT, T55K, G63N, Q248N), CA2 (aa 2-260 of WT, L156H, A257de1, S258de1, F259de1, K260de1), CA2 (aa 2-260 of WT, L156H, S2de1, H3de1, H4de1, W5de1), CA2 (aa 2-260 of WT, W4Y, L156H), CA2 (aa 2-260 of WT, L156H, G234de1, E235de1, P236de1), CA2 (aa 2-260 of WT, L156H, F225L), CA2 (aa 2-260 of WT, D70N, D74N, D100N, L156H), (CA2 (aa 2-260 of WT, I59N, G102R)(SEQ ID NO. 210598), CA2 (aa 2-260 of WT, G63D, E69V, N231I)(SEQ ID NO. 210748), CA2 (aa 2-260 of WT, R27L, T87I, H122Y, N252D)(SEQ ID NO. 210702), CA2 (aa 2-260 of WT, D72F, V241F, P249L)(SEQ ID NO. 210503), CA2 (aa 2-260 of WT, D71L, T87N, L250R)(SEQ ID NO. 210510), CA2 (aa 2-260 of WT, L156H, S172C, F178Y, E186D)(SEQ ID NO. 210756), CA2 (aa 2-260 of WT, A77I, P249F)(SEQ ID NO. 210514), CA2 (aa 2-260 of WT, E106D, C205S)(SEQ ID NO. 210523), CA2 (aa 2-260 of WT, C205S, W208S)(SEQ ID NO. 210525), CA2 (aa 2-260 of WT, S73N, R89Y)(SEQ ID NO. 210532), CA2 (aa 2-260 of WT, D71K, T192F)(SEQ ID NO. 210534), CA2 (aa 2-260 of WT, S73N, R89F)(SEQ ID NO. 210562), CA2 (aa 2-260 of WT, G63D, M240L)(SEQ ID NO. 210578), CA2 (aa 2-260 of WT, V134F, L228F)(SEQ ID NO. 210580), and/or CA2 (aa 2-260 of WT, S56F, D71S)(SEQ ID NO. 210584).

[0104] In one embodiment, the DD may include amino acids 2 to 260 of CA2 (SEQ ID NO. 11717), such as, but not limited to, SEQ ID NO. (210492).

[0105] In some embodiments, the SRE may be, but is not limited to, CA2 (aa 2-260 of WT, R27L, H122Y), CA2 (aa 2-260 of WT, T87I, H122Y), CA2 (aa 2-260 of WT, H122Y, N252D), CA2 (aa 2-260 of WT, D72F, V241F), CA2 (aa 2-260 of WT, V241F, P249L), CA2 (aa 2-260 of WT, D72F, P249L), CA2 (aa 2-260 of WT, D71L, L250R), CA2 (aa 2-260 of WT, D72F, P249F), CA2 (aa 2-260 of WT, T55K, G63N, Q248N), CA2 (aa 2-260 of WT, L156H, A257de1, S258de1, F259de1, K260de1), CA2 (aa 2-260 of WT, L156H, S2de1, H3de1, H4de1, W5de1), CA2 (aa 2-260 of WT, W4Y, L156H), CA2 (aa 2-260 of WT, L156H, G234de1, E235de1, P236de1), CA2 (aa 2-260 of WT, L156H, F225L), CA2 (aa 2-260 of WT, D70N, D74N, D100N, L156H), (CA2 (aa 2-260 of WT, I59N, G102R)(SEQ ID NO. 210598), CA2 (aa 2-260 of WT, G63D, E69V, N231I)(SEQ ID NO. 210748), CA2 (aa 2-260 of WT, R27L, T87I, H122Y, N252D)(SEQ ID NO. 210702), CA2 (aa 2-260 of WT, D72F, V241F, P249L)(SEQ ID NO. 210503), CA2 (aa 2-260 of WT, D71L, T87N, L250R)(SEQ ID NO. 210510), CA2 (aa 2-260 of WT, L156H, S172C, F178Y, E186D)(SEQ ID NO. 210756), CA2 (aa 2-260 of WT, D71F, N231F)(SEQ ID NO. 210505), CA2 (aa 2-260 of WT, A77I, P249F)(SEQ ID NO. 210514), CA2 (aa 2-260 of WT, D71K, P249H)(SEQ ID NO. 210516), CA2 (aa 2-260 of WT, D72F, P249H)(SEQ ID NO. 210518), CA2 (aa 2-260 of WT, Q53N, N61Y)(SEQ ID NO. 210521), CA2 (aa 2-260 of WT, E106D, C205S)(SEQ ID NO. 210523), CA2 (aa 2-260 of WT, C205S, W208S)(SEQ ID NO. 210525), CA2 (aa 2-260 of WT, S73N, R89Y)(SEQ ID NO. 210532), CA2 (aa 2-260 of WT, D71K, T192F)(SEQ ID NO. 210534), CA2 (aa 2-260 of WT, Y193L, K260L)(SEQ ID NO. 210540), CA2 (aa 2-260 of WT, D71F, V241F, P249L)(SEQ ID NO. 210544), CA2 (aa 2-260 of WT, L147F, Q248F)(SEQ ID NO. 210548), CA2 (aa 2-260 of WT, D52I, S258P)(SEQ ID NO. 210550), CA2 (aa 2-260 of WT, D72S, T192N)(SEQ ID NO. 210552), CA2 (aa 2-260 of WT, D179E, T192I)(SEQ ID NO. 210554), CA2 (aa 2-260 of WT, S56N, Q103K)(SEQ ID NO. 210558), CA2 (aa 2-260 of WT, D71Y, Q248L)(SEQ ID NO. 210560), CA2 (aa 2-260 of WT, S73N, R89F)(SEQ ID NO. 210562), CA2 (aa 2-260 of WT, D71K, N231L, E235G, L239F)(SEQ ID NO. 210564), CA2 (aa 2-260 of WT, D72F, P249I)(SEQ ID NO. 210568), CA2 (aa 2-260 of WT, D72X, V241X, P249X)(SEQ ID NO. 210572), CA2 (aa 2-260 of WT, A54X, S56X, L57X, T192X)(SEQ ID NO. 210574), CA2 (aa 2-260 of WT, Y193V, K260F)(SEQ ID NO. 210576), CA2 (aa 2-260 of WT, G63D, M240L)(SEQ ID NO. 210578), CA2 (aa 2-260 of WT, V134F, L228F)(SEQ ID NO. 210580), CA2 (aa 2-260 of WT, D71G, N231K)(SEQ ID NO. 210582), CA2 (aa 2-260 of WT, S56F, D71S)(SEQ ID NO. 210584), CA2 (aa 2-260 of WT, D52L, G128R, Q248F)(SEQ ID NO. 210586), CA2 (aa 2-260 of WT, S73X, R89X)(SEQ ID NO. 210588), CA2 (aa 2-260 of WT, Y51X, D72X, V241X, P249X)(SEQ ID NO. 210592), CA2 (aa 2-260 of WT, D72I, W97C)(SEQ ID NO. 210594), CA2 (aa 2-260 of WT, D71K, T192F, N231F)(SEQ ID NO. 210596), CA2 (aa 2-260 of WT, H36Q, S43T, Y51F, N67D, G131W, R226H)(SEQ ID NO. 210698), CA2 (aa 2-260 of WT, F70I, F146V)(SEQ ID NO. 210700), CA2 (aa 2-260 of WT, K45N, V68L, H119Y, K169R, D179E)(SEQ ID NO. 210704), CA2 (aa 2-260 of WT, H15L, A54V, K111E, E220K, F225I)(SEQ ID NO. 210706), CA2 (aa 2-260 of WT, P13S, P83A, D101G, K111N, F230I)(SEQ ID NO. 210708), CA2 (aa 2-260 of WT, G63D, W123R, E220K)(SEQ ID NO. 210712), CA2 (aa 2-260 of WT, N11D, E69K, G86D, V109M, K113I, T125I, D138G, G155S)(SEQ ID NO. 210714), CA2 (aa 2-260 of WT, I59N, G102R, A173T)(SEQ ID NO. 210716), CA2 (aa 2-260 of WT, L79F, P180S)(SEQ ID NO. 210718), CA2 (aa 2-260 of WT, A77P, G102R, D138N)(SEQ ID NO. 210724), CA2 (aa 2-260 of WT, F20L, K45N, G63D, E69V, N231I)(SEQ ID NO. 210726), CA2 (aa 2-260 of WT, T199N, L202P, L228F)(SEQ ID NO. 210728), CA2 (aa 2-260 of WT, K9N, H122Y, T168K)(SEQ ID NO. 210730), CA2 (aa 2-260 of WT, Q53H, L90V, Q92H, G131E)(SEQ ID NO. 210732), CA2 (aa 2-260 of WT, L44M, L47V, N62K, E69D)(SEQ ID NO. 210734), CA2 (aa 2-260 of WT, D75V, K169N, F259L)(SEQ ID NO. 210738), CA2 (aa 2-260 of WT, T207S, V222A, N231D)(SEQ ID NO. 210740), CA2 (aa 2-260 of WT, I59F, V206M, G232R)(SEQ ID NO. 210742), CA2 (aa 2-260 of WT, P13A, A133T)(SEQ ID NO. 210744), CA2 (aa 2-260 of WT, I59N, R89I)(SEQ ID NO. 210750), CA2 (aa 2-260 of WT, A65N, G86D, G131R, G155D, K158N, V162A, G170D, P236L)(SEQ ID NO. 210752), CA2 (aa 2-260 of WT, G12R, H15Y, D19V)(SEQ ID NO. 210754), CA2 (aa 2-260 of WT, A65V, F95Y, E106G, H107Q, I145M, F175I)(SEQ ID NO. 210758), and/or CA2 (aa 2-260 of WT, G63D, E69V, N231I)(SEQ ID NO. 210851 or 210847).

[0106] In one embodiment, the DD may be CA2 (aa 2-260 of WT, R27L, H122Y), CA2 (aa 2-260 of WT, T87I, H122Y), CA2 (aa 2-260 of WT, H122Y, N252D), CA2 (aa 2-260 of WT, D72F, V241F), CA2 (aa 2-260 of WT, V241F, P249L), CA2 (aa 2-260 of WT, D72F, P249L), CA2 (aa 2-260 of WT, D71L, L250R), CA2 (aa 2-260 of WT, D72F, P249F), CA2 (aa 2-260 of WT, T55K, G63N, Q248N), CA2 (aa 2-260 of WT, L156H, A257de1, S258de1, F259de1, K260de1), CA2 (aa 2-260 of WT, L156H, S2de1, H3de1, H4de1, W5de1), CA2 (aa 2-260 of WT, W4Y, L156H), CA2 (aa 2-260 of WT, L156H, G234de1, E235de1, P236de1), CA2 (aa 2-260 of WT, L156H, F225L), CA2 (aa 2-260 of WT, D70N, D74N, D100N, L156H), (CA2 (aa 2-260 of WT, I59N, G102R)(SEQ ID NO. 210598), CA2 (aa 2-260 of WT, G63D, E69V, N231I)(SEQ ID NO. 210748), CA2 (aa 2-260 of WT, R27L, T87I, H122Y, N252D)(SEQ ID NO. 210702), CA2 (aa 2-260 of WT, D72F, V241F, P249L)(SEQ ID NO. 210503), CA2 (aa 2-260 of WT, D71L, T87N, L250R)(SEQ ID NO. 210510), CA2 (aa 2-260 of WT, L156H, S172C, F178Y, E186D)(SEQ ID NO. 210756), CA2 (aa 2-260 of WT, D71F, N231F)(SEQ ID NO. 210505), CA2 (aa 2-260 of WT, A77I, P249F)(SEQ ID NO. 210514), CA2 (aa 2-260 of WT, D71K, P249H)(SEQ ID NO. 210516), CA2 (aa 2-260 of WT, D72F, P249H)(SEQ ID NO. 210518), CA2 (aa 2-260 of WT, Q53N, N61Y)(SEQ ID NO. 210521), CA2 (aa 2-260 of WT, E106D, C205S)(SEQ ID NO. 210523), CA2 (aa 2-260 of WT, C205S, W208S)(SEQ ID NO. 210525), CA2 (aa 2-260 of WT, S73N, R89Y)(SEQ ID NO. 210532), CA2 (aa 2-260 of WT, D71K, T192F)(SEQ ID NO. 210534), CA2 (aa 2-260 of WT, Y193L, K260L)(SEQ ID NO. 210540), CA2 (aa 2-260 of WT, D71F, V241F, P249L)(SEQ ID NO. 210544), CA2 (aa 2-260 of WT, L147F, Q248F)(SEQ ID NO. 210548), CA2 (aa 2-260 of WT, D52I, S258P)(SEQ ID NO. 210550), CA2 (aa 2-260 of WT, D72S, T192N)(SEQ ID NO. 210552), CA2 (aa 2-260 of WT, D179E, T192I)(SEQ ID NO. 210554), CA2 (aa 2-260 of WT, S56N, Q103K)(SEQ ID NO. 210558), CA2 (aa 2-260 of WT, D71Y, Q248L)(SEQ ID NO. 210560), CA2 (aa 2-260 of WT, S73N, R89F)(SEQ ID NO. 210562), CA2 (aa 2-260 of WT, D71K, N231L, E235G, L239F)(SEQ ID NO. 210564), CA2 (aa 2-260 of WT, D72F, P249I)(SEQ ID NO. 210568), CA2 (aa 2-260 of WT, D72X, V241X, P249X)(SEQ ID NO. 210572), CA2 (aa 2-260 of WT, A54X, S56X, L57X, T192X)(SEQ ID NO. 210574), CA2 (aa 2-260 of WT, Y193V, K260F)(SEQ ID NO. 210576), CA2 (aa 2-260 of WT, G63D, M240L)(SEQ ID NO. 210578), CA2 (aa 2-260 of WT, V134F, L228F)(SEQ ID NO. 210580), CA2 (aa 2-260 of WT, D71G, N231K)(SEQ ID NO. 210582), CA2 (aa 2-260 of WT, S56F, D71S)(SEQ ID NO. 210584), CA2 (aa 2-260 of WT, D52L, G128R, Q248F)(SEQ ID NO. 210586), CA2 (aa 2-260 of WT, S73X, R89X)(SEQ ID NO. 210588), CA2 (aa 2-260 of WT, Y51X, D72X, V241X, P249X)(SEQ ID NO. 210592), CA2 (aa 2-260 of WT, D72I, W97C)(SEQ ID NO. 210594), CA2 (aa 2-260 of WT, D71K, T192F, N231F)(SEQ ID NO. 210596), CA2 (aa 2-260 of WT, H36Q, S43T, Y51F, N67D, G131W, R226H)(SEQ ID NO. 210698), CA2 (aa 2-260 of WT, F70I, F146V)(SEQ ID NO. 210700), CA2 (aa 2-260 of WT, K45N, V68L, H119Y, K169R, D179E)(SEQ ID NO. 210704), CA2 (aa 2-260 of WT, H15L, A54V, K111E, E220K, F225I)(SEQ ID NO. 210706), CA2 (aa 2-260 of WT, P13S, P83A, D101G, K111N, F230I)(SEQ ID NO. 210708), CA2 (aa 2-260 of WT, G63D, W123R, E220K)(SEQ ID NO. 210712), CA2 (aa 2-260 of WT, N11D, E69K, G86D, V109M, K113I, T125I, D138G, G155S)(SEQ ID NO. 210714), CA2 (aa 2-260 of WT, I59N, G102R, A173T)(SEQ ID NO. 210716), CA2 (aa 2-260 of WT, L79F, P180S)(SEQ ID NO. 210718), CA2 (aa 2-260 of WT, A77P, G102R, D138N)(SEQ ID NO. 210724), CA2 (aa 2-260 of WT, F20L, K45N, G63D, E69V, N231I)(SEQ ID NO. 210726), CA2 (aa 2-260 of WT, T199N, L202P, L228F)(SEQ ID NO. 210728), CA2 (aa 2-260 of WT, K9N, H122Y, T168K)(SEQ ID NO. 210730), CA2 (aa 2-260 of WT, Q53H, L90V, Q92H, G131E)(SEQ ID NO. 210732), CA2 (aa 2-260 of WT, L44M, L47V, N62K, E69D)(SEQ ID NO. 210734), CA2 (aa 2-260 of WT, D75V, K169N, F259L)(SEQ ID NO. 210738), CA2 (aa 2-260 of WT, T207S, V222A, N231D)(SEQ ID NO. 210740), CA2 (aa 2-260 of WT, I59F, V206M, G232R)(SEQ ID NO. 210742), CA2 (aa 2-260 of WT, P13A, A133T)(SEQ ID NO. 210744), CA2 (aa 2-260 of WT, I59N, R89I)(SEQ ID NO. 210750), CA2 (aa 2-260 of WT, A65N, G86D, G131R, G155D, K158N, V162A, G170D, P236L)(SEQ ID NO. 210752), CA2 (aa 2-260 of WT, G12R, H15Y, D19V)(SEQ ID NO. 210754), CA2 (aa 2-260 of WT, A65V, F95Y, E106G, H107Q, I145M, F175I)(SEQ ID NO. 210758), and/or CA2 (aa 2-260 of WT, G63D, E69V, N231I)(SEQ ID NO. 210851 or 210847).

[0107] Also provided herein are isolated polypeptide variants comprising at least one mutation relative to SEQ ID NO. 11717. Non-limiting examples of mutations relative to SEQ ID NO. 11717 include A115L, A116Q, A116V, A133L, A133T, A141P, A152D, A152L, A152R, A173C, A173G, A173L, A173T, A23P, A247L, A247S, A257L, A257S, A38P, A38V, A54Q, A54V, A54X, A65L, A65N, A65V, A77I, A77P, A77Q, C205M, C205R, C205V, C205W, C205Y, D101G, D101M, D110I, D129I, D138G, D138M, D138N, D161*, D161M, D161V, D164G, D164I, D174*, D174T, D179E, D179I, D179R, D189G, D189I, D19T, D19V, D242G, D242T, D32T, D34T, D41T, D52I, D52L, D71F, D71G, D71K, D71M, D71S, D71Y, D72I, D72S, D72T, D72X, D75T, D75V, D85M, E106D, E106G, E106S, E117*, E117N, E14N, E186*, E186N, E204A, E204D, E204G, E204N, E213*, E213G, E213N, E220K, E220R, E220S, E233D, E233G, E233R, E235*, E235G, E235N, E237K, E237R, E238*, E238N, E238R, E26S, E69D, E69K, E69S, F130L, F146V, F175I, F175L, F175S, F178L, F178S, F20L, F20S, F225I, F225L, F225S, F225Y, F230I, F230L, F230S, F259L, F259S, F66S, F70I, F70L, F95Y, G102D, G104R, G104V, G128R, G12D, G12E, G131E, G131R, G131W, G139D, G144D, G144V, G150A, G150S, G150W, G155A, G155C, G155D, G155S, G170A, G170D, G182A, G182W, G195A, G195R, G232R, G232W, G234L, G234V, G25E, G63D, G63V, G81E, G81V, G82D, G86A, G86D, G98V, H107I, H107Q, H119T, H119Y, H122T, H122Y, H15L, H15T, H15Y, H17D, H17I, H36I, H36Q, H64M, H94T, H96T, I145F, I145M, I166H, I166L, I209D, I209L, I215H, I215S, I22L, I255N, I255S, I33S, I59F, I59N, I59S, I91F, K111E, K111N, K112R, K113I, K113N, K126N, K132E, K132R, K148E, K148R, K153*, K153N, K158E, K158N, K167*, K169N, K169R, K171Q, K171R, K18R, K212N, K212Q, K212R, K212W, K224E, K224N, K227*, K227N, K24R, K251E, K251R, K256Q, K260F, K260L, K260Q, K39S, K45N, K45S, K80M, K80R, L118F, L120W, L140V, L140W, L143*, L147*, L147F, L156F, L156H, L156P, L156Q, L163A, L163W, L183P, L183S, L184F, L184P, L188P, L188W, L197*, L197M, L197P, L197R, L197T, L202F, L202H, L202I, L202P, L202R, L202S, L203P, L203S, L203W, L211*, L211A, L211S, L223*, L223I, L223V, L228F, L228H, L228T, L239*, L239F, L239T, L250*, L250P, L250T, L44*, L44M, L47C, L47V, L57*, L57X, L60S, L79F, L79S, L84W, L90*, L90V, M240D, M240L, M240R, M240W, N11D, N11K, N124T, N177*, N177T, N229*, N229T, N231D, N231F, N231K, N231L, N231M, N231Q, N231T, N243Q, N243T, N252E, N252T, N61R, N61T, N61Y, N62K, N62M, N67D, N67T, P137L, P13A, P13H, P13L, P13S, P154L, P154R, P154T, P180L, P180S, P185L, P185S, P185V, P194Q, P200A, P200L, P200S, P200T, P201A, P201L, P201R, P201S, P214T, P236L, P236T, P246L, P246Q, P249A, P249F, P249H, P249I, P249X, P30L, P30S, P42L, P83A, Q103K, Q135S, Q136N, Q157R, Q157S, Q221A, Q221R, Q248F, Q248L, Q248S, Q254A, Q254K, Q28S, Q53H, Q53K, Q53N, Q74R, Q92H, Q92S, R181H, R181S, R181V, R226H, R226P, R226V, R245A, R253G, R253Q, R27A, R58G, R89D, R89F, R89I, R89X, R89Y, S105L, S105Q, S151A, S151I, S151Q, S165F, S165P, S172E, S172V, S187I, S187P, S196H, S196L, S216A, S216Q, S218A, S218Q, S219A, S219Q, S258F, S258P, S29C, S29P, S43P, S43T, S48L, S50P, S56F, S56N, S56P, S56X, S73L, S73N, S73X, S99H, T108L, T125I, T125P, T168K, T168N, T168Q, T176H, T176L, T192D, T192F, T192I, T192N, T192P, T192X, T198D, T198I, T198P, T199A, T199H, T199P, T207D, T207I, T207P, T207S, T35I, T35L, T37Q, T55L, T87L, V109M, V109W, V121F, V134C, V134F, V142F, V149G, V149L, V159L, V159S, V160C, V160L, V162A, V162C, V206*, V206C, V206M, V210C, V217L, V217R, V217S, V222A, V222C, V222G, V241G, V241W, V241X, V31L, V49F, V68L, V68W, V78C, W123G, W123R, W16G, W191*, W191G, W191L, W208G, W208L, W208S, W244*, W244G, W244L, W97C, W97G, Y114H, Y114M, Y127M, Y190*, Y190L, Y190T, Y193C, Y193F, Y193I, Y193L, Y193T, Y193V, Y193X, Y40M, Y51F, Y51M, Y51T, Y51X, Y88T, K9N, S29A

[0108] In some embodiments, the isolated polypeptide variant may be CA2 (aa 2-260 of WT, R27L, H122Y), CA2 (aa 2-260 of WT, T87I, H122Y), CA2 (aa 2-260 of WT, H122Y, N252D), CA2 (aa 2-260 of WT, D72F, V241F), CA2 (aa 2-260 of WT, V241F, P249L), CA2 (aa 2-260 of WT, D72F, P249L), CA2 (aa 2-260 of WT, D71L, L250R), CA2 (aa 2-260 of WT, D72F, P249F), CA2 (aa 2-260 of WT, T55K, G63N, Q248N), CA2 (aa 2-260 of WT, L156H, A257de1, S258de1, F259de1, K260de1), CA2 (aa 2-260 of WT, L156H, S2de1, H3de1, H4de1, W5de1), CA2 (aa 2-260 of WT, W4Y, L156H), CA2 (aa 2-260 of WT, L156H, G234de1, E235de1, P236de1), CA2 (aa 2-260 of WT, L156H, F225L), CA2 (aa 2-260 of WT, D70N, D74N, D100N, L156H), (CA2 (aa 2-260 of WT, I59N, G102R)(SEQ ID NO. 210598), CA2 (aa 2-260 of WT, G63D, E69V, N231I)(SEQ ID NO. 210748), CA2 (aa 2-260 of WT, R27L, T87I, H122Y, N252D)(SEQ ID NO. 210702), CA2 (aa 2-260 of WT, D72F, V241F, P249L)(SEQ ID NO. 210503), CA2 (aa 2-260 of WT, D71L, T87N, L250R)(SEQ ID NO. 210510), CA2 (aa 2-260 of WT, L156H, S172C, F178Y, E186D)(SEQ ID NO. 210756), CA2 (aa 2-260 of WT, D71F, N231F)(SEQ ID NO. 210505), CA2 (aa 2-260 of WT, A77I, P249F)(SEQ ID NO. 210514), CA2 (aa 2-260 of WT, D71K, P249H)(SEQ ID NO. 210516), CA2 (aa 2-260 of WT, D72F, P249H)(SEQ ID NO. 210518), CA2 (aa 2-260 of WT, Q53N, N61Y)(SEQ ID NO. 210521), CA2 (aa 2-260 of WT, E106D, C205S)(SEQ ID NO. 210523), CA2 (aa 2-260 of WT, C205S, W208S)(SEQ ID NO. 210525), CA2 (aa 2-260 of WT, S73N, R89Y)(SEQ ID NO. 210532), CA2 (aa 2-260 of WT, D71K, T192F)(SEQ ID NO. 210534), CA2 (aa 2-260 of WT, Y193L, K260L)(SEQ ID NO. 210540), CA2 (aa 2-260 of WT, D71F, V241F, P249L)(SEQ ID NO. 210544), CA2 (aa 2-260 of WT, L147F, Q248F)(SEQ ID NO. 210548), CA2 (aa 2-260 of WT, D52I, S258P)(SEQ ID NO. 210550), CA2 (aa 2-260 of WT, D72S, T192N)(SEQ ID NO. 210552), CA2 (aa 2-260 of WT, D179E, T192I)(SEQ ID NO. 210554), CA2 (aa 2-260 of WT, S56N, Q103K)(SEQ ID NO. 210558), CA2 (aa 2-260 of WT, D71Y, Q248L)(SEQ ID NO. 210560), CA2 (aa 2-260 of WT, S73N, R89F)(SEQ ID NO. 210562), CA2 (aa 2-260 of WT, D71K, N231L, E235G, L239F)(SEQ ID NO. 210564), CA2 (aa 2-260 of WT, D72F, P249I)(SEQ ID NO. 210568), CA2 (aa 2-260 of WT, D72X, V241X, P249X)(SEQ ID NO. 210572), CA2 (aa 2-260 of WT, A54X, S56X, L57X, T192X)(SEQ ID NO. 210574), CA2 (aa 2-260 of WT, Y193V, K260F)(SEQ ID NO. 210576), CA2 (aa 2-260 of WT, G63D, M240L)(SEQ ID NO. 210578), CA2 (aa 2-260 of WT, V134F, L228F)(SEQ ID NO. 210580), CA2 (aa 2-260 of WT, D71G, N231K)(SEQ ID NO. 210582), CA2 (aa 2-260 of WT, S56F, D71S)(SEQ ID NO. 210584), CA2 (aa 2-260 of WT, D52L, G128R, Q248F)(SEQ ID NO. 210586), CA2 (aa 2-260 of WT, S73X, R89X)(SEQ ID NO. 210588), CA2 (aa 2-260 of WT, Y51X, D72X, V241X, P249X)(SEQ ID NO. 210592), CA2 (aa 2-260 of WT, D72I, W97C)(SEQ ID NO. 210594), CA2 (aa 2-260 of WT, D71K, T192F, N231F)(SEQ ID NO. 210596), CA2 (aa 2-260 of WT, H36Q, S43T, Y51F, N67D, G131W, R226H)(SEQ ID NO. 210698), CA2 (aa 2-260 of WT, F70I, F146V)(SEQ ID NO. 210700), CA2 (aa 2-260 of WT, K45N, V68L, H119Y, K169R, D179E)(SEQ ID NO. 210704), CA2 (aa 2-260 of WT, H15L, A54V, K111E, E220K, F225I)(SEQ ID NO. 210706), CA2 (aa 2-260 of WT, P13S, P83A, D101G, K111N, F230I)(SEQ ID NO. 210708), CA2 (aa 2-260 of WT, G63D, W123R, E220K)(SEQ ID NO. 210712), CA2 (aa 2-260 of WT, N11D, E69K, G86D, V109M, K113I, T125I, D138G, G155S)(SEQ ID NO. 210714), CA2 (aa 2-260 of WT, I59N, G102R, A173T)(SEQ ID NO. 210716), CA2 (aa 2-260 of WT, L79F, P180S)(SEQ ID NO. 210718), CA2 (aa 2-260 of WT, A77P, G102R, D138N)(SEQ ID NO. 210724), CA2 (aa 2-260 of WT, F20L, K45N, G63D, E69V, N231I)(SEQ ID NO. 210726), CA2 (aa 2-260 of WT, T199N, L202P, L228F)(SEQ ID NO. 210728), CA2 (aa 2-260 of WT, K9N, H122Y, T168K)(SEQ ID NO. 210730), CA2 (aa 2-260 of WT, Q53H, L90V, Q92H, G131E)(SEQ ID NO. 210732), CA2 (aa 2-260 of WT, L44M, L47V, N62K, E69D)(SEQ ID NO. 210734), CA2 (aa 2-260 of WT, D75V, K169N, F259L)(SEQ ID NO. 210738), CA2 (aa 2-260 of WT, T207S, V222A, N231D)(SEQ ID NO. 210740), CA2 (aa 2-260 of WT, I59F, V206M, G232R)(SEQ ID NO. 210742), CA2 (aa 2-260 of WT, P13A, A133T)(SEQ ID NO. 210744), CA2 (aa 2-260 of WT, I59N, R89I)(SEQ ID NO. 210750), CA2 (aa 2-260 of WT, A65N, G86D, G131R, G155D, K158N, V162A, G170D, P236L)(SEQ ID NO. 210752), CA2 (aa 2-260 of WT, G12R, H15Y, D19V)(SEQ ID NO. 210754), CA2 (aa 2-260 of WT, A65V, F95Y, E106G, H107Q, I145M, F175I)(SEQ ID NO. 210758), and/or CA2 (aa 2-260 of WT, G63D, E69V, N231I)(SEQ ID NO. 210851 or 210847).

[0109] Also provided herein are biocircuit systems that include at least one effector module. The effector module of the biocircuit may include a stimulus response element (SRE), and the SRE may include in whole or in part, human carbonic anhydrase 2 (CA2; SEQ ID NO. 11717). The biocircuits may also include at least one payload, which may be attached, appended or associated with the SRE.

[0110] The SRE of the biocircuit system which includes, in whole or in part, human carbonic anhydrase 2 (CA2; SEQ ID NO. 11717), may include one, two, three or more mutations such as, but not limited to, A115L, A116Q, A116V, A133L, A133T, A141P, A152D, A152L, A152R, A173C, A173G, A173L, A173T, A23P, A247L, A247S, A257L, A257S, A38P, A38V, A54Q, A54V, A54X, A65L, A65N, A65V, A77I, A77P, A77Q, C205M, C205R, C205V, C205W, C205Y, D101G, D101M, D110I, D129I, D138G, D138M, D138N, D161*, D161M, D161V, D164G, D164I, D174*, D174T, D179E, D179I, D179R, D189G, D189I, D19T, D19V, D242G, D242T, D32T, D34T, D41T, D52I, D52L, D71F, D71G, D71K, D71M, D71S, D71Y, D72I, D72S, D72T, D72X, D75T, D75V, D85M, E106D, E106G, E106S, E117*, E117N, E14N, E186*, E186N, E204A, E204D, E204G, E204N, E213*, E213G, E213N, E220K, E220R, E220S, E233D, E233G, E233R, E235*, E235G, E235N, E237K, E237R, E238*, E238N, E238R, E26S, E69D, E69K, E69S, F130L, F146V, F175I, F175L, F175S, F178L, F178S, F20L, F20S, F225I, F225L, F225S, F225Y, F230I, F230L, F230S, F259L, F259S, F66S, F70I, F70L, F95Y, G102D, G104R, G104V, G128R, G12D, G12E, G131E, G131R, G131W, G139D, G144D, G144V, G150A, G150S, G150W, G155A, G155C, G155D, G155S, G170A, G170D, G182A, G182W, G195A, G195R, G232R, G232W, G234L, G234V, G25E, G63D, G63V, G81E, G81V, G82D, G86A, G86D, G98V, H107I, H107Q, H119T, H119Y, H122T, H122Y, H15L, H15T, H15Y, H17D, H17I, H36I, H36Q, H64M, H94T, H96T, I145F, I145M, I166H, I166L, I209D, I209L, I215H, I215S, I22L, I255N, I255S, I33S, I59F, I59N, I59S, I91F, K111E, K111N, K112R, K113I, K113N, K126N, K132E, K132R, K148E, K148R, K153*, K153N, K158E, K158N, K167*, K169N, K169R, K171Q, K171R, K18R, K212N, K212Q, K212R, K212W, K224E, K224N, K227*, K227N, K24R, K251E, K251R, K256Q, K260F, K260L, K260Q, K39S, K45N, K45S, K80M, K80R, L118F, L120W, L140V, L140W, L143*, L147*, L147F, L156F, L156H, L156P, L156Q, L163A, L163W, L183P, L183S, L184F, L184P, L188P, L188W, L197*, L197M, L197P, L197R, L197T, L202F, L202H, L202I, L202P, L202R, L202S, L203P, L203S, L203W, L211*, L211A, L211S, L223*, L223I, L223V, L228F, L228H, L228T, L239*, L239F, L239T, L250*, L250P, L250T, L44*, L44M, L47C, L47V, L57*, L57X, L60S, L79F, L79S, L84W, L90*, L90V, M240D, M240L, M240R, M240W, N11D, N11K, N124T, N177*, N177T, N229*, N229T, N231D, N231F, N231K, N231L, N231M, N231Q, N231T, N243Q, N243T, N252E, N252T, N61R, N61T, N61Y, N62K, N62M, N67D, N67T, P137L, P13A, P13H, P13L, P13S, P154L, P154R, P154T, P180L, P180S, P185L, P185S, P185V, P194Q, P200A, P200L, P200S, P200T, P201A, P201L, P201R, P201S, P214T, P236L, P236T, P246L, P246Q, P249A, P249F, P249H, P249I, P249X, P30L, P30S, P42L, P83A, Q103K, Q135S, Q136N, Q157R, Q157S, Q221A, Q221R, Q248F, Q248L, Q248S, Q254A, Q254K, Q28S, Q53H, Q53K, Q53N, Q74R, Q92H, Q92S, R181H, R1I8S, R181V, R226H, R226P, R226V, R245A, R253G, R253Q, R27A, R58G, R89D, R89F, R89I, R89X, R89Y, S105L, S105Q, S151A, S151I, S151Q, S165F, S165P, S172E, S172V, S187I, S187P, S196H, S196L, S216A, S216Q, S218A, S218Q, S219A, S219Q, S258F, S258P, S29C, S29P, S43P, S43T, S48L, S50P, S56F, S56N, S56P, S56X, S73L, S73N, S73X, S99H, T108L, T125I, T125P, T168K, T168N, T168Q, T176H, T176L, T192D, T192F, T192I, T192N, T192P, T192X, T198D, T198I, T198P, T199A, T199H, T199P, T207D, T207I, T207P, T207S, T35I, T35L, T37Q, T55L, T87L, V109M, V109W, V121F, V134C, V134F, V142F, V149G, V149L, V159L, V159S, V160C, V160L, V162A, V162C, V206*, V206C, V206M, V210C, V217L, V217R, V217S, V222A, V222C, V222G, V241G, V241W, V241X, V31L, V49F, V68L, V68W, V78C, W123G, W123R, W16G, W191*, W191G, W191L, W208G, W208L, W208S, W244*, W244G, W244L, W97C, W97G, Y114H, Y114M, Y127M, Y190*, Y190L, Y190T, Y193C, Y193F, Y193I, Y193L, Y193T, Y193V, Y193X, Y40M, Y51F, Y51M, Y51T, Y51X, Y88T, K9N, S29A.

[0111] In some aspects, the SRE may be selected from, but not limited to, CA2 (aa 2-260 of WT, R27L, H122Y), CA2 (aa 2-260 of WT, T87I, H122Y), CA2 (aa 2-260 of WT, H122Y, N252D), CA2 (aa 2-260 of WT, D72F, V241F), CA2 (aa 2-260 of WT, V241F, P249L), CA2 (aa 2-260 of WT, D72F, P249L), CA2 (aa 2-260 of WT, D71L, L250R), CA2 (aa 2-260 of WT, D72F, P249F), CA2 (aa 2-260 of WT, T55K, G63N, Q248N), CA2 (aa 2-260 of WT, L156H, A257de1, S258de1, F259de1, K260de1), CA2 (aa 2-260 of WT, L156H, S2de1, H3de1, H4de1, W5de1), CA2 (aa 2-260 of WT, W4Y, L156H), CA2 (aa 2-260 of WT, L156H, G234de1, E235de1, P236de1), CA2 (aa 2-260 of WT, L156H, F225L), CA2 (aa 2-260 of WT, D70N, D74N, D100N, L156H), (CA2 (aa 2-260 of WT, I59N, G102R)(SEQ ID NO. 210598), CA2 (aa 2-260 of WT, G63D, E69V, N231I)(SEQ ID NO. 210748), CA2 (aa 2-260 of WT, R27L, T87I, H122Y, N252D)(SEQ ID NO. 210702), CA2 (aa 2-260 of WT, D72F, V241F, P249L)(SEQ ID NO. 210503), CA2 (aa 2-260 of WT, D71L, T87N, L250R)(SEQ ID NO. 210510), CA2 (aa 2-260 of WT, L156H, S172C, F178Y, E186D)(SEQ ID NO. 210756), CA2 (aa 2-260 of WT, D71F, N231F)(SEQ ID NO. 210505), CA2 (aa 2-260 of WT, A77I, P249F)(SEQ ID NO. 210514), CA2 (aa 2-260 of WT, D71K, P249H)(SEQ ID NO. 210516), CA2 (aa 2-260 of WT, D72F, P249H)(SEQ ID NO. 210518), CA2 (aa 2-260 of WT, Q53N, N61Y)(SEQ ID NO. 210521), CA2 (aa 2-260 of WT, E106D, C205S)(SEQ ID NO. 210523), CA2 (aa 2-260 of WT, C205S, W208S)(SEQ ID NO. 210525), CA2 (aa 2-260 of WT, S73N, R89Y)(SEQ ID NO. 210532), CA2 (aa 2-260 of WT, D71K, T192F)(SEQ ID NO. 210534), CA2 (aa 2-260 of WT, Y193L, K260L)(SEQ ID NO. 210540), CA2 (aa 2-260 of WT, D71F, V241F, P249L)(SEQ ID NO. 210544), CA2 (aa 2-260 of WT, L147F, Q248F)(SEQ ID NO. 210548), CA2 (aa 2-260 of WT, D52I, S258P)(SEQ ID NO. 210550), CA2 (aa 2-260 of WT, D72S, T192N)(SEQ ID NO. 210552), CA2 (aa 2-260 of WT, D179E, T192I)(SEQ ID NO. 210554), CA2 (aa 2-260 of WT, S56N, Q103K)(SEQ ID NO. 210558), CA2 (aa 2-260 of WT, D71Y, Q248L)(SEQ ID NO. 210560), CA2 (aa 2-260 of WT, S73N, R89F)(SEQ ID NO. 210562), CA2 (aa 2-260 of WT, D71K, N231L, E235G, L239F)(SEQ ID NO. 210564), CA2 (aa 2-260 of WT, D72F, P249I)(SEQ ID NO. 210568), CA2 (aa 2-260 of WT, D72X, V241X, P249X)(SEQ ID NO. 210572), CA2 (aa 2-260 of WT, A54X, S56X, L57X, T192X)(SEQ ID NO. 210574), CA2 (aa 2-260 of WT, Y193V, K260F)(SEQ ID NO. 210576), CA2 (aa 2-260 of WT, G63D, M240L)(SEQ ID NO. 210578), CA2 (aa 2-260 of WT, V134F, L228F)(SEQ ID NO. 210580), CA2 (aa 2-260 of WT, D71G, N231K)(SEQ ID NO. 210582), CA2 (aa 2-260 of WT, S56F, D71S)(SEQ ID NO. 210584), CA2 (aa 2-260 of WT, D52L, G128R, Q248F)(SEQ ID NO. 210586), CA2 (aa 2-260 of WT, S73X, R89X)(SEQ ID NO. 210588), CA2 (aa 2-260 of WT, Y51X, D72X, V241X, P249X)(SEQ ID NO. 210592), CA2 (aa 2-260 of WT, D72I, W97C)(SEQ ID NO. 210594), CA2 (aa 2-260 of WT, D71K, T192F, N231F)(SEQ ID NO. 210596), CA2 (aa 2-260 of WT, H36Q, S43T, Y51F, N67D, G131W, R226H)(SEQ ID NO. 210698), CA2 (aa 2-260 of WT, F70I, F146V)(SEQ ID NO. 210700), CA2 (aa 2-260 of WT, K45N, V68L, H119Y, K169R, D179E)(SEQ ID NO. 210704), CA2 (aa 2-260 of WT, H15L, A54V, K111E, E220K, F225I)(SEQ ID NO. 210706), CA2 (aa 2-260 of WT, P13S, P83A, D101G, K111N, F230I)(SEQ ID NO. 210708), CA2 (aa 2-260 of WT, G63D, W123R, E220K)(SEQ ID NO. 210712), CA2 (aa 2-260 of WT, N11D, E69K, G86D, V109M, K113I, T125I, D138G, G155S)(SEQ ID NO. 210714), CA2 (aa 2-260 of WT, I59N, G102R, A173T)(SEQ ID NO. 210716), CA2 (aa 2-260 of WT, L79F, P180S)(SEQ ID NO. 210718), CA2 (aa 2-260 of WT, A77P, G102R, D138N)(SEQ ID NO. 210724), CA2 (aa 2-260 of WT, F20L, K45N, G63D, E69V, N231I)(SEQ ID NO. 210726), CA2 (aa 2-260 of WT, T199N, L202P, L228F)(SEQ ID NO. 210728), CA2 (aa 2-260 of WT, K9N, H122Y, T168K)(SEQ ID NO. 210730), CA2 (aa 2-260 of WT, Q53H, L90V, Q92H, G131E)(SEQ ID NO. 210732), CA2 (aa 2-260 of WT, L44M, L47V, N62K, E69D)(SEQ ID NO. 210734), CA2 (aa 2-260 of WT, D75V, K169N, F259L)(SEQ ID NO. 210738), CA2 (aa 2-260 of WT, T207S, V222A, N231D)(SEQ ID NO. 210740), CA2 (aa 2-260 of WT, I59F, V206M, G232R)(SEQ ID NO. 210742), CA2 (aa 2-260 of WT, P13A, A133T)(SEQ ID NO. 210744), CA2 (aa 2-260 of WT, I59N, R89I)(SEQ ID NO. 210750), CA2 (aa 2-260 of WT, A65N, G86D, G131R, G155D, K158N, V162A, G170D, P236L)(SEQ ID NO. 210752), CA2 (aa 2-260 of WT, G12R, H15Y, D19V)(SEQ ID NO. 210754), CA2 (aa 2-260 of WT, A65V, F95Y, E106G, H107Q, I145M, F175I)(SEQ ID NO. 210758), and/or CA2 (aa 2-260 of WT, G63D, E69V, N231I)(SEQ ID NO. 210851 or 210847).

[0112] The biocircuit system described herein may include SREs that are responsive to one or more stimuli.

[0113] In some embodiments, the stimulus may be a small molecule, wherein the small molecule is Celecoxib, Valdecoxib, Rofecoxib, Acetazolamide, Methazolamide, Dorzolamide, Brinzolamide, Diclofenamide, Ethoxzolamide, Zonisamide, Dansylamide, and Dichlorphenamide. In embodiment, the small molecule may be Acetazolamide.

[0114] Also described herein are vectors encoding the biocircuit systems, and pharmaceutical compositions that include the biocircuit systems and pharmaceutically acceptable excipients.

### Payloads

[0115] As used herein a “payload” or “target payload” or “payload of interest (POI)” is defined as any protein or nucleic acid whose function is to be altered.

[0116] Payloads may include any coding or non-coding gene or any protein or fragment thereof.

[0117] Payloads are often associated with one or more SREs and may be encoded alone or in combination with one or more SRE in a polynucleotide of the present disclosure. Payloads themselves may be altered (at the protein or nucleic acid level) thereby providing for an added layer of tenability of the effector module. For example, payloads may be engineered or designed to contain mutations, single or multiple, which affect the stability of the payload or its susceptibility to degradation, cleavage or trafficking. The combination of an SRE which can have a spectrum of responses to a stimulus with a payload which is altered to exhibit a variety of responses or gradations of output signals, e.g., expression levels, produce biocircuits which are superior to those in the art. For example, mutations or substitutional designs such as those created for IL12 in WO2016048903 (specifically in Example 1 therein), the contents of which are incorporated herein by reference in their entirety, may be used in any protein payload in conjunction with an SRE of the present disclosure to create dual tunable biocircuits. The ability to independently tune both the SRE and the payload greatly increases the scope of uses of the effector modules of the present disclosure.

[0118] Artificial peptides or polypeptide components of the payload may be derived from any known polypeptide which is not naturally occurring.

[0119] As used herein, the phrase “derived from” as it relates to effector modules, SRE's or payloads means that the effector module, SRE or payload originates at least in part from the stated parent molecule or sequence. For example, in designing an SRE, such SRE may be derived from an epitope or region of a naturally occurring protein but then have been modified in any of the ways taught herein to optimize the SRE function.

[0120] In one embodiment, the payload is derived from a region of parent protein or from a mutant protein. The region of the parent protein may be 10, 11, 12, 13, 14, 15, 16, 17, 18, 19, 20, 21, 22, 23, 24, 25, 26, 27, 28, 29, 30, 31, 32, 33, 34, 35, 36, 37, 38, 39, 40, 41, 42, 43, 44, 45, 46, 47, 48, 49, 50, 51, 52, 53, 54, 55, 56, 57, 58, 59, 60, 61, 62, 63, 64, 65, 66, 67, 68, 69, 70, 71, 72, 73, 74, 75, 76, 77, 78, 79, 80, 81, 82, 83, 84, 85, 86, 87, 88, 89, 90, 91, 92, 93, 94, 95, 96, 97, 98, 99, 100, 101, 102, 103, 104, 105, 106, 107, 108, 109, 110, 111, 112, 113, 114, 115, 116, 117, 118, 119, 120, 121, 122, 123, 124, 125, 126, 127, 128, 129, 130, 131, 132, 133, 134, 135, 136, 137, 138, 139, 140, 141, 142, 143, 144, 145, 146, 147, 148, 149, 150, 151, 152, 153, 154, 155, 156, 157, 158, 159, 160, 161, 162,163, 164, 165, 166, 167, 168, 169, 170, 171, 172, 173, 174, 175, 176, 177, 178, 179, 180, 181, 182, 183, 184, 185, 186, 187, 188, 189, 190, 191, 192, 193, 194, 195, 196, 197, 198, 199, 200, 201, 202, 203, 204, 205, 206, 207, 208, 209, 210, 211, 212, 213, 214, 215, 216, 217, 218, 219, 220, 221, 222, 223, 224, 225, 226, 227, 228, 229, 230, 231, 232, 233, 234, 235, 236, 237, 238, 239, 240, 241, 242, 243, 244, 245, 246, 247, 248, 249, 250, 251, 252, 253, 254, 255, 256, 257, 258, 259, 260, 261, 262, 263, 264, 265, 266, 267, 268, 269, 270, 271, 272, 273, 274, 275, 276, 277, 278, 279, 280, 281, 282, 283, 284, 285, 286, 287, 288, 289, 290, 291, 292, 293, 294, 295, 296, 297, 298, 299, 300, 301, 302, 303, 304, 305, 306, 307, 308, 309, 310, 311, 312, 313, 314, 315, 316, 317, 318, 319, 320, 321, 322, 323, 324, 325, 326, 327, 328, 329, 330, 331, 332, 333, 334, 335, 336, 337, 338, 339, 340, 341, 342, 343, 344, 345, 346, 347, 348, 349, 350, 351, 352, 353, 354, 355, 356, 357, 358, 359, 360, 361, 362, 363, 364, 365, 366, 367, 368, 369, 370, 371, 372, 373, 374, 375, 376, 377, 378, 379, 380, 381, 382, 383, 384, 385, 386, 387, 388, 389, 390, 391, 392, 393, 394, 395, 396, 397, 398, 399, 400, 401, 402, 403, 404, 405, 406, 407, 408, 409, 410, 411, 412, 413, 414, 415, 416, 417, 418, 419, 420, 421, 422, 423, 424, 425, 426, 427, 428, 429, 430, 431, 432, 433, 434, 435, 436, 437, 438, 439, 440, 441, 442, 443, 444, 445, 446, 447, 448, 449, 450, or more than 450 amino acids in length. The region of the parent protein may be 5-50, 25-75, 50-100, 75-125, 100-150, 125-175, 150-200, 175-225, 200-250, 225-275, 250-300, 275-325, 300-350, 325-375, 350-400, 375-425, or 400-450 amino acids in length.

[0121] In one embodiment, the payload is derived from a region of parent protein or from a mutant protein and includes a region of the parent protein. The payload may include a region of the parent protein which is 1%, 5%, 10%, 15%, 20%, 25%, 30%, 35%, 40%, 45%, 50%, 55%, 60%, 65%, 70%, 75%, 80%, 85%, 90%, 95%, 99%, or 100%, 5-10%, 10-15%, 15-20%, 20-25%, 25-30%, 30-35%, 35-40%, 40-45%, 45-50%, 50-55%, 55-60%, 60-65%, 65-70%, 70-75%, 75-80%, 80-85%, 85-90%, 90-95%, 95-100%, 10-20%, 20-30%, 30-40%, 40-50%, 50-60%, 60-70%, 70-80%, 80-90%, 90-100%, 10-30%, 20-40%, 30-50%, 40-60%, 50-70%, 60-80%, 70-90%, 80-100%, 10-40%, 20-50%, 30-60%, 40-70%, 50-80%, 60-90%, 70-100%, 10-50%, 20-60%, 30-70%, 40-80%, 50-90%, 60-100%, 10-60%, 20-70%, 30-80%, 40-90%, 50-100%, 10-70%, 20-80%, 30-90%, 40-100%, 10-80%, 20-90%, 30-100%, 10-90%, 20-100%, 25-50%, 50-75%, or 75-100% of the parent protein or mutant protein.

[0122] In one embodiment, the payload is derived from a parent protein or from a mutant protein and may have 1%, 5%, 10%, 15%, 20%, 25%, 30%, 35%, 40%, 45%, 50%, 55%, 60%, 65%, 70%, 75%, 80%, 85%, 90%, 95%, 99%, or 100%, 5-10%, 10-15%, 15-20%, 20-25%, 25-30%, 30-35%, 35-40%, 40-45%, 45-50%, 50-55%, 55-60%, 60-65%, 65-70%, 70-75%, 75-80%, 80-85%, 85-90%, 90-95%, 95-100%, 10-20%, 20-30%, 30-40%, 40-50%, 50-60%, 60-70%, 70-80%, 80-90%, 90-100%, 10-30%, 20-40%, 30-50%, 40-60%, 50-70%, 60-80%, 70-90%, 80-100%, 10-40%, 20-50%, 30-60%, 40-70%, 50-80%, 60-90%, 70-100%, 10-50%, 20-60%, 30-70%, 40-80%, 50-90%, 60-100%, 10-60%, 20-70%, 30-80%, 40-90%, 50-100%, 10-70%, 20-80%, 30-90%, 40-100%, 10-80%, 20-90%, 30-100%, 10-90%, 20-100%, 25-50%, 50-75%, or 75-100% identity to the parent protein or mutant protein.

[0123] In one embodiment, the transmembrane domain region of a first payload may be replaced with a transmembrane domain, variant or fragment thereof, from a second parent protein.

### Polypeptides and Polypeptides as Payloads

[0124] The stimuli, biocircuit components, effector modules, including their SREs and payloads of the present disclosure may exist as a whole polypeptide, a plurality of polypeptides or fragments of polypeptides, which independently may be encoded by one or more nucleic acids, a plurality of nucleic acids, fragments of nucleic acids or variants of any of the aforementioned.

[0125] As used herein, the term “polypeptide” refers to a polymer of amino acid residues (natural or unnatural) linked together most often by peptide bonds. The term, as used herein, refers to proteins, polypeptides, and peptides of any size, structure, or function. In some instances, the polypeptide encoded is smaller than about 50 amino acids and the polypeptide is then termed a peptide. If the polypeptide is a peptide, it will be at least about 2, 3, 4, or at least 5 amino acid residues long. Thus, polypeptides include gene products, naturally occurring polypeptides, synthetic polypeptides, homologs, orthologs, paralogs, fragments and other equivalents, variants, and analogs of the foregoing. A polypeptide may be a single molecule or may be a multi-molecular complex such as a dimer, trimer or tetramer. They may also comprise single chain or multichain polypeptides and may be associated or linked. The term polypeptide may also apply to amino acid polymers in which one or more amino acid residues are an artificial chemical analogue of a corresponding naturally occurring amino acid.

[0126] As used herein, the term “polypeptide variant” refers to molecules which differ in their amino acid sequence from a native or reference sequence. The amino acid sequence variants may possess substitutions, deletions, and/or insertions at certain positions within the amino acid sequence, as compared to a native or reference sequence. Ordinarily, variants will possess at least about 50% identity (homology) to a native or reference sequence, and preferably, they will be at least about 80%, more preferably at least about 90% identical (homologous) to a native or reference sequence.

[0127] In some embodiments “variant mimics” are provided. As used herein, the term “variant mimic” refers to a variant which contains one or more amino acids which would mimic an activated sequence. For example, glutamate may serve as a mimic for phospho-threonine and/or phospho-serine. Alternatively, variant mimics may result in deactivation or in an inactivated product containing the mimic, e.g., phenylalanine may act as an inactivating substitution for tyrosine; or alanine may act as an inactivating substitution for serine. The amino acid sequences of the pharmaceutical compositions, biocircuits, biocircuit components, effector modules including their SREs or payloads of the present disclosure may comprise naturally occurring amino acids and as such may be considered to be proteins, peptides, polypeptides, or fragments thereof. Alternatively, the pharmaceutical compositions, biocircuits, biocircuit components, effector modules including their SREs or payloads may comprise both naturally and non-naturally occurring amino acids.

[0128] As used herein, the term “amino acid sequence variant” refers to molecules with some differences in their amino acid sequences as compared to a native or starting sequence. The amino acid sequence variants may possess substitutions, deletions, and/or insertions at certain positions within the amino acid sequence. As used herein, the terms “native” or “starting” when referring to sequences are relative terms referring to an original molecule against which a comparison may be made. Native or starting sequences should not be confused with wild type sequences. Native sequences or molecules may represent the wild-type (that sequence found in nature) but do not have to be identical to the wild-type sequence.

[0129] Ordinarily, variants will possess at least about 70% homology to a native sequence, and preferably, they will be at least about 80%, more preferably at least about 90% homologous to a native sequence.

[0130] As used herein, the term “homology” as it applies to amino acid sequences is defined as the percentage of residues in the candidate amino acid sequence that are identical with the residues in the amino acid sequence of a second sequence after aligning the sequences and introducing gaps, if necessary, to achieve the maximum percent homology. Methods and computer programs for the alignment are well known in the art. It is understood that homology depends on a calculation of percent identity but may differ in value due to gaps and penalties introduced in the calculation.

[0131] As used herein, the term “homolog” as it applies to amino acid sequences is meant the corresponding sequence of other species having substantial identity to a second sequence of a second species.

[0132] As used herein, the term “analog” is meant to include polypeptide variants which differ by one or more amino acid alterations, e.g., substitutions, additions or deletions of amino acid residues that still maintain the properties of the parent polypeptide.

[0133] As used herein, the term “derivative” is used synonymously with the term “variant” and refers to a molecule that has been modified or changed in any way relative to a reference molecule or starting molecule.

[0134] The present disclosure contemplates several types of pharmaceutical compositions, biocircuits, biocircuit components, effector modules including their SREs or payloads which are amino acid based including variants and derivatives. These include substitutional, insertional, deletional and covalent variants and derivatives. As such, included within the scope of this disclosure are pharmaceutical compositions, biocircuits, biocircuit components, effector modules including their SREs or payloads comprising substitutions, insertions, additions, deletions and/or covalent modifications. For example, sequence tags or amino acids, such as one or more lysines, can be added to peptide sequences of the disclosure (e.g., at the N-terminal or C-terminal ends). Sequence tags can be used for peptide purification or localization. Lysines can be used to increase peptide solubility or to allow for biotinylation. Alternatively, amino acid residues located at the carboxy and amino terminal regions of the amino acid sequence of a peptide or protein may optionally be deleted providing for truncated sequences. Certain amino acids (e.g., C-terminal or N-terminal residues) may alternatively be deleted depending on the use of the sequence, as for example, expression of the sequence as part of a larger sequence which is soluble or linked to a solid support.

[0135] “Substitutional variants” when referring to proteins are those that have at least one amino acid residue in a native or starting sequence removed and a different amino acid inserted in its place at the same position. The substitutions may be single, where only one amino acid in the molecule has been substituted, or they may be multiple, where two or more amino acids have been substituted in the same molecule.

[0136] As used herein, the term “conservative amino acid substitution” refers to the substitution of an amino acid that is normally present in the sequence with a different amino acid of similar size, charge, or polarity. Examples of conservative substitutions include the substitution of a non-polar (hydrophobic) residue such as isoleucine, valine and leucine for another non-polar residue. Likewise, examples of conservative substitutions include the substitution of one polar (hydrophilic) residue for another such as between arginine and lysine, between glutamine and asparagine, and between glycine and serine. Additionally, the substitution of a basic residue such as lysine, arginine or histidine for another, or the substitution of one acidic residue such as aspartic acid or glutamic acid for another acidic residue are additional examples of conservative substitutions. Examples of non-conservative substitutions include the substitution of a non-polar (hydrophobic) amino acid residue such as isoleucine, valine, leucine, alanine, methionine for a polar (hydrophilic) residue such as cysteine, glutamine, glutamic acid or lysine and/or a polar residue for a non-polar residue.

[0137] As used herein, the term “insertional variants” when referring to proteins are those with one or more amino acids inserted immediately adjacent to an amino acid at a particular position in a native or starting sequence. As used herein, the term “immediately adjacent” refers to an adjacent amino acid that is connected to either the alpha-carboxy or alpha-amino functional group of a starting or reference amino acid.

[0138] As used herein, the term “deletional variants” when referring to proteins, are those with one or more amino acids in the native or starting amino acid sequence removed. Ordinarily, deletional variants will have one or more amino acids deleted in a particular region of the molecule.

[0139] As used herein, the term “derivatives,” as referred to herein includes variants of a native or starting protein comprising one or more modifications with organic proteinaceous or non-proteinaceous derivatizing agents, and post-translational modifications. Covalent modifications are traditionally introduced by reacting targeted amino acid residues of the protein with an organic derivatizing agent that is capable of reacting with selected side-chains or terminal residues, or by harnessing mechanisms of post-translational modifications that function in selected recombinant host cells. The resultant covalent derivatives are useful in programs directed at identifying residues important for biological activity, for immunoassays, or for the preparation of anti-protein antibodies for immunoaffinity purification of the recombinant glycoprotein. Such modifications are within the ordinary skill in the art and are performed without undue experimentation.

[0140] As used herein, the term “site,” as it pertains to amino acids-based embodiments is used synonymously with “amino acid residue” and “amino acid side chain”. A site represents a position within a peptide or polypeptide that may be modified, manipulated, altered, derivatized or varied within the polypeptide-based molecules of the present disclosure.

[0141] As used herein, the terms “termini” or “terminus,” when referring to proteins refers to an extremity of a peptide or polypeptide. Such extremity is not limited only to the first or final site of the peptide or polypeptide but may include additional amino acids in the terminal regions. The polypeptide-based molecules of the present disclosure may be characterized as having both an N-terminus (terminated by an amino acid with a free amino group (NH2)) and a C-terminus (terminated by an amino acid with a free carboxyl group (COOH)).

[0142] Polypeptides or proteins of the disclosure are in some cases made up of multiple polypeptide chains brought together by disulfide bonds or by non-covalent forces (multimers, oligomers). These sorts of proteins will have multiple N- and C-termini. Alternatively, the termini of the polypeptides may be modified such that they begin or end, as the case may be, with a non-polypeptide-based moiety such as an organic conjugate.

[0143] Once any of the features have been identified or defined as a component of a biocircuit system component, stimulus, effector module including the SREs or payloads of the disclosure, any of several manipulations and/or modifications of these features may be performed by moving, swapping, inverting, deleting, randomizing or duplicating. Furthermore, it is understood that manipulation of features may result in the same outcome as a modification to the compositions of the disclosure. For example, a manipulation which involved deleting a domain would result in the alteration of the length of a molecule just as modification of a nucleic acid to encode less than a full-length molecule would.

[0144] Modifications and manipulations can be accomplished by methods known in the art such as site directed mutagenesis. The resulting modified molecules may then be tested for activity using in vitro or in vivo assays such as those described herein, or any other suitable screening assay known in the art.

[0145] In some embodiments, compositions of the present disclosure may comprise one or more atoms that are isotopes. As used herein, the term “isotope” refers to a chemical element that has one or more additional neutrons. In some embodiments, compounds of the present disclosure may be deuterated. As used herein, the term “deuterate” refers to the process of replacing one or more hydrogen atoms in a substance with deuterium isotopes. Deuterium isotopes are isotopes of hydrogen. The nucleus of hydrogen contains one proton while deuterium nuclei contain both a proton and a neutron. The pharmaceutical compositions, biocircuits, biocircuit components, effector modules including their SREs or payloads of the present disclosure may be deuterated in order to change one or more physical property, such as stability, or to allow pharmaceutical compositions, biocircuits, biocircuit components, effector modules including their SREs or payloads to be used in diagnostic and/or experimental applications.

[0146] At the protein level, any of the biocircuit components may comprise one or more post-translational modifications (PTM). Such PTMs may occur intracellularly after administration of a protein-based biocircuit component or upon or after translation of a biocircuit component administered as a nucleic acid encoding said biocircuit component.

[0147] Post translational modifications (PTMs) of the present disclosure include, but are not limited to acetylation, phosphorylation, ubiquitination, carboxylation, deamidation, deamination, deacetylation, dihydroxylation, dephosphorylation, formylation, gamma-carboxyglutamation, glutathionylation, glycation, hydroxylation, methylation, nitration, sumoylation, N- or O-transglutamination, glycosylation and farnesylation.

[0148] Effector modules, including their SREs and payloads, may independently have 1, 2, 3, 4, 5, 6, 7, 8, 9, 10 or more PTMs which are the same or different.

[0149] Effector modules may be designed to include one or more structural or functional domain, repeat, or motif of a protein family. Such domains, repeats and motifs are categorized by protein family; and representative families are given in the EMBL-EBI database, located at http://www.ebi.ac.uk/.

[0150] In some embodiments, protein modifications engineered into the structure of the compositions of the disclosure to interfere with antigen processing and peptide loading such as glycosylation and PEGylation, may also be useful in the present disclosure. Compositions of the disclosure may also be engineered to include non-classical amino acid sidechains to design less immunogenic compositions. Any of the methods discussed in International Patent Publication No. WO2005051975 for reducing immunogenicity may be useful in the present disclosure (the contents of which are incorporated by reference in their entirety).

[0151] The SRE may be, but is not limited to, a peptide, peptide complex, peptide-protein complex, protein, fusion protein, protein complex, protein-protein complex. The SRE may include one or more regions derived from any natural or mutated protein, or antibody. In this aspect, the SRE is an element, when responding to a stimulus, can tune intracellular localization, intramolecular activation, and/or degradation of payloads.

[0152] In some embodiments, effector modules of the present disclosure may comprise additional features that facilitate the expression and regulation of the effector module, such as one or more signal sequences (SSs), one or more cleavage and/or processing sites, one or more targeting and/or penetrating peptides, one or more tags, and/or one or more linkers. Additionally, effector modules of the present disclosure may further comprise other regulatory moieties such as inducible promoters, enhancer sequences, microRNA sites, and/or microRNA targeting sites. Each aspect or tuned modality may bring to the effector module or biocircuit a differentially tuned feature. For example, an SRE may represent a destabilizing domain, while mutations in the protein payload may alter its cleavage sites or dimerization properties or half-life and the inclusion of one or more microRNA or microRNA binding site may impart cellular detargeting or trafficking features. Consequently, the present disclosure embraces biocircuits which are multifactorial in their tenability. Such biocircuits may be engineered to contain one, two, three, four or more tuned features.

[0153] In some embodiments, effector modules of the present disclosure may include one or more degrons to tune expression. As used herein, a “degron” refers to a minimal sequence within a protein that is sufficient for the recognition and the degradation by the proteolytic system. An important property of degrons is that they are transferrable, that is, appending a degron to a sequence confers degradation upon the sequence. In some embodiments, the degron may be appended to the destabilizing domains, the payload or both. Incorporation of the degron within the effector module of the disclosure, confers additional protein instability to the effector module and may be used to minimize basal expression. In some embodiments, the degron may be an N degron, a phospho degron, a heat inducible degron, a photosensitive degron, an oxygen dependent degron. As a non-limiting example, the degron may be an Ornithine decarboxylase degron as described by Takeuchi et al. (Takeuchi J et al. (2008). Biochem J. 2008 Mar. 1; 410(2):401-7; the contents of which are incorporated by reference in their entirety). Other examples of degrons useful in the present disclosure include degrons described in International patent publication Nos. WO2017004022, WO2016210343, and WO2011062962; the contents of each of which are incorporated by reference in their entirety.

### Immunotherapeutic Agents

[0154] Biocircuits described herein may include an immunotherapeutic agent. In some embodiments, payloads of the present disclosure may be immunotherapeutic agents that induce immune responses in an organism. The immunotherapeutic agent may be, but is not limited to, an antibody and fragments and variants thereof, a chimeric antigen receptor (CAR), a chimeric switch receptor, a cytokine, chemokine, a cytokine receptor, a chemokine receptor, a cytokine-cytokine receptor fusion polypeptide, or any agent that induces an immune response. In one embodiment, the immunotherapeutic agent induces an anti-cancer immune response in a cell, or in a subject.

### Cytokines, Chemokines and Other Factors

[0155] In accordance with the present disclosure, payloads of the present disclosure may be cytokines, chemokines, growth factors, and soluble proteins produced by immune cells, cancer cells and other cell types, which act as chemical communicators between cells and tissues within the body. These proteins mediate a wide range of physiological functions, from effects on cell growth, differentiation, migration and survival, to a number of effector activities. For example, activated T cells produce a variety of cytokines for cytotoxic function to eliminate tumor cells.

[0156] In some embodiments, payloads of the present disclosure may be cytokines, and fragments, variants, analogs and derivatives thereof, including but not limited to interleukins, tumor necrosis factors (TNFs), interferons (IFNs), TGF beta and chemokines. It is understood in the art that certain gene and/or protein nomenclature for the same gene or protein may be inclusive or exclusive of punctuation such as a dash “-” or symbolic such as Greek letters. Whether these are included or excluded herein, the meaning is not meant to be changed as would be understood by one of skill in the art. For example, IL2, IL2 and IL-2 refer to the same interleukin. Likewise, TNF alpha, TNFα, TNF-alpha, TNF-α, TNF alpha and TNF a all refer to the same protein. Likewise, CD40L, CD40 L and CD40LG refer to the same protein.

[0157] In some embodiments, payloads of the present disclosure may be cytokines that stimulate immune responses. In other embodiments, payloads of the disclosure may be antagonists of cytokines that negatively impact anti-cancer immune responses.

[0158] In some embodiments, payloads of the present disclosure may be cytokine receptors, recombinant receptors, variants, analogs and derivatives thereof; or signal components of cytokines.

[0159] In some embodiments, cytokines of the present disclosure may be utilized to improve expansion, survival, persistence, and potency of immune cells such as CD8+ TEM, natural killer cells and tumor infiltrating lymphocytes (TIL) cells used for immunotherapy. In other embodiments, T cells engineered with two or more DD regulated cytokines are utilized to provide kinetic control of T cell activation and tumor microenvironment remodeling. In one aspect, the present disclosure provides biocircuits and compositions to minimize toxicity related to cytokine therapy. Despite its success in mitigating tumor burden, systemic cytokine therapy often results in the development of severe dose limiting side effects. Two factors contribute to the observed toxicity (a) Pleiotropism, wherein cytokines affect different cells types and sometimes produce opposing effects on the same cells depending on the context (b) Cytokines have short serum half-life and thus need to be administered at high doses to achieve therapeutic effects, which exacerbates the pleiotropic effects. In one aspect, cytokines of the present disclosure may be utilized to modulate cytokine expression in the event of adverse effects. In some embodiments, cytokines of the present disclosure may be designed to have prolonged life span or enhanced specificity to minimize toxicity.

[0160] In some embodiments, the payload of the present disclosure may be an interleukin (IL) cytokine. Interleukins (ILs) are a class of glycoproteins produced by leukocytes for regulating immune responses. As used herein, the term “interleukin (IL)” refers to an interleukin polypeptide from any species or source and includes the full-length protein as well as fragments or portions of the protein. In some aspects, the interleukin payload is selected from IL1, IL1alpha (also called hematopoietin-1), IL1beta (catabolic), IL1 delta, IL1epsilon, IL1eta, IL1 zeta, interleukin-1 family member 1 to 11 (IL1F1 to IL1F11), interleukin-1 homolog 1 to 4 (IL1H1 to IL1H4), IL1 related protein 1 to 3 (IL1RP1 to IL1RP3), IL2, 1L3, 114, 115, IL6, 17, 118, 119, IL10, IL10C, IL10D, IL11, IL11a, IL11b, IL12, IL13, IL14, IL15, IL16, IL17, IL17A, IL17B, L17C, IL17E, IL17F, IL18, IL19, IL20, IL20 like (1L20L), IL21, IL22, IL23, IL23A, IL23-p19, 1L23-p40, IL24, IL25, IL26, IL27, IL28A, IL28B, IL29, IL30, IL31, IL32, IL33, IL34, IL35, IL36 alpha, 1L36 beta, IL36 gamma, IL36RN, IL37, IL37a, 1L37b, IL37c, IL37d, IL37e and IL38. In other aspects, the payload of the present disclosure may be an interleukin receptor selected from CD121a, CDw121b, IL2Rα/CD25, IL2Rβ/CD122, IL2Rγ/CD132, CDw131, CD124, CD131, CDw125, CD126, CD130, CD127, CDw210, IL8RA, IL11Rα, CD212, CD213α1, CD213α2, IL14R, IL15Rα, CDw217, IL18Rα, IL18Rβ, IL20Rα, and IL20Rβ. In other aspects, the payload of the present disclosure may be a member of the TNF superfamily, including, without limitation, TNF alpha, CD40L, lymphotoxin (LTA) alpha, LTA beta and OX40L.

### Antibodies and Antibody Fragments and Variants

[0161] Biocircuits described herein may include one or more antibodies described herein. In some embodiments, the one or more of the antibodies described herein may be a payload.

[0162] In some embodiments, antibody fragments and variants may comprise antigen binding regions from intact antibodies. Examples of antibody fragments and variants may include, but are not limited to Fab, Fab′, F(ab′)2, and Fv fragments; diabodies; linear antibodies; single-chain antibody molecules such as single chain variable fragment (scFv); and multispecific antibodies formed from antibody fragments. Pharmaceutical compositions, biocircuits, biocircuit components, effector modules including their SREs or payloads of the present disclosure may comprise one or more of these fragments.

[0163] For the purposes herein, an “antibody” may comprise a heavy and light variable domain as well as an Fe region. As used herein, the term “native antibody” usually refers to a heterotetrameric glycoprotein of about 150,000 Daltons, composed of two identical light (L) chains and two identical heavy (H) chains linked to each other by disulfide bonds. Each heavy chain has at one end a variable domain (VH) followed by a number of constant domains. Each light chain has a variable domain at one end (VL) and a constant domain at its other end; the constant domain of the light chain is aligned with the first constant domain of the heavy chain, and the light chain variable domain is aligned with the variable domain of the heavy chain.

[0164] As used herein, the term “variable domain” refers to specific antibody domains found on both the antibody heavy and light chains that differ extensively in sequence among antibodies and are used in the binding and specificity of each particular antibody for its particular antigen. Variable domains comprise hypervariable regions. As used herein, the term “hypervariable region” refers to a region within a variable domain comprising amino acid residues responsible for antigen binding. The amino acids present within the hypervariable regions determine the structure of the complementarity determining regions (CDRs) that become part of the antigen-binding site of the antibody. As used herein, the term “CDR” refers to a region of an antibody comprising a structure that is complimentary to its target antigen or epitope. Other portions of the variable domain, not interacting with the antigen, are referred to as framework (FW) regions. The antigen-binding site (also known as the antigen combining site or paratope) comprises the amino acid residues necessary to interact with a particular antigen.

[0165] VH and VL domains have three CDRs each. VL CDRs are referred to herein as CDR-L1, CDR-L2 and CDR-L3, in order of occurrence when moving from N to C terminus along the variable domain polypeptide. VH CDRs are referred to herein as CDR-H1, CDR-H2 and CDR-H3, in order of occurrence when moving from N to C terminus along the variable domain polypeptide.

[0166] As used herein, the term “Fv” refers to an antibody fragment comprising the minimum fragment on an antibody needed to form a complete antigen-binding site. These regions consist of a dimer of one heavy chain and one light chain variable domain in tight, non-covalent association. Fv fragments can be generated by proteolytic cleavage but are largely unstable. Recombinant methods are known in the art for generating stable Fv fragments, typically through insertion of a flexible linker between the light chain variable domain and the heavy chain variable domain (to form a single chain Fv (scFv)) or through the introduction of a disulfide bridge between heavy and light chain variable domains (Strohl, W. R. Therapeutic Antibody Engineering. Woodhead Publishing, Philadelphia Pa. 2012. Ch. 3, p 46-47, the contents of which are herein incorporated by reference in their entirety).

[0167] As used herein, the term “light chain” refers to a component of an antibody from any vertebrate species assigned to one of two clearly distinct types, called kappa and lambda based on amino acid sequences of constant domains. Depending on the amino acid sequence of the constant domain of their heavy chains, antibodies can be assigned to different classes. There are five major classes of intact antibodies: IgA, IgD, IgE, IgG, and IgM, and several of these may be further divided into subclasses (isotypes), e.g., IgG1, IgG2, IgG3, IgG4, IgA, and IgA2.

[0168] As used herein, the term “single chain Fv” or “scFv” refers to a fusion protein of VH and VL antibody domains, wherein these domains are linked together into a single polypeptide chain by a flexible peptide linker. In some embodiments, the Fv polypeptide linker enables the scFv to form the desired structure for antigen binding. In some embodiments, scFvs are utilized in conjunction with phage display, yeast display or other display methods where they may be expressed in association with a surface member (e.g. phage coat protein) and used in the identification of high affinity peptides for a given antigen.

[0169] Using molecular genetics, two scFvs can be engineered in tandem into a single polypeptide, separated by a linker domain, called a “tandem scFv” (tascFv). Construction of a tascFv with genes for two different scFvs yields a “bispecific single-chain variable fragments” (bis-scFvs). Only two tascFvs have been developed clinically by commercial firms; both are bispecific agents in active early phase development by Micromet for oncologic indications and are described as “Bispecific T-cell Engagers (BiTE).” Blinatumomab is an anti-CD19/anti-CD3 bispecific tascFv that potentiates T-cell responses to B-cell non-Hodgkin lymphoma in Phase 2. MT110 is an anti-EP-CAM/anti-CD3 bispecific tascFv that potentiates T-cell responses to solid tumors in Phase 1. Bispecific, tetravalent “TandAbs” are also being researched by Affimed (Nelson, A. L., MAbs., 2010, January-February; 2(1):77-83). maxibodies (bivalent scFv fused to the amino terminus of the Fe (CH2-CH3 domains) of IgG may also be included.

[0170] As used herein, the term “bispecific antibody” refers to an antibody capable of binding two different antigens. Such antibodies typically comprise regions from at least two different antibodies. Bispecific antibodies may include any of those described in Riethmuller, G. Cancer Immunity. 2012, 12:12-18, Marvin et al., 2005. Acta Pharmacologica Sinica. 2005, 26(6): 649-658 and Schaefer et al., PNAS. 2011, 108(27):11187-11192, the contents of each of which are herein incorporated by reference in their entirety.

[0171] As used herein, the term “diabody” refers to a small antibody fragment with two antigen-binding sites. Diabodies are functional bispecific single-chain antibodies (bscAb). Diabodies comprise a heavy chain variable domain VH connected to a light chain variable domain VL in the same polypeptide chain. By using a linker that is too short to allow pairing between the two domains on the same chain, the domains are forced to pair with the complementary domains of another chain and create two antigen-binding sites.

[0172] The term “intrabody” refers to a form of antibody that is not secreted from a cell in which it is produced, but instead targets one or more intracellular proteins. Intrabodies may be used to affect a multitude of cellular processes including, but not limited to intracellular trafficking, transcription, translation, metabolic processes, proliferative signaling and cell division. In some embodiments, methods of the present disclosure may include intrabody-based therapies. In some such embodiments, variable domain sequences and/or CDR sequences disclosed herein may be incorporated into one or more constructs for intrabody-based therapy.

[0173] As used herein, the term “monoclonal antibody” refers to an antibody obtained from a population of substantially homogeneous cells (or clones), i.e., the individual antibodies comprising the population are identical and/or bind the same epitope, except for possible variants that may arise during production of the monoclonal antibodies, such variants generally being present in minor amounts. In contrast to polyclonal antibody preparations that typically include different antibodies directed against different determinants (epitopes), each monoclonal antibody is directed against a single determinant on the antigen.

[0174] The modifier “monoclonal” indicates the character of the antibody as being obtained from a substantially homogeneous population of antibodies and is not to be construed as requiring production of the antibody by any particular method. The monoclonal antibodies herein include “chimeric” antibodies (immunoglobulins) in which a portion of the heavy and/or light chain is identical with or homologous to corresponding sequences in antibodies derived from a particular species or belonging to a particular antibody class or subclass, while the remainder of the chain(s) is identical with or homologous to corresponding sequences in antibodies derived from another species or belonging to another antibody class or subclass, as well as fragments of such antibodies.

[0175] As used herein, the term “humanized antibody” refers to a chimeric antibody comprising a minimal portion from one or more non-human (e.g., murine) antibody source(s) with the remainder derived from one or more human immunoglobulin sources. For the most part, humanized antibodies are human immunoglobulins (recipient antibody) in which residues from the hypervariable region from an antibody of the recipient are replaced by residues from the hypervariable region from an antibody of a non-human species (donor antibody) such as mouse, rat, rabbit or nonhuman primate having the desired specificity, affinity, and/or capacity. In one embodiment, the antibody may be a humanized full-length antibody. As a non-limiting example, the antibody may have been humanized using the methods taught in US Patent Publication NO. US20130303399, the contents of which are herein incorporated by reference in its entirety.

[0176] As used herein, the term “antibody variant” refers to a modified antibody (in relation to a native or starting antibody) or a biomolecule resembling a native or starting antibody in structure and/or function (e.g., an antibody mimetic). Antibody variants may be altered in their amino acid sequence, composition or structure as compared to a native antibody. Antibody variants may include, but are not limited to, antibodies with altered isotypes (e.g., IgA, IgD, IgE, IgG1, IgG2, IgG3, IgG4, or IgM), humanized variants, optimized variants, multispecific antibody variants (e.g., bispecific variants), and antibody fragments.

[0177] In some embodiments, pharmaceutical compositions, biocircuits, biocircuit components, effector modules including their SREs or payloads of the present disclosure may be antibody mimetics. As used herein, the term “antibody mimetic” refers to any molecule which mimics the function or effect of an antibody and which binds specifically and with high affinity to their molecular targets. In some embodiments, antibody mimetics may be monobodies, designed to incorporate the fibronectin type III domain (Fn3) as a protein scaffold (U.S. Pat. Nos. 6,673,901; 6,348,584). In some embodiments, antibody mimetics may be those known in the art including, but are not limited to affibody molecules, affilins, affitins, anticalins, avimers, Centyrins, DARPINSTM, Fynomers and Kunitz and domain peptides. In other embodiments, antibody mimetics may include one or more non-peptide regions.

[0178] In one embodiment, the antibody may comprise a modified Fe region. As a non-limiting example, the modified Fe region may be made by the methods or may be any of the regions described in US Patent Publication NO. US20150065690, the contents of which are herein incorporated by reference in its entirety.

[0179] In some embodiments, payloads of the disclosure may encode multispecific antibodies that bind more than one epitope. As used herein, the terms “multibody” or “multispecific antibody” refer to an antibody wherein two or more variable regions bind to different epitopes. The epitopes may be on the same or different targets. In one embodiment, the multispecific antibody may be generated and optimized by the methods described in International Patent Publication NO. WO2011109726 and US Patent Publication NO. US20150252119, the contents of which each of which are herein incorporated by reference in their entirety. These antibodies are able to bind to multiple antigens with high specificity and high affinity.

[0180] In certain embodiments, a multi-specific antibody is a “bispecific antibody” which recognizes two different epitopes on the same or different antigens. In one aspect, bispecific antibodies are capable of binding two different antigens. Such antibodies typically comprise antigen-binding regions from at least two different antibodies. For example, a bispecific monoclonal antibody (BsMAb, BsAb) is an artificial protein composed of fragments of two different monoclonal antibodies, thus allowing the BsAb to bind to two different types of antigen. Bispecific antibody frameworks may include any of those described in Riethmuller, G., 2012. Cancer Immunity, 2012, 12:12-18; Marvin et al., Acta Pharmacologica Sinica. 2005, 26(6):649-658; and Schaefer et al., PNAS. 2011, 108(27): 11187-11192, the contents of each of which are herein incorporated by reference in their entirety. New generations of BsMAb, called “trifunctional bispecific” antibodies, have been developed. These consist of two heavy and two light chains, one each from two different antibodies, where the two Fab regions (the arms) are directed against two antigens, and the Fe region (the foot) comprises the two heavy chains and forms the third binding site.

[0181] In some embodiments, payloads may encode antibodies comprising a single antigen-binding domain. These molecules are extremely small, with molecular weights approximately one-tenth of those observed for full-sized mAbs. Further antibodies may include “nanobodies” derived from the antigen-binding variable heavy chain regions (VHHs) of heavy chain antibodies found in camels and llamas, which lack light chains (Nelson, A. L., MAbs.2010. January-February; 2(1):77-83).

[0182] In some embodiments, the antibody may be “miniaturized”. Among the best examples of mAb miniaturization are the small modular immunopharmaceuticals (SMIPs) from Trubion Pharmaceuticals. These molecules, which can be monovalent or bivalent, are recombinant single-chain molecules containing one VL, one VH antigen-binding domain, and one or two constant “effector” domains, all connected by linker domains. Presumably, such a molecule might offer the advantages of increased tissue or tumor penetration claimed by fragments while retaining the effector immune functions conferred by constant domains. At least three “miniaturized” SMIPs have entered clinical development.

[0183] One example of miniaturized antibodies is called “unibody” in which the hinge region has been removed from IgG4 molecules. While IgG4 molecules are unstable and can exchange light-heavy chain heterodimers with one another, deletion of the hinge region prevents heavy chain-heavy chain pairing entirely, leaving highly specific monovalent light/heavy heterodimers, while retaining the Fe region to ensure stability and half-life in vivo.

[0184] In some embodiments, payloads of the disclosure may encode single-domain antibodies (sdAbs, or nanobodies) which are antibody fragment consisting of a single monomeric variable antibody domain. Like a whole antibody, it is able to bind selectively to a specific antigen. In one aspect, a sdAb may be a “Camel Ig or “camelid VHH”. As used herein, the term “camel Ig” refers to the smallest known antigen-binding unit of a heavy chain antibody (Koch-No lte, et al, FASEB J., 2007, 21: 3490-3498). A “heavy chain antibody” or a “camelid antibody” refers to an antibody that contains two VH domains and no light chains (Riechmann L. et al, J. Immunol. Methods, 1999, 231: 25-38; International patent publication NOs. WO1994/04678 and WO1994/025591; and U.S. Pat. No. 6,005,079). In another aspect, a sdAb may be a “immunoglobulin new antigen receptor” (IgNAR). As used herein, the term “immunoglobulin new antigen receptor” refers to class of antibodies from the shark immune repertoire that consist of homodimers of one variable new antigen receptor (VNAR) domain and five constant new antigen receptor (CNAR) domains.

[0185] In some embodiments, payloads of the disclosure may encode intrabodies. Intrabodies are a form of antibody that is not secreted from a cell in which it is produced, but instead targets one or more intracellular proteins. Intrabodies are expressed and function intracellularly and may be used to affect a multitude of cellular processes including, but not limited to intracellular trafficking, transcription, translation, metabolic processes, proliferative signaling and cell division. In some embodiments, methods described herein include intrabody-based therapies. In some such embodiments, variable domain sequences and/or CDR sequences disclosed herein are incorporated into one or more constructs for intrabody-based therapy. For example, intrabodies may target one or more glycated intracellular proteins or may modulate the interaction between one or more glycated intracellular proteins and an alternative protein.

[0186] In some aspects, payloads of the disclosure may encode biosynthetic antibodies as described in U.S. Pat. No. 5,091,513, the contents of which are herein incorporated by reference in their entirety. Such antibody may include one or more sequences of amino acids constituting a region which behaves as a biosynthetic antibody binding site (BABS). The sites comprise 1) non-covalently associated or disulfide bonded synthetic VH and VL dimers, 2) VH-VL or VL-VH single chains wherein the VH and VL are attached by a polypeptide linker, or 3) individuals VH or VL domains. The binding domains comprise linked CDR and FR regions, which may be derived from separate immunoglobulins. The biosynthetic antibodies may also include other polypeptide sequences which function, e.g., as an enzyme, toxin, binding site, or site of attachment to an immobilization media or radioactive atom. Methods are disclosed for producing the biosynthetic antibodies, for designing BABS having any specificity that can be elicited by in vivo generation of antibody, and for producing analogs thereof.

[0187] In some embodiments, payloads may encode antibodies with antibody acceptor frameworks taught in U.S. Pat. No. 8,399,625. Such antibody acceptor frameworks may be particularly well suited accepting CDRs from an antibody of interest.

[0188] In one embodiment, the antibody may be a conditionally active biologic protein. An antibody may be used to generate a conditionally active biologic protein which are reversibly or irreversibly inactivated at the wild type normal physiological conditions as well as to such conditionally active biologic proteins and uses of such conditional active biologic proteins are provided. Such methods and conditionally active proteins are taught in, for example, International Publication No. WO2015175375 and WO2016036916 and US Patent Publication No. US20140378660, the contents of each of which are incorporated herein by reference in their entirety.

### Antibodies Used for Immunotherapy

[0189] In some embodiments, payloads of the present disclosure may be antibodies, fragments and variants thereof which are specific to tumor specific antigens (TSAs) and tumor associated antigens (TAAs). Antibodies circulate throughout the body until they find and attach to the TSA/TAA. Once attached, they recruit other parts of the immune system, increasing ADCC (antibody dependent cell-mediated cytotoxicity) and ADCP (antibody dependent cell-mediated phagocytosis) to destroy tumor cells. As used herein, the term “tumor specific antigen (TSA)” means an antigenic substance produced in tumor cells, which can trigger an anti-tumor immune response in a host organism. In one embodiment, a TSA may be a tumor neoantigen. The tumor antigen specific antibody mediates complement-dependent cytotoxic response against tumor cells expressing the same antigen.

[0190] In some embodiments, the tumor specific antigens (TSAs), tumor associated antigens (TAAs), pathogen associated antigens, or fragments thereof can be expressed as a peptide or as an intact protein or portion thereof. The intact protein or a portion thereof can be native or mutagenized. Antigens associated with cancers or virus-induced cancers as described herein are well-known in the art. Such a TSA or TAA may be previously associated with a cancer or may be identified by any method known in the art.

[0191] In one embodiment, the antigen is CD19, a B-cell surface protein expressed throughout B-cell development. CD19 is a well-known B cell surface molecule, which upon B cell receptor activation enhances B-cell antigen receptor induced signaling and expansion of B cell populations. CD19 is broadly expressed in both normal and neoplastic B cells. Malignancies derived from B cells such as chronic lymphocytic leukemia, acute lymphocytic leukemia and many non-Hodgkin lymphomas frequently retain CD19 expression. This near universal expression and specificity for a single cell lineage has made CD19 an attractive target for immunotherapies. Human CD19 has 14 exons wherein exon 1-4 encode the extracellular portion of the CD19, exon 5 encodes the transmembrane portion of CD19 and exons 6-14 encode the cytoplasmic tail.

[0192] In one embodiment, payloads of the present disclosure may be antibodies, fragments and variants thereof which are specific to CD19 antigen.

[0193] In some embodiments, the immunotherapeutic agent may be an antibody that is specifically immunoreactive to an antigen selected from a tumor specific antigen (TSA), a tumor associated antigen (TAA), or an antigenic epitope.

[0194] In one aspect, the antigen may be an antigenic epitope. In some embodiments, the antigenic epitope may be CD19.

[0195] A tumor specific antigen (TSA) may be a tumor neoantigen. A neoantigen is a mutated antigen that is only expressed by tumor cells because of genetic mutations or alterations in transcription which alter protein coding sequences, therefore creating novel, foreign antigens. The genetic changes result from genetic substitution, insertion, deletion or any other genetic changes of a native cognate protein (i.e. a molecule that is expressed in normal cells).

### Chimeric Anti Gen Receptors (CARs)

[0196] Biocircuits described herein may include a chimeric antigen receptor. In some embodiments, payloads of the present disclosure may be a chimeric antigen receptors (CARs) which when transduced into immune cells (e.g., T cells and NK cells), can re-direct the immune cells against the target (e.g., a tumor cell) which expresses a molecule recognized by the extracellular target moiety of the CAR.

[0197] As used herein, the term “chimeric antigen receptor (CAR)” refers to a synthetic receptor that mimics the TCR on the surface of T cells. In general, a CAR is composed of an extracellular targeting domain, a transmembrane domain/region and an intracellular signaling/activation domain. In a standard CAR receptor, the components: the extracellular targeting domain, transmembrane domain and intracellular signaling/activation domain, are linearly constructed as a single fusion protein. The extracellular region comprises a targeting domain/moiety (e.g., a scFv) that recognizes a specific tumor antigen or other tumor cell-surface molecules. The intracellular region may contain a signaling domain of TCR complex (e.g., the signal region of CD3ζ), and/or one or more costimulatory signaling domains, such as those from CD28, 4-1BB (CD137) and OX-40 (CD134). For example, a “first-generation CAR” only has the CD3ζ signaling domain. In an effort to augment T-cell persistence and proliferation, costimulatory intracellular domains are added, giving rise to second generation CARs having a CD3ζ signal domain plus one costimulatory signaling domain, and third generation CARs having CD3ζ signal domain plus two or more costimulatory signaling domains. A CAR, when expressed by a T cell, endows the T cell with antigen specificity determined by the extracellular targeting moiety of the CAR. Recently, it is also desirable to add one or more elements such as homing and suicide genes to develop a more competent and safer architecture of CAR, so called the fourth-generation CAR.

[0198] In some embodiments, the immunotherapeutic agent of the effector module is a chimeric antigen receptor (CAR). The chimeric antigen may comprise an extracellular target moiety; a transmembrane domain; an intracellular signaling domain; and optionally, one or more co-stimulatory domains.

[0199] In some embodiments, the extracellular targeting domain is joined through the hinge (also called space domain or spacer) and transmembrane regions to an intracellular signaling domain. The hinge connects the extracellular targeting domain to the transmembrane domain which transverses the cell membrane and connects to the intracellular signaling domain. The hinge may need to be varied to optimize the potency of CAR expressing cells toward cancer cells due to the size of the target protein where the targeting moiety binds, and the size and affinity of the targeting domain itself. Upon recognition and binding of the targeting moiety to the target cell, the intracellular signaling domain leads to an activation signal for the CAR T cell, which is further amplified by the “second signal” from one or more intracellular costimulatory domains. The CAR T cell, once activated, can destroy the target cell.

[0200] In some embodiments, the CAR of the present disclosure may be split into two parts, each part is linked a dimerizing domain, such that an input that triggers the dimerization promotes assembly of the intact functional receptor. Wu and Lim recently reported a split CAR in which the extracellular CD19 binding domain and the intracellular signaling element are separated and linked to the FKBP domain and the FRB* (T2089L mutant of FKBP-rapamycin binding) domain that heterodimerize in the presence of the rapamycin analog AP21967. The split receptor is assembled in the presence of AP21967 and together with the specific antigen binding, activates T cells (Wu et al., Science, 2015, 625(6258): aab4077).

[0201] In some embodiments, the CAR of the present disclosure may be designed as an inducible CAR. Sakemura et al recently reported the incorporation of a Tet-On inducible system to the CD19 CAR construct. The CD19 CAR is activated only in the presence of doxycycline (Dox). Sakemura reported that Tet-CD19CAR T cells in the presence of Dox were equivalently cytotoxic against CD19+ cell lines and had equivalent cytokine production and proliferation upon CD19 stimulation, compared with conventional CD19CAR T cells (Sakemura et al., Cancer Immuno. Res., 2016, Jun. 21, Epub ahead of print). In one example, this Tet-CAR may be the payload of the effector module under the control of SREs (e.g., DDs) of the disclosure. The dual systems provide more flexibility to turn-on and off the CAR expression in transduced T cells.

[0202] According to the present disclosure, the payload of the present disclosure may be a first-generation CAR, or a second-generation CAR, or a third-generation CAR, or a fourth-generation CAR. In some embodiments, the payload of the present disclosure may be a full CAR construct composed of the extracellular domain, the hinge and transmembrane domain and the intracellular signaling region. In other embodiments, the payload of the present disclosure may be a component of the full CAR construct including an extracellular targeting moiety, a hinge region, a transmembrane domain, an intracellular signaling domain, one or more co-stimulatory domain, and other additional elements that improve CAR architecture and functionality including but not limited to a leader sequence, a homing element and a safety switch, or the combination of such components.

[0203] CARs regulated by biocircuits and compositions of the present disclosure are tunable and thereby offer several advantages. The reversible on-off switch mechanism allows management of acute toxicity caused by excessive CAR-T cell expansion. Pulsatile CAR expression using SREs of the present disclosure may be achieved by cycling ligand level. The ligand conferred regulation of the CAR may be effective in offsetting tumor escape induced by antigen loss, avoiding functional exhaustion caused by tonic signaling due to chronic antigen exposure and improving the persistence of CAR expressing cells in vivo.

[0204] In some embodiments, biocircuits and compositions of the disclosure may be utilized to down regulate CAR expression to limit on target on tissue toxicity caused by tumor lysis syndrome. Down regulating the expression of the CARs of the present disclosure following anti-tumor efficacy may prevent (1) On target off tumor toxicity caused by antigen expression in normal tissue, (2) antigen independent activation in vivo.

### Extracellular Targeting Domain/Moiety

[0205] In accordance with the disclosure, the extracellular target moiety of a CAR may be any agent that recognizes and binds to a given target molecule, for example, a neoantigen on tumor cells, with high specificity and affinity. The target moiety may be an antibody and variants thereof that specifically binds to a target molecule on tumor cells, or a peptide aptamer selected from a random sequence pool based on its ability to bind to the target molecule on tumor cells, or a variant or fragment thereof that can bind to the target molecule on tumor cells, or an antigen recognition domain from native T-cell receptor (TCR) (e.g. CD4 extracellular domain to recognize HIV infected cells), or exotic recognition components such as a linked cytokine that leads to recognition of target cells bearing the cytokine receptor, or a natural ligand of a receptor.

[0206] In some embodiments, the targeting domain of a CAR may be a Ig NAR, a Fab fragment, a Fab′ fragment, a F(ab)′2 fragment, a F(ab)′3 fragment, Fv, a single chain variable fragment (scFv), a bis-scFv, a (scFv)2, a minibody, a diabody, a triabody, a tetrabody, a disulfide stabilized Fv protein (dsFv), a unibody, a nanobody, or an antigen binding region derived from an antibody that specifically recognizes a target molecule, for example a tumor specific antigen (TSA). In one embodiment, the targeting moiety is a scFv. The scFv domain, when it is expressed on the surface of a CAR T cell and subsequently binds to a target protein on a cancer cell, is able to maintain the CAR T cell in proximity to the cancer cell and to trigger the activation of the T cell. A scFv can be generated using routine recombinant DNA technology techniques and is discussed in the present disclosure.

[0207] In one aspect, the extracellular target moiety may be an scFv derived from an antibody. In one aspect, the scFv may specifically bind to a CD19 antigen.

### Intracellular Signaling Domains

[0208] The intracellular domain of a CAR fusion polypeptide, after binding to its target molecule, transmits a signal to the effector immune cell, activating at least one of the normal effector functions of effector immune cells, including cytolytic activity (e.g., cytokine secretion) or helper activity. Therefore, the intracellular domain comprises an “intracellular signaling domain” of a T cell receptor (TCR).

[0209] In some aspects, the entire intracellular signaling domain can be employed. In other aspects, a truncated portion of the intracellular signaling domain may be used in place of the intact chain as long as it transduces the effector function signal.

[0210] In some embodiments, the intracellular signaling domain of the present disclosure may contain signaling motifs which are known as immunoreceptor tyrosine-based activation motifs (ITAMs). Examples of ITAM containing cytoplasmic signaling sequences include those derived from TCR CD3zeta, FcR gamma, FcR beta, CD3 gamma, CD3 delta, CD3 epsilon, CD5, CD22, CD79a, CD79b, and CD66d. In one example, the intracellular signaling domain is a CD3 zeta (CD3ζ) signaling domain.

[0211] In some embodiments, the intracellular region of the present disclosure further comprises one or more costimulatory signaling domains which provide additional signals to the effector immune cells. These costimulatory signaling domains, in combination with the signaling domain can further improve expansion, activation, memory, persistence, and tumor-eradicating efficiency of CAR engineered immune cells (e.g., CAR T cells). In some cases, the costimulatory signaling region contains 1, 2, 3, or 4 cytoplasmic domains of one or more intracellular signaling and/or costimulatory molecules. The costimulatory signaling domain may be the intracellular/cytoplasmic domain of a costimulatory molecule, including but not limited to CD2, CD7, CD27, CD28, 4-1BB (CD137), OX40 (CD134), CD30, CD40, ICOS (CD278), GITR (glucocorticoid-induced tumor necrosis factor receptor), LFA-1 (lymphocyte function-associated antigen-1), LIGHT, NKG2C, B7-H3. In one example, the costimulatory signaling domain is derived from the cytoplasmic domain of CD28. In another example, the costimulatory signaling domain is derived from the cytoplasmic domain of 4-1BB (CD137). In another example, the co-stimulatory signaling domain may be an intracellular domain of GITR as taught in U.S. Pat. No. 9,175,308; the contents of which are incorporated herein by reference in its entirety.

[0212] In some embodiments, the intracellular signaling domains disclosed in International Patent Publication, WO2014153270 may be useful in the present disclosure.

[0213] In some embodiments, the chimeric antigen receptors described herein may include CD3 zeta domains altered to tune CAR activity. The CD3 zeta domains may include one or more mutations in the immunoreceptor tyrosine-based activation motifs (ITAMs). In one aspect, the tyrosine residues within the ITAMs may be mutated resulting in reduced phosphorylation and limited downstream signaling. In some embodiments, one or more of the ITAMs may be deleted from the CD3 zeta domain. In one aspect, the CD3 zeta may include one ITAM. Any of the CARs and CD3 zeta domains described by Feucht et al. 2019 may be used herein (Calibration of CAR activation potential directs alternative T cell fates and therapeutic potency. Nature Medicine 25, 82-88 (2019); the contents of which are herein incorporated by reference in their entirety).

[0214] In some embodiments, the GITR co-stimulatory domains may be useful in the CAR described herein. In some embodiments, the GITR domains may be capable of inducing T cell effector function and activating T cells. In some aspects, GITR domains described herein may be able to suppress inhibitory T regulatory cells that block immune response. In some embodiments, GITR intracellular domain containing CAR T cells can decrease the production of cytokines, which may reduce the cytokine release syndrome. Any of the GITR domains described in International Patent Publication, WO2018045034; the contents of which are herein incorporated by reference in their entirety.

### Transmembrane Domains and Hinge Regions

[0215] In some embodiments, the CAR of the present disclosure may comprise a transmembrane domain. As used herein, the term “Transmembrane domain (TM)” refers broadly to an amino acid sequence of about 15 residues in length which spans the plasma membrane. More preferably, a transmembrane domain includes at least 20, 21, 22, 23, 24, 25, 26, 27, 28, 29, 30, 31, 32, 33, 34, 35, 36, 37, 38, 39, 40, 41, 42, 43, 44, or 45 amino acid residues and spans the plasma membrane. In some embodiments, the transmembrane domain of the present disclosure may be derived either from a natural or from a synthetic source. The transmembrane domain of a CAR may be derived from any naturally membrane-bound or transmembrane protein. For example, the transmembrane region may be derived from (i.e. comprise at least the transmembrane region(s) of) the alpha, beta or zeta chain of the T-cell receptor, CD3 epsilon, CD4, CD5, CD8, CD8a, CD9, CD16, CD22, CD33, CD28, CD37, CD45, CD64, CD80, CD86, CD134, CD137, CD152, or CD154.

[0216] Alternatively, the transmembrane domain of the present disclosure may be synthetic. In some aspects, the synthetic sequence may comprise predominantly hydrophobic residues such as leucine and valine.

[0217] In some embodiments, the transmembrane domain of the present disclosure may be selected from the group consisting of a CD8α transmembrane domain, a CD4 transmembrane domain, a CD 28 transmembrane domain, a CTLA-4 transmembrane domain, a PD-1 transmembrane domain, and a human IgG4 Fe region. As non-limiting examples, the transmembrane domain may be a CTLA-4 transmembrane domain comprising the amino acid sequences of SEQ ID NOs. 1-5 of International Patent Publication NO. WO2014/100385; and a PD-1 transmembrane domain comprising the amino acid sequences of SEQ ID NOs. 6-8 of International Patent Publication NO. WO2014100385; the contents of each of which are incorporated herein by reference in their entirety.

[0218] In some embodiments, the CAR of the present disclosure may comprise an optional hinge region (also called spacer). A hinge sequence is a short sequence of amino acids that facilitates flexibility of the extracellular targeting domain that moves the target binding domain away from the effector cell surface to enable proper cell/cell contact, target binding and effector cell activation (Patel et al., Gene Therapy, 1999; 6: 412-419). The hinge sequence may be positioned between the targeting moiety and the transmembrane domain.

[0219] In some embodiments, the CAR of the present disclosure may comprise one or more linkers between any of the domains of the CAR. The linker may be between 1-30 amino acids long.

[0220] In some embodiments, the components including the targeting moiety, transmembrane domain and intracellular signaling domains of the present disclosure may be constructed in a single fusion polypeptide. The fusion polypeptide may be the payload of an effector module of the disclosure. In some embodiments, more than one CAR fusion polypeptides may be included in an effector module, for example, two, three or more CARs may be included in the effector module under the control of a single SRE (e.g., a DD).

[0221] In one embodiment, the CAR construct comprises a CD19 scFv (e.g., CAT13.1E10 or FMC63), a CD8a spacer or transmembrane domain, and a 4-1BB and CD3ζ endodomain. These constructs with CAT13.1E10 may have increased proliferation after stimulation in vitro, increased cytotoxicity against the CD19+ targets, and increased effector and target interactions as compared to constructs with FMC63.

[0222] In some embodiments, the payload of the disclosure may be any of the co-stimulatory molecules and/or intracellular domains described herein. In some embodiments, one or more co-stimulatory molecules, each under the control of different SRE may be used in the present disclosure. SRE regulated co-stimulatory molecules may also be expressed in conjunction with a first-generation CAR, a second-generation CAR, a third generation CAR, a fourth generation, or any other CAR design described herein.

### Tandem CAR (TanCAR)

[0223] In some embodiments, the CAR of the present disclosure may be a tandem chimeric antigen receptor (TanCAR) which is able to target two, three, four, or more tumor specific antigens. In some aspects, The CAR is a bispecific TanCAR including two targeting domains which recognize two different TSAs on tumor cells. The bispecific CAR may be further defined as comprising an extracellular region comprising a targeting domain (e.g., an antigen recognition domain) specific for a first tumor antigen and a targeting domain (e.g., an antigen recognition domain) specific for a second tumor antigen. In other aspects, the CAR is a multispecific TanCAR that includes three or more targeting domains configured in a tandem arrangement. The space between the targeting domains in the TanCAR may be between about 5 and about 30 amino acids in length, for example, 6, 7, 8, 9, 10, 11, 12, 13, 14, 15, 16, 17, 18, 19, 20, 21, 22, 23, 24, 25, 26, 27, 28, 29 and 30 amino acids.

### Split CAR

[0224] In some embodiments, the components including the targeting moiety, transmembrane domain and intracellular signaling domains of the present disclosure may be split into two or more parts such that it is dependent on multiple inputs that promote assembly of the intact functional receptor. In one embodiment, the split synthetic CAR system can be constructed in which the assembly of an activated CAR receptor is dependent on the binding of a ligand to the SRE (e.g. a small molecule) and a specific antigen to the targeting moiety. As a non-limiting example, the split CAR consists of two parts that assemble in a small molecule-dependent manner; one part of the receptor features an extracellular antigen binding domain (e.g. scFv) and the other part has the intracellular signaling domains, such as the CD3ζ intracellular domain.

[0225] In other aspects, the split parts of the CAR system can be further modified to increase signal. In one example, the second part of cytoplasmic fragment may be anchored to the plasma membrane by incorporating a transmembrane domain (e.g., CD8a transmembrane domain) to the construct. An additional extracellular domain may also be added to the second part of the CAR system, for instance an extracellular domain that mediates homo-dimerization. These modifications may increase receptor output activity, i.e., T cell activation.

[0226] In some aspects, the two parts of the split CAR system contain heterodimerization domains that conditionally interact upon binding of a heterodimerizing small molecule. As such, the receptor components are assembled in the presence of the small molecule, to form an intact system which can then be activated by antigen engagement. Any known heterodimerizing components can be incorporated into a split CAR system. Other small molecule dependent heterodimerization domains may also be used, including, but not limited to, gibberellin-induced dimerization system (GID1-GAI), trimethoprim-SLF induced ecDHFR and FKBP dimerization (Czlapinski et al., J Am Chem Soc., 2008, 130(40): 13186-13187) and ABA (abscisic acid) induced dimerization of PP2C and PYL domains (Cutler et al., Annu Rev Plant Biol. 2010, 61: 651-679). The dual regulation using inducible assembly (e.g., ligand dependent dimerization) and degradation (e.g., destabilizing domain induced CAR degradation) of the split CAR system may provide more flexibility to control the activity of the CAR modified T cells.

### Switchable CAR

[0227] In some embodiments, the CAR of the disclosure may be a switchable CAR. Juillerat et al (Juilerat et al., Sci. Rep., 2016, 6: 18950; the contents of which are incorporated herein by reference in their entirety) recently reported controllable CARs that can be transiently switched on in response to a stimulus (e.g. a small molecule). In this CAR design, a system is directly integrated in the hinge domain that separate the scFv domain from the cell membrane domain in the CAR. Such system is possible to split or combine different key functions of a CAR such as activation and co-stimulation within different chains of a receptor complex, mimicking the complexity of the TCR native architecture. This integrated system can switch the scFv and antigen interaction between on/off states controlled by the absence/presence of the stimulus.

### Reversible CAR

[0228] In other embodiments, the CAR of the disclosure may be a reversible CAR system. In this CAR architecture, a LID domain (ligand-induced degradation) is incorporated into the CAR system. The CAR can be temporarily down-regulated by adding a ligand of the LID domain. The combination of LID and DD mediated regulation provides tunable control of continuingly activated CAR T cells, thereby reducing CAR mediated tissue toxicity.

### Activation-Conditional CAR

[0229] In some embodiments, payloads of the disclosure may be an activation-conditional chimeric antigen receptor, which is only expressed in an activated immune cell. The expression of the CAR may be coupled to activation conditional control region which refers to one or more nucleic acid sequences that induce the transcription and/or expression of a sequence e.g. a CAR under its control. Such activation conditional control regions may be promoters of genes that are upregulated during the activation of the effector immune cell e.g. IL2 promoter or NFAT binding sites. In some embodiments, activation of the immune cell may be achieved by a constitutively expressed CAR (International Publication NO. WO2016126608; the contents of which are incorporated herein by reference in their entirety).

### Polynucleotides

[0230] Biocircuit components including effector modules, their SREs and payloads, may be nucleic acid-based. The term “nucleic acid,” in its broadest sense, includes any compound and/or substance that comprise a polymer of nucleotides, e.g., linked nucleosides. These polymers are often referred to as polynucleotides. Exemplary nucleic acids or polynucleotides of the disclosure include, but are not limited to, ribonucleic acids (RNAs), deoxyribonucleic acids (DNAs), threose nucleic acids (TNAs), glycol nucleic acids (GNAs), peptide nucleic acids (PNAs), locked nucleic acids (LNAs, including LNA having a β-D-ribo configuration, α-LNA having an α-L-ribo configuration (a diastereomer of LNA), 2′-amino-LNA having a 2′-amino functionalization, and 2′-amino-α-LNA having a 2′-amino functionalization) or hybrids thereof.

[0231] In some embodiments, the nucleic acid molecule is a messenger RNA (mRNA). As used herein, the term “messenger RNA” (mRNA) refers to any polynucleotide which encodes a polypeptide of interest and which is capable of being translated to produce the encoded polypeptide of interest in vitro, in vivo, in situ or ex vivo. Polynucleotides of the disclosure may be mRNA or any nucleic acid molecule and may or may not be chemically modified.

[0232] Traditionally, the basic components of an mRNA molecule include at least a coding region, a 5′UTR, a 3UTR, a 5′ cap and a poly-A tail. Building on this wild type modular structure, the present disclosure expands the scope of functionality of traditional mRNA molecules by providing payload which maintain a modular organization, but which comprise one or more structural and/or chemical modifications or alterations which impart useful properties to the polynucleotide, for example tenability of function. As used herein, a “structural” feature or modification is one in which two or more linked nucleosides are inserted, deleted, duplicated, inverted or randomized in a polynucleotide without significant chemical modification to the nucleosides themselves. Because chemical bonds will necessarily be broken and reformed to effect a structural modification, structural modifications are of a chemical nature and hence are chemical modifications. However, structural modifications will result in a different sequence of nucleotides. For example, the polynucleotide “ATCG” may be chemically modified to “AT-5meC-G”. The same polynucleotide may be structurally modified from “ATCG” to “ATCCCG”. Here, the dinucleotide “CC” has been inserted, resulting in a structural modification to the polynucleotide.

[0233] In some embodiments, polynucleotides of the present disclosure may harbor 5′UTR sequences which play a role in translation initiation. 5′UTR sequences may include features such as Kozak sequences which are commonly known to be involved in the process by which the ribosome initiates translation of genes, Kozak sequences have the consensus XCCR(A/G) CCAUG, where R is a purine (adenine or guanine) three bases upstream of the start codon (AUG) and X is any nucleotide. In one embodiment, the Kozak sequence is ACCGCC. By engineering the features that are typically found in abundantly expressed genes of target cells or tissues, the stability and protein production of the polynucleotides of the disclosure can be enhanced.

[0234] Further provided are polynucleotides, which may contain an internal ribosome entry site (IRES) which play an important role in initiating protein synthesis in the absence of 5′ cap structure in the polynucleotide. An IRES may act as the sole ribosome binding site or may serve as one of the multiple binding sites. Polynucleotides of the disclosure containing more than one functional ribosome binding site may encode several peptides or polypeptides that are translated independently by the ribosomes giving rise to bicistronic and/or multicistronic nucleic acid molecules.

[0235] In one embodiment, polynucleotides of the present disclosure may encode variant polypeptides which have a certain identity with a reference polypeptide sequence. As used herein, a “reference polypeptide sequence” refers to a starting polypeptide sequence. Reference sequences may be wild type sequences or any sequence to which reference is made in the design of another sequence.

[0236] The term “identity” as known in the art, refers to a relationship between two or more sequences, as determined by comparing the sequences. In the art, identity also means the degree of sequence relatedness between sequences, as determined by the number of matches between strings of two or more residues (amino acid or nucleic acid). Identity measures the percent of identical matches between two or more sequences with gap alignments (if any) addressed by a particular mathematical model or computer program (i.e., “algorithms”). Identity of related sequences can be readily calculated by known methods. Such methods include, but are not limited to, those described in Computational Molecular Biology, Lesk, A. M., ed., Oxford University Press, New York, 1988; Biocomputing: Informatics and Genome Projects, Smith, D. W., ed., Academic Press, New York, 1993; Computer Analysis of Sequence Data, Part 1, Griffin, A. M., and Griffin, H. G., eds., Humana Press, N.J., 1994; Sequence Analysis in Molecular Biology, von Heinje, G., Academic Press, 1987; Sequence Analysis Primer, Gribskov, M. and Devereux, J., eds., M. Stockton Press, New York, 1991; and Carillo et al., SIAM J. Applied Math. 48, 1073 (1988).

[0237] In some embodiments, the variant sequence may have the same or a similar activity as the reference sequence. Alternatively, the variant may have an altered activity (e.g., increased or decreased) relative to a reference sequence. Generally, variants of a particular polynucleotide or polypeptide of the disclosure will have at least about 40%, 45%, 50%, 55%, 60%, 65%, 70%, 75%, 80%, 85%, 90%, 91%, 92%, 93%, 94%, 95%, 96%, 97%, 98%, 99% but less than 100% sequence identity to that particular reference polynucleotide or polypeptide as determined by sequence alignment programs and parameters described herein and known to those skilled in the art. Such tools for alignment include those of the BLAST suite (Stephen F. Altschul, Thomas L. Madden, Alejandro A. Schaffer, Jinghui Zhang, Zheng Zhang, Webb Miller, and David J. Lipman (1997), “Gapped BLAST and PSI-BLAST: a new generation of protein database search programs”, Nucleic Acids Res. 25:3389-3402.)

### Chemical Modifications to Polynucleotides

[0238] According to the present disclosure, the terms “modification” or, as appropriate, “modified” polynucleotides refer to modification with respect to A, G, U (T in DNA) or C nucleotides.

[0239] Modifications of the polynucleotides of the disclosure may be on the nucleoside base and/or sugar portion of the nucleosides which comprise the polynucleotide. In some embodiments, multiple modifications are included in the modified nucleic acid or in one or more individual nucleoside or nucleotide. For example, modifications to a nucleoside may include one or more modifications to the nucleobase and the sugar. Modifications to the polynucleotides of the present disclosure may include any of those taught in, for example, International Publication WO2013052523, the contents of which are incorporated herein by reference in its entirety.

[0240] As described herein “nucleoside” is defined as a compound containing a sugar molecule (e.g., a pentose or ribose) or a derivative thereof in combination with an organic base (e.g., a purine or pyrimidine) or a derivative thereof (also referred to herein as “nucleobase”). As described herein, “nucleotide” is defined as a nucleoside including a phosphate group.

[0241] The modified nucleotides, which may be incorporated into a polynucleotide can be modified on the internucleoside linkage (e.g., phosphate backbone). Herein, in the context of the polynucleotide backbone, the phrases “phosphate” and “phosphodiester” are used interchangeably. Backbone phosphate groups can be modified by replacing one or more of the oxygen atoms with a different substituent. Further, the modified nucleosides and nucleotides can include the wholesale replacement of an unmodified phosphate moiety with another internucleoside linkage. Examples of modified phosphate groups include, but are not limited to, phosphorothioate, phosphonoselenoates, boranophosphates, boranophosphate esters, hydrogen phosphonates, phosphoramidates, phosphonodiamidites, alkyl or aryl phosphonates, and phosphotriesters. Phosphorodithioates have both non-linking oxygens replaced by sulfur. The phosphate linker can also be modified by the replacement of a linking oxygen with nitrogen (bridged phosphoramidates), sulfur (bridged phosphorothioates), and carbon (bridged methylene-phosphonates). Other modifications which may be used are taught in, for example, International Application WO2013052523, the contents of which are incorporated herein by reference in their entirety.

[0242] Different sugar modifications, nucleotide modifications, and/or internucleoside linkages (e.g., backbone structures) may exist at various positions in the polynucleotide. One of ordinary skill in the art will appreciate that the nucleotide analogs or other modification(s) may be located at any position(s) of a polynucleotide such that the function of the polynucleotide is not substantially decreased. A modification may also be a 5′ or 3 terminal modification. The polynucleotide may contain from about 1% to about 100% modified nucleotides (either in relation to overall nucleotide content, or in relation to one or more types of nucleotide, i.e. any one or more of A, G, U or C) or any intervening percentage (e.g., from 1% to 20%, from 1% to 25%, from 1% to 50%, from 1% to 60%, from 1% to 70%, from 1% to 80%, from 1% to 90%, from 1% to 95%, from 10% to 20%, from 10% to 25%, from 10% to 50%, from 10% to 60%, from 10% to 70%, from 10% to 80%, from 10% to 90%, from 10% to 95%, from 10% to 100%, from 20% to 25%, from 20% to 50%, from 20% to 60%, from 20% to 70%, from 20% to 80%, from 20% to 90%, from 20% to 95%, from 20% to 100%, from 50% to 60%, from 50% to 70%, from 50% to 80%, from 50% to 90%, from 50% to 95%, from 50% to 100%, from 70% to 80%, from 70% to 90%, from 70% to 95%, from 70% to 100%, from 80% to 90%, from 80% to 95%, from 80% to 100%, from 90% to 95%, from 90% to 100%, and from 95% to 100%).

[0243] In some embodiments, the polynucleotide includes a modified pyrimidine or purine. In some embodiments, the pyrimidine or purine in the polynucleotide molecule may be replaced with from about 1% to about 100% of a modified uracil or modified uridine (e.g., from 1% to 20%, from 1% to 25%, from 1% to 50%, from 1% to 60%, from 1% to 70%, from 1% to 80%, from 1% to 90%, from 1% to 95%, from 10% to 20%, from 10% to 25%, from 10% to 50%, from 10% to 60%, from 10% to 70%, from 10% to 80%, from 10% to 90%, from 10% to 95%, from 10% to 100%, from 20% to 25%, from 20% to 50%, from 20% to 60%, from 20% to 70%, from 20% to 80%, from 20% to 90%, from 20% to 95%, from 20% to 100%, from 50% to 60%, from 50% to 70%, from 50% to 80%, from 50% to 90%, from 50% to 95%, from 50% to 100%, from 70% to 80%, from 70% to 90%, from 70% to 95%, from 70% to 100%, from 80% to 90%, from 80% to 95%, from 80% to 100%, from 90% to 95%, from 90% to 100%, and from 95% to 100% of a modified pyrimidine or purine.

[0244] In some embodiments, the polynucleotides may comprise two or more effector module component sequences which are in a pattern such as ABABAB or AABBAABBAABB or ABCABCABC or variants thereof repeated once, twice, or more than three times. In these patterns, each letter, A, B, or C represent a different effector module component.

[0245] In yet another embodiment, the polynucleotides may comprise two or more effector module component sequences with each component having one or more sequences. As a non-limiting example, the sequences may be in a pattern such as ABABAB or AABBAABBAABB or ABCABCABC or variants thereof repeated once, twice, or more than three times in each of the regions. As another non-limiting example, the sequences may be in a pattern such as ABABAB or AABBAABBAABB or ABCABCABC or variants thereof repeated once, twice, or more than three times across the entire polynucleotide. In these patterns, each letter, A, B, or C represent a different sequence or component.

### Codon Selection

[0246] In some embodiments, one or more codons of the polynucleotides of the present disclosure may be replaced with other codons encoding the native amino acid sequence to tune the expression of the SREs, through a process referred to as codon selection. Since mRNA codon, and tRNA anticodon pools tend to vary among organisms, cell types, sub cellular locations and over time, the codon selection described herein is a spatiotemporal (ST) codon selection.

[0247] In some embodiments of the disclosure, certain polynucleotide features may be codon optimized. Codon optimization refers to a process of modifying a nucleic acid sequence for enhanced expression in the host cell by replacing at least 1, 2, 3, 4, 5, 10, 15, 20, 25, 50 or more codons of the native sequence with codons that are most frequently used in the genes of that host cell while maintaining the native amino acid sequence. Codon usage may be measured using the Codon Adaptation Index (CAI) which measures the deviation of a coding polynucleotide sequence from a reference gene set. Codon usage tables are available at the Codon Usage Database (http://www.kazusa.or.jp/codon/) and the CAI can be calculated by EMBOSS CAI program (http://emboss.sourceforge.net/). Codon optimization methods are known in the art and may be useful in efforts to achieve one or more of several goals. These goals include to match codon frequencies in target and host organisms to ensure proper folding, bias nucleotide content to alter stability or reduce secondary structures, minimize tandem repeat codons or base runs that may impair gene construction or expression, customize transcriptional and translational control regions, insert or remove protein signaling sequences, remove/add post translation modification sites in encoded protein (e.g. glycosylation sites), add, remove or shuffle protein domains, insert or delete restriction sites, modify ribosome binding sites and degradation sites, to adjust translational rates to allow the various domains of the protein to fold properly, or to reduce or eliminate problem secondary structures within the polynucleotide. In one embodiment, a polynucleotide sequence or portion thereof is codon optimized using optimization algorithms. Codon options for each amino acid are well-known in the art as are various species table for optimizing for expression in that particular species.

[0248] In some embodiments of the disclosure, certain polynucleotide features may be codon optimized. For example, a preferred region for codon optimization may be upstream (5′) or downstream (3′) to a region which encodes a polypeptide. These regions may be incorporated into the polynucleotide before and/or after codon optimization of the payload encoding region or open reading frame (ORF).

[0249] After optimization (if desired), the polynucleotides components are reconstituted and transformed into a vector such as, but not limited to, plasmids, viruses, cosmids, and artificial chromosomes.

[0250] In some embodiments, certain regions of the polynucleotide may be preferred for codon selection. For example, a preferred region for codon selection may be upstream (5′) or downstream (3′) to a region which encodes a polypeptide. These regions may be incorporated into the polynucleotide before and/or after codon selection of the payload encoding region or open reading frame (ORF).

[0251] The stop codon of the polynucleotides of the present disclosure may be modified to include sequences and motifs to alter the expression levels of the SREs, payloads and effector modules of the present disclosure. Such sequences may be incorporated to induce stop codon readthrough, wherein the stop codon may specify amino acids e.g. selenocysteine or pyrrolysine. In other instances, stop codons may be skipped altogether to resume translation through an alternate open reading frame. Stop codon read through may be utilized to tune the expression of components of the effector modules at a specific ratio (e.g. as dictated by the stop codon context). Examples of preferred stop codon motifs include UGAN, UAAN, and UAGN, where N is either C or U.

[0252] Suppression of termination occurs during translation of many viral mRNAs as a means of generating a second protein with extended carboxy terminus. In retroviruses, gag and pol genes are encoded by a single mRNA and separated by an amber termination codon UAG. Translational suppression of the amber codon allows synthesis of the gag pol precursor. Translation suppression is mediated by suppressor tRNAs that can recognize termination codons and insert a specific amino acid. In some embodiments, effector modules described herein may incorporate amber termination codons. Such codons may be used in lieu of or in addition to IRES and p2A sequences in bicistronic constructs. Stop codon read through may be combined with P2A to obtain low level expression of downstream gene (e.g. 1112). In some embodiments, the amber stop codons may be combined with tRNA expression or amino-acyl tRNA synthetase for further control. In one aspect, the payload may be a regulated tRNA synthetase.

### Conjugates

[0253] It is contemplated by the present disclosure that the compositions of the present disclosure may be complexed, conjugated or combined with one or more homologous or heterologous molecules. As used herein, the term “homologous molecule” refers to a molecule which is similar in at least one of structure or function relative to a starting molecule while a “heterologous molecule” is one that differs in at least one of structure or function relative to a starting molecule. Structural homologs are therefore molecules which may be substantially structurally similar. In some embodiments, such homologs may be identical. Functional homologs are molecules which may be substantially functionally similar. In some embodiments, such homologs may be identical.

[0254] Pharmaceutical compositions, biocircuits, biocircuit components, effector modules including their SREs or payloads of the present disclosure may comprise conjugates. Such conjugates of the disclosure may include naturally occurring substances or ligands, such as proteins (e.g., human serum albumin (HSA), low-density lipoprotein (LDL), high-density lipoprotein (HDL), or globulin); carbohydrates (e.g., a dextran, pullulan, chitin, chitosan, inulin, cyclodextrin or hyaluronic acid); or lipids. Conjugates may also be recombinant or synthetic molecules, such as synthetic polymers, e.g., synthetic polyamino acids, an oligonucleotide (e.g. an aptamer). Examples of polyamino acids may include polylysine (PLL), poly L-aspartic acid, poly L-glutamic acid, styrene-maleic acid anhydride copolymer, poly(L-lactide-co-glycolied) copolymer, divinyl ether-maleic anhydride copolymer, N-(2-hydroxypropyl) methacrylamide copolymer (HMPA), polyethylene glycol (PEG), polyvinyl alcohol (PVA), polyurethane, poly (2-ethylacryllic acid), N-isopropylacrylamide polymers, or polyphosphazine. Example of polyamines include: polyethylenimine, polylysine (PLL), spermine, spermidine, polyamine, pseudopeptide-polyamine, peptidomimetic polyamine, dendrimer polyamine, arginine, amidine, protamine, cationic lipid, cationic porphyrin, quaternary salt of a polyamine, or an alpha helical peptide.

[0255] In some embodiments, conjugates may also include targeting groups. As used herein, the term “targeting group” refers to a functional group or moiety attached to an agent that facilitates localization of the agent to a desired region, tissue, cell and/or protein. Such targeting groups may include, but are not limited to cell or tissue targeting agents or groups (e.g. lectins, glycoproteins, lipids, proteins, an antibody that binds to a specified cell type such as a kidney cell or other cell type). In some embodiments, targeting groups may comprise

[0256] , melanotropins, lectins, glycoproteins, surfactant protein A, mucin carbohydrates, multivalent lactose, multivalent galactose, N-acetyl-galactosamine, N-acetyl-gulucosamine, multivalent mannose, multivalent fucose, glycosylated polyaminoacids, multivalent galactose, transferrin, bisphosphonate, polyglutamate, polyaspartate, lipids, cholesterol, steroids, bile acids, folates, vitamin B12, biotin, an RGD peptide, an RGD peptide mimetic or an aptamer.

[0257] In some embodiments, targeting groups may be proteins, e.g., glycoproteins, or peptides, e.g., molecules having a specific affinity for a co-ligand, or antibodies e.g., an antibody, that binds to a specified cell type such as a cancer cell, endothelial cell, or bone cell. Targeting groups may also comprise hormones and/or hormone receptors.

[0258] In some embodiments, targeting groups may be any ligand capable of targeting specific receptors. Examples include, without limitation, folate, Ga1NAc, galactose, mannose, mannose-6-phosphate, apatamers, integrin receptor ligands, chemokine receptor ligands, transferrin, biotin, serotonin receptor ligands, PSMA, endothelin, GCPII, somatostatin, LDL, and HDL ligands. In some embodiments, targeting groups are aptamers. Such aptamers may be unmodified or comprise any combination of modifications disclosed herein.

[0259] In still other embodiments, pharmaceutical compositions, biocircuits, biocircuit components, effector modules including their SREs or payloads of the present disclosure may be covalently conjugated to cell penetrating polypeptides. In some embodiments, cell-penetrating peptides may also include signal sequences. In some embodiments, conjugates described herein may be designed to have increased stability, increased cell transfection and/or altered biodistribution (e.g., targeted to specific tissues or cell types.)

[0260] In some embodiments, conjugating moieties may be added to pharmaceutical compositions, biocircuits, biocircuit components, effector modules including their SREs or payloads of the present disclosure such that they allow the attachment of detectable labels to targets for clearance. Such detectable labels include, but are not limited to biotin labels, ubiquitins, fluorescent molecules, human influenza hemagglutinin (HA), c-myc, histidine (His), flag, glutathione S-transferase (GST), V5 (a paramyxovirus of simian virus 5 epitope), biotin, avidin, streptavidin, horse radish peroxidase (HRP) and digoxigenin.

[0261] In some embodiments, pharmaceutical compositions, biocircuits, biocircuit components, effector modules including their SREs or payloads of the present disclosure may be combined with one another or other molecules in the treatment of diseases and/or conditions.

### Additional Effector Module Features

[0262] The effector module of the present disclosure may further comprise a signal sequence which regulates the distribution of the payload of interest, a cleavage and/or processing feature which facilitate cleavage of the payload from the effector module construct, a targeting and/or penetrating signal which can regulate the cellular localization of the effector module, a tag, and/or one or more linker sequences which link different components of the effector module.

[0263] In some embodiments, additional effector module features of the present disclosure include, without limitation, any of those taught in Table 7.

TABLE 7
Effector Module Features

| | | | NA |
|---|---|---|---|
| | | | sequence |
| | | AA SEQ | or SEQ |
| Feature | AA sequence | ID NO. | ID NO. |
| EGFP | VSKGEELFTGVVPILVELDG | 211128 | 211133 |
| | DVNGHKFSVSGEGEGDATYG | | |
| | KLTLKFICTTGKLPVPWPTL | | |
| | VTTLTYGVQCFSRYPDHMKQ | | |
| | HDFFKSAMPEGYVQERTIFF | | |
| | KDDGNYKTRAEVKFEGDTLV | | |
| | NRIELKGIDFKEDGNILGHK | | |
| | LEYNYNSHNVYIMADKQKNG | | |
| | IKVNFKIRHNIEDGSVQLAD | | |
| | HYQQNTPIGDGPVLLPDNHY | | |
| | LSTQSKLSKDPNEKRDHMVL | | |
| | LEFVTAAGITLGMDELYK | | |
| Flag tag | DYKDDDDK | 211129 | 211134 |
| Linker | GSGSG | 211130 | 211135 |
| (GSGSG) | | | |
| HA tag | YPYDVPDYA | 211131 | 211136 |
| Linker | GS | — | ggatcc |
| (GS) | | | |
| Linker | GSLDG | 211132 | 211137 |
| (GSLDG) | | | |

### Signal Sequences

[0264] In addition to the SRE and payload region, effector modules of the disclosure may further comprise one or more additional features such as one or more signal sequences.

[0265] Signal sequences (sometimes referred to as signal peptides, targeting signals, target peptides, localization sequences, transit peptides, leader sequences or leader peptides) direct proteins (e.g., the effector module of the present disclosure) to their designated cellular and/or extracellular locations. Protein signal sequences play a central role in the targeting and translocation of nearly all secreted proteins and many integral membrane proteins.

[0266] A signal sequence is a short (5-30 amino acids long) peptide present at the N-terminus of the majority of newly synthesized proteins that are destined towards a particular location. Signal sequences can be recognized by signal recognition particles (SRPs) and cleaved using type I and type II signal peptide peptidases. Signal sequences derived from human proteins can be incorporated as a regulatory module of the effector module to direct the effector module to a particular cellular and/or extracellular location. These signal sequences are experimentally verified and can be cleaved (Zhang Z. and Henzel W. J.; “Signal peptide prediction based on analysis of experimentally verified cleavage sites.”; Protein Sci. 2004, 13:2819-2824).

[0267] In some embodiments, a signal sequence may be, although not necessarily, located at the N-terminus or C-terminus of the effector module, and may be, although not necessarily, cleaved off the desired effector module to yield a “mature” payload.

[0268] In some embodiments, the signal sequence used herein may exclude the methionine at the position 1 of amino acid sequence of the signal sequence. This may be referred to as an M1de1 mutation.

[0269] In addition to signal sequences naturally occurring such as from a secreted protein, a signal sequence may be avariant modified from a known signal sequence of a protein. For example, U.S. Pat. Nos. 8,258,102 and 9,133,265 to Sleep disclose a modified albumin signal sequence having a secretion signal and an additional X1-X2-X3-X4-X5-motif which can increase protein secretion; U.S. Pat. No. 9,279,007 to Do discloses signal sequences of modified fragments of human immunoglobulin heavy chain binding protein (Bip) that can enhance protein expression and secretion; U.S. Pat. No. 8,148,494 to Leonhartsberger et al., discloses a signal peptide with a cleavage site that can be fused with a recombinant protein; the contents of each of which are incorporated by reference in their entirety.

[0270] In some instances, the secreted signal sequences may be cytokine signal sequences such as, but not limited to, IL2 signal sequence or ap40 signal sequence.

[0271] In some instances, signal sequences directing the payload of interest to the surface membrane of the target cell may be used. Expression of the payload on the surface of the target cell may be useful to limit the diffusion of the payload to non-target in vivo environments, thereby potentially improving the safety profile of the payloads. Additionally, the membrane presentation of the payload may allow for physiologically and qualitative signaling as well as stabilization and recycling of the payload for a longer half-life. Membrane sequences may be the endogenous signal sequence of the N terminal component of the payload of interest. Optionally, it may be desirable to exchange this sequence for a different signal sequence. Signal sequences may be selected based on their compatibility with the secretory pathway of the cell type of interest so that the payload is presented on the surface of the T cell. In some embodiments, the signal sequence may be IgE signal sequence, CD8a signal sequence (also referred to as CD8a leader), or IL15Ra signal sequence (also referred to as IL15Ra leader) or M1de1 CD8a signal sequence (also referred to as M1de1 CD8 leader sequence).

[0272] Other signal sequence variants may be used in the present effector module may include those discussed in U.S. patent application publication NOs.: 2007/0141666; PCT patent application publication NOs.: 1993/018181; the contents of each of which are incorporated herein by reference in their entirety.

[0273] Other examples of signal sequences include, a variant may be a modified signal sequence discussed in U.S. Pat. Nos. 8,148,494; 8,258,102; 9,133,265; 9,279,007; and U.S. patent application publication NO. 20070141666; and International patent application publication NO. WO1993018181; the contents of each of which are incorporated herein by reference in their entirety.

[0274] In other examples, a signal sequence may be a heterogeneous signal sequence from other organisms such as virus, yeast and bacteria, which can direct an effector module to a particular cellular site, such as a nucleus (e.g., EP 1209450). Other examples may include Aspartic Protease (NSP24) signal sequences from Trichoderma that can increase secretion of fused protein such as enzymes (e.g., U.S. Pat. No. 8,093,016 to Cervin and Kim), bacterial lipoprotein signal sequences (e.g., PCT application publication NO. WO199109952 to Lau and Rioux), E. coli enterotoxin II signal peptides (e.g., U.S. Pat. No. 6,605,697 to Kwon et al.), E. coli secretion signal sequence (e.g., U.S. patent publication NO. US2016090404 to Malley et al.), a lipase signal sequence from a methylotrophic yeast (e.g., U.S. Pat. No. 8,975,041), and signal peptides for DNases derived from Coryneform bacteria (e.g., U.S. Pat. No. 4,965,197); the contents of each of which are incorporated herein by reference in their entirety.

[0275] Signal sequences may also include nuclear localization signals (NLSs), nuclear export signals (NESs), polarized cell tubulo-vesicular structure localization signals (See, e.g., U.S. Pat. No. 8,993,742; Cour et al., Nucleic Acids Res. 2003, 31(1): 393-396; the contents of each of which are incorporated herein by reference in their entirety), extracellular localization signals, signals to subcellular locations (e.g. lysosome, endoplasmic reticulum, golgi, mitochondria, plasma membrane and peroxisomes, etc.) (See, e.g., U.S. Pat. No. 7,396,811; and Negi et al., Database, 2015, 1-7; the contents of each of which are incorporated herein by reference in their entirety).

### Cleavage Sites

[0276] In some embodiments, the effector module comprises a cleavage and/or processing feature.

[0277] The effector module of the present disclosure may include at least one protein cleavage signal/site. The protein cleavage signal/site may be located at the N-terminus, the C-terminus, at any space between the N- and the C-termini such as, but not limited to, half-way between the N- and C-termini, between the N-terminus and the half-way point, between the half-way point and the C-terminus, and combinations thereof.

[0278] The effector module may include one or more cleavage signal(s)/site(s) of any proteinases. The proteinases may be a serine proteinase, a cysteine proteinase, an endopeptidase, a dipeptidase, a metalloproteinase, a glutamic proteinase, a threonine proteinase and an aspartic proteinase. In some aspects, the cleavage site may be a signal sequence of furin, actinidain, calpain-1, carboxypeptidase A, carboxypeptidase P, carboxypeptidase Y, caspase-1, caspase-2, caspase-3, caspase-4, caspase-5, caspase-6, caspase-7, caspase-8, caspase-9, caspase-10, cathepsin B, cathepsin C, cathepsin G, cathepsin H, cathepsin K, cathepsin L, cathepsin S, cathepsin V, clostripain, chymase, chymotrypsin, elastase, endoproteinase, enterokinase, factor Xa, formic acid, granzyme B, Matrix metallopeptidase-2, Matrix metallopeptidase-3, pepsin, proteinase K, SUMO protease, subtilisin, TEV protease, thermolysin, thrombin, trypsin and TAGZyme.

### Tags

[0279] In some embodiments, the effector module comprises a protein tag.

[0280] The protein tag may be used for detecting and monitoring the process of the effector module. The effector module may include one or more tags such as an epitope tag (e.g., a FLAG or hemagglutinin (HA) tag). A large number of protein tags may be used for the present effector modules. They include, but are not limited to, self-labeling polypeptide tags (e.g., haloalkane dehalogenase (halotag2 or halotag7), ACP tag, clip tag, MCP tag, snap tag), epitope tags (e.g., FLAG, HA, His, and Myc), fluorescent tags (e.g., green fluorescent protein (GFP), red fluorescent protein (RFP), yellow fluorescent protein (YFP), and its variants), bioluminescent tags (e.g. luciferase and its variants), affinity tags (e.g., maltose-binding protein (MBP) tag, glutathione-S-transferase (GST) tag), immunogenic affinity tags (e.g., protein A/G, IRS, 0, AU5, glu-glu, KT3, S-tag, HSV, VSV-G, Xpress and V5), and other tags (e.g., biotin (small molecule), StrepTag (StrepII), SBP, biotin carboxyl carrier protein (BCCP), eXact, CBP, CYD, HPC, CBD intein-chitin binding domain, Trx, NorpA, and NusA.

[0281] In other embodiments, a tag may also be selected from those disclosed in U.S. Pat. Nos. 8,999,897; 8,357,511; 7,094, 568; 5,011,912; 4,851,341; and 4,703,004; U.S patent application publication NOs. US2013115635 and US2013012687; and International application publication NO. WO2013091661; the contents of each of which are incorporated herein by reference in their entirety.

[0282] In some aspects, a multiplicity of protein tags, either the same or different tags, may be used; each of the tags may be located at the same N or C terminus, whereas in other cases these tags may be located at each terminus.

### Linkers

[0283] In some embodiments, the effector module comprises a linker.

[0284] In some embodiments, the effector module of the disclosure may further comprise a linker sequence. The linker region serves primarily as a spacer between two or more polypeptides within the effector module. The “linker” or “spacer”, as used herein, refers to a molecule or group of molecules that connects two molecules, or two parts of a molecule such as two domains of a recombinant protein.

[0285] In some embodiments, “Linker” (L) or “linker domain” or “linker region” or “linker module” or “peptide linker” as used herein refers to an oligo-or polypeptide region of from about 1 to 100 amino acids in length, which links together any of the domains/regions of the effector module (also called peptide linker). The peptide linker may be 1-40 amino acids in length, or 2-30 amino acids in length, or 20-80 amino acids in length, or 50-100 amino acids in length. Linker length may also be optimized depending on the type of payload utilized and based on the crystal structure of the payload. In some instances, a shorter linker length may be preferably selected. In some aspects, the peptide linker is made up of amino acids linked together by peptide bonds, preferably from 1 to 20 amino acids linked by peptide bonds, wherein the amino acids are selected from the 20 naturally occurring amino acids: Glycine (G), Alanine (A), Valine (V), Leucine (L), Isoleucine (I), Serine (S), Cysteine (C), Threonine (T), Methionine (M), Proline (P), Phenylalanine (F), Tyrosine (Y), Tryptophan (W), Histidine (H), Lysine (K), Arginine (R), Aspartate (D), Glutamic acid (E), Asparagine (N), and Glutamine (Q). One or more of these amino acids may be glycosylated, as is understood by those in the art.

[0286] A linker sequence may be a natural linker derived from a multi-domain protein. A natural linker is a short peptide sequence that separates two different domains or motifs within a protein.

[0287] In some aspects, linkers may be flexible or rigid. In other aspects, linkers may be cleavable or non-cleavable. As used herein, the terms “cleavable linker domain or region” or “cleavable peptide linker” are used interchangeably. In some embodiments, the linker sequence may be cleaved enzymatically and/or chemically.

[0288] The linkers of the present disclosure may also be non-peptide linkers. For example, alkyl linkers such as NH—(CH₂) a-C(O), wherein a=2-20 can be used. These alkyl linkers may further be substituted by any non-sterically hindering group such as lower alkyl (e.g., C₁-C₆) lower acyl, halogen (e.g., Cl, Br), CN, NH₂, phenyl, etc.

### Targeting or Penetrating Peptides

[0289] In some embodiments, the effector module comprises a targeting and/or penetrating peptide.

[0290] Small targeting and/or penetrating peptides that selectively recognize cell surface markers (e.g. receptors, trans-membrane proteins, and extra-cellular matrix molecules) can be employed to target the effector module to the desired organs, tissues or cells. Short peptides (5-50 amino acid residues) synthesized in vitro and naturally occurring peptides, or analogs, variants, derivatives thereof, may be incorporated into the effector module for homing the effector module to the desired organs, tissues and cells, and/or subcellular locations inside the cells.

[0291] In some embodiments, a targeting sequence and/or penetrating peptide may be included in the effector module to drive the effector module to a target organ, or a tissue, or a cell (e.g., a cancer cell). In other embodiments, a targeting and/or penetrating peptide may direct the effector module to a specific subcellular location inside a cell. As non-limiting examples, such targeting sequences and/or penetrating peptides may include those for targeting the effector module to desired region of the central nervous system (e.g., U.S. Pat. No. 9,259,432; U.S. application publication NO.: 2015/259392); or adipose tissue (e.g., U.S. Pat. Nos. 8,067,377 and 8,710,017); or prostate (e.g., U.S. patent publication NO.: 2016/0046668); the contents of each of which are incorporated herein by reference in their entirety.

[0292] In other embodiments, a targeting and/or penetrating peptide may direct the effector module to a specific subcellular location inside a cell. As a non-limiting example, a mitochondrion targeting peptide and/or a mitochondria membrane penetrating peptide may be included in the effector module to drive the effector module to the mitochondria of a cell. See e.g., U.S. Pat. Nos. 9,260,495; 9,173,952 and 9,132,198; and U.S. application publication NO.: 2015/361140; the contents of each of which are incorporated herein by reference in their entirety.

[0293] A targeting peptide has any number of amino acids from about 6 to about 30 inclusive. The peptide may have 6, 7, 8, 9, 10, 11, 12, 13, 14, 15, 16, 17, 18, 19, 20, 21, 22, 23, 24, 25, 26, 27, 28, 29 or 30 amino acids. Generally, a targeting peptide may have 25 or fewer amino acids, for example, 20 or fewer, for example 15 or fewer.

[0294] Naturally occurring small targeting and/or penetrating peptides that recognize specific tissues or cells bind cell surface molecules (e.g. receptors, trans-membrane proteins) with high affinity, which make them attractive trafficking moieties. Such peptides may include peptide toxins from microbes, insects (e.g. scorpion, honeybee, spider), animals (e.g. snake) and plants, and analogs, variants and derivatives thereof; and secreted peptide hormones, ligands and signal peptides.

[0295] In some aspects, analogs, variants and derivatives from natural toxins that abolish their cytotoxic activities may be used as targeting peptides. Exotoxin is a toxin secreted by bacteria. Many exotoxins have been shown to bind specific cell molecules. For example, enterotoxins, a group of protein toxins produced and secreted from bacterial organisms bind the mucosal (epithelial) cells of the intestinal wall. Enterotoxins may include, but are not limited to, E. coli heat stable enterotoxin (ST), Cholera toxin (CT), E. coli heat-labile enterotoxin (LT), Bordetella pertussis-derived pertussis toxin (PT), Pseudomonas aeruginosa exotoxin A (ETA), Staphylococcus enterotoxins, Corynebacterium diphtheria-derived diphtheria toxin, enterotoxin NSP4 from rotavirus. Other exotoxins include neurotoxins which affect the nervous system, cardiotoxins which affect the heart, pseudomonas exotoxins, Botulinum neurotoxins, shiga toxin, shiga-like toxin 1 and 2, Clostridium difficile toxins, Clostridium perfringens epsilon toxin and anthrax toxin.

[0296] In addition to exotoxins, other toxins may include those isolated from plants such as maize RIP, gelonin, pokeweed antiviral protein, saporin, trichsanthin, ricin, abrin; scorpions such as Charybdotoxin; spider such as PcTx1; cone snail such as PcTx1; sea anemone such as gigantoxin 1; honey bees such as mellitins, a group of water-soluble, cationic, amphipathic 26 amino acid alpha-helical peptides isolated from the venoms of honey bee Apis mellifera (western or European or big honey bee), Apis florea (little or dwarf honey bee), Apis dorsata (giant honey bee) and Apis cerana (oriental honey bee); snake venom toxins, bombesin which is originally isolated from the skin of toad, which binds g-protein couple gastrin releasing peptide receptors (e.g. BBR-1/2/3) in the gastric tract and brain. See e.g. Suchanek, G., et al., PNAS (1978) 75:701-704; the contents of which are incorporated by reference in its entirety.

[0297] Peptides hormones and other signal peptides transfer important messages for cell to cell communications, which selectively bind cells that express their receptors with high affinity. In some aspects, peptide hormones may be included in the effector module. Such small peptide hormones and signal peptides may include, but are not limited to, adiponectin, adipose-derived hormone, agouti signaling peptide, allatostatin, amylin, angiotensin, atrial natriuretic peptide, bomben-like peptide, big gastrin, betatrophin, bradykinin, calcitonin, corticotrophin releasing hormone, cosyntrophin, endothelin, enteroglucagon, FGF, FNDC5, follicle-stimulating hormone, gastrin, ghrelin, glucagon and glucagon-like peptide, gonadotrophin, granulocyte colony stimulating factor, growth hormone, growth hormone releasing hormone, hepcidin, human chorionic gonadotrophin, human placental lactogen, incretin, insulin and insulin analogs, insulin-like growth factor, leptin, little gastrin, liraglutide, luteinizing hormone, melanocortin, minigastrin, alpha-melanocyte-stimulating hormone, neuropeptide Y, nerve growth factor (NGF), neurotrophin-¾, NPH insulin, orexin, obestatin, osteocalcin, pancreatic hormone, parathyroid hormone, peptide hormone, peptide YY, prolactin, preprohormone, relaxi, renin, salcatonin, somatostatin (SST), secretin, substance P, sincalide, teleost leptins, temporin, tesamorelin, thyroid stimulating hormone, urocortin, vasoactive intestinal peptide (VIP), VGF and Vitellogenin.

[0298] Targeting and penetrating peptides may also be engineered biomimetic peptides and/or chemically modified small peptides. Numerous peptides with specific motifs and sequences that target specific cells and tissues with high affinity and selectivity in normal or diseased conditions are identified. A synthetic targeting peptide may be up to 30 amino acids in length or may be longer. A targeting peptide generally has at least about 5 amino acids but may have fewer, for example, 4 amino acids, or 3 amino acids. Generally, a targeting peptide has any number of amino acids from about 6 to about 30 inclusive. The peptide may have 6, 7, 8, 9, 10, 11, 12, 13, 14, 15, 16, 17, 18, 19, 20, 21, 22, 23, 24, 25, 26, 27, 28, 29 or 30 amino acids. Generally, a targeting peptide may have 25 or fewer amino acids, for example, 20 or fewer, for example 15 or fewer.

[0299] A chimeric peptide may also be synthesized with fused amino acids from naturally occurring proteins and artificial amino acid sequences.

### Stimuli

[0300] Biocircuits of the present disclosure are triggered by one or more stimuli. Stimuli include a ligand, an externally added or endogenous metabolite, the presence or absence of a defined ligand, the presence or action of one or more effector modules, or a concentration gradient of ions or biomolecules or the like.

### Ligands

[0301] In some embodiments, the stimulus is a ligand. Ligands may be nucleic acid-based, protein-based, lipid-based, organic, inorganic or any combination of the foregoing.

[0302] In some embodiments, the ligand may be, but is not limited to, a protein, peptide, nucleic acid, lipid, lipid derivative, sterol, steroid, metabolite, metabolite derivative, and small molecule.

[0303] In some embodiments, the stimulus is a small molecule. In some embodiments, the small molecules are cell permeable. In some embodiments, the small molecules are FDA-approved, safe and orally administered.

[0304] In some embodiments, the ligands bind to carbonic anhydrases. In some embodiments, the ligand binds to and inhibits carbonic anhydrase function and is herein referred to as carbonic anhydrase inhibitor.

[0305] In some embodiments, the ligand is a small molecule that binds to carbonic anhydrase 2. In one embodiment, the small molecule is CA2 inhibitor. Examples of CA2 inhibitors include, but are not limited to Celecoxib (also referred to as Celebrex), Valdecoxib, Rofecoxib, Acetazolamide, Methazolamide, Dorzolamide, Brinzolamide, Diclofenamide, Ethoxzolamide, Zonisamide, Dansylamide, and Dichlorphenamide.

[0306] In some embodiments, the ligands may comprise portions of small molecules know to mediate binding to CA2. Ligands may also be modified to reduce off-target binding to carbonic anhydrases other than CA2 and increase specific binding to CA2.

[0307] Ligands may also be selected from the analysis of the dependence of a known CA2 ligand's activity on its molecular/chemical structure, through Structure Activity Relationships (SAR) study. Any of the methods related to SAR, known in art may be utilized to identify stabilizing ligands of the disclosure. SAR may be utilized to improve properties of the ligand such as specificity, potency, pharmacokinetics, bioavailability, and safety. SAR analysis of known CA2 inhibitors may also be combined with high resolution X ray structures of CA2 complexed with ligands

[0308] In one embodiment, the stimuli of the present disclosure may be FDA approved ligands capable of binding to the specific DDs or target regions within the DDs.

[0309] In some embodiments, ligands that do not affect the activity of the immune cell, and/or the chimeric antigen receptor, in the absence of the SREs may be preferably selected.

[0310] In some embodiments, two or more ligands may be utilized to stabilize the same stimulus response element.

### Ligand Conjugates

[0311] In some embodiments, the ligand may be complexed or bound to another molecule such a, but not limited to, another ligand, a protein, peptide, nucleic acid, lipid, lipid derivative, sterol, steroid, metabolite, metabolite derivative or small molecule. In some embodiments, the ligand stimulus is complexed to or bound to one or more other molecules. In some embodiments, the ligand stimulus is complexed or bound to one or more different kinds and/or numbers of other molecules. In some embodiment, the ligand stimulus is a multimer of the same kind of ligand. In some embodiments, the ligand stimulus multimer comprises 2, 3, 4, 5, 6, or more monomers.

[0312] Ligands such as small molecules that are well known to bind candidate proteins can be tested for their regulation in protein responses. The small molecules may be clinically approved to be safe and have appropriate pharmaceutical kinetics and distribution. In some embodiments, the stimulus is a ligand of a destabilizing domain (DD), for example, a small molecule that binds a destabilizing domain and stabilizes the POI fused to the destabilizing domain.

[0313] In some embodiments, the stimulus is a small molecule. In some embodiments, the small molecules are cell permeable.

### Embedded Stimulus, Signals or Other Regulatory Moieties

[0314] In some embodiments, the effector module of the present disclosure may further comprise one or more microRNAs, microRNA binding sites, promotors and tunable elements.

### MicroRNA

[0315] In one embodiment, microRNA may be used in support of the creation of tunable biocircuits. Each aspect or tuned modality may bring to the effector module or biocircuit a differentially tuned feature. For example, a destabilizing domain may alter cleavage sites or dimerization properties or half-life of the payload, and the inclusion of one or more microRNA or microRNA binding site may impart cellular detargeting or trafficking features. Consequently, the present disclosure embraces biocircuits which are multifactorial in their tenability. Such biocircuits and effector modules may be engineered to contain one, two, three, four or more tuned features.

[0316] microRNAs (or miRNA) are 19-25 nucleotide long noncoding RNAs that bind to the 3′UTR of nucleic acid molecules and down-regulate gene expression either by reducing nucleic acid molecule stability or by inhibiting translation. The polynucleotides of the disclosure may comprise one or more microRNA target sequences, microRNA sequences, or microRNA seeds.

[0317] For example, if the polynucleotide is not intended to be delivered to the liver but ends up there, then miR-122, a microRNA abundant in liver, can inhibit the expression of the polynucleotide if one or multiple target sites of miR-122 are engineered into the polynucleotide. Introduction of one or multiple binding sites for different microRNA can be engineered to further decrease the longevity, stability, and protein translation of a polynucleotide hence providing an additional layer of tenability beyond the stimulus selection, SRE design and payload variation.

[0318] As used herein, the term “microRNA site” refers to a microRNA target site or a microRNA recognition site, or any nucleotide sequence to which a microRNA binds or associates. It should be understood that “binding” may follow traditional Watson-Crick hybridization rules or may reflect any stable association of the microRNA with the target sequence at or adjacent to the microRNA site.

[0319] Conversely, for the purposes of the polynucleotides of the present disclosure, microRNA binding sites can be engineered out of (i.e. removed from) sequences in which they naturally occur in order to increase protein expression in specific tissues. For example, miR-122 binding sites may be removed to improve protein expression in the liver.

[0320] Regulation of expression in multiple tissues can be accomplished through introduction or removal or one or several microRNA binding sites.

[0321] Specifically, microRNAs are known to be differentially expressed in immune cells (also called hematopoietic cells), such as antigen presenting cells (APCs) (e.g. dendritic cells and macrophages), macrophages, monocytes, B lymphocytes, T lymphocytes, granulocytes, natural killer cells, etc. Immune cell specific microRNAs are involved in immunogenicity, autoimmunity, the immune-response to infection, inflammation, as well as unwanted immune response after gene therapy and tissue/organ transplantation. Immune cells specific microRNAs also regulate many aspects of development, proliferation, differentiation and apoptosis of hematopoietic cells (immune cells). For example, miR-142 and miR-146 are exclusively expressed in the immune cells, particularly abundant in myeloid dendritic cells. Introducing the miR-142 binding site into the 3′-UTR of a polypeptide of the present disclosure can selectively suppress the gene expression in the antigen presenting cells through miR-142 mediated mRNA degradation, limiting antigen presentation in professional APCs (e.g. dendritic cells) and thereby preventing antigen-mediated immune response after gene delivery (see, Annoni A et al., blood, 2009, 114, 5152-5161, the content of which is herein incorporated by reference in its entirety.)

[0322] In one embodiment, microRNAs binding sites that are known to be expressed in immune cells, in particular, the antigen presenting cells, can be engineered into the polynucleotides to suppress the expression of the polynucleotide in APCs through microRNA mediated RNA degradation, subduing the antigen-mediated immune response, while the expression of the polynucleotide is maintained in non-immune cells where the immune cell specific microRNAs are not expressed.

[0323] Many microRNA expression studies have been conducted, and are described in the art, to profile the differential expression of microRNAs in various cancer cells/tissues and other diseases. Some microRNAs are abnormally over-expressed in certain cancer cells and others are under-expressed. For example, microRNAs are differentially expressed in cancer cells (WO2008/154098, US2013/0059015, US2013/0042333, WO2011/157294); cancer stem cells (US2012/0053224); pancreatic cancers and diseases (US2009/0131348, US2011/0171646, US2010/0286232, U.S. Pat. No. 8,389,210); asthma and inflammation (U.S. Pat. No. 8,415,096); prostate cancer (US2013/0053264); hepatocellular carcinoma (WO2012/151212, US2012/0329672, WO2008/054828, U.S. Pat. No. 8,252,538); lung cancer cells (WO2011/076143, WO2013/033640, WO2009/070653, US2010/0323357); cutaneous T cell lymphoma (WO2013/011378); colorectal cancer cells (WO2011/0281756, WO2011/076142); cancer positive lymph nodes (WO2009/100430, US2009/0263803); nasopharyngeal carcinoma (EP2112235); chronic obstructive pulmonary disease (US2012/0264626, US2013/0053263); thyroid cancer (WO2013/066678); ovarian cancer cells (US2012/0309645, WO2011/095623); breast cancer cells (WO2008/154098, WO2007/081740, US2012/0214699), leukemia and lymphoma (WO2008/073915, US2009/0092974, US2012/0316081, US2012/0283310, WO2010/018563, the content of each of which is incorporated herein by reference in their entirety).

[0324] In one embodiment, microRNA may be used as described herein in support of the creation of tunable biocircuits.

[0325] In some embodiments, effector modules may be designed to encode (as a DNA or RNA or mRNA) one or more payloads, SREs and/or regulatory sequence such as a microRNA or microRNA binding site. In some embodiments, any of the encoded payloads or SREs may be stabilized or de-stabilized by mutation and then combined with one or more regulatory sequences to generate a dual or multi-tuned effector module or biocircuit system.

[0326] Each aspect or tuned modality may bring to the effector module or biocircuit a differentially tuned feature. For example, an SRE may represent a destabilizing domain, while mutations in the protein payload may alter its cleavage sites or dimerization properties or half-life and the inclusion of one or more microRNA or microRNA binding site may impart cellular targeting or trafficking features. Consequently, the present disclosure embraces biocircuits which are multifactorial in their tenability.

[0327] Such biocircuits may be engineered to contain one, two, three, four or more tuned features.

### Promoters

[0328] In some embodiments, compositions of the disclosure comprise a promoter.

[0329] As used herein a promoter is defined as a DNA sequence recognized by transcription machinery of the cell, required to initiate specific transcription of the polynucleotide sequence of the present disclosure. Vectors can comprise native or non-native promoters operably linked to the polynucleotides of the disclosure. The promoters selected may be strong, weak, constitutive, inducible, tissue specific, development stage-specific, and/or organism specific. One example of a suitable promoter is the immediate early cytomegalovirus (CMV) promoter such as, but not limited to SEQ ID NO: 210476-210478. This promoter sequence is a strong constitutive promoter sequence capable of driving high levels of expression of polynucleotide sequence that is operatively linked to it. Another example of a promoter is Elongation Growth Factor-1 Alpha (EF-1 alpha) such as, but not limited to, SEQ ID NO: 210479-210483. Other constitutive promoters may also be used, including, but not limited to simian virus 40 (SV40), mouse mammary tumor virus (MMTV), human immunodeficiency virus (HIV), long terminal repeat (LTR), promoter, an avian leukemia virus promoter, an Epstein-Barr virus immediate early promoter, a Rous sarcoma virus promoter as well as human gene promoters including, but not limited to the phosphoglycerate kinase (PGK) promoter (non-limiting examples include SEQ ID NO: 210484-210491), actin promoter, the myosin promoter, the hemoglobin promoter, the Ubiquitin C (Ubc) promoter, the human U6 small nuclear protein promoter and the creatine kinase promoter. In some instances, inducible promoters such as but not limited to metallothionine promoter, glucocorticoid promoter, a progesterone promoter, and a tetracycline promoter may be used.

[0330] In some embodiments, the optimal promoter may be selected based on its ability to achieve minimal expression of the SREs and payloads of the disclosure in the absence of the ligand and detectable expression in the presence of the ligand.

[0331] Additional promoter elements e.g. enhancers may be used to regulate the frequency of transcriptional initiation. Such regions may be located 10-100 base pairs upstream or downstream of the start site. In some instances, two or more promoter elements may be used to cooperatively or independently activate transcription.

[0332] In some embodiments, the promoter of the disclosure may be a Tet-ON promoter. Combination of the transcription regulation Tet system with the DDs permits simultaneous control of gene expression and protein stability. Any of the dual-Tet ON-DD systems described by Pedone et al. (2018) doi: https://doi.org/10.1101/404699 may be useful in the present disclosure (the contents of which are herein incorporated by reference in their entirety.

### Other Regulatory Features

[0333] In some embodiments, compositions of the disclosure may include optional proteasome adaptors. As used herein, the term “proteasome adaptor” refers to any nucleotide/amino acid sequence that targets the appended payload for degradation. In some aspects, the adaptors target the payload for degradation directly thereby circumventing the need for ubiquitination reactions. Proteasome adaptors may be used in conjunction with destabilizing domains to reduce the basal expression of the payload. Exemplary proteasome adaptors include the UbL domain of Rad23 or hHR23b, HPV E7 which binds to both the target protein Rb and the S4 subunit of the proteasome with high affinity, which allows direct proteasome targeting, bypassing the ubiquitination machinery; the protein gankyrin which binds to Rb and the proteasome subunit S6.

### Exemplary Effector Module Constructs

[0334] Biocircuits of the present disclosure may comprise at least one effector module which may comprise at least one SRE derived from CA2 (referred to as “CA2 SREs”) which may be operably linked to at least one payload of interest. These types of biocircuits and effector modules are referred to as “CA2 biocircuits” and “CA2 effector modules”. Additionally, the CA2 effector module may comprise additional features including, but not limited to, signal sequences, linker, spacers, tags, flags, cleavage sites, and IRES. Any of the exemplary SREs (e.g., DDs), payloads of interest, signal sequences, linker, spacers, tags, flags, cleavage sites, and IRES taught herein or known in the art may be combined to create the CA2 effector modules of the present disclosure.

### Payloads of Interest

[0335] In one embodiment, the CA2 effector module comprises a payload of interest. The payload of interest may be a wild-type polypeptide, a fragment of a wild-type polypeptide and/or comprise one or more mutations relative to a wild-type polypeptide.

[0336] In one embodiment, the CA2 effector module produces regulated interleukin-15 (IL15).

[0337] In one embodiment, the CA2 effector module produces regulated interleukin-15 receptor subunit alpha (IL15Ra).

[0338] In one embodiment, the CA2 effector module produces a regulated fluorescent protein. In one embodiment, at least one payload in the CA2 effector module is a mCherry protein. In one embodiment, at least one payload in the CA2 effector module is a Renilla luciferase wild-type sequence (SEQ ID NO: 210643, encoded by SEQ ID NO: 210644). In one embodiment, at least one payload in the CA2 effector module is a Renilla luciferase sequence. In one embodiment, at least one payload in the CA2 effector module is a firefly luciferase sequence. In one embodiment, at least one payload in the CA2 effector module is a region of the firefly luciferase sequence. In one embodiment, at least one payload in the CA2 effector module is a Aequorea coerulescens GFP (AcGFP) sequence. In one embodiment, at least one payload in the CA2 effector module is a region of the AcGFP sequence.

[0339] In one embodiment, the CA2 effector module produces regulated CD19 scFV. The CA2 effector module may include a payload of a transmembrane domain and/or cytoplasmic domain from another parent protein as well as the CD19 scFV payload. In one embodiment, at least one payload in the CA2 effector module includes at least one mutation as compared to the wild-type sequence.

[0340] In one embodiment, the CA2 effector module produces regulated CAR.

[0341] In some aspects, the payloads described herein may be co-expressed with a chimeric antigen receptor.

[0342] In one embodiment, the CA2 effector module produces regulated interleukin-12 (IL12).

[0343] In one embodiment, the effector module produces regulated

[0344] The CA2 biocircuits and/or CA2 effector modules of the present disclosure may be monocistronic or multicistronic meaning one (monocistronic) or more than one (multicistronic) message (e.g., payload of interest) is produced. If two messages are produced, the CA2 biocircuit or CA2 effector module is considered bicistronic.

[0345] In one embodiment, at least one CA2 effector module of the present disclosure is monocistronic.

[0346] In one embodiment, at least one CA2 effector module of the present disclosure is multicistronic.

[0347] In one embodiment, at least one CA2 effector module of the present disclosure is bicistronic.

[0348] In one embodiment, the CA2 biocircuit of the present disclosure is monocistronic.

[0349] In one embodiment, the CA2 biocircuit of the present disclosure is multicistronic.

[0350] In one embodiment, the CA2 biocircuit of the present disclosure is bicistromc.

### CA2 GFP Effector Modules

[0351] In one embodiment, CA2 DDs are fused to AcGFP through a linker sequence at either the N-terminal or the C-terminal end of the fusion constructs. These are referred to as “CA2 GFP effector modules.” The destabilizing and ligand dependent stabilization properties of the fusion proteins may be evaluated by methods such as western blotting, and FACS. Examples of CA2 mutants that are fused to GFP are provided in Table 8. Constructs may be cloned into any vector known in the art, such as, but not limited to pLVX.IRES. Puro vectors. In Table 8, an asterisk indicates the translation of the stop codon.

TABLE 8
CA2 GFP constructs

| | | AA SEQ | NA SEQ |
|---|---|---|---|
| Description | Sequence | ID NO. | ID NO. |
| Linker (GSG) | GSG | — | GGATCC |
| (BamH1-Gly) | | | GGT |
| Linker (GS) | GS | — | GGATCC |
| (BamH1) | | | |
| Linker (SLDG) | SLDG | 210667 | 210668; |
| | | | 210669 |
| P2A cleavage site | ATNFSLLKQAGDVEENPGP | 208337 | 208338 |
| OT-001986 | MVSKGAELFTGIVPILIELNGDVNGHKFSVSGEGEGDATYGKLTLKFI | 210670 | 210671 |
| (AcGFP (1-239 of | CTTGKLPVPWPTLVTTLSYGVQCFSRYPDHMKQHDFFKSAMPEGYIQ | | |
| WT); Linker (GSG) | ERTIFFEDDGNYKSRAEVKFEGDTLVNRIELTGTDFKEDGNILGNKME | | |
| (BamH1-Gly); CA2 | YNYNAHNVYIMTDKAKNGIKVNFKIRHNIEDGSVQLADHYQQNTPIG | | |
| (aa 2-260 of WT); | DGPVLLPDNHYLSTQSALSKDPNEKRDHMIYFGFVTAAAITHGMDEL | | |
| stop) | YKGSGSHHWGYGKHNGPEHWHKDFPIAKGERQSPVDIDTHTAKYDP | | |
| | SLKPLSVSYDQATSLRILNNGHAFNVEFDDSQDKAVLKGGPLDGTYR | | |
| | LIQFHFHWGSLDGQGSEHTVDKKKYAAELHLVHWNTKYGDFGKAV | | |
| | QQPDGLAVLGIFLKVGSAKPGLQKVVDVLDSIKTKGKSADFTNFDPR | | |
| | GLLPESLDYWTYPGSLTTPPLLECVTWIVLKEPISVSSEQVLKFRKLNF | | |
| | NGEGEPEELMVDNWRPAQPLKNRQIKASFK* | | |
| OT-001987 | MVSKGAELFTGIVPILIELNGDVNGHKFSVSGEGEGDATYGKLTLKFI | 210672 | 210673 |
| (AcGFP (1-239 of | CTTGKLPVPWPTLVTTLSYGVQCFSRYPDHMKQHDFFKSAMPEGYIQ | | |
| WT); Linker (GS) | ERTIFFEDDGNYKSRAEVKFEGDTLVNRIELTGTDFKEDGNILGNKME | | |
| (BamH1); CA2 (aa | YNYNAHNVYIMTDKAKNGIKVNFKIRHNIEDGSVQLADHYQQNTPIG | | |
| 2-260 of WT); | DGPVLLPDNHYLSTQSALSKDPNEKRDHMIYFGFVTAAAITHGMDEL | | |
| Linker (SLDG); | YKGSSHHWGYGKHNGPEHWHKDFPIAKGERQSPVDIDTHTAKYDPS | | |
| P2A cleavage site; | LKPLSVSYDQATSLRILNNGHAFNVEFDDSQDKAVLKGGPLDGTYRL | | |
| mCherry (M1L); | IQFHFHWGSLDGQGSEHTVDKKKYAAELHLVHWNTKYGDFGKAVQ | | |
| stop) | QPDGLAVLGIFLKVGSAKPGLQKVVDVLDSIKTKGKSADFTNFDPRG | | |
| | LLPESLDYWTYPGSLTTPPLLECVTWIVLKEPISVSSEQVLKFRKLNFN | | |
| | GEGEPEELMVDNWRPAQPLKNRQIKASFKSLDGATNFSLLKQAGDV | | |
| | EENPGPLSKGEEDNMAIIKEFMRFKVHMEGSVNGHEFEIEGEGEGRPY | | |
| | EGTQTAKLKVTKGGPLPFAWDILSPQFMYGSKAYVKHPADIPDYLKL | | |
| | SFPEGFKWERVMNFEDGGVVTVTQDSSLQDGEFIYKVKLRGTNFPSD | | |
| | GPVMQKKTMGWEASSERMYPEDGALKGEIKQRLKLKDGGHYDAEV | | |
| | KTTYKAKKPVQLPGAYNVNIKLDITSHNEDYTIVEQYERAEGRHSTG | | |
| | GMDELYK* | | |
| OT-001515 | MVSKGAELFTGIVPILIELNGDVNGHKFSVSGEGEGDATYGKLTLKFI | 210674 | 210675 |
| (AcGFP (1-239 of | CTTGKLPVPWPTLVTTLSYGVQCFSRYPDHMKQHDFFKSAMPEGYIQ | | |
| WT); Linker (GS) | ERTIFFEDDGNYKSRAEVKFEGDTLVNRIELTGTDFKEDGNILGNKME | | |
| (BamH1); CA2 (aa | YNYNAHNVYIMTDKAKNGIKVNFKIRHNIEDGSVQLADHYQQNTPIG | | |
| 2-260 of WT, | DGPVLLPDNHYLSTQSALSKDPNEKRDHMIYFGFVTAAAITHGMDEL | | |
| W208S); Linker | YKGSSHHWGYGKHNGPEHWHKDFPIAKGERQSPVDIDTHTAKYDPS | | |
| (SLDG); P2A | LKPLSVSYDQATSLRILNNGHAFNVEFDDSQDKAVLKGGPLDGTYRL | | |
| cleavage site; | IQFHFHWGSLDGQGSEHTVDKKKYAAELHLVHWNTKYGDFGKAVQ | | |
| mCherry (M1L); | QPDGLAVLGIFLKVGSAKPGLQKVVDVLDSIKTKGKSADFTNFDPRG | | |
| stop) | LLPESLDYWTYPGSLTTPPLLECVTSIVLKEPISVSSEQVLKFRKLNFN | | |
| | GEGEPEELMVDNWRPAQPLKNRQIKASFKSLDGATNFSLLKQAGDV | | |
| | EENPGPLSKGEEDNMAIIKEFMRFKVHMEGSVNGHEFEIEGEGEGRPY | | |
| | EGTQTAKLKVTKGGPLPFAWDILSPQFMYGSKAYVKHPADIPDYLKL | | |
| | SFPEGFKWERVMNFEDGGVVTVTQDSSLQDGEFIYKVKLRGTNFPSD | | |
| | GPVMQKKTMGWEASSERMYPEDGALKGEIKQRLKLKDGGHYDAEV | | |
| | KTTYKAKKPVQLPGAYNVNIKLDITSHNEDYTIVEQYERAEGRHSTG | | |
| | GMDELYK* | | |
| OT-001976 | MVSKGAELFTGIVPILIELNGDVNGHKFSVSGEGEGDATYGKLTLKFI | 210676 | 210677 |
| (AcGFP (1-239 of | CTTGKLPVPWPTLVTTLSYGVQCFSRYPDHMKQHDFFKSAMPEGYIQ | | |
| WT); Linker (GS) | ERTIFFEDDGNYKSRAEVKFEGDTLVNRIELTGTDFKEDGNILGNKME | | |
| (BamH1); CA2 (aa | YNYNAHNVYIMTDKAKNGIKVNFKIRHNIEDGSVQLADHYQQNTPIG | | |
| 2-260 of WT, | DGPVLLPDNHYLSTQSALSKDPNEKRDHMIYFGFVTAAAITHGMDEL | | |
| Y51N); Linker | YKGSSHHWGYGKHNGPEHWHKDFPIAKGERQSPVDIDTHTAKYDPS | | |
| (SLDG); P2A | LKPLSVSNDQATSLRILNNGHAFNVEFDDSQDKAVLKGGPLDGTYRL | | |
| cleavage site; | IQFHFHWGSLDGQGSEHTVDKKKYAAELHLVHWNTKYGDFGKAVQ | | |
| mCherry (M1L); | QPDGLAVLGIFLKVGSAKPGLQKVVDVLDSIKTKGKSADFTNFDPRG | | |
| stop) | LLPESLDYWTYPGSLTTPPLLECVTWIVLKEPISVSSEQVLKFRKLNFN | | |
| | GEGEPEELMVDNWRPAQPLKNRQIKASFKSLDGATNFSLLKQAGDV | | |
| | EENPGPLSKGEEDNMAIIKEFMRFKVHMEGSVNGHEFEIEGEGEGRPY | | |
| | EGTQTAKLKVTKGGPLPFAWDILSPQFMYGSKAYVKHPADIPDYLKL | | |
| | SFPEGFKWERVMNFEDGGVVTVTQDSSLQDGEFIYKVKLRGTNFPSD | | |
| | GPVMQKKTMGWEASSERMYPEDGALKGEIKQRLKLKDGGHYDAEV | | |
| | KTTYKAKKPVQLPGAYNVNIKLDITSHNEDYTIVEQYERAEGRHSTG | | |
| | GMDELYK* | | |
| OT-001977 | MVSKGAELFTGIVPILIELNGDVNGHKFSVSGEGEGDATYGKLTLKFI | 210678 | 210679 |
| (AcGFP (1-239 of | CTTGKLPVPWPTLVTTLSYGVQCFSRYPDHMKQHDFFKSAMPEGYIQ | | |
| WT); Linker (GS) | ERTIFFEDDGNYKSRAEVKFEGDTLVNRIELTGTDFKEDGNILGNKME | | |
| (BamH1); CA2 (aa | YNYNAHNVYIMTDKAKNGIKVNFKIRHNIEDGSVQLADHYQQNTPIG | | |
| 2-260 of WT, | DGPVLLPDNHYLSTQSALSKDPNEKRDHMIYFGFVTAAAITHGMDEL | | |
| S56N); Linker | YKGSSHHWGYGKHNGPEHWHKDFPIAKGERQSPVDIDTHTAKYDPS | | |
| (SLDG); P2A | LKPLSVSYDQATNLRILNNGHAFNVEFDDSQDKAVLKGGPLDGTYRL | | |
| cleavage site; | IQFHFHWGSLDGQGSEHTVDKKKYAAELHLVHWNTKYGDFGKAVQ | | |
| mCherry (M1L); | QPDGLAVLGIFLKVGSAKPGLQKVVDVLDSIKTKGKSADFTNFDPRG | | |
| stop) | LLPESLDYWTYPGSLTTPPLLECVTWIVLKEPISVSSEQVLKFRKLNFN | | |
| | GEGEPEELMVDNWRPAQPLKNRQIKASFKSLDGATNFSLLKQAGDV | | |
| | EENPGPLSKGEEDNMAIIKEFMRFKVHMEGSVNGHEFEIEGEGEGRPY | | |
| | EGTQTAKLKVTKGGPLPFAWDILSPQFMYGSKAYVKHPADIPDYLKL | | |
| | SFPEGFKWERVMNFEDGGVVTVTQDSSLQDGEFIYKVKLRGTNFPSD | | |
| | GPVMQKKTMGWEASSERMYPEDGALKGEIKQRLKLKDGGHYDAEV | | |
| | KTTYKAKKPVQLPGAYNVNIKLDITSHNEDYTIVEQYERAEGRHSTG | | |
| | GMDELYK* | | |
| OT-001978 | MVSKGAELFTGIVPILIELNGDVNGHKFSVSGEGEGDATYGKLTLKFI | 210680 | 210681 |
| (AcGFP (1-239 of | CTTGKLPVPWPTLVTTLSYGVQCFSRYPDHMKQHDFFKSAMPEGYIQ | | |
| WT); Linker (GS) | ERTIFFEDDGNYKSRAEVKFEGDTLVNRIELTGTDFKEDGNILGNKME | | |
| (BamH1); CA2 (aa | YNYNAHNVYIMTDKAKNGIKVNFKIRHNIEDGSVQLADHYQQNTPIG | | |
| 2-260 of WT, | DGPVLLPDNHYLSTQSALSKDPNEKRDHMIYFGFVTAAAITHGMDEL | | |
| D72F, V241F, | YKGSSHHWGYGKHNGPEHWHKDFPIAKGERQSPVDIDTHTAKYDPS | | |
| P249L); Linker | LKPLSVSYDQATSLRILNNGHAFNVEFDFSQDKAVLKGGPLDGTYRLI | | |
| (SLDG); P2A | QFHFHWGSLDGQGSEHTVDKKKYAAELHLVHWNTKYGDFGKAVQ | | |
| cleavage site; | QPDGLAVLGIFLKVGSAKPGLQKVVDVLDSIKTKGKSADFTNFDPRG | | |
| mCherry (M1L); | LLPESLDYWTYPGSLTTPPLLECVTWIVLKEPISVSSEQVLKFRKLNFN | | |
| stop) | GEGEPEELMFDNWRPAQLLKNRQIKASFKSLDGATNFSLLKQAGDVE | | |
| | ENPGPLSKGEEDNMAIIKEFMRFKVHMEGSVNGHEFEIEGEGEGRPYE | | |
| | GTQTAKLKVTKGGPLPFAWDILSPQFMYGSKAYVKHPADIPDYLKLS | | |
| | FPEGFKWERVMNFEDGGVVTVTQDSSLQDGEFIYKVKLRGTNFPSDG | | |
| | PVMQKKTMGWEASSERMYPEDGALKGEIKQRLKLKDGGHYDAEVK | | |
| | TTYKAKKPVQLPGAYNVNIKLDITSHNEDYTIVEQYERAEGRHSTGG | | |
| | MDELYK* | | |
| OT-001979 | MVSKGAELFTGIVPILIELNGDVNGHKFSVSGEGEGDATYGKLTLKFI | 210682 | 210683 |
| (AcGFP (1-239 of | CTTGKLPVPWPTLVTTLSYGVQCFSRYPDHMKQHDFFKSAMPEGYIQ | | |
| WT); Linker (GS) | ERTIFFEDDGNYKSRAEVKFEGDTLVNRIELTGTDFKEDGNILGNKME | | |
| (BamH1); CA2 (aa | YNYNAHNVYIMTDKAKNGIKVNFKIRHNIEDGSVQLADHYQQNTPIG | | |
| 2-260 of WT, | DGPVLLPDNHYLSTQSALSKDPNEKRDHMIYFGFVTAAAITHGMDEL | | |
| D71L, T87N, | YKGSSHHWGYGKHNGPEHWHKDFPIAKGERQSPVDIDTHTAKYDPS | | |
| L250R); Linker | LKPLSVSYDQATSLRILNNGHAFNVEFLDSQDKAVLKGGPLDGNYRL | | |
| (SLDG); P2A | IQFHFHWGSLDGQGSEHTVDKKKYAAELHLVHWNTKYGDFGKAVQ | | |
| cleavage site; | QPDGLAVLGIFLKVGSAKPGLQKVVDVLDSIKTKGKSADFTNFDPRG | | |
| mCherry (M1L); | LLPESLDYWTYPGSLTTPPLLECVTWIVLKEPISVSSEQVLKFRKLNFN | | |
| stop) | GEGEPEELMVDNWRPAQPRKNRQIKASFKSLDGATNFSLLKQAGDV | | |
| | EENPGPLSKGEEDNMAIIKEFMRFKVHMEGSVNGHEFEIEGEGEGRPY | | |
| | EGTQTAKLKVTKGGPLPFAWDILSPQFMYGSKAYVKHPADIPDYLKL | | |
| | SFPEGFKWERVMNFEDGGVVTVTQDSSLQDGEFIYKVKLRGTNFPSD | | |
| | GPVMQKKTMGWEASSERMYPEDGALKGEIKQRLKLKDGGHYDAEV | | |
| | KTTYKAKKPVQLPGAYNVNIKLDITSHNEDYTIVEQYERAEGRHSTG | | |
| | GMDELYK* | | |
| OT-001980 | MVSKGAELFTGIVPILIELNGDVNGHKFSVSGEGEGDATYGKLTLKFI | 210684 | 210685 |
| (AcGFP (1-239 of | CTTGKLPVPWPTLVTTLSYGVQCFSRYPDHMKQHDFFKSAMPEGYIQ | | |
| WT); CA2 (aa 2- | ERTIFFEDDGNYKSRAEVKFEGDTLVNRIELTGTDFKEDGNILGNKME | | |
| 260 of WT, | YNYNAHNVYIMTDKAKNGIKVNFKIRHNIEDGSVQLADHYQQNTPIG | | |
| L183S); P2A | DGPVLLPDNHYLSTQSALSKDPNEKRDHMIYFGFVTAAAITHGMDEL | | |
| cleavage site; | YKGSSHHWGYGKHNGPEHWHKDFPIAKGERQSPVDIDTHTAKYDPS | | |
| mCherry (M1L); | LKPLSVSYDQATSLRILNNGHAFNVEFDDSQDKAVLKGGPLDGTYRL | | |
| stop) | IQFHFHWGSLDGQGSEHTVDKKKYAAELHLVHWNTKYGDFGKAVQ | | |
| | QPDGLAVLGIFLKVGSAKPGLQKVVDVLDSIKTKGKSADFTNFDPRG | | |
| | SLPESLDYWTYPGSLTTPPLLECVTWIVLKEPISVSSEQVLKFRKLNFN | | |
| | GEGEPEELMVDNWRPAQPLKNRQIKASFKSLDGATNFSLLKQAGDV | | |
| | EENPGPLSKGEEDNMAIIKEFMRFKVHMEGSVNGHEFEIEGEGEGRPY | | |
| | EGTQTAKLKVTKGGPLPFAWDILSPQFMYGSKAYVKHPADIPDYLKL | | |
| | SFPEGFKWERVMNFEDGGVVTVTQDSSLQDGEFIYKVKLRGTNFPSD | | |
| | GPVMQKKTMGWEASSERMYPEDGALKGEIKQRLKLKDGGHYDAEV | | |
| | KTTYKAKKPVQLPGAYNVNIKLDITSHNEDYTIVEQYERAEGRHSTG | | |
| | GMDELYK* | | |
| OT-001681 | MVSKGAELFTGIVPILIELNGDVNGHKFSVSGEGEGDATYGKLTLKFI | 210686 | 210687 |
| (AcGFP (1-239 of | CTTGKLPVPWPTLVTTLSYGVQCFSRYPDHMKQHDFFKSAMPEGYIQ | | |
| WT); Linker (GSG) | ERTIFFEDDGNYKSRAEVKFEGDTLVNRIELTGTDFKEDGNILGNKME | | |
| (BamH1-Gly); CA2 | YNYNAHNVYIMTDKAKNGIKVNFKIRHNIEDGSVQLADHYQQNTPIG | | |
| (aa 2-260 of WT, | DGPVLLPDNHYLSTQSALSKDPNEKRDHMIYFGFVTAAAITHGMDEL | | |
| E106D, C205S); | YKGSGSHHWGYGKHNGPEHWHKDFPIAKGERQSPVDIDTHTAKYDP | | |
| Linker (SLDG); | SLKPLSVSYDQATSLRILNNGHAFNVEFDDSQDKAVLKGGPLDGTYR | | |
| P2A cleavage site; | LIQFHFHWGSLDGQGSDHTVDKKKYAAELHLVHWNTKYGDFGKAV | | |
| mCherry (M1L); | QQPDGLAVLGIFLKVGSAKPGLQKVVDVLDSIKTKGKSADFTNFDPR | | |
| stop) | GLLPESLDYWTYPGSLTTPPLLESVTWIVLKEPISVSSEQVLKFRKLNF | | |
| | NGEGEPEELMVDNWRPAQPLKNRQIKASFKSLDGATNFSLLKQAGD | | |
| | VEENPGPLSKGEEDNMAIIKEFMRFKVHMEGSVNGHEFEIEGEGEGRP | | |
| | YEGTQTAKLKVTKGGPLPFAWDILSPQFMYGSKAYVKHPADIPDYLK | | |
| | LSFPEGFKWERVMNFEDGGVVTVTQDSSLQDGEFIYKVKLRGTNFPS | | |
| | DGPVMQKKTMGWEASSERMYPEDGALKGEIKQRLKLKDGGHYDAE | | |
| | VKTTYKAKKPVQLPGAYNVNIKLDITSHNEDYTIVEQYERAEGRHST | | |
| | GGMDELYK* | | |
| OT-001682 | MVSKGAELFTGIVPILIELNGDVNGHKFSVSGEGEGDATYGKLTLKFI | 210688 | 210689 |
| (AcGFP (1-239 of | CTTGKLPVPWPTLVTTLSYGVQCFSRYPDHMKQHDFFKSAMPEGYIQ | | |
| WT); Linker (GSG) | ERTIFFEDDGNYKSRAEVKFEGDTLVNRIELTGTDFKEDGNILGNKME | | |
| (BamH1-Gly); CA2 | YNYNAHNVYIMTDKAKNGIKVNFKIRHNIEDGSVQLADHYQQNTPIG | | |
| (aa 2-260 of WT, | DGPVLLPDNHYLSTQSALSKDPNEKRDHMIYFGFVTAAAITHGMDEL | | |
| C205S, W208S); | YKGSGSHHWGYGKHNGPEHWHKDFPIAKGERQSPVDIDTHTAKYDP | | |
| Linker (SLDG); | SLKPLSVSYDQATSLRILNNGHAFNVEFDDSQDKAVLKGGPLDGTYR | | |
| P2A cleavage site; | LIQFHFHWGSLDGQGSEHTVDKKKYAAELHLVHWNTKYGDFGKAV | | |
| mCherry (M1L); | QQPDGLAVLGIFLKVGSAKPGLQKVVDVLDSIKTKGKSADFTNFDPR | | |
| stop) | GLLPESLDYWTYPGSLTTPPLLESVTSIVLKEPISVSSEQVLKFRKLNF | | |
| | NGEGEPEELMVDNWRPAQPLKNRQIKASFKSLDGATNFSLLKQAGD | | |
| | VEENPGPLSKGEEDNMAIIKEFMRFKVHMEGSVNGHEFEIEGEGEGRP | | |
| | YEGTQTAKLKVTKGGPLPFAWDILSPQFMYGSKAYVKHPADIPDYLK | | |
| | LSFPEGFKWERVMNFEDGGVVTVTQDSSLQDGEFIYKVKLRGTNFPS | | |
| | DGPVMQKKTMGWEASSERMYPEDGALKGEIKQRLKLKDGGHYDAE | | |
| | VKTTYKAKKPVQLPGAYNVNIKLDITSHNEDYTIVEQYERAEGRHST | | |
| | GGMDELYK* | | |
| OT-001570 | MVSKGAELFTGIVPILIELNGDVNGHKFSVSGEGEGDATYGKLTLKFI | 210690 | 210691 |
| (AcGFP (1-239 of | CTTGKLPVPWPTLVTTLSYGVQCFSRYPDHMKQHDFFKSAMPEGYIQ | | |
| WT); Linker (GSG) | ERTIFFEDDGNYKSRAEVKFEGDTLVNRIELTGTDFKEDGNILGNKME | | |
| (BamH1-Gly); CA2 | YNYNAHNVYIMTDKAKNGIKVNFKIRHNIEDGSVQLADHYQQNTPIG | | |
| (aa 2-260 of WT, | DGPVLLPDNHYLSTQSALSKDPNEKRDHMIYFGFVTAAAITHGMDEL | | |
| C205S); P2A | YKGSGSHHWGYGKHNGPEHWHKDFPIAKGERQSPVDIDTHTAKYDP | | |
| cleavage site; | SLKPLSVSYDQATSLRILNNGHAFNVEFDDSQDKAVLKGGPLDGTYR | | |
| mCherry (M1L); | LIQFHFHWGSLDGQGSEHTVDKKKYAAELHLVHWNTKYGDFGKAV | | |
| stop) | QQPDGLAVLGIFLKVGSAKPGLQKVVDVLDSIKTKGKSADFTNFDPR | | |
| | GLLPESLDYWTYPGSLTTPPLLESVTWIVLKEPISVSSEQVLKFRKLNF | | |
| | NGEGEPEELMVDNWRPAQPLKNRQIKASFKSLDGATNFSLLKQAGD | | |
| | VEENPGPLSKGEEDNMAIIKEFMRFKVHMEGSVNGHEFEIEGEGEGRP | | |
| | YEGTQTAKLKVTKGGPLPFAWDILSPQFMYGSKAYVKHPADIPDYLK | | |
| | LSFPEGFKWERVMNFEDGGVVTVTQDSSLQDGEFIYKVKLRGTNFPS | | |
| | DGPVMQKKTMGWEASSERMYPEDGALKGEIKQRLKLKDGGHYDAE | | |
| | VKTTYKAKKPVQLPGAYNVNIKLDITSHNEDYTIVEQYERAEGRHST | | |
| | GGMDELYK* | | |
| OT-002006 | MVSKGAELFTGIVPILIELNGDVNGHKFSVSGEGEGDATYGKLTLKFI | 210853 | 210854 |
| (AcGFP (1-239 of | CTTGKLPVPWPTLVTTLSYGVQCFSRYPDHMKQHDFFKSAMPEGYIQ | | |
| WT); Linker | ERTIFFEDDGNYKSRAEVKFEGDTLVNRIELTGTDFKEDGNILGNKME | | |
| (GSG); CA2 (aa 2- | YNYNAHNVYIMTDKAKNGIKVNFKIRHNIEDGSVQLADHYQQNTPIG | | |
| 260 of WT, G63D, | DGPVLLPDNHYLSTQSALSKDPNEKRDHMIYFGFVTAAAITHGMDEL | | |
| E69V, N231I); | YKGSGSHHWGYGKHNGPEHWHKDFPIAKGERQSPVDIDTHTAKYDP | | |
| stop) | SLKPLSVSYDQATSLRILNNDHAFNVVFDDSQDKAVLKGGPLDGTYR | | |
| | LIQFHFHWGSLDGQGSEHTVDKKKYAAELHLVHWNTKYGDFGKAV | | |
| | QQPDGLAVLGIFLKVGSAKPGLQKVVDVLDSIKTKGKSADFTNFDPR | | |
| | GLLPESLDYWTYPGSLTIPPLLECVTWIVLKEPISVSSEQVLKFRKLNF | | |
| | IGEGEPEELMVDNWRPAQPLKNRQIKASFK* | | |
| OT-002001 | MVSKGAELFTGIVPILIELNGDVNGHKFSVSGEGEGDATYGKLTLKFI | 210855 | 210856 |
| (AcGFP (1-239 of | CTTGKLPVPWPTLVTTLSYGVQCFSRYPDHMKQHDFFKSAMPEGYIQ | | |
| WT); Linker | ERTIFFEDDGNYKSRAEVKFEGDTLVNRIELTGTDFKEDGNILGNKME | | |
| (GSG); CA2 (aa 2- | YNYNAHNVYIMTDKAKNGIKVNFKIRHNIEDGSVQLADHYQQNTPIG | | |
| 260 of WT, F20L, | DGPVLLPDNHYLSTQSALSKDPNEKRDHMIYFGFVTAAAITHGMDEL | | |
| K45N, G104R, | YKGSGSHHWGYGKHNGPEHWHKDLPIAKGERQSPVDIDTHTAKYDP | | |
| A116V); stop) | SLNPLSVSYDQATSLRILNNGHAFNVEFDDSQDKAVLKGGPLDGTYR | | |
| | LIQFHFHWGSLDGQRSEHTVDKKKYAVELHLVHWNTKYGDFGKAV | | |
| | QQPDGLAVLGIFLKVGSAKPGLQKVVDVLDSIKTKGKSADFTNFDPR | | |
| | GLLPESLDYWTYPGSLTIPPLLECVTWIVLKEPISVSSEQVLKFRKLNF | | |
| | NGEGEPEELMVDNWRPAQPLKNRQIKASFK* | | |

[0352] Additional examples of CA2 mutants that are fused to GFP are provided in Table 9. Constructs may be cloned into any vector known in the art, such as, but not limited to pLVX.IRES. Puro vectors.

TABLE 9
CA2 GFP constructs

| Con- | Con- | | | | |
|---|---|---|---|---|---|
| struct | struct | | | AA SEQ | NA SEQ |
| name | ID | Description | AA Sequence | ID NO. | ID NO. |
| OT-CA2- | OT- | AcGFP (Met | MVSKGAELFTGIVPILIELNGDVNGHKFSVSGEGEGDATYGKLTLKFICTTGKLPVPWP | 211040; | 211076 |
| 006 | 002823 | start)-Linker | TLVTTLSYGVQCFSRYPDHMKQHDFFKSAMPEGYIQERTIFFEDDGNYKSRAEVKFEG | 211138; | |
| | | (GSG)-CA2 | DTLVNRIELTGTDFKEDGNILGNKMEYNYNAHNVYIMTDKAKNGIKVNFKIRHNIEDG | 211139; | |
| | | (M1del, | SVQLADHYQQNTPIGDGPVLLPDNHYLSTQSALSKDPNEKRDHMIYFGFVTAAAITHG | 211140; | |
| | | E106D)-IRES- | MDELYKGSGSHHWGYGKHNGPEHWHKDFPIAKGERQSPVDIDTHTAKYDPSLKPLSV | 211141 | |
| | | Puro | SYDQATSLRILNNGHAFNVEFDDSQDKAVLKGGPLDGTYRLIQFHFHWGSLDGQGSD | | |
| | | | HTVDKKKYAAELHLVHWNTKYGDFGKAVQQPDGLAVLGIFLKVGSAKPGLQKVVD | | |
| | | | VLDSIKTKGKSADFTNFDPRGLLPESLDYWTYPGSLTTPPLLECVTWIVLKEPISVSSEQ | | |
| | | | VLKFRKLNFNGEGEPEELMVDNWRPAQPLKNRQIKASFK**SR*YDSLEIPPLSLPPP*R | | |
| | | | YWPKPLGIRPVCVCLYVIFHHIAVFWQCEGPETWPCLLDEHS*GSFPSRQRNARSVECR | | |
| | | | EGSSSSGSFLKTNNVCSDPLQAAEPPTWRQVPLRPKATCIRYTCKGGTTPVPRCELDSC | | |
| | | | GKSQMALLKRIQQGAEGCPEGTPLYGI*SGASVHMLYMCLVEVKKTSRPPEPRGRGFP | | |
| | | | LKNTMISLPQPTRRRPSMTEYKPTVRLATRDDVPRAVRTLAAAFADYPATRHTVDPDR | | |
| | | | HIERVTELQELFLTRVGLDIGKVWVADDGAAVAVWTTPESVEAGAVFAEIGPRMAEL | | |
| | | | SGSRLAAQQQMEGLLAPHRPKEPAWFLATVGVSPDHQGKGLGSAVVLPGVEAAERA | | |
| | | | GVPAFLETSAPRNLPFYERLGFTVTADVEVPEGPRTWCMTRKPGA* | | |
| OT-CA2- | OT- | AcGFP- | MVSKGAELFTGIVPILIELNGDVNGHKFSVSGEGEGDATYGKLTLKFICTTGKLPVPWP | 211041 | 211077 |
| 029 | 001994 | Linker (GSG)- | TLVTTLSYGVQCFSRYPDHMKQHDFFKSAMPEGYIQERTIFFEDDGNYKSRAEVKFEG | | |
| | | CA2 (M1del, | DTLVNRIELTGTDFKEDGNILGNKMEYNYNAHNVYIMTDKAKNGIKVNFKIRHNIEDG | | |
| | | I59N, G102R) | SVQLADHYQQNTPIGDGPVLLPDNHYLSTQSALSKDPNEKRDHMIYFGFVTAAAITHG | | |
| | | | MDELYKGSGSHHWGYGKHNGPEHWHKDFPIAKGERQSPVDIDTHTAKYDPSLKPLSV | | |
| | | | SYDQATSLRNLNNGHAFNVEFDDSQDKAVLKGGPLDGTYRLIQFHFHWGSLDRQGSE | | |
| | | | HTVDKKKYAAELHLVHWNTKYGDFGKAVQQPDGLAVLGIFLKVGSAKPGLQKVVD | | |
| | | | VLDSIKTKGKSADFTNFDPRGLLPESLDYWTYPGSLTTPPLLECVTWIVLKEPISVSSEQ | | |
| | | | VLKFRKLNFNGEGEPEELMVDNWRPAQPLKNRQIKASFK* | | |
| OT-CA2- | OT- | AcGFP- | MVSKGAELFTGIVPILIELNGDVNGHKFSVSGEGEGDATYGKLTLKFICTTGKLPVPWP | 211042 | 211078 |
| 031 | 002005 | Linker (GSG)- | TLVTTLSYGVQCFSRYPDHMKQHDFFKSAMPEGYIQERTIFFEDDGNYKSRAEVKFEG | | |
| | | CA2 (M1del, | DTLVNRIELTGTDFKEDGNILGNKMEYNYNAHNVYIMTDKAKNGIKVNFKIRHNIEDG | | |
| | | L197P) | SVQLADHYQQNTPIGDGPVLLPDNHYLSTQSALSKDPNEKRDHMIYFGFVTAAAITHG | | |
| | | | MDELYKGSGSHHWGYGKHNGPEHWHKDFPIAKGERQSPVDIDTHTAKYDPSLKPLSV | | |
| | | | SYDQATSLRILNNGHAFNVEFDDSQDKAVLKGGPLDGTYRLIQFHFHWGSLDGQGSE | | |
| | | | HTVDKKKYAAELHLVHWNTKYGDFGKAVQQPDGLAVLGIFLKVGSAKPGLQKVVD | | |
| | | | VLDSIKTKGKSADFTNFDPRGLLPESLDYWTYPGSPTTPPLLECVTWIVLKEPISVSSEQ | | |
| | | | VLKFRKLNFNGEGEPEELMVDNWRPAQPLKNRQIKASFK* | | |
| OT-CA2- | OT- | AcGFP- | MVSKGAELFTGIVPILIELNGDVNGHKFSVSGEGEGDATYGKLTLKFICTTGKLPVPWP | 211043 | 211079 |
| 032 | 002004 | Linker (GSG)- | TLVTTLSYGVQCFSRYPDHMKQHDFFKSAMPEGYIQERTIFFEDDGNYKSRAEVKFEG | | |
| | | CA2 (M1del, | DTLVNRIELTGTDFKEDGNILGNKMEYNYNAHNVYIMTDKAKNGIKVNFKIRHNIEDG | | |
| | | L156H, S172C, | SVQLADHYQQNTPIGDGPVLLPDNHYLSTQSALSKDPNEKRDHMIYFGFVTAAAITHG | | |
| | | F178Y, | MDELYKGSGSHHWGYGKHNGPEHWHKDFPIAKGERQSPVDIDTHTAKYDPSLKPLSV | | |
| | | E186D) | SYDQATSLRILNNGHAFNVEFDDSQDKAVLKGGPLDGTYRLIQFHFHWGSLDGQGSE | | |
| | | | HTVDKKKYAAELHLVHWNTKYGDFGKAVQQPDGLAVLGIFLKVGSAKPGHQKVVD | | |
| | | | VLDSIKTKGKCADFTNYDPRGLLPDSLDYWTYPGSLTTPPLLECVTWIVLKEPISVSSE | | |
| | | | QVLKFRKLNFNGEGEPEELMVDNWRPAQPLKNRQIKASFK* | | |
| OT-CA2- | OT- | AcGFP- | MVSKGAELFTGIVPILIELNGDVNGHKFSVSGEGEGDATYGKLTLKFICTTGKLPVPWP | 211044 | 211080 |
| 033 | 002003 | Linker (GSG)- | TLVTTLSYGVQCFSRYPDHMKQHDFFKSAMPEGYIQERTIFFEDDGNYKSRAEVKFEG | | |
| | | CA2 (M1del, | DTLVNRIELTGTDFKEDGNILGNKMEYNYNAHNVYIMTDKAKNGIKVNFKIRHNIEDG | | |
| | | L156H) | SVQLADHYQQNTPIGDGPVLLPDNHYLSTQSALSKDPNEKRDHMIYFGFVTAAAITHG | | |
| | | | MDELYKGSGSHHWGYGKHNGPEHWHKDFPIAKGERQSPVDIDTHTAKYDPSLKPLSV | | |
| | | | SYDQATSLRILNNGHAFNVEFDDSQDKAVLKGGPLDGTYRLIQFHFHWGSLDGQGSE | | |
| | | | HTVDKKKYAAELHLVHWNTKYGDFGKAVQQPDGLAVLGIFLKVGSAKPGHQKVVD | | |
| | | | VLDSIKTKGKSADFTNFDPRGLLPESLDYWTYPGSLTTPPLLECVTWIVLKEPISVSSEQ | | |
| | | | VLKFRKLNFNGEGEPEELMVDNWRPAQPLKNRQIKASFK* | | |
| OT-CA2- | OT- | AcGFP- | MVSKGAELFTGIVPILIELNGDVNGHKFSVSGEGEGDATYGKLTLKFICTTGKLPVPWP | 211045 | 211081 |
| 034 | 002002 | Linker (GSG)- | TLVTTLSYGVQCFSRYPDHMKQHDFFKSAMPEGYIQERTIFFEDDGNYKSRAEVKFEG | | |
| | | CA2 (M1del, | DTLVNRIELTGTDFKEDGNILGNKMEYNYNAHNVYIMTDKAKNGIKVNFKIRHNIEDG | | |
| | | R27L, T87I, | SVQLADHYQQNTPIGDGPVLLPDNHYLSTQSALSKDPNEKRDHMIYFGFVTAAAITHG | | |
| | | H122Y, | MDELYKGSGSHHWGYGKHNGPEHWHKDFPIAKGELQSPVDIDTHTAKYDPSLKPLSV | | |
| | | N252D) | SYDQATSLRILNNGHAFNVEFDDSQDKAVLKGGPLDGIYRLIQFHFHWGSLDGQGSEH | | |
| | | | TVDKKKYAAELHLVYWNTKYGDFGKAVQQPDGLAVLGIFLKVGSAKPGLQKVVDV | | |
| | | | LDSIKTKGKSADFTNFDPRGLLPESLDYWTYPGSLTTPPLLECVTWIVLKEPISVSSEQV | | |
| | | | LKFRKLNFNGEGEPEELMVDNWRPAQPLKDRQIKASFK* | | |
| OT-CA2- | OT- | AcGFP- | MVSKGAELFTGIVPILIELNGDVNGHKFSVSGEGEGDATYGKLTLKFICTTGKLPVPWP | 211046 | 211082 |
| 038 | 002187 | Linker (GS)- | TLVTTLSYGVQCFSRYPDHMKQHDFFKSAMPEGYIQERTIFFEDDGNYKSRAEVKFEG | | |
| | | CA2 (I59N)- | DTLVNRIELTGTDFKEDGNILGNKMEYNYNAHNVYIMTDKAKNGIKVNFKIRHNIEDG | | |
| | | Linker (SLDG)- | SVQLADHYQQNTPIGDGPVLLPDNHYLSTQSALSKDPNEKRDHMIYFGFVTAAAITHG | | |
| | | mCherry | MDELYKGSSHHWGYGKHNGPEHWHKDFPIAKGERQSPVDIDTHTAKYDPSLKPLSVS | | |
| | | | YDQATSLRNLNNGHAFNVEFDDSQDKAVLKGGPLDGTYRLIQFHFHWGSLDGQGSEH | | |
| | | | TVDKKKYAAELHLVHWNTKYGDFGKAVQQPDGLAVLGIFLKVGSAKPGLQKVVDV | | |
| | | | LDSIKTKGKSADFTNFDPRGLLPESLDYWTYPGSLTTPPLLECVTWIVLKEPISVSSEQV | | |
| | | | LKFRKLNFNGEGEPEELMVDNWRPAQPLKNRQIKASFKSLDGATNFSLLKQAGDVEE | | |
| | | | NPGPLSKGEEDNMAIIKEFMRFKVHMEGSVNGHEFEIEGEGEGRPYEGTQTAKLKVTK | | |
| | | | GGPLPFAWDILSPQFMYGSKAYVKHPADIPDYLKLSFPEGFKWERVMNFEDGGVVTV | | |
| | | | TQDSSLQDGEFIYKVKLRGTNFPSDGPVMQKKTMGWEASSERMYPEDGALKGEIKQR | | |
| | | | LKLKDGGHYDAEVKTTYKAKKPVQLPGAYNVNIKLDITSHNEDYTIVEQYERAEGRH | | |
| | | | STGGMDELYK* | | |
| OT-CA2- | OT- | AcGFP- | MVSKGAELFTGIVPILIELNGDVNGHKFSVSGEGEGDATYGKLTLKFICTTGKLPVPWP | 211047 | 211083 |
| 039 | 002188 | Linker (GS)- | TLVTTLSYGVQCFSRYPDHMKQHDFFKSAMPEGYIQERTIFFEDDGNYKSRAEVKFEG | | |
| | | CA2 (G63D)- | DTLVNRIELTGTDFKEDGNILGNKMEYNYNAHNVYIMTDKAKNGIKVNFKIRHNIEDG | | |
| | | Linker (SLDG)- | SVQLADHYQQNTPIGDGPVLLPDNHYLSTQSALSKDPNEKRDHMIYFGFVTAAAITHG | | |
| | | mCherry | MDELYKGSSHHWGYGKHNGPEHWHKDFPIAKGERQSPVDIDTHTAKYDPSLKPLSVS | | |
| | | | YDQATSLRILNNDHAFNVEFDDSQDKAVLKGGPLDGTYRLIQFHFHWGSLDGQGSEH | | |
| | | | TVDKKKYAAELHLVHWNTKYGDFGKAVQQPDGLAVLGIFLKVGSAKPGLQKVVDV | | |
| | | | LDSIKTKGKSADFTNFDPRGLLPESLDYWTYPGSLTTPPLLECVTWIVLKEPISVSSEQV | | |
| | | | LKFRKLNFNGEGEPEELMVDNWRPAQPLKNRQIKASFKSLDGATNFSLLKQAGDVEE | | |
| | | | NPGPLSKGEEDNMAIIKEFMRFKVHMEGSVNGHEFEIEGEGEGRPYEGTQTAKLKVTK | | |
| | | | GGPLPFAWDILSPQFMYGSKAYVKHPADIPDYLKLSFPEGFKWERVMNFEDGGVVTV | | |
| | | | TQDSSLQDGEFIYKVKLRGTNFPSDGPVMQKKTMGWEASSERMYPEDGALKGEIKQR | | |
| | | | LKLKDGGHYDAEVKTTYKAKKPVQLPGAYNVNIKLDITSHNEDYTIVEQYERAEGRH | | |
| | | | STGGMDELYK* | | |
| OT-CA2- | OT- | AcGFP- | MVSKGAELFTGIVPILIELNGDVNGHKFSVSGEGEGDATYGKLTLKFICTTGKLPVPWP | 211048 | 211084 |
| 046 | 002490 | Linker (GS)- | TLVTTLSYGVQCFSRYPDHMKQHDFFKSAMPEGYIQERTIFFEDDGNYKSRAEVKFEG | | |
| | | CA2 (M1del, | DTLVNRIELTGTDFKEDGNILGNKMEYNYNAHNVYIMTDKAKNGIKVNFKIRHNIEDG | | |
| | | H122Y)- | SVQLADHYQQNTPIGDGPVLLPDNHYLSTQSALSKDPNEKRDHMIYFGFVTAAAITHG | | |
| | | Linker (SLDG)- | MDELYKGSSHHWGYGKHNGPEHWHKDFPIAKGERQSPVDIDTHTAKYDPSLKPLSVS | | |
| | | P2A-mCherry | YDQATSLRILNNGHAFNVEFDDSQDKAVLKGGPLDGTYRLIQFHFHWGSLDGQGSEH | | |
| | | | TVDKKKYAAELHLVYWNTKYGDFGKAVQQPDGLAVLGIFLKVGSAKPGLQKVVDV | | |
| | | | LDSIKTKGKSADFTNFDPRGLLPESLDYWTYPGSLTTPPLLECVTWIVLKEPISVSSEQV | | |
| | | | LKFRKLNFNGEGEPEELMVDNWRPAQPLKNRQIKASFKSLDGATNFSLLKQAGDVEE | | |
| | | | NPGPLSKGEEDNMAIIKEFMRFKVHMEGSVNGHEFEIEGEGEGRPYEGTQTAKLKVTK | | |
| | | | GGPLPFAWDILSPQFMYGSKAYVKHPADIPDYLKLSFPEGFKWERVMNFEDGGVVTV | | |
| | | | TQDSSLQDGEFIYKVKLRGTNFPSDGPVMQKKTMGWEASSERMYPEDGALKGEIKQR | | |
| | | | LKLKDGGHYDAEVKTTYKAKKPVQLPGAYNVNIKLDITSHNEDYTIVEQYERAEGRH | | |
| | | | STGGMDELYK* | | |
| OT-CA2- | OT- | AcGFP- | MVSKGAELFTGIVPILIELNGDVNGHKFSVSGEGEGDATYGKLTLKFICTTGKLPVPWP | 211049 | 211085 |
| 058 | 002828 | Linker (GS)- | TLVTTLSYGVQCFSRYPDHMKQHDFFKSAMPEGYIQERTIFFEDDGNYKSRAEVKFEG | | |
| | | CA2 (M1del, | DTLVNRIELTGTDFKEDGNILGNKMEYNYNAHNVYIMTDKAKNGIKVNFKIRHNIEDG | | |
| | | G63D, M240L)- | SVQLADHYQQNTPIGDGPVLLPDNHYLSTQSALSKDPNEKRDHMIYFGFVTAAAITHG | | |
| | | Linker | MDELYKGSSHHWGYGKHNGPEHWHKDFPIAKGERQSPVDIDTHTAKYDPSLKPLSVS | | |
| | | (SLDG)-P2A- | YDQATSLRILNNDHAFNVEFDDSQDKAVLKGGPLDGTYRLIQFHFHWGSLDGQGSEH | | |
| | | mCherry | TVDKKKYAAELHLVHWNTKYGDFGKAVQQPDGLAVLGIFLKVGSAKPGLQKVVDV | | |
| | | | LDSIKTKGKSADFTNFDPRGLLPESLDYWTYPGSLTTPPLLECVTWIVLKEPISVSSEQV | | |
| | | | LKFRKLNFNGEGEPEELLVDNWRPAQPLKNRQIKASFKSLDGATNFSLLKQAGDVEEN | | |
| | | | PGPLSKGEEDNMAIIKEFMRFKVHMEGSVNGHEFEIEGEGEGRPYEGTQTAKLKVTKG | | |
| | | | GPLPFAWDILSPQFMYGSKAYVKHPADIPDYLKLSFPEGFKWERVMNFEDGGVVTVT | | |
| | | | QDSSLQDGEFIYKVKLRGTNFPSDGPVMQKKTMGWEASSERMYPEDGALKGEIKQRL | | |
| | | | KLKDGGHYDAEVKTTYKAKKPVQLPGAYNVNIKLDITSHNEDYTIVEQYERAEGRHS | | |
| | | | TGGMDELYK* | | |
| OT-CA2- | OT- | AcGFP- | MVSKGAELFTGIVPILIELNGDVNGHKFSVSGEGEGDATYGKLTLKFICTTGKLPVPWP | 211050 | 211086 |
| 059 | 002829 | Linker (GS)- | TLVTTLSYGVQCFSRYPDHMKQHDFFKSAMPEGYIQERTIFFEDDGNYKSRAEVKFEG | | |
| | | CA2 (M1del, | DTLVNRIELTGTDFKEDGNILGNKMEYNYNAHNVYIMTDKAKNGIKVNFKIRHNIEDG | | |
| | | A77I, P249F)- | SVQLADHYQQNTPIGDGPVLLPDNHYLSTQSALSKDPNEKRDHMIYFGFVTAAAITHG | | |
| | | Linker (SLDG)- | MDELYKGSSHHWGYGKHNGPEHWHKDFPIAKGERQSPVDIDTHTAKYDPSLKPLSVS | | |
| | | P2A-mCherry | YDQATSLRILNNGHAFNVEFDDSQDKIVLKGGPLDGTYRLIQFHFHWGSLDGQGSEHT | | |
| | | | VDKKKYAAELHLVHWNTKYGDFGKAVQQPDGLAVLGIFLKVGSAKPGLQKVVDVL | | |
| | | | DSIKTKGKSADFTNFDPRGLLPESLDYWTYPGSLTTPPLLECVTWIVLKEPISVSSEQVL | | |
| | | | KFRKLNFNGEGEPEELMVDNWRPAQFLKNRQIKASFKSLDGATNFSLLKQAGDVEEN | | |
| | | | PGPLSKGEEDNMAIIKEFMRFKVHMEGSVNGHEFEIEGEGEGRPYEGTQTAKLKVTKG | | |
| | | | GPLPFAWDILSPQFMYGSKAYVKHPADIPDYLKLSFPEGFKWERVMNFEDGGVVTVT | | |
| | | | QDSSLQDGEFIYKVKLRGTNFPSDGPVMQKKTMGWEASSERMYPEDGALKGEIKQRL | | |
| | | | KLKDGGHYDAEVKTTYKAKKPVQLPGAYNVNIKLDITSHNEDYTIVEQYERAEGRHS | | |
| | | | TGGMDELYK* | | |
| OT-CA2- | OT- | AcGFP-CA2 | MVSKGAELFTGIVPILIELNGDVNGHKFSVSGEGEGDATYGKLTLKFICTTGKLPVPWP | 211051 | 211087 |
| 060 | 002830 | (M1del, D71K, | TLVTTLSYGVQCFSRYPDHMKQHDFFKSAMPEGYIQERTIFFEDDGNYKSRAEVKFEG | | |
| | | T192F)- | DTLVNRIELTGTDFKEDGNILGNKMEYNYNAHNVYIMTDKAKNGIKVNFKIRHNIEDG | | |
| | | Linker (SLDG)- | SVQLADHYQQNTPIGDGPVLLPDNHYLSTQSALSKDPNEKRDHMIYFGFVTAAAITHG | | |
| | | P2A-mCherry | MDELYKGSSHHWGYGKHNGPEHWHKDFPIAKGERQSPVDIDTHTAKYDPSLKPLSVS | | |
| | | | YDQATSLRILNNGHAFNVEFKDSQDKAVLKGGPLDGTYRLIQFHFHWGSLDGQGSEH | | |
| | | | TVDKKKYAAELHLVHWNTKYGDFGKAVQQPDGLAVLGIFLKVGSAKPGLQKVVDV | | |
| | | | LDSIKTKGKSADFTNFDPRGLLPESLDYWFYPGSLTTPPLLECVTWIVLKEPISVSSEQV | | |
| | | | LKFRKLNFNGEGEPEELMVDNWRPAQPLKNRQIKASFKSLDGATNFSLLKQAGDVEE | | |
| | | | NPGPLSKGEEDNMAIIKEFMRFKVHMEGSVNGHEFEIEGEGEGRPYEGTQTAKLKVTK | | |
| | | | GGPLPFAWDILSPQFMYGSKAYVKHPADIPDYLKLSFPEGFKWERVMNFEDGGVVTV | | |
| | | | TQDSSLQDGEFIYKVKLRGTNFPSDGPVMQKKTMGWEASSERMYPEDGALKGEIKQR | | |
| | | | LKLKDGGHYDAEVKTTYKAKKPVQLPGAYNVNIKLDITSHNEDYTIVEQYERAEGRH | | |
| | | | STGGMDELYK* | | |
| OT-CA2- | OT- | HA Tag- | MYPYDVPDYAGSSHHWGYGKHNGPEHWHKDFPIAKGERQSPVDIDTHTAKYDPSLK | 211052 | 211088 |
| 070 | 002347 | Linker (GS)- | PLSVSYDQATSLRILNNGHAFNVEFDDSQDKAVLKGGPLDGTYRLIQFHFHWGSLDGQ | | |
| | | CA2 (M1del, | GSEHTVDKKKYAAELHLVHWNTKYGDFGKAVQQPDGLAVLGIFLKVGSAKPGHQKV | | |
| | | L156H)- | VDVLDSIKTKGKSADFTNFDPRGLLPESLDYWTYPGSLTTPPLLECVTWIVLKEPISVSS | | |
| | | Linker | EQVLKFRKLNFNGEGEPEELMVDNWRPAQPLKNRQIKASFKGSGSGDYKDDDDKVS | | |
| | | (GSGSG)- | KGEELFTGWPILVELDGDVNGHKFSVSGEGEGDATYGKLTLKFICTTGKLPVPWPTL | | |
| | | Flag tag- | VTTLTYGVQCFSRYPDHMKQHDFFKSAMPEGYVQERTIFFKDDGNYKTRAEVKFEGD | | |
| | | EGFP-Linker | TLVNRIELKGIDFKEDGNILGHKLEYNYNSHNVYIMADKQKNGIKVNFKIRHNIEDGSV | | |
| | | (GS)-Linker | QLADHYQQNTPIGDGPVLLPDNHYLSTQSKLSKDPNEKRDHMVLLEFVTAAGITLGM | | |
| | | (GSLDG)- | DELYKGSGSLDGATNFSLLKQAGDVEENPGPLSKGEEDNMAIIKEFMRFKVHMEGSV | | |
| | | P2A-mCherry | NGHEFEIEGEGEGRPYEGTQTAKLKVTKGGPLPFAWDILSPQFMYGSKAYVKHPADIP | | |
| | | | DYLKLSFPEGFKWERVMNFEDGGVVTVTQDSSLQDGEFIYKVKLRGTNFPSDGPVMQ | | |
| | | | KKTMGWEASSERMYPEDGALKGEIKQRLKLKDGGHYDAEVKTTYKAKKPVQLPGA | | |
| | | | YNVNIKLDITSHNEDYTIVEQYERAEGRHSTGGMDELYK* | | |
| OT-CA2- | OT- | AcGFP- | MVSKGAELFTGIVPILIELNGDVNGHKFSVSGEGEGDATYGKLTLKFICTTGKLPVPWP | 211053 | 211089 |
| 073 | 002832 | Linker (GS)- | TLVTTLSYGVQCFSRYPDHMKQHDFFKSAMPEGYIQERTIFFEDDGNYKSRAEVKFEG | | |
| | | CA2 (M1del, | DTLVNRIELTGTDFKEDGNILGNKMEYNYNAHNVYIMTDKAKNGIKVNFKIRHNIEDG | | |
| | | R27L, H122Y)- | SVQLADHYQQNTPIGDGPVLLPDNHYLSTQSALSKDPNEKRDHMIYFGFVTAAAITHG | | |
| | | Linker | MDELYKGSSHHWGYGKHNGPEHWHKDFPIAKGELQSPVDIDTHTAKYDPSLKPLSVS | | |
| | | (SLDG)-P2A- | YDQATSLRILNNGHAFNVEFDDSQDKAVLKGGPLDGTYRLIQFHFHWGSLDGQGSEH | | |
| | | mCherry | TVDKKKYAAELHLVYWNTKYGDFGKAVQQPDGLAVLGIFLKVGSAKPGLQKVVDV | | |
| | | | LDSIKTKGKSADFTNFDPRGLLPESLDYWTYPGSLTTPPLLECVTWIVLKEPISVSSEQV | | |
| | | | LKFRKLNFNGEGEPEELMVDNWRPAQPLKNRQIKASFKSLDGATNFSLLKQAGDVEE | | |
| | | | NPGPLSKGEEDNMAIIKEFMRFKVHMEGSVNGHEFEIEGEGEGRPYEGTQTAKLKVTK | | |
| | | | GGPLPFAWDILSPQFMYGSKAYVKHPADIPDYLKLSFPEGFKWERVMNFEDGGVVTV | | |
| | | | TQDSSLQDGEFIYKVKLRGTNFPSDGPVMQKKTMGWEASSERMYPEDGALKGEIKQR | | |
| | | | LKLKDGGHYDAEVKTTYKAKKPVQLPGAYNVNIKLDITSHNEDYTIVEQYERAEGRH | | |
| | | | STGGMDELYK* | | |
| OT-CA2- | OT- | AcGFP- | MVSKGAELFTGIVPILIELNGDVNGHKFSVSGEGEGDATYGKLTLKFICTTGKLPVPWP | 211054 | 211090 |
| 075 | 002834 | Linker (GS)- | TLVTTLSYGVQCFSRYPDHMKQHDFFKSAMPEGYIQERTIFFEDDGNYKSRAEVKFEG | | |
| | | CA2 (M1del, | DTLVNRIELTGTDFKEDGNILGNKMEYNYNAHNVYIMTDKAKNGIKVNFKIRHNIEDG | | |
| | | T87I, H122Y)- | SVQLADHYQQNTPIGDGPVLLPDNHYLSTQSALSKDPNEKRDHMIYFGFVTAAAITHG | | |
| | | Linker (SLDG)- | MDELYKGSSHHWGYGKHNGPEHWHKDFPIAKGERQSPVDIDTHTAKYDPSLKPLSVS | | |
| | | P2A-mCherry | YDQATSLRILNNGHAFNVEFDDSQDKAVLKGGPLDGIYRLIQFHFHWGSLDGQGSEHT | | |
| | | | VDKKKYAAELHLVYWNTKYGDFGKAVQQPDGLAVLGIFLKVGSAKPGLQKVVDVL | | |
| | | | DSIKTKGKSADFTNFDPRGLLPESLDYWTYPGSLTTPPLLECVTWIVLKEPISVSSEQVL | | |
| | | | KFRKLNFNGEGEPEELMVDNWRPAQPLKNRQIKASFKSLDGATNFSLLKQAGDVEEN | | |
| | | | PGPLSKGEEDNMAIIKEFMRFKVHMEGSVNGHEFEIEGEGEGRPYEGTQTAKLKVTKG | | |
| | | | GPLPFAWDILSPQFMYGSKAYVKHPADIPDYLKLSFPEGFKWERVMNFEDGGVVTVT | | |
| | | | QDSSLQDGEFIYKVKLRGTNFPSDGPVMQKKTMGWEASSERMYPEDGALKGEIKQRL | | |
| | | | KLKDGGHYDAEVKTTYKAKKPVQLPGAYNVNIKLDITSHNEDYTIVEQYERAEGRHS | | |
| | | | TGGMDELYK* | | |
| OT-CA2- | OT- | AcGFP- | MVSKGAELFTGIVPILIELNGDVNGHKFSVSGEGEGDATYGKLTLKFICTTGKLPVPWP | 211055 | 211091 |
| 077 | 002836 | Linker (GS)- | TLVTTLSYGVQCFSRYPDHMKQHDFFKSAMPEGYIQERTIFFEDDGNYKSRAEVKFEG | | |
| | | CA2 (M1del, | DTLVNRIELTGTDFKEDGNILGNKMEYNYNAHNVYIMTDKAKNGIKVNFKIRHNIEDG | | |
| | | H122Y, | SVQLADHYQQNTPIGDGPVLLPDNHYLSTQSALSKDPNEKRDHMIYFGFVTAAAITHG | | |
| | | N252D)- | MDELYKGSSHHWGYGKHNGPEHWHKDFPIAKGERQSPVDIDTHTAKYDPSLKPLSVS | | |
| | | Linker (SLDG)- | YDQATSLRILNNGHAFNVEFDDSQDKAVLKGGPLDGTYRLIQFHFHWGSLDGQGSEH | | |
| | | P2A-mCherry | TVDKKKYAAELHLVYWNTKYGDFGKAVQQPDGLAVLGIFLKVGSAKPGLQKVVDV | | |
| | | | LDSIKTKGKSADFTNFDPRGLLPESLDYWTYPGSLTTPPLLECVTWIVLKEPISVSSEQV | | |
| | | | LKFRKLNFNGEGEPEELMVDNWRPAQPLKDRQIKASFKSLDGATNFSLLKQAGDVEE | | |
| | | | NPGPLSKGEEDNMAIIKEFMRFKVHMEGSVNGHEFEIEGEGEGRPYEGTQTAKLKVTK | | |
| | | | GGPLPFAWDILSPQFMYGSKAYVKHPADIPDYLKLSFPEGFKWERVMNFEDGGVVTV | | |
| | | | TQDSSLQDGEFIYKVKLRGTNFPSDGPVMQKKTMGWEASSERMYPEDGALKGEIKQR | | |
| | | | LKLKDGGHYDAEVKTTYKAKKPVQLPGAYNVNIKLDITSHNEDYTIVEQYERAEGRH | | |
| | | | STGGMDELYK* | | |
| OT-CA2- | OT- | AcGFP- | MVSKGAELFTGIVPILIELNGDVNGHKFSVSGEGEGDATYGKLTLKFICTTGKLPVPWP | 211056 | 211092 |
| 078 | 002939 | Linker (GS)- | TLVTTLSYGVQCFSRYPDHMKQHDFFKSAMPEGYIQERTIFFEDDGNYKSRAEVKFEG | | |
| | | CA2 (M1del, | DTLVNRIELTGTDFKEDGNILGNKMEYNYNAHNVYIMTDKAKNGIKVNFKIRHNIEDG | | |
| | | D72F, V241F)- | SVQLADHYQQNTPIGDGPVLLPDNHYLSTQSALSKDPNEKRDHMIYFGFVTAAAITHG | | |
| | | Linker | MDELYKGSSHHWGYGKHNGPEHWHKDFPIAKGERQSPVDIDTHTAKYDPSLKPLSVS | | |
| | | (SLDG)-P2A- | YDQATSLRILNNGHAFNVEFDFSQDKAVLKGGPLDGTYRLIQFHFHWGSLDGQGSEH | | |
| | | mCherry | TVDKKKYAAELHLVHWNTKYGDFGKAVQQPDGLAVLGIFLKVGSAKPGLQKVVDV | | |
| | | | LDSIKTKGKSADFTNFDPRGLLPESLDYWTYPGSLTTPPLLECVTWIVLKEPISVSSEQV | | |
| | | | LKFRKLNFNGEGEPEELMFDNWRPAQPLKNRQIKASFKSLDGATNFSLLKQAGDVEE | | |
| | | | NPGPLSKGEEDNMAIIKEFMRFKVHMEGSVNGHEFEIEGEGEGRPYEGTQTAKLKVTK | | |
| | | | GGPLPFAWDILSPQFMYGSKAYVKHPADIPDYLKLSFPEGFKWERVMNFEDGGVVTV | | |
| | | | TQDSSLQDGEFIYKVKLRGTNFPSDGPVMQKKTMGWEASSERMYPEDGALKGEIKQR | | |
| | | | LKLKDGGHYDAEVKTTYKAKKPVQLPGAYNVNIKLDITSHNEDYTIVEQYERAEGRH | | |
| | | | STGGMDELYK* | | |
| OT-CA2- | OT- | AcGFP- | MVSKGAELFTGIVPILIELNGDVNGHKFSVSGEGEGDATYGKLTLKFICTTGKLPVPWP | 211057 | 211093 |
| 079 | 002837 | Linker (GS)- | TLVTTLSYGVQCFSRYPDHMKQHDFFKSAMPEGYIQERTIFFEDDGNYKSRAEVKFEG | | |
| | | CA2 (M1del, | DTLVNRIELTGTDFKEDGNILGNKMEYNYNAHNVYIMTDKAKNGIKVNFKIRHNIEDG | | |
| | | V241F, P249L)- | SVQLADHYQQNTPIGDGPVLLPDNHYLSTQSALSKDPNEKRDHMIYFGFVTAAAITHG | | |
| | | Linker | MDELYKGSSHHWGYGKHNGPEHWHKDFPIAKGERQSPVDIDTHTAKYDPSLKPLSVS | | |
| | | (SLDG)-P2A- | YDQATSLRILNNGHAFNVEFDDSQDKAVLKGGPLDGTYRLIQFHFHWGSLDGQGSEH | | |
| | | mCherry | TVDKKKYAAELHLVHWNTKYGDFGKAVQQPDGLAVLGIFLKVGSAKPGLQKVVDV | | |
| | | | LDSIKTKGKSADFTNFDPRGLLPESLDYWTYPGSLTTPPLLECVTWIVLKEPISVSSEQV | | |
| | | | LKFRKLNFNGEGEPEELMFDNWRPAQLLKNRQIKASFKSLDGATNFSLLKQAGDVEE | | |
| | | | NPGPLSKGEEDNMAIIKEFMRFKVHMEGSVNGHEFEIEGEGEGRPYEGTQTAKLKVTK | | |
| | | | GGPLPFAWDILSPQFMYGSKAYVKHPADIPDYLKLSFPEGFKWERVMNFEDGGVVTV | | |
| | | | TQDSSLQDGEFIYKVKLRGTNFPSDGPVMQKKTMGWEASSERMYPEDGALKGEIKQR | | |
| | | | LKLKDGGHYDAEVKTTYKAKKPVQLPGAYNVNIKLDITSHNEDYTIVEQYERAEGRH | | |
| | | | STGGMDELYK* | | |
| OT-CA2- | OT- | AcGFP- | MVSKGAELFTGIVPILIELNGDVNGHKFSVSGEGEGDATYGKLTLKFICTTGKLPVPWP | 211058 | 211094 |
| 080 | 002838 | Linker (GS)- | TLVTTLSYGVQCFSRYPDHMKQHDFFKSAMPEGYIQERTIFFEDDGNYKSRAEVKFEG | | |
| | | CA2 (M1del, | DTLVNRIELTGTDFKEDGNILGNKMEYNYNAHNVYIMTDKAKNGIKVNFKIRHNIEDG | | |
| | | D72F, P249L)- | SVQLADHYQQNTPIGDGPVLLPDNHYLSTQSALSKDPNEKRDHMIYFGFVTAAAITHG | | |
| | | Linker (SLDG)- | MDELYKGSSHHWGYGKHNGPEHWHKDFPIAKGERQSPVDIDTHTAKYDPSLKPLSVS | | |
| | | P2A-mCherry | YDQATSLRILNNGHAFNVEFDFSQDKAVLKGGPLDGTYRLIQFHFHWGSLDGQGSEH | | |
| | | | TVDKKKYAAELHLVHWNTKYGDFGKAVQQPDGLAVLGIFLKVGSAKPGLQKVVDV | | |
| | | | LDSIKTKGKSADFTNFDPRGLLPESLDYWTYPGSLTTPPLLECVTWIVLKEPISVSSEQV | | |
| | | | LKFRKLNFNGEGEPEELMVDNWRPAQLLKNRQIKASFKSLDGATNFSLLKQAGDVEE | | |
| | | | NPGPLSKGEEDNMAIIKEFMRFKVHMEGSVNGHEFEIEGEGEGRPYEGTQTAKLKVTK | | |
| | | | GGPLPFAWDILSPQFMYGSKAYVKHPADIPDYLKLSFPEGFKWERVMNFEDGGVVTV | | |
| | | | TQDSSLQDGEFIYKVKLRGTNFPSDGPVMQKKTMGWEASSERMYPEDGALKGEIKQR | | |
| | | | LKLKDGGHYDAEVKTTYKAKKPVQLPGAYNVNIKLDITSHNEDYTIVEQYERAEGRH | | |
| | | | STGGMDELYK* | | |
| OT-CA2- | OT- | AcGFP- | MVSKGAELFTGIVPILIELNGDVNGHKFSVSGEGEGDATYGKLTLKFICTTGKLPVPWP | 211059 | 211095 |
| 081 | 002839 | Linker (GS)- | TLVTTLSYGVQCFSRYPDHMKQHDFFKSAMPEGYIQERTIFFEDDGNYKSRAEVKFEG | | |
| | | CA2 (M1del, | DTLVNRIELTGTDFKEDGNILGNKMEYNYNAHNVYIMTDKAKNGIKVNFKIRHNIEDG | | |
| | | D71L, T87N)- | SVQLADHYQQNTPIGDGPVLLPDNHYLSTQSALSKDPNEKRDHMIYFGFVTAAAITHG | | |
| | | Linker (SLDG)- | MDELYKGSSHHWGYGKHNGPEHWHKDFPIAKGERQSPVDIDTHTAKYDPSLKPLSVS | | |
| | | P2A-mCherry | YDQATSLRILNNGHAFNVEFLDSQDKAVLKGGPLDGNYRLIQFHFHWGSLDGQGSEH | | |
| | | | TVDKKKYAAELHLVHWNTKYGDFGKAVQQPDGLAVLGIFLKVGSAKPGLQKVVDV | | |
| | | | LDSIKTKGKSADFTNFDPRGLLPESLDYWTYPGSLTTPPLLECVTWIVLKEPISVSSEQV | | |
| | | | LKFRKLNFNGEGEPEELMVDNWRPAQPLKNRQIKASFKSLDGATNFSLLKQAGDVEE | | |
| | | | NPGPLSKGEEDNMAIIKEFMRFKVHMEGSVNGHEFEIEGEGEGRPYEGTQTAKLKVTK | | |
| | | | GGPLPFAWDILSPQFMYGSKAYVKHPADIPDYLKLSFPEGFKWERVMNFEDGGVVTV | | |
| | | | TQDSSLQDGEFIYKVKLRGTNFPSDGPVMQKKTMGWEASSERMYPEDGALKGEIKQR | | |
| | | | LKLKDGGHYDAEVKTTYKAKKPVQLPGAYNVNIKLDITSHNEDYTIVEQYERAEGRH | | |
| | | | STGGMDELYK* | | |
| OT-CA2- | OT- | AcGFP- | MVSKGAELFTGIVPILIELNGDVNGHKFSVSGEGEGDATYGKLTLKFICTTGKLPVPWP | 211060 | 211096 |
| 082 | 002840 | Linker (GS)- | TLVTTLSYGVQCFSRYPDHMKQHDFFKSAMPEGYIQERTIFFEDDGNYKSRAEVKFEG | | |
| | | CA2 (M1del, | DTLVNRIELTGTDFKEDGNILGNKMEYNYNAHNVYIMTDKAKNGIKVNFKIRHNIEDG | | |
| | | D71L, L250R)- | SVQLADHYQQNTPIGDGPVLLPDNHYLSTQSALSKDPNEKRDHMIYFGFVTAAAITHG | | |
| | | Linker | MDELYKGSSHHWGYGKHNGPEHWHKDFPIAKGERQSPVDIDTHTAKYDPSLKPLSVS | | |
| | | (SLDG)-P2A- | YDQATSLRILNNGHAFNVEFLDSQDKAVLKGGPLDGTYRLIQFHFHWGSLDGQGSEH | | |
| | | mCherry | TVDKKKYAAELHLVHWNTKYGDFGKAVQQPDGLAVLGIFLKVGSAKPGLQKVVDV | | |
| | | | LDSIKTKGKSADFTNFDPRGLLPESLDYWTYPGSLTTPPLLECVTWIVLKEPISVSSEQV | | |
| | | | LKFRKLNFNGEGEPEELMVDNWRPAQPRKNRQIKASFKSLDGATNFSLLKQAGDVEE | | |
| | | | NPGPLSKGEEDNMAIIKEFMRFKVHMEGSVNGHEFEIEGEGEGRPYEGTQTAKLKVTK | | |
| | | | GGPLPFAWDILSPQFMYGSKAYVKHPADIPDYLKLSFPEGFKWERVMNFEDGGVVTV | | |
| | | | TQDSSLQDGEFIYKVKLRGTNFPSDGPVMQKKTMGWEASSERMYPEDGALKGEIKQR | | |
| | | | LKLKDGGHYDAEVKTTYKAKKPVQLPGAYNVNIKLDITSHNEDYTIVEQYERAEGRH | | |
| | | | STGGMDELYK* | | |
| OT-CA2- | OT- | AcGFP- | MVSKGAELFTGIVPILIELNGDVNGHKFSVSGEGEGDATYGKLTLKFICTTGKLPVPWP | 211061 | 211097 |
| 085 | 002349 | Linker (GS)- | TLVTTLSYGVQCFSRYPDHMKQHDFFKSAMPEGYIQERTIFFEDDGNYKSRAEVKFEG | | |
| | | CA2 (Y51T)- | DTLVNRIELTGTDFKEDGNILGNKMEYNYNAHNVYIMTDKAKNGIKVNFKIRHNIEDG | | |
| | | Linker (SLDG)- | SVQLADHYQQNTPIGDGPVLLPDNHYLSTQSALSKDPNEKRDHMIYFGFVTAAAITHG | | |
| | | P2A-mCherry | MDELYKGSSHHWGYGKHNGPEHWHKDFPIAKGERQSPVDIDTHTAKYDPSLKPLSVS | | |
| | | | TDQATSLRILNNGHAFNVEFDDSQDKAVLKGGPLDGTYRLIQFHFHWGSLDGQGSEH | | |
| | | | TVDKKKYAAELHLVHWNTKYGDFGKAVQQPDGLAVLGIFLKVGSAKPGLQKVVDV | | |
| | | | LDSIKTKGKSADFTNFDPRGLLPESLDYWTYPGSLTTPPLLECVTWIVLKEPISVSSEQV | | |
| | | | LKFRKLNFNGEGEPEELMVDNWRPAQPLKNRQIKASFKSLDGATNFSLLKQAGDVEE | | |
| | | | NPGPLSKGEEDNMAIIKEFMRFKVHMEGSVNGHEFEIEGEGEGRPYEGTQTAKLKVTK | | |
| | | | GGPLPFAWDILSPQFMYGSKAYVKHPADIPDYLKLSFPEGFKWERVMNFEDGGVVTV | | |
| | | | TQDSSLQDGEFIYKVKLRGTNFPSDGPVMQKKTMGWEASSERMYPEDGALKGEIKQR | | |
| | | | LKLKDGGHYDAEVKTTYKAKKPVQLPGAYNVNIKLDITSHNEDYTIVEQYERAEGRH | | |
| | | | STGGMDELYK* | | |
| OT-CA2- | OT- | AcGFP- | MVSKGAELFTGIVPILIELNGDVNGHKFSVSGEGEGDATYGKLTLKFICTTGKLPVPWP | 211062 | 211098 |
| 086 | 002350 | Linker (GS)- | TLVTTLSYGVQCFSRYPDHMKQHDFFKSAMPEGYIQERTIFFEDDGNYKSRAEVKFEG | | |
| | | CA2 (S73N, | DTLVNRIELTGTDFKEDGNILGNKMEYNYNAHNVYIMTDKAKNGIKVNFKIRHNIEDG | | |
| | | R89F)-Linker | SVQLADHYQQNTPIGDGPVLLPDNHYLSTQSALSKDPNEKRDHMIYFGFVTAAAITHG | | |
| | | (SLDG)-P2A- | MDELYKGSSHHWGYGKHNGPEHWHKDFPIAKGERQSPVDIDTHTAKYDPSLKPLSVS | | |
| | | mCherry | YDQATSLRILNNGHAFNVEFDDNQDKAVLKGGPLDGTYFLIQFHFHWGSLDGQGSEH | | |
| | | | TVDKKKYAAELHLVHWNTKYGDFGKAVQQPDGLAVLGIFLKVGSAKPGLQKVVDV | | |
| | | | LDSIKTKGKSADFTNFDPRGLLPESLDYWTYPGSLTTPPLLECVTWIVLKEPISVSSEQV | | |
| | | | LKFRKLNFNGEGEPEELMVDNWRPAQPLKNRQIKASFKSLDGATNFSLLKQAGDVEE | | |
| | | | NPGPLSKGEEDNMAIIKEFMRFKVHMEGSVNGHEFEIEGEGEGRPYEGTQTAKLKVTK | | |
| | | | GGPLPFAWDILSPQFMYGSKAYVKHPADIPDYLKLSFPEGFKWERVMNFEDGGVVTV | | |
| | | | TQDSSLQDGEFIYKVKLRGTNFPSDGPVMQKKTMGWEASSERMYPEDGALKGEIKQR | | |
| | | | LKLKDGGHYDAEVKTTYKAKKPVQLPGAYNVNIKLDITSHNEDYTIVEQYERAEGRH | | |
| | | | STGGMDELYK* | | |
| OT-CA2- | OT- | AcGFP- | MVSKGAELFTGIVPILIELNGDVNGHKFSVSGEGEGDATYGKLTLKFICTTGKLPVPWP | 211063 | 211099 |
| 087 | 002543 | Linker (GS)- | TLVTTLSYGVQCFSRYPDHMKQHDFFKSAMPEGYIQERTIFFEDDGNYKSRAEVKFEG | | |
| | | CA2 (D72F, | DTLVNRIELTGTDFKEDGNILGNKMEYNYNAHNVYIMTDKAKNGIKVNFKIRHNIEDG | | |
| | | P249F)- | SVQLADHYQQNTPIGDGPVLLPDNHYLSTQSALSKDPNEKRDHMIYFGFVTAAAITHG | | |
| | | Linker (SLDG)- | MDELYKGSSHHWGYGKHNGPEHWHKDFPIAKGERQSPVDIDTHTAKYDPSLKPLSVS | | |
| | | P2A-mCherry | YDQATSLRILNNGHAFNVEFDFSQDKAVLKGGPLDGTYRLIQFHFHWGSLDGQGSEH | | |
| | | | TVDKKKYAAELHLVHWNTKYGDFGKAVQQPDGLAVLGIFLKVGSAKPGLQKVVDV | | |
| | | | LDSIKTKGKSADFTNFDPRGLLPESLDYWTYPGSLTTPPLLECVTWIVLKEPISVSSEQV | | |
| | | | LKFRKLNFNGEGEPEELMVDNWRPAQFLKNRQIKASFKSLDGATNFSLLKQAGDVEE | | |
| | | | NPGPLSKGEEDNMAIIKEFMRFKVHMEGSVNGHEFEIEGEGEGRPYEGTQTAKLKVTK | | |
| | | | GGPLPFAWDILSPQFMYGSKAYVKHPADIPDYLKLSFPEGFKWERVMNFEDGGVVTV | | |
| | | | TQDSSLQDGEFIYKVKLRGTNFPSDGPVMQKKTMGWEASSERMYPEDGALKGEIKQR | | |
| | | | LKLKDGGHYDAEVKTTYKAKKPVQLPGAYNVNIKLDITSHNEDYTIVEQYERAEGRH | | |
| | | | STGGMDELYK* | | |
| OT-CA2- | OT- | AcGFP- | MVSKGAELFTGIVPILIELNGDVNGHKFSVSGEGEGDATYGKLTLKFICTTGKLPVPWP | 211064 | 211100 |
| 088 | 002544 | Linker (GS)- | TLVTTLSYGVQCFSRYPDHMKQHDFFKSAMPEGYIQERTIFFEDDGNYKSRAEVKFEG | | |
| | | CA2 (T55K, | DTLVNRIELTGTDFKEDGNILGNKMEYNYNAHNVYIMTDKAKNGIKVNFKIRHNIEDG | | |
| | | G63N, Q248N)- | SVQLADHYQQNTPIGDGPVLLPDNHYLSTQSALSKDPNEKRDHMIYFGFVTAAAITHG | | |
| | | Linker | MDELYKGSSHHWGYGKHNGPEHWHKDFPIAKGERQSPVDIDTHTAKYDPSLKPLSVS | | |
| | | (SLDG)-P2A- | YDQAKSLRILNNNHAFNVEFDDSQDKAVLKGGPLDGTYRLIQFHFHWGSLDGQGSEH | | |
| | | mCherry | TVDKKKYAAELHLVHWNTKYGDFGKAVQQPDGLAVLGIFLKVGSAKPGLQKVVDV | | |
| | | | LDSIKTKGKSADFTNFDPRGLLPESLDYWTYPGSLTTPPLLECVTWIVLKEPISVSSEQV | | |
| | | | LKFRKLNFNGEGEPEELMVDNWRPANPLKNRQIKASFKSLDGATNFSLLKQAGDVEE | | |
| | | | NPGPLSKGEEDNMAIIKEFMRFKVHMEGSVNGHEFEIEGEGEGRPYEGTQTAKLKVTK | | |
| | | | GGPLPFAWDILSPQFMYGSKAYVKHPADIPDYLKLSFPEGFKWERVMNFEDGGVVTV | | |
| | | | TQDSSLQDGEFIYKVKLRGTNFPSDGPVMQKKTMGWEASSERMYPEDGALKGEIKQR | | |
| | | | LKLKDGGHYDAEVKTTYKAKKPVQLPGAYNVNIKLDITSHNEDYTIVEQYERAEGRH | | |
| | | | STGGMDELYK* | | |
| OT-CA2- | OT- | AcGFP- | MVSKGAELFTGIVPILIELNGDVNGHKFSVSGEGEGDATYGKLTLKFICTTGKLPVPWP | 211065 | 211101 |
| 089 | 002545 | Linker (GS)- | TLVTTLSYGVQCFSRYPDHMKQHDFFKSAMPEGYIQERTIFFEDDGNYKSRAEVKFEG | | |
| | | CA2 (Y193I)- | DTLVNRIELTGTDFKEDGNILGNKMEYNYNAHNVYIMTDKAKNGIKVNFKIRHNIEDG | | |
| | | Linker (SLDG)- | SVQLADHYQQNTPIGDGPVLLPDNHYLSTQSALSKDPNEKRDHMIYFGFVTAAAITHG | | |
| | | P2A-mCherry | MDELYKGSSHHWGYGKHNGPEHWHKDFPIAKGERQSPVDIDTHTAKYDPSLKPLSVS | | |
| | | | YDQATSLRILNNGHAFNVEFDDSQDKAVLKGGPLDGTYRLIQFHFHWGSLDGQGSEH | | |
| | | | TVDKKKYAAELHLVHWNTKYGDFGKAVQQPDGLAVLGIFLKVGSAKPGLQKVVDVLDS | | |
| | | | IKTKGKSADFTNFDPRGLLPESLDYWTIPGSLTTPPLLECVTWIVLKEPISVSSEQVL | | |
| | | | KFRKLNFNGEGEPEELMVDNWRPAQPLKNRQIKASFKSLDGATNFSLLKQAGDVEEN | | |
| | | | PGPLSKGEEDNMAIIKEFMRFKVHMEGSVNGHEFEIEGEGEGRPYEGTQTAKLKVTKG | | |
| | | | GPLPFAWDILSPQFMYGSKAYVKHPADIPDYLKLSFPEGFKWERVMNFEDGGVVTVT | | |
| | | | QDSSLQDGEFIYKVKLRGTNFPSDGPVMQKKTMGWEASSERMYPEDGALKGEIKQRL | | |
| | | | KLKDGGHYDAEVKTTYKAKKPVQLPGAYNVNIKLDITSHNEDYTIVEQYERAEGRHS | | |
| | | | TGGMDELYK* | | |
| OT-CA2- | OT- | AcGFP- | MVSKGAELFTGIVPILIELNGDVNGHKFSVSGEGEGDATYGKLTLKFICTTGKLPVPWP | 211066 | 211102 |
| 090 | 002351 | Linker (GS)- | TLVTTLSYGVQCFSRYPDHMKQHDFFKSAMPEGYIQERTIFFEDDGNYKSRAEVKFEG | | |
| | | CA2 (S56F)- | DTLVNRIELTGTDFKEDGNILGNKMEYNYNAHNVYIMTDKAKNGIKVNFKIRHNIEDG | | |
| | | Linker (SLDG)- | SVQLADHYQQNTPIGDGPVLLPDNHYLSTQSALSKDPNEKRDHMIYFGFVTAAAITHG | | |
| | | P2A-mCherry | MDELYKGSSHHWGYGKHNGPEHWHKDFPIAKGERQSPVDIDTHTAKYDPSLKPLSVS | | |
| | | | YDQATFLRILNNGHAFNVEFDDSQDKAVLKGGPLDGTYRLIQFHFHWGSLDGQGSEH | | |
| | | | TVDKKKYAAELHLVHWNTKYGDFGKAVQQPDGLAVLGIFLKVGSAKPGLQKVVDV | | |
| | | | LDSIKTKGKSADFTNFDPRGLLPESLDYWTYPGSLTTPPLLECVTWIVLKEPISVSSEQV | | |
| | | | LKFRKLNFNGEGEPEELMVDNWRPAQPLKNRQIKASFKSLDGATNFSLLKQAGDVEE | | |
| | | | NPGPLSKGEEDNMAIIKEFMRFKVHMEGSVNGHEFEIEGEGEGRPYEGTQTAKLKVTK | | |
| | | | GGPLPFAWDILSPQFMYGSKAYVKHPADIPDYLKLSFPEGFKWERVMNFEDGGVVTV | | |
| | | | TQDSSLQDGEFIYKVKLRGTNFPSDGPVMQKKTMGWEASSERMYPEDGALKGEIKQR | | |
| | | | LKLKDGGHYDAEVKTTYKAKKPVQLPGAYNVNIKLDITSHNEDYTIVEQYERAEGRH | | |
| | | | STGGMDELYK* | | |
| OT-CA2- | OT- | AcGFP- | MVSKGAELFTGIVPILIELNGDVNGHKFSVSGEGEGDATYGKLTLKFICTTGKLPVPWP | 211067 | 211103 |
| 091 | 002520 | Linker (GS)- | TLVTTLSYGVQCFSRYPDHMKQHDFFKSAMPEGYIQERTIFFEDDGNYKSRAEVKFEG | | |
| | | CA2 (S56F, | DTLVNRIELTGTDFKEDGNILGNKMEYNYNAHNVYIMTDKAKNGIKVNFKIRHNIEDG | | |
| | | D71S)-Linker | SVQLADHYQQNTPIGDGPVLLPDNHYLSTQSALSKDPNEKRDHMIYFGFVTAAAITHG | | |
| | | (SLDG)-P2A- | MDELYKGSSHHWGYGKHNGPEHWHKDFPIAKGERQSPVDIDTHTAKYDPSLKPLSVS | | |
| | | mCherry | YDQATFLRILNNGHAFNVEFSDSQDKAVLKGGPLDGTYRLIQFHFHWGSLDGQGSEH | | |
| | | | TVDKKKYAAELHLVHWNTKYGDFGKAVQQPDGLAVLGIFLKVGSAKPGLQKVVDV | | |
| | | | LDSIKTKGKSADFTNFDPRGLLPESLDYWTYPGSLTTPPLLECVTWIVLKEPISVSSEQV | | |
| | | | LKFRKLNFNGEGEPEELMVDNWRPAQPLKNRQIKASFKSLDGATNFSLLKQAGDVEE | | |
| | | | NPGPLSKGEEDNMAIIKEFMRFKVHMEGSVNGHEFEIEGEGEGRPYEGTQTAKLKVTK | | |
| | | | GGPLPFAWDILSPQFMYGSKAYVKHPADIPDYLKLSFPEGFKWERVMNFEDGGVVTV | | |
| | | | TQDSSLQDGEFIYKVKLRGTNFPSDGPVMQKKTMGWEASSERMYPEDGALKGEIKQR | | |
| | | | LKLKDGGHYDAEVKTTYKAKKPVQLPGAYNVNIKLDITSHNEDYTIVEQYERAEGRH | | |
| | | | STGGMDELYK* | | |
| OT-CA2- | OT- | AcGFP- | MVSKGAELFTGIVPILIELNGDVNGHKFSVSGEGEGDATYGKLTLKFICTTGKLPVPWP | 211068 | 211104 |
| 092 | 002546 | Linker (GS)- | TLVTTLSYGVQCFSRYPDHMKQHDFFKSAMPEGYIQERTIFFEDDGNYKSRAEVKFEG | | |
| | | CA2 (S73N, | DTLVNRIELTGTDFKEDGNILGNKMEYNYNAHNVYIMTDKAKNGIKVNFKIRHNIEDG | | |
| | | R89Y))- | SVQLADHYQQNTPIGDGPVLLPDNHYLSTQSALSKDPNEKRDHMIYFGFVTAAAITHG | | |
| | | Linker (SLDG)- | MDELYKGSSHHWGYGKHNGPEHWHKDFPIAKGERQSPVDIDTHTAKYDPSLKPLSVS | | |
| | | P2A-mCherry | YDQATSLRILNNGHAFNVEFDDNQDKAVLKGGPLDGTYYLIQFHFHWGSLDGQGSEH | | |
| | | | TVDKKKYAAELHLVHWNTKYGDFGKAVQQPDGLAVLGIFLKVGSAKPGLQKVVDV | | |
| | | | LDSIKTKGKSADFTNFDPRGLLPESLDYWTYPGSLTTPPLLECVTWIVLKEPISVSSEQV | | |
| | | | LKFRKLNFNGEGEPEELMVDNWRPAQPLKNRQIKASFKSLDGATNFSLLKQAGDVEE | | |
| | | | NPGPLSKGEEDNMAIIKEFMRFKVHMEGSVNGHEFEIEGEGEGRPYEGTQTAKLKVTK | | |
| | | | GGPLPFAWDILSPQFMYGSKAYVKHPADIPDYLKLSFPEGFKWERVMNFEDGGVVTV | | |
| | | | TQDSSLQDGEFIYKVKLRGTNFPSDGPVMQKKTMGWEASSERMYPEDGALKGEIKQR | | |
| | | | LKLKDGGHYDAEVKTTYKAKKPVQLPGAYNVNIKLDITSHNEDYTIVEQYERAEGRH | | |
| | | | STGGMDELYK* | | |
| OT-CA2- | OT- | AcGFP- | MVSKGAELFTGIVPILIELNGDVNGHKFSVSGEGEGDATYGKLTLKFICTTGKLPVPWP | 211069 | 211105 |
| 093 | 002547 | Linker (GS)- | TLVTTLSYGVQCFSRYPDHMKQHDFFKSAMPEGYIQERTIFFEDDGNYKSRAEVKFEG | | |
| | | CA2 (V134F, | DTLVNRIELTGTDFKEDGNILGNKMEYNYNAHNVYIMTDKAKNGIKVNFKIRHNIEDG | | |
| | | L228F)- | SVQLADHYQQNTPIGDGPVLLPDNHYLSTQSALSKDPNEKRDHMIYFGFVTAAAITHG | | |
| | | Linker (SLDG)- | MDELYKGSSHHWGYGKHNGPEHWHKDFPIAKGERQSPVDIDTHTAKYDPSLKPLSVS | | |
| | | P2A-mCherry | YDQATSLRILNNGHAFNVEFDDSQDKAVLKGGPLDGTYRLIQFHFHWGSLDGQGSEH | | |
| | | | TVDKKKYAAELHLVHWNTKYGDFGKAFQQPDGLAVLGIFLKVGSAKPGLQKVVDVL | | |
| | | | DSIKTKGKSADFTNFDPRGLLPESLDYWTYPGSLTTPPLLECVTWIVLKEPISVSSEQVL | | |
| | | | KFRKFNFNGEGEPEELMVDNWRPAQPLKNRQIKASFKSLDGATNFSLLKQAGDVEEN | | |
| | | | PGPLSKGEEDNMAIIKEFMRFKVHMEGSVNGHEFEIEGEGEGRPYEGTQTAKLKVTKG | | |
| | | | GPLPFAWDILSPQFMYGSKAYVKHPADIPDYLKLSFPEGFKWERVMNFEDGGVVTVT | | |
| | | | QDSSLQDGEFIYKVKLRGTNFPSDGPVMQKKTMGWEASSERMYPEDGALKGEIKQRL | | |
| | | | KLKDGGHYDAEVKTTYKAKKPVQLPGAYNVNIKLDITSHNEDYTIVEQYERAEGRHS | | |
| | | | TGGMDELYK* | | |
| OT-CA2- | OT- | AcGFP- | MVSKGAELFTGIVPILIELNGDVNGHKFSVSGEGEGDATYGKLTLKFICTTGKLPVPWP | 211070 | 211106 |
| 096 | 003182 | Linker (GS)- | TLVTTLSYGVQCFSRYPDHMKQHDFFKSAMPEGYIQERTIFFEDDGNYKSRAEVKFEG | | |
| | | CA2 (M1del, | DTLVNRIELTGTDFKEDGNILGNKMEYNYNAHNVYIMTDKAKNGIKVNFKIRHNIEDG | | |
| | | L156H, | SVQLADHYQQNTPIGDGPVLLPDNHYLSTQSALSKDPNEKRDHMIYFGFVTAAAITHG | | |
| | | A256del, | MDELYKGSSHHWGYGKHNGPEHWHKDFPIAKGERQSPVDIDTHTAKYDPSLKPLSVS | | |
| | | S257del, | YDQATSLRILNNGHAFNVEFDDSQDKAVLKGGPLDGTYRLIQFHFHWGSLDGQGSEH | | |
| | | F258del, | TVDKKKYAAELHLVHWNTKYGDFGKAVQQPDGLAVLGIFLKVGSAKPGHQKVVDV | | |
| | | K259del)- | LDSIKTKGKSADFTNFDPRGLLPESLDYWTYPGSLTTPPLLECVTWIVLKEPISVSSEQV | | |
| | | Linker (SLDG)- | LKFRKLNFNGEGEPEELMVDNWRPAQPLKNRQIKSLDGATNFSLLKQAGDVEENPGP | | |
| | | P2A-mCherry | LSKGEEDNMAIIKEFMRFKVHMEGSVNGHEFEIEGEGEGRPYEGTQTAKLKVTKGGPL | | |
| | | | PFAWDILSPQFMYGSKAYVKHPADIPDYLKLSFPEGFKWERVMNFEDGGVVTVTQDS | | |
| | | | SLQDGEFIYKVKLRGTNFPSDGPVMQKKTMGWEASSERMYPEDGALKGEIKQRLKLK | | |
| | | | DGGHYDAEVKTTYKAKKPVQLPGAYNVNIKLDITSHNEDYTIVEQYERAEGRHSTGG | | |
| | | | MDELYK* | | |
| OT-CA2- | OT- | AcGFP- | MVSKGAELFTGIVPILIELNGDVNGHKFSVSGEGEGDATYGKLTLKFICTTGKLPVPWP | 211071 | 211107 |
| 097 | 003183 | Linker (GS)- | TLVTTLSYGVQCFSRYPDHMKQHDFFKSAMPEGYIQERTIFFEDDGNYKSRAEVKFEG | | |
| | | CA2 (M1del, | DTLVNRIELTGTDFKEDGNILGNKMEYNYNAHNVYIMTDKAKNGIKVNFKIRHNIEDG | | |
| | | S2del, H3del, | SVQLADHYQQNTPIGDGPVLLPDNHYLSTQSALSKDPNEKRDHMIYFGFVTAAAITHG | | |
| | | H4del, W5del, | MDELYKGSGYGKHNGPEHWHKDFPIAKGERQSPVDIDTHTAKYDPSLKPLSVSYDQA | | |
| | | L156H)- | TSLRILNNGHAFNVEFDDSQDKAVLKGGPLDGTYRLIQFHFHWGSLDGQGSEHTVDK | | |
| | | Linker (SLDG)- | KKYAAELHLVHWNTKYGDFGKAVQQPDGLAVLGIFLKVGSAKPGHQKVVDVLDSIK | | |
| | | P2A-mCherry | TKGKSADFTNFDPRGLLPESLDYWTYPGSLTTPPLLECVTWIVLKEPISVSSEQVLKFR | | |
| | | | KLNFNGEGEPEELMVDNWRPAQPLKNRQIKASFKSLDGATNFSLLKQAGDVEENPGP | | |
| | | | LSKGEEDNMAIIKEFMRFKVHMEGSVNGHEFEIEGEGEGRPYEGTQTAKLKVTKGGPL | | |
| | | | PFAWDILSPQFMYGSKAYVKHPADIPDYLKLSFPEGFKWERVMNFEDGGVVTVTQDS | | |
| | | | SLQDGEFIYKVKLRGTNFPSDGPVMQKKTMGWEASSERMYPEDGALKGEIKQRLKLK | | |
| | | | DGGHYDAEVKTTYKAKKPVQLPGAYNVNIKLDITSHNEDYTIVEQYERAEGRHSTGG | | |
| | | | MDELYK* | | |
| OT-CA2- | OT- | AcGFP- | MVSKGAELFTGIVPILIELNGDVNGHKFSVSGEGEGDATYGKLTLKFICTTGKLPVPWP | 211072 | 211108 |
| 098 | 003184 | Linker (GS)- | TLVTTLSYGVQCFSRYPDHMKQHDFFKSAMPEGYIQERTIFFEDDGNYKSRAEVKFEG | | |
| | | CA2 (M1del, | DTLVNRIELTGTDFKEDGNILGNKMEYNYNAHNVYIMTDKAKNGIKVNFKIRHNIEDG | | |
| | | W5Y, L156H)- | SVQLADHYQQNTPIGDGPVLLPDNHYLSTQSALSKDPNEKRDHMIYFGFVTAAAITHG | | |
| | | Linker | MDELYKGSSHHYGYGKHNGPEHWHKDFPIAKGERQSPVDIDTHTAKYDPSLKPLSVS | | |
| | | (SLDG)-P2A- | YDQATSLRILNNGHAFNVEFDDSQDKAVLKGGPLDGTYRLIQFHFHWGSLDGQGSEH | | |
| | | mCherry | TVDKKKYAAELHLVHWNTKYGDFGKAVQQPDGLAVLGIFLKVGSAKPGHQKVVDV | | |
| | | | LDSIKTKGKSADFTNFDPRGLLPESLDYWTYPGSLTTPPLLECVTWIVLKEPISVSSEQV | | |
| | | | LKFRKLNFNGEGEPEELMVDNWRPAQPLKNRQIKASFKSLDGATNFSLLKQAGDVEE | | |
| | | | NPGPLSKGEEDNMAIIKEFMRFKVHMEGSVNGHEFEIEGEGEGRPYEGTQTAKLKVTK | | |
| | | | GGPLPFAWDILSPQFMYGSKAYVKHPADIPDYLKLSFPEGFKWERVMNFEDGGVVTV | | |
| | | | TQDSSLQDGEFIYKVKLRGTNFPSDGPVMQKKTMGWEASSERMYPEDGALKGEIKQR | | |
| | | | LKLKDGGHYDAEVKTTYKAKKPVQLPGAYNVNIKLDITSHNEDYTIVEQYERAEGRH | | |
| | | | STGGMDELYK* | | |
| OT-CA2- | OT- | AcGFP- | MVSKGAELFTGIVPILIELNGDVNGHKFSVSGEGEGDATYGKLTLKFICTTGKLPVPWP | 211073 | 211109 |
| 099 | 003185 | Linker (GS)- | TLVTTLSYGVQCFSRYPDHMKQHDFFKSAMPEGYIQERTIFFEDDGNYKSRAEVKFEG | | |
| | | CA2 (M1del, | DTLVNRIELTGTDFKEDGNILGNKMEYNYNAHNVYIMTDKAKNGIKVNFKIRHNIEDG | | |
| | | L156H, | SVQLADHYQQNTPIGDGPVLLPDNHYLSTQSALSKDPNEKRDHMIYFGFVTAAAITHG | | |
| | | G234del, | MDELYKGSSHHWGYGKHNGPEHWHKDFPIAKGERQSPVDIDTHTAKYDPSLKPLSVS | | |
| | | E235del, | YDQATSLRILNNGHAFNVEFDDSQDKAVLKGGPLDGTYRLIQFHFHWGSLDGQGSEH | | |
| | | P236del)- | TVDKKKYAAELHLVHWNTKYGDFGKAVQQPDGLAVLGIFLKVGSAKPGHQKVVDV | | |
| | | Linker (SLDG)- | LDSIKTKGKSADFTNFDPRGLLPESLDYWTYPGSLTTPPLLECVTWIVLKEPISVSSEQV | | |
| | | P2A-mCherry | LKFRKLNFNGEEELMVDNWRPAQPLKNRQIKASFKSLDGATNFSLLKQAGDVEENPG | | |
| | | | PLSKGEEDNMAIIKEFMRFKVHMEGSVNGHEFEIEGEGEGRPYEGTQTAKLKVTKGGP | | |
| | | | LPFAWDILSPQFMYGSKAYVKHPADIPDYLKLSFPEGFKWERVMNFEDGGVVTVTQD | | |
| | | | SSLQDGEFIYKVKLRGTNFPSDGPVMQKKTMGWEASSERMYPEDGALKGEIKQRLKL | | |
| | | | KDGGHYDAEVKTTYKAKKPVQLPGAYNVNIKLDITSHNEDYTIVEQYERAEGRHSTG | | |
| | | | GMDELYK* | | |
| OT-CA2- | OT- | AcGFP- | MVSKGAELFTGIVPILIELNGDVNGHKFSVSGEGEGDATYGKLTLKFICTTGKLPVPWP | 211074 | 211110 |
| 101 | 003187 | Linker (GS)- | TLVTTLSYGVQCFSRYPDHMKQHDFFKSAMPEGYIQERTIFFEDDGNYKSRAEVKFEG | | |
| | | CA2 (M1del, | DTLVNRIELTGTDFKEDGNILGNKMEYNYNAHNVYIMTDKAKNGIKVNFKIRHNIEDG | | |
| | | L156H, F225L)- | SVQLADHYQQNTPIGDGPVLLPDNHYLSTQSALSKDPNEKRDHMIYFGFVTAAAITHG | | |
| | | Linker | MDELYKGSSHHWGYGKHNGPEHWHKDFPIAKGERQSPVDIDTHTAKYDPSLKPLSVS | | |
| | | (SLDG)-P2A- | YDQATSLRILNNGHAFNVEFDDSQDKAVLKGGPLDGTYRLIQFHFHWGSLDGQGSEH | | |
| | | mCherry | TVDKKKYAAELHLVHWNTKYGDFGKAVQQPDGLAVLGIFLKVGSAKPGHQKVVDV | | |
| | | | LDSIKTKGKSADFTNFDPRGLLPESLDYWTYPGSLTTPPLLECVTWIVLKEPISVSSEQV | | |
| | | | LKLRKLNFNGEGEPEELMVDNWRPAQPLKNRQIKASFKSLDGATNFSLLKQAGDVEE | | |
| | | | NPGPLSKGEEDNMAIIKEFMRFKVHMEGSVNGHEFEIEGEGEGRPYEGTQTAKLKVTK | | |
| | | | GGPLPFAWDILSPQFMYGSKAYVKHPADIPDYLKLSFPEGFKWERVMNFEDGGVVTV | | |
| | | | TQDSSLQDGEFIYKVKLRGTNFPSDGPVMQKKTMGWEASSERMYPEDGALKGEIKQR | | |
| | | | LKLKDGGHYDAEVKTTYKAKKPVQLPGAYNVNIKLDITSHNEDYTIVEQYERAEGRH | | |
| | | | STGGMDELYK* | | |
| OT-CA2- | OT- | AcGFP- | MVSKGAELFTGIVPILIELNGDVNGHKFSVSGEGEGDATYGKLTLKFICTTGKLPVPWP | 211075 | 211111 |
| 102 | 003188 | Linker (GS)- | TLVTTLSYGVQCFSRYPDHMKQHDFFKSAMPEGYIQERTIFFEDDGNYKSRAEVKFEG | | |
| | | CA2 (M1del, | DTLVNRIELTGTDFKEDGNILGNKMEYNYNAHNVYIMTDKAKNGIKVNFKIRHNIEDG | | |
| | | D71N, D75N, | SVQLADHYQQNTPIGDGPVLLPDNHYLSTQSALSKDPNEKRDHMIYFGFVTAAAITHG | | |
| | | D101N, | MDELYKGSSHHWGYGKHNGPEHWHKDFPIAKGERQSPVDIDTHTAKYDPSLKPLSVS | | |
| | | L156H)- | YDQATSLRILNNGHAFNVEFNDSQNKAVLKGGPLDGTYRLIQFHFHWGSLNGQGSEH | | |
| | | Linker (SLDG)- | TVDKKKYAAELHLVHWNTKYGDFGKAVQQPDGLAVLGIFLKVGSAKPGHQKVVDV | | |
| | | P2A-mCherry | LDSIKTKGKSADFTNFDPRGLLPESLDYWTYPGSLTTPPLLECVTWIVLKEPISVSSEQV | | |
| | | | LKFRKLNFNGEGEPEELMVDNWRPAQPLKNRQIKASFKSLDGATNFSLLKQAGDVEE | | |
| | | | NPGPLSKGEEDNMAIIKEFMRFKVHMEGSVNGHEFEIEGEGEGRPYEGTQTAKLKVTK | | |
| | | | GGPLPFAWDILSPQFMYGSKAYVKHPADIPDYLKLSFPEGFKWERVMNFEDGGVVTV | | |
| | | | TQDSSLQDGEFIYKVKLRGTNFPSDGPVMQKKTMGWEASSERMYPEDGALKGEIKQR | | |
| | | | LKLKDGGHYDAEVKTTYKAKKPVQLPGAYNVNIKLDITSHNEDYTIVEQYERAEGRH | | |
| | | | STGGMDELYK* | | |

### CA2 CAR & CA21L15 Effector Modules

[0353] In one embodiment, the CA2 DDs described herein may be appended to one or more of the CAR payloads of interest. These are referred to as “CA2 CAR effector modules.” Table 10 provides CA2 CAR constructs.

TABLE 10
CA2 CAR & CA2 IL15 constructs

| Descrip- | | AA SEQ | NA SEQ |
|---|---|---|---|
| tion | Sequence | ID NO. | ID NO. |
| OT-001988 | MALPVTALLLPLALLLHAARPDIQMT | 210692 | 210693 |
| (CD8α | QTTSSLSASLGDRVTISCRASQDISK | | |
| leader; | YLNWYQQKPDGTVKLLIYHTSRLHSG | | |
| CD19 scFv; | VPSRFSGSGSGTDYSLTISNLEQEDI | | |
| CD8a Hinge | ATYFCQQGNTLPYTFGGGTKLEITGG | | |
| and Trans- | GGSGGGGSGGGGSEVKLQESGPGLVA | | |
| membrane | PSQSLSVTCTVSGVSLPDYGVSWIRQ | | |
| Domain; | PPRKGLEWLGVIWGSETTYYNSALKS | | |
| CD28 co- | RLTIIKDNSKSQVFLKMNSLQTDDTA | | |
| stimu- | IYYCAKHYYYGGSYAMDYWGQGTSVT | | |
| latory | VSSTTTPAPRPPTPAPTIASQPLSLR | | |
| domain/ | PEACRPAAGGAVHTRGLDFACDIYIW | | |
| 4-1BB | APLAGTCGVLLLSLVITLYCKRGRKK | | |
| intra- | LLYIFKQPFMRPVQTTQEEDGCSCRF | | |
| cellular | PEEEEGGCELRVKFSRSADAPAYKQG | | |
| domain; | QNQLYNELNLGRREEYDVLDKRRGRD | | |
| CD3 zeta | PEMGGKPRRKNPQEGLYNELQKDKMA | | |
| intra- | EAYSEIGMKGERRRGKGHDGLYQGLS | | |
| cellular | TATKDTYDALHMQALPPRGSSHHWGY | | |
| domain; | GKHNGPEHWHKDFPIAKGERQSPVDI | | |
| Linker | DTHTAKYDPSLKPLSVSYDQATSLRN | | |
| (GS); | LNNGHAFNVEFDDSQDKAVLKGGPLD | | |
| CA2 (aa | GTYRLIQFHFHWGSLDRQGSEHTVDK | | |
| 2-260 | KKYAAELHLVHWNTKYGDFGKAVQQP | | |
| of WT, | DGLAVLGIFLKVGSAKPGLQKVVDVL | | |
| I59N, | DSIKTKGKSADFTNFDPRGLLPESLD | | |
| G102R); | YWTYPGSLTTPPLLECVTWIVLKEPI | | |
| stop) | SVSSEQVLKFRKLNFNGEGEPEELMV | | |
| | DNWRPAQPLKNRQIKASFK* | | |
| OT-001989 | MALPVTALLLPLALLLHAARPDIQMT | 210694 | 210695 |
| (CD8α | QTTSSLSASLGDRVTISCRASQDISK | | |
| leader; | YLNWYQQKPDGTVKLLIYHTSRLHSG | | |
| CD19 scFv; | VPSRFSGSGSGTDYSLTISNLEQEDI | | |
| CD8a Hinge | ATYFCQQGNTLPYTFGGGTKLEITGG | | |
| and Trans- | GGSGGGGSGGGGSEVKLQESGPGLVA | | |
| membrane | PSQSLSVTCTVSGVSLPDYGVSWIRQ | | |
| Domain; | PPRKGLEWLGVIWGSETTYYNSALKS | | |
| CD28 co- | RLTIIKDNSKSQVFLKMNSLQTDDTA | | |
| stimu- | IYYCAKHYYYGGSYAMDYWGQGTSVT | | |
| latory | VSSTTTPAPRPPTPAPTIASQPLSLR | | |
| domain/ | PEACRPAAGGAVHTRGLDFACDIYIW | | |
| 4-1BB | APLAGTCGVLLLSLVITLYCKRGRKK | | |
| intra- | LLYIFKQPFMRPVQTTQEEDGCSCRF | | |
| cellular | PEEEEGGCELRVKFSRSADAPAYKQG | | |
| domain; | QNQLYNELNLGRREEYDVLDKRRGRD | | |
| CD3 zeta | PEMGGKPRRKNPQEGLYNELQKDKMA | | |
| intra- | EAYSEIGMKGERRRGKGHDGLYQGLS | | |
| cellular | TATKDTYDALHMQALPPRGSSHHWGY | | |
| domain; | GKHNGPEHWHKDFPIAKGERQSPVDI | | |
| Linker | DTHTAKYDPSLKPLSVSYDQATSLRI | | |
| (GS); | LNNGHAFNVEFDDSQDKAVLKGGPLD | | |
| CA2 (aa | GTYRLIQFHFHWGSLDGQGSEHTVDK | | |
| 2-260 | KKYAAELHLVHWNTKYGDFGKAVQQP | | |
| of WT, | DGLAVLGIFLKVGSAKPGHQKVVDVL | | |
| L156H); | DSIKTKGKSADFTNFDPRGLLPESLD | | |
| stop) | YWTYPGSLTTPPLLECVTWIVLKEPI | | |
| | SVSSEQVLKFRKLNFNGEGEPEELMV | | |
| | DNWRPAQPLKNRQIKASFK* | | |
| OT-002094 | MDMRVPAQLLGLLLLWLSGARCNWVN | 210874 | 210875 |
| (Ig Kappa | VISDLKKIEDLIQSMHIDATLYTESD | | |
| light | VHPSCKVTAMKCFLLELQVISLESGD | | |
| chain | ASIHDTVENLIILANNSLSSNGNVTE | | |
| leader; | SGCKECEELEEKNIKEFLQSFVHIVQ | | |
| Linker | MFINTSGSGSGSGSGSGSGSGSGSGS | | |
| ((GS)15); | GSGSGSGSGSKQEHFPDNLLPSWAIT | | |
| IL15 | LISVNGIFVICCLTYCFAPRCRERRG | | |
| (49-162 | NSSHHWGYGKHGPEHWHKDFPIAKGE | | |
| of WT); | IRQSPVDDTHTAKYDPSLKPLSVSYD | | |
| B7-1 | QATSLRILNNGHAFNVEFDDSQDKAV | | |
| Hinge, | LKGGPLDGTYRLIQFHFHWGSLDGQG | | |
| Trans- | SEHTVDKKKYAAELHLVHWNTKYGDF | | |
| membrane | GKAVQQPDGLAVLGIFLKVGSAKPGH | | |
| Domain | QKVVDVLDSIKTKGKSADFTNFDPRG | | |
| and Tail; | LLPESLDYWTYPGSLTTPPLLECVTW | | |
| Linker | IVLKEPISVSSEQVLKFRKLNFNGEG | | |
| (GS); | EPEELMVDNWRPAQPLKNRQIKASF | | |
| CA2 (aa | K* | | |
| 2-260 | | | |
| of WT, | | | |
| L156H); | | | |
| stop) | | | |

[0354] Table 11 provides additional CA2 CAR constructs.

TABLE 11
CA2 CAR

| | | AA | NA |
|---|---|---|---|
| | | SEQ | SEQ |
| | | ID | ID |
| Description | Sequence | NO. | NO. |
| OT-002173 (Met; | MALPVTALLLPLALLLHAARPDIQMTQTTSSLSASLGDRVTISCR | 211112 | 211120 |
| CD8α leader; | ASQDISKYLNWYQQKPDGTVKLLIYHTSRLHSGVPSRFSGSGSGT | | |
| CD19 scFv; | DYSLTISNLEQEDIATYFCQQGNTLPYTFGGGTKLEITGGGGSGG | | |
| CD8α hinge-TM; | GGSGGGGSEVKLQESGPGLVAPSQSLSVTCTVSGVSLPDYGVSW | | |
| 4-1BB | IRQPPRKGLEWLGVIWGSETTYYNSALKSRLTIIKDNSKSQVFLK | | |
| intracellular | MNSLQTDDTAIYYCAKHYYYGGSYAMDYWGQGTSVTVSSTTTP | | |
| signaling | APRPPTPAPTIASQPLSLRPEACRPAAGGAVHTRGLDFACDIYIWA | | |
| domain; | PLAGTCGVLLLSLVITLYCKRGRKKLLYIFKQPFMRPVQTTQEED | | |
| CD3 zeta | GCSCRFPEEEEGGCELRVKFSRSADAPAYKQGQNQLYNELNLGR | | |
| signaling | REEYDVLDKRRGRDPEMGGKPRRKNPQEGLYNELQKDKMAEA | | |
| domain; | YSEIGMKGERRRGKGHDGLYQGLSTATKDTYDALHMQALPPRG | | |
| Linker (GS); | SSHHWGYGKHNGPEHWHKDFPIAKGERQSPVDIDTHTAKYDPSL | | |
| CA2 | KPLSVSYDQATSLRILNNDHAFNVVFDDSQDKAVLKGGPLDGTY | | |
| (aa 2-260 | RLIQFHFHWGSLDGQGSEHTVDKKKYAAELHLVHWNTKYGDFG | | |
| of WT, | KAVQQPDGLAVLGIFLKVGSAKPGLQKVVDVLDSIKTKGKSADF | | |
| G63D, E69V, | TNFDPRGLLPESLDYWTYPGSLTTPPLLECVTWIVLKEPISVSSEQ | | |
| N231I); stop) | VLKFRKLNFIGEGEPEELMVDNWRPAQPLKNRQIKASFK | | |
| OT-002174 (Met; | MALPVTALLLPLALLLHAARPDIQMTQTTSSLSASLGDRVTISCR | 211113 | 211121 |
| CD8α leader; | ASQDISKYLNWYQQKPDGTVKLLIYHTSRLHSGVPSRFSGSGSGT | | |
| CD19 scFv; | DYSLTISNLEQEDIATYFCQQGNTLPYTFGGGTKLEITGGGGSGG | | |
| CD8α hinge-TM; | GGSGGGGSEVKLQESGPGLVAPSQSLSVTCTVSGVSLPDYGVSW | | |
| 4-1BB | IRQPPRKGLEWLGVIWGSETTYYNSALKSRLTIIKDNSKSQVFLK | | |
| intracellular | MNSLQTDDTAIYYCAKHYYYGGSYAMDYWGQGTSVTVSSTTTP | | |
| signaling | APRPPTPAPTIASQPLSLRPEACRPAAGGAVHTRGLDFACDIYIWA | | |
| domain; | PLAGTCGVLLLSLVITLYCKRGRKKLLYIFKQPFMRPVQTTQEED | | |
| CD3 zeta | GCSCRFPEEEEGGCELRVKFSRSADAPAYKQGQNQLYNELNLGR | | |
| signaling | REEYDVLDKRRGRDPEMGGKPRRKNPQEGLYNELQKDKMAEA | | |
| domain; | YSEIGMKGERRRGKGHDGLYQGLSTATKDTYDALHMQALPPRG | | |
| Linker (GS); | SSHHWGYGKHNGPEHWHKDFPIAKGERQSPVDIDTHTAKYDPSL | | |
| CA2 | KPLSVSYDQATSLRILNNGHAFNVEFDDSQDKAVLKGGPLDGTY | | |
| (aa 2-260 | RLIQFHFHWGSLDGQGSEHTVDKKKYAAELHLVHWNTKYGDFG | | |
| of WT, | KAVQQPDGLAVLGIFLKVGSAKPGLQKVVDVLDSIKTKGKSADF | | |
| L197P); stop) | TNFDPRGLLPESLDYWTYPGSPTTPPLLECVTWIVLKEPISVSSEQ | | |
| | VLKFRKLNFNGEGEPEELMVDNWRPAQPLKNRQIKASFK | | |
| OT-002175 (Met; | MALPVTALLLPLALLLHAARPDIQMTQTTSSLSASLGDRVTISCR | 211114 | 211122 |
| CD8α leader; | ASQDISKYLNWYQQKPDGTVKLLIYHTSRLHSGVPSRFSGSGSGT | | |
| CD19 scFv; | DYSLTISNLEQEDIATYFCQQGNTLPYTFGGGTKLEITGGGGSGG | | |
| CD8α hinge-TM; | GGSGGGGSEVKLQESGPGLVAPSQSLSVTCTVSGVSLPDYGVSW | | |
| 4-1BB | IRQPPRKGLEWLGVIWGSETTYYNSALKSRLTIIKDNSKSQVFLK | | |
| intracellular | MNSLQTDDTAIYYCAKHYYYGGSYAMDYWGQGTSVTVSSTTTP | | |
| signaling | APRPPTPAPTIASQPLSLRPEACRPAAGGAVHTRGLDFACDIYIWA | | |
| domain; | PLAGTCGVLLLSLVITLYCKRGRKKLLYIFKQPFMRPVQTTQEED | | |
| CD3 zeta | GCSCRFPEEEEGGCELRVKFSRSADAPAYKQGQNQLYNELNLGR | | |
| signaling | REEYDVLDKRRGRDPEMGGKPRRKNPQEGLYNELQKDKMAEA | | |
| domain; | YSEIGMKGERRRGKGHDGLYQGLSTATKDTYDALHMQALPPRG | | |
| Linker (GS); | SSHHWGYGKHNGPEHWHKDFPIAKGERQSPVDIDTHTAKYDPSL | | |
| CA2 | KPLSVSYDQATSLRILNNGHAFNVEFDDSQDKAVLKGGPLDGTY | | |
| (aa 2-260 | RLIQFHFHWGSLDGQGSEHTVDKKKYAAELHLVHWNTKYGDFG | | |
| of WT, L156H, | KAVQQPDGLAVLGIFLKVGSAKPGHQKVVDVLDSIKTKGKCAD | | |
| S172C, F178Y, | FTNYDPRGLLPDSLDYWTYPGSLTTPPLLECVTWIVLKEPISVSSE | | |
| E186D); stop) | QVLKFRKLNFNGEGEPEELMVDNWRPAQPLKNRQIKASFK | | |
| OT-002176 (Met; | MALPVTALLLPLALLLHAARPDIQMTQTTSSLSASLGDRVTISCR | 211115 | 211123 |
| CD8α leader; | ASQDISKYLNWYQQKPDGTVKLLIYHTSRLHSGVPSRFSGSGSGT | | |
| CD19 scFv; | DYSLTISNLEQEDIATYFCQQGNTLPYTFGGGTKLEITGGGGSGG | | |
| CD8α hinge-TM; | GGSGGGGSEVKLQESGPGLVAPSQSLSVTCTVSGVSLPDYGVSW | | |
| 4-1BB | IRQPPRKGLEWLGVIWGSETTYYNSALKSRLTIIKDNSKSQVFLK | | |
| intracellular | MNSLQTDDTAIYYCAKHYYYGGSYAMDYWGQGTSVTVSSTTTP | | |
| signaling | APRPPTPAPTIASQPLSLRPEACRPAAGGAVHTRGLDFACDIYIWA | | |
| domain; | PLAGTCGVLLLSLVITLYCKRGRKKLLYIFKQPFMRPVQTTQEED | | |
| CD3 zeta | GCSCRFPEEEEGGCELRVKFSRSADAPAYKQGQNQLYNELNLGR | | |
| signaling | REEYDVLDKRRGRDPEMGGKPRRKNPQEGLYNELQKDKMAEA | | |
| domain; | YSEIGMKGERRRGKGHDGLYQGLSTATKDTYDALHMQALPPRG | | |
| Linker (GS); | SSHHWGYGKHNGPEHWHKDFPIAKGELQSPVDIDTHTAKYDPSL | | |
| CA2 | KPLSVSYDQATSLRILNNGHAFNVEFDDSQDKAVLKGGPLDGIY | | |
| (aa 2-260 | RLIQFHFHWGSLDGQGSEHTVDKKKYAAELHLVYWNTKYGDFG | | |
| of WT, R27L, | KAVQQPDGLAVLGIFLKVGSAKPGLQKVVDVLDSIKTKGKSADF | | |
| T87I, H122Y, | TNFDPRGLLPESLDYWTYPGSLTTPPLLECVTWIVLKEPISVSSEQ | | |
| N252D); stop) | VLKFRKLNFNGEGEPEELMVDNWRPAQPLKDRQIKASFK | | |
| OT-002177 (Met; | MALPVTALLLPLALLLHAARPDIQMTQTTSSLSASLGDRVTISCR | 211116 | 211124 |
| CD8α leader; | ASQDISKYLNWYQQKPDGTVKLLIYHTSRLHSGVPSRFSGSGSGT | | |
| CD19 scFv; | DYSLTISNLEQEDIATYFCQQGNTLPYTFGGGTKLEITGGGGSGG | | |
| CD8α hinge-TM; | GGSGGGGSEVKLQESGPGLVAPSQSLSVTCTVSGVSLPDYGVSW | | |
| 4-1BB | IRQPPRKGLEWLGVIWGSETTYYNSALKSRLTIIKDNSKSQVFLK | | |
| intracellular | MNSLQTDDTAIYYCAKHYYYGGSYAMDYWGQGTSVTVSSTTTP | | |
| signaling | APRPPTPAPTIASQPLSLRPEACRPAAGGAVHTRGLDFACDIYIWA | | |
| domain; | PLAGTCGVLLLSLVITLYCKRGRKKLLYIFKQPFMRPVQTTQEED | | |
| CD3 zeta | GCSCRFPEEEEGGCELRVKFSRSADAPAYKQGQNQLYNELNLGR | | |
| signaling | REEYDVLDKRRGRDPEMGGKPRRKNPQEGLYNELQKDKMAEA | | |
| domain; | YSEIGMKGERRRGKGHDGLYQGLSTATKDTYDALHMQALPPRG | | |
| Linker (GS); | SSHHWGYGKHNGPEHWHKDFPIAKGERQSPVDIDTHTAKYDPSL | | |
| CA2 | KPLSVSYDQATNLRILNNGHAFNVEFDDSQDKAVLKGGPLDGTY | | |
| (aa 2-260 | RLIQFHFHWGSLDGQGSEHTVDKKKYAAELHLVHWNTKYGDFG | | |
| of WT, | KAVQQPDGLAVLGIFLKVGSAKPGLQKVVDVLDSIKTKGKSADF | | |
| S56N); stop) | TNFDPRGLLPESLDYWTYPGSLTTPPLLECVTWIVLKEPISVSSEQ | | |
| | VLKFRKLNFNGEGEPEELMVDNWRPAQPLKNRQIKASFK | | |
| OT-002178 (Met; | MALPVTALLLPLALLLHAARPDIQMTQTTSSLSASLGDRVTISCR | 211117 | 211125 |
| CD8α leader; | ASQDISKYLNWYQQKPDGTVKLLIYHTSRLHSGVPSRFSGSGSGT | | |
| CD19 scFv; | DYSLTISNLEQEDIATYFCQQGNTLPYTFGGGTKLEITGGGGSGG | | |
| CD8α hinge-TM; | GGSGGGGSEVKLQESGPGLVAPSQSLSVTCTVSGVSLPDYGVSW | | |
| 4-1BB | IRQPPRKGLEWLGVIWGSETTYYNSALKSRLTIIKDNSKSQVFLK | | |
| intracellular | MNSLQTDDTAIYYCAKHYYYGGSYAMDYWGQGTSVTVSSTTTP | | |
| signaling | APRPPTPAPTIASQPLSLRPEACRPAAGGAVHTRGLDFACDIYIWA | | |
| domain; | PLAGTCGVLLLSLVITLYCKRGRKKLLYIFKQPFMRPVQTTQEED | | |
| CD3 zeta | GCSCRFPEEEEGGCELRVKFSRSADAPAYKQGQNQLYNELNLGR | | |
| signaling | REEYDVLDKRRGRDPEMGGKPRRKNPQEGLYNELQKDKMAEA | | |
| domain; | YSEIGMKGERRRGKGHDGLYQGLSTATKDTYDALHMQALPPRG | | |
| Linker (GS); | SSHHWGYGKHNGPEHWHKDFPIAKGERQSPVDIDTHTAKYDPSL | | |
| CA2 | KPLSVSYDQATSLRILNNGHAFNVEFDFSQDKAVLKGGPLDGTY | | |
| (aa 2-260 | RLIQFHFHWGSLDGQGSEHTVDKKKYAAELHLVHWNTKYGDFG | | |
| of WT, | KAVQQPDGLAVLGIFLKVGSAKPGLQKVVDVLDSIKTKGKSADF | | |
| D72F, V241F, | TNFDPRGLLPESLDYWTYPGSLTTPPLLECVTWIVLKEPISVSSEQ | | |
| P249L); stop) | VLKFRKLNFNGEGEPEELMFDNWRPAQLLKNRQIKASFK | | |
| OT-002179 (Met; | MALPVTALLLPLALLLHAARPDIQMTQTTSSLSASLGDRVTISCR | 211118 | 211126 |
| CD8α leader; | ASQDISKYLNWYQQKPDGTVKLLIYHTSRLHSGVPSRFSGSGSGT | | |
| CD19 scFv; | DYSLTISNLEQEDIATYFCQQGNTLPYTFGGGTKLEITGGGGSGG | | |
| CD8α hinge-TM; | GGSGGGGSEVKLQESGPGLVAPSQSLSVTCTVSGVSLPDYGVSW | | |
| 4-1BB | IRQPPRKGLEWLGVIWGSETTYYNSALKSRLTIIKDNSKSQVFLK | | |
| intracellular | MNSLQTDDTAIYYCAKHYYYGGSYAMDYWGQGTSVTVSSTTTP | | |
| signaling | APRPPTPAPTIASQPLSLRPEACRPAAGGAVHTRGLDFACDIYIWA | | |
| domain; | PLAGTCGVLLLSLVITLYCKRGRKKLLYIFKQPFMRPVQTTQEED | | |
| CD3 zeta | GCSCRFPEEEEGGCELRVKFSRSADAPAYKQGQNQLYNELNLGR | | |
| signaling | REEYDVLDKRRGRDPEMGGKPRRKNPQEGLYNELQKDKMAEA | | |
| domain; | YSEIGMKGERRRGKGHDGLYQGLSTATKDTYDALHMQALPPRG | | |
| Linker (GS); | SSHHWGYGKHNGPEHWHKDFPIAKGERQSPVDIDTHTAKYDPSL | | |
| CA2 | KPLSVSYDQATSLRILNNGHAFNVEFLDSQDKAVLKGGPLDGNY | | |
| (aa 2-260 | RLIQFHFHWGSLDGQGSEHTVDKKKYAAELHLVHWNTKYGDFG | | |
| of WT, | KAVQQPDGLAVLGIFLKVGSAKPGLQKVVDVLDSIKTKGKSADF | | |
| D71L, T87N, | TNFDPRGLLPESLDYWTYPGSLTTPPLLECVTWIVLKEPISVSSEQ | | |
| L250R); stop) | VLKFRKLNFNGEGEPEELMVDNWRPAQPRKNRQIKASFK | | |
| OT-002180 (Met; | MALPVTALLLPLALLLHAARPDIQMTQTTSSLSASLGDRVTISCR | 211119 | 211127 |
| CD8α leader; | ASQDISKYLNWYQQKPDGTVKLLIYHTSRLHSGVPSRFSGSGSGT | | |
| CD19 scFv; | DYSLTISNLEQEDIATYFCQQGNTLPYTFGGGTKLEITGGGGSGG | | |
| CD8α hinge-TM; | GGSGGGGSEVKLQESGPGLVAPSQSLSVTCTVSGVSLPDYGVSW | | |
| 4-1BB | IRQPPRKGLEWLGVIWGSETTYYNSALKSRLTIIKDNSKSQVFLK | | |
| intracellular | MNSLQTDDTAIYYCAKHYYYGGSYAMDYWGQGTSVTVSSTTTP | | |
| signaling | APRPPTPAPTIASQPLSLRPEACRPAAGGAVHTRGLDFACDIYIWA | | |
| domain; | PLAGTCGVLLLSLVITLYCKRGRKKLLYIFKQPFMRPVQTTQEED | | |
| CD3 zeta | GCSCRFPEEEEGGCELRVKFSRSADAPAYKQGQNQLYNELNLGR | | |
| signaling | REEYDVLDKRRGRDPEMGGKPRRKNPQEGLYNELQKDKMAEA | | |
| domain; | YSEIGMKGERRRGKGHDGLYQGLSTATKDTYDALHMQALPPRG | | |
| Linker (GS); | SSHHWGYGKHNGPEHWHKDFPIAKGERQSPVDIDTHTAKYDPSL | | |
| CA2 | KPLSVSYDQATSLRILNNGHAFNVEFDDSQDKAVLKGGPLDGTY | | |
| (aa 2-260 | RLIQFHFHWGSLDGQGSEHTVDKKKYAAELHLVHWNTKYGDFG | | |
| of WT, | KAVQQPDGLAVLGIFLKVGSAKPGLQKVVDVLDSIKTKGKSADF | | |
| L183S); stop) | TNFDPRGSLPESLDYWTYPGSLTTPPLLECVTWIVLKEPISVSSEQ | | |
| | VLKFRKLNFNGEGEPEELMVDNWRPAQPLKNRQIKASFK | | |

### CA2 CD40L Effector Modules

[0355] In some embodiments, CA2 DDs described herein may be appended to CD40L. Table 13 provides an exemplary CA2 DD appended to CD40L. Table 12 provides construct components to prepare a regulated CD40L CA2 construct as listed in Table 13. In Table 13, “*” represents the translation of the stop codon.

TABLE 12
CA2 CD40L construct components

| | AA SEQ ID | NA SEQ ID |
|---|---|---|
| Component | NO. | NO. |
| Linker (GGSGGGSGGGSG) | 210882 | 210883 |
| CD40L | 13148 | 210920 |
| CA2 (L156H) | 210602 | 210603 |

TABLE 13
CA2 CD40L constructs

| | | AA | NA |
|---|---|---|---|
| | | SEQ | SEQ |
| | | ID | ID |
| ID | AA Sequence | NO. | NO. |
| OT-001990 | MSHHWGYGKHNGPEHWHKDFPIAKG | 210927 | 210928 |
| (CA2 | ERQSPVDIDTHTAKYDPSLKPLSVS | | |
| (L156H); | YDQATSLRILNNGHAFNVEFDDSQD | | |
| Linker | KAVLKGGPLDGTYRLIQFHFHWGSL | | |
| (GGSGGGS | DGQGSEHTVDKKKYAAELHLVHWNT | | |
| GGGSG); | KYGDFGKAVQQPDGLAVLGIFLKVG | | |
| CD40L; | SAKPGHQKVVDVLDSIKTKGKSADF | | |
| stop) | TNFDPRGLLPESLDYWTYPGSLTTP | | |
| | PLLECVTWIVLKEPISVSSEQVLKF | | |
| | RKLNFNGEGEPEELMVDNWRPAQPL | | |
| | KNRQIKASFKGGSGGGSGGGSGMIE | | |
| | TYNQTSPRSAATGLPISMKIFMYLL | | |
| | TVFLITQMIGSALFAVYLHRRLDKI | | |
| | EDERNLHEDFVFMKTIQRCNTGERS | | |
| | LSLLNCEEIKSQFEGFVKDIMLNKE | | |
| | ETKKENSFEMQKGDQNPQIAAHVIS | | |
| | EASSKTTSVLQWAEKGYYTMSNNLV | | |
| | TLENGKQLTVKRQGLYYIYAQVTFC | | |
| | SNREASSQAPFIASLCLKSPGRFER | | |
| | ILLRAANTHSSAKPCGQQSIHLGGV | | |
| | FELQPGASVFVNVTDPSQVSHGTGF | | |
| | TSFGLLKL* | | |

CA2 mbIL12 with CAR Effector Modules

[0356] In some embodiments, CA2 DDs described herein may be appended to membrane bound IL12 herein referred to as “mbIL12”. Table 15 provides CA2 DDs appended to mbIL12 payloads. Such effector modules may further be operably linked to any of the CARs described herein Membrane associated IL12 constructs in tandem with CD19 CAR are provided in Table 15. Any of the DD described herein may be combined with the construct components in Table 14 to prepare regulated membrane bound IL12 constructs listed in Table 15. In Table 15, “*” represents the translation of the stop codon

TABLE 14
CA2 mbIL2 with CAR construct components

| | AA | NA |
|---|---|---|
| | SEQ | SEQ |
| | ID | ID |
| Component | NO. | NO. |
| CD8a Leader | 207570 | 207571 |
| IL 12b (p40) Leader | 207912 | 207918 |
| Linker (GS) | GS | GGATCA; |
| | | GGATCC |
| Linker (G4S)3 | 208369 | 208373 |
| Linker (GS)15 | 210880 | 210881 |
| CD19scFV | 205092 | 205098 |
| CD8a Hinge and | 205909 | 205910; |
| Transmembrane Domain | | 205911 |
| 4-1BB intracellular | 206147 | 206154 |
| domain | | |
| CD3 zeta intracellular | 206033 | 206039 |
| domain | | |
| P2A Cleavage Site | 208337 | 208338 |
| IL12B(p40) (23-328 | 210884 | 210890 |
| of WT) | | |
| IL12A(p35) (57-253 | 210898 | 210907 |
| of WT) | | |
| CA2 (aa2-260 of WT, | 210598 | 210599 |
| I59N, G102R) | | |
| CA2 (aa2-260 of WT, | 210600 | 210601 |
| L156H) | | |
| CA2 (aa 2-260 of WT, | 210748 | 210749 |
| G63D, E69V, N231I) | | |
| CA2 (aa 2-260 of WT, | 210702 | 210703 |
| R27L, T87I, H122Y, N252D) | | |

TABLE 15
CA2 mbIL2 with CAR constructs

| | | AA | NA |
|---|---|---|---|
| | | SEQ | SEQ |
| | | ID | ID |
| ID | AA Sequence | NO. | NO. |
| OT-002007 (CD8a | MALPVTALLLPLALLLHAARPDIQMTQTTSSLSASLGDRVTISCRASQD | 210949 | 210950 |
| Leader, CD19 | ISKYLNWYQQKPDGTVKLLIYHTSRLHSGVPSRFSGSGSGTDYSLTISN | | |
| scFV; | LEQEDIATYFCQQGNTLPYTFGGGTKLEITGGGGSGGGGSGGGGSEVK | | |
| CD8a Hinge and | LQESGPGLVAPSQSLSVTCTVSGVSLPDYGVSWIRQPPRKGLEWLGVI | | |
| Transmembrane | WGSETTYYNSALKSRLTIIKDNSKSQVFLKMNSLQTDDTAIYYCAKHY | | |
| Domain; 4-1BB | YYGGSYAMDYWGQGTSVTVSSTTTPAPRPPTPAPTIASQPLSLRPEACR | | |
| intracellular | PAAGGAVHTRGLDFACDIYIWAPLAGTCGVLLLSLVITLYCKRGRKKL | | |
| domain; | LYIFKQPFMRPVQTTQEEDGCSCRFPEEEEGGCELRVKFSRSADAPAYK | | |
| CD3 zeta | QGQNQLYNELNLGRREEYDVLDKRRGRDPEMGGKPRRKNPQEGLYN | | |
| intracellular | ELQKDKMAEAYSEIGMKGERRRGKGHDGLYQGLSTATKDTYDALHM | | |
| domain; | QALPPRGSATNFSLLKQAGDVEENPGPMCHQQLVISWFSLVFLASPLV | | |
| Linker (GS) | AIWELKKDVYVVELDWYPDAPGEMVVLTCDTPEEDGITWTLDQSSEV | | |
| (BamH1 site); | LGSGKTLTIQVKEFGDAGQYTCHKGGEVLSHSLLLLHKKEDGIWSTDI | | |
| P2A Cleavage | LKDQKEPKNKTFLRCEAKNYSGRFTCWWLTTISTDLTFSVKSSRGSSD | | |
| Site; IL12b | PQGVTCGAATLSAERVRGDNKEYEYSVECQEDSACPAAEESLPIEVMV | | |
| (p40) Leader, | DAVHKLKYENYTSSFFIRDIIKPDPPKNLQLKPLKNSRQVEVSWEYPDT | | |
| IL12B (p40) | WSTPHSYFSLTFCVQVQGKSKREKKDRVFTDKTSATVICRKNASISVR | | |
| (23-328 of | AQDRYYSSSWSEWASVPCSGGGGSGGGGSGGGGSRNLPVATPDPGMF | | |
| WT); Linker | PCLHHSQNLLRAVSNMLQKARQTLEFYPCTSEEIDHEDITKDKTSTVEA | | |
| ((G4S)3); | CLPLELTKNESCLNSRETSFITNGSCLASRKTSFMMALCLSSIYEDLKM | | |
| IL12A (p35) | YQVEFKTMNAKLLMDPKRQIFLDQNMLAVIDELMQALNFNSETVPQK | | |
| (57-253 | SSLEEPDFYKTKIKLCILLHAFRIRAVTIDRVMSYLNASGSGSGSGSGSG | | |
| of WT); | SGSGSGSGSGSGSGSGSGSTTTPAPRPPTPAPTIASQPLSLRPEACRPAA | | |
| Linker | GGAVHTRGLDFACDIYIWAPLAGTCGVLLLSLVITLYCGSSHHWGYGK | | |
| ((GS)15); | HNGPEHWHKDFPIAKGERQSPVDIDTHTAKYDPSLKPLSVSYDQATSL | | |
| CD8a Hinge | RNLNNGHAFNVEFDDSQDKAVLKGGPLDGTYRLIQFHFHWGSLDRQG | | |
| and | SEHTVDKKKYAAELHLVHWNTKYGDFGKAVQQPDGLAVLGIFLKVG | | |
| Transmembrane | SAKPGLQKVVDVLDSIKTKGKSADFTNFDPRGLLPESLDYWTYPGSLT | | |
| Domain; 4-1BB | TPPLLECVTWIVLKEPISVSSEQVLKFRKLNFNGEGEPEELMVDNWRPA | | |
| intracellular | QPLKNRQIKASFK* | | |
| domain; | | | |
| Linker (GS) | | | |
| (BamH1 site); | | | |
| CA2 (aa 2-260 | | | |
| of WT, I59N, | | | |
| G102R); Stop | | | |
| (TGA)) | | | |
| OT-002008 (CD8a | MALPVTALLLPLALLLHAARPDIQMTQTTSSLSASLGDRVTISCRASQD | 210951 | 210952 |
| Leader, | ISKYLNWYQQKPDGTVKLLIYHTSRLHSGVPSRFSGSGSGTDYSLTISN | | |
| CD19 scFV; | LEQEDIATYFCQQGNTLPYTFGGGTKLEITGGGGSGGGGSGGGGSEVK | | |
| CD8a Hinge and | LQESGPGLVAPSQSLSVTCTVSGVSLPDYGVSWIRQPPRKGLEWLGVI | | |
| Transmembrane | WGSETTYYNSALKSRLTIIKDNSKSQVFLKMNSLQTDDTAIYYCAKHY | | |
| Domain; 4-1BB | YYGGSYAMDYWGQGTSVTVSSTTTPAPRPPTPAPTIASQPLSLRPEACR | | |
| intracellular | PAAGGAVHTRGLDFACDIYIWAPLAGTCGVLLLSLVITLYCKRGRKKL | | |
| domain; | LYIFKQPFMRPVQTTQEEDGCSCRFPEEEEGGCELRVKFSRSADAPAYK | | |
| CD3 zeta | QGQNQLYNELNLGRREEYDVLDKRRGRDPEMGGKPRRKNPQEGLYN | | |
| intracellular | ELQKDKMAEAYSEIGMKGERRRGKGHDGLYQGLSTATKDTYDALHM | | |
| domain; | QALPPRGSATNFSLLKQAGDVEENPGPMCHQQLVISWFSLVFLASPLV | | |
| Linker (GS) | AIWELKKDVYVVELDWYPDAPGEMVVLTCDTPEEDGITWTLDQSSEV | | |
| (BamH1 site); | LGSGKTLTIQVKEFGDAGQYTCHKGGEVLSHSLLLLHKKEDGIWSTDI | | |
| P2A Cleavage | LKDQKEPKNKTFLRCEAKNYSGRFTCWWLTTISTDLTFSVKSSRGSSD | | |
| Site; IL12b | PQGVTCGAATLSAERVRGDNKEYEYSVECQEDSACPAAEESLPIEVMV | | |
| (p40) Leader, | DAVHKLKYENYTSSFFIRDIIKPDPPKNLQLKPLKNSRQVEVSWEYPDT | | |
| IL12B (p40) | WSTPHSYFSLTFCVQVQGKSKREKKDRVFTDKTSATVICRKNASISVR | | |
| (23-328 of WT); | AQDRYYSSSWSEWASVPCSGGGGSGGGGSGGGGSRNLPVATPDPGMF | | |
| Linker ((G4S)3); | PCLHHSQNLLRAVSNMLQKARQTLEFYPCTSEEIDHEDITKDKTSTVEA | | |
| IL12A (p35) | CLPLELTKNESCLNSRETSFITNGSCLASRKTSFMMALCLSSIYEDLKM | | |
| (57-253 | YQVEFKTMNAKLLMDPKRQIFLDQNMLAVIDELMQALNFNSETVPQK | | |
| of WT); Linker | SSLEEPDFYKTKIKLCILLHAFRIRAVTIDRVMSYLNASGSGSGSGSGSG | | |
| ((GS)15); CD8a | SGSGSGSGSGSGSGSGSGSTTTPAPRPPTPAPTIASQPLSLRPEACRPAA | | |
| Hinge and | GGAVHTRGLDFACDIYIWAPLAGTCGVLLLSLVITLYCGSSHHWGYGK | | |
| Transmembrane | HNGPEHWHKDFPIAKGERQSPVDIDTHTAKYDPSLKPLSVSYDQATSL | | |
| Domain; 4-1BB | RILNNGHAFNVEFDDSQDKAVLKGGPLDGTYRLIQFHFHWGSLDGQG | | |
| intracellular | SEHTVDKKKYAAELHLVHWNTKYGDFGKAVQQPDGLAVLGIFLKVG | | |
| domain; | SAKPGHQKVVDVLDSIKTKGKSADFTNFDPRGLLPESLDYWTYPGSLT | | |
| Linker (GS) | TPPLLECVTWIVLKEPISVSSEQVLKFRKLNFNGEGEPEELMVDNWRPA | | |
| (BamH1 site); | QPLKNRQIKASFK* | | |
| CA2 (aa 2-260 | | | |
| of WT, L156H); | | | |
| Stop (TGA)) | | | |
| OT-002009 (CD8a | MALPVTALLLPLALLLHAARPDIQMTQTTSSLSASLGDRVTISCRASQD | 210953 | 210954 |
| Leader, | ISKYLNWYQQKPDGTVKLLIYHTSRLHSGVPSRFSGSGSGTDYSLTISN | | |
| CD19 scFV; | LEQEDIATYFCQQGNTLPYTFGGGTKLEITGGGGSGGGGSGGGGSEVK | | |
| CD8a Hinge and | LQESGPGLVAPSQSLSVTCTVSGVSLPDYGVSWIRQPPRKGLEWLGVI | | |
| Transmembrane | WGSETTYYNSALKSRLTIIKDNSKSQVFLKMNSLQTDDTAIYYCAKHY | | |
| Domain; 4-1BB | YYGGSYAMDYWGQGTSVTVSSTTTPAPRPPTPAPTIASQPLSLRPEACR | | |
| intracellular | PAAGGAVHTRGLDFACDIYIWAPLAGTCGVLLLSLVITLYCKRGRKKL | | |
| domain; | LYIFKQPFMRPVQTTQEEDGCSCRFPEEEEGGCELRVKFSRSADAPAYK | | |
| CD3 zeta | QGQNQLYNELNLGRREEYDVLDKRRGRDPEMGGKPRRKNPQEGLYN | | |
| intracellular | ELQKDKMAEAYSEIGMKGERRRGKGHDGLYQGLSTATKDTYDALHM | | |
| domain; | QALPPRGSATNFSLLKQAGDVEENPGPMCHQQLVISWFSLVFLASPLV | | |
| Linker (GS) | AIWELKKDVYVVELDWYPDAPGEMVVLTCDTPEEDGITWTLDQSSEV | | |
| (BamH1 site); | LGSGKTLTIQVKEFGDAGQYTCHKGGEVLSHSLLLLHKKEDGIWSTDI | | |
| P2A Cleavage | LKDQKEPKNKTFLRCEAKNYSGRFTCWWLTTISTDLTFSVKSSRGSSD | | |
| Site; IL12b | PQGVTCGAATLSAERVRGDNKEYEYSVECQEDSACPAAEESLPIEVMV | | |
| (p40) Leader, | DAVHKLKYENYTSSFFIRDIIKPDPPKNLQLKPLKNSRQVEVSWEYPDT | | |
| IL12B (p40) | WSTPHSYFSLTFCVQVQGKSKREKKDRVFTDKTSATVICRKNASISVR | | |
| (23-328 of WT); | AQDRYYSSSWSEWASVPCSGGGGSGGGGSGGGGSRNLPVATPDPGMF | | |
| Linker ((G4S)3); | PCLHHSQNLLRAVSNMLQKARQTLEFYPCTSEEIDHEDITKDKTSTVEA | | |
| IL12A (p35) | CLPLELTKNESCLNSRETSFITNGSCLASRKTSFMMALCLSSIYEDLKM | | |
| (57-253 | YQVEFKTMNAKLLMDPKRQIFLDQNMLAVIDELMQALNFNSETVPQK | | |
| of WT); Linker | SSLEEPDFYKTKIKLCILLHAFRIRAVTIDRVMSYLNASGSGSGSGSGSG | | |
| ((GS)15); CD8a | SGSGSGSGSGSGSGSGSGSTTTPAPRPPTPAPTIASQPLSLRPEACRPAA | | |
| Hinge and | GGAVHTRGLDFACDIYIWAPLAGTCGVLLLSLVITLYCGSSHHWGYGK | | |
| Transmembrane | HNGPEHWHKDFPIAKGERQSPVDIDTHTAKYDPSLKPLSVSYDQATSL | | |
| Domain; 4-1BB | RILNNGHAFNVEFDDSQDKAVLKGGPLDGTYRLIQFHFHWGSLDGQG | | |
| intracellular | SEHTVDKKKYAAELHLVHWNTKYGDFGKAVQQPDGLAVLGIFLKVG | | |
| domain; | SAKPGHQKVVDVLDSIKTKGKSADFTNFDPRGLLPESLDYWTYPGSLT | | |
| Linker (GS) | TPPLLECVTWIVLKEPISVSSEQVLKFRKLNFNGEGEPEELMVDNWRPA | | |
| (BamH1 site); | QPLKNRQIKASFK* | | |
| CA2 (aa 2-260 | | | |
| of WT, L156H); | | | |
| Stop (TGA)) | | | |
| OT-002010 (CD8a | MALPVTALLLPLALLLHAARPDIQMTQTTSSLSASLGDRVTISCRASQD | 210955 | 210956 |
| Leader, | ISKYLNWYQQKPDGTVKLLIYHTSRLHSGVPSRFSGSGSGTDYSLTISN | | |
| CD19 scFV; | LEQEDIATYFCQQGNTLPYTFGGGTKLEITGGGGSGGGGSGGGGSEVK | | |
| CD8a Hinge and | LQESGPGLVAPSQSLSVTCTVSGVSLPDYGVSWIRQPPRKGLEWLGVI | | |
| Transmembrane | WGSETTYYNSALKSRLTIIKDNSKSQVFLKMNSLQTDDTAIYYCAKHY | | |
| Domain; 4-1BB | YYGGSYAMDYWGQGTSVTVSSTTTPAPRPPTPAPTIASQPLSLRPEACR | | |
| intracellular | PAAGGAVHTRGLDFACDIYIWAPLAGTCGVLLLSLVITLYCKRGRKKL | | |
| domain; | LYIFKQPFMRPVQTTQEEDGCSCRFPEEEEGGCELRVKFSRSADAPAYK | | |
| CD3 zeta | QGQNQLYNELNLGRREEYDVLDKRRGRDPEMGGKPRRKNPQEGLYN | | |
| intracellular | ELQKDKMAEAYSEIGMKGERRRGKGHDGLYQGLSTATKDTYDALHM | | |
| domain; | QALPPRGSATNFSLLKQAGDVEENPGPMCHQQLVISWFSLVFLASPLV | | |
| Linker (GS) | AIWELKKDVYVVELDWYPDAPGEMVVLTCDTPEEDGITWTLDQSSEV | | |
| (BamH1 site); | LGSGKTLTIQVKEFGDAGQYTCHKGGEVLSHSLLLLHKKEDGIWSTDI | | |
| P2A Cleavage | LKDQKEPKNKTFLRCEAKNYSGRFTCWWLTTISTDLTFSVKSSRGSSD | | |
| Site; IL12b | PQGVTCGAATLSAERVRGDNKEYEYSVECQEDSACPAAEESLPIEVMV | | |
| (p40) Leader, | DAVHKLKYENYTSSFFIRDIIKPDPPKNLQLKPLKNSRQVEVSWEYPDT | | |
| IL12B (p40) | WSTPHSYFSLTFCVQVQGKSKREKKDRVFTDKTSATVICRKNASISVR | | |
| (23-328 of WT); | AQDRYYSSSWSEWASVPCSGGGGSGGGGSGGGGSRNLPVATPDPGMF | | |
| Linker ((G4S)3); | PCLHHSQNLLRAVSNMLQKARQTLEFYPCTSEEIDHEDITKDKTSTVEA | | |
| IL12A (p35) | CLPLELTKNESCLNSRETSFITNGSCLASRKTSFMMALCLSSIYEDLKM | | |
| (57-253 | YQVEFKTMNAKLLMDPKRQIFLDQNMLAVIDELMQALNFNSETVPQK | | |
| of WT); Linker | SSLEEPDFYKTKIKLCILLHAFRIRAVTIDRVMSYLNASGSGSGSGSGSG | | |
| ((GS)15); CD8a | SGSGSGSGSGSGSGSGSGSTTTPAPRPPTPAPTIASQPLSLRPEACRPAA | | |
| Hinge and | GGAVHTRGLDFACDIYIWAPLAGTCGVLLLSLVITLYCGSSHHWGYGK | | |
| Transmembrane | HNGPEHWHKDFPIAKGERQSPVDIDTHTAKYDPSLKPLSVSYDQATSL | | |
| Domain; 4-1BB | RILNNDHAFNVVFDDSQDKAVLKGGPLDGTYRLIQFHFHWGSLDGQG | | |
| intracellular | SEHTVDKKKYAAELHLVHWNTKYGDFGKAVQQPDGLAVLGIFLKVG | | |
| domain; | SAKPGLQKVVDVLDSIKTKGKSADFTNFDPRGLLPESLDYWTYPGSLT | | |
| Linker (GS) | TPPLLECVTWIVLKEPISVSSEQVLKFRKLNFIGEGEPEELMVDNWRPA | | |
| (BamH1 site); | QPLKNRQIKASFK* | | |
| CA2 (aa 2-260 | | | |
| of WT, G63D, | | | |
| E69V, N231I); | | | |
| Stop (TGA)) | | | |
| OT-002012 (CD8a | MALPVTALLLPLALLLHAARPDIQMTQTTSSLSASLGDRVTISCRASQD | 210957 | 210958 |
| Leader, | ISKYLNWYQQKPDGTVKLLIYHTSRLHSGVPSRFSGSGSGTDYSLTISN | | |
| CD19 scFV; | LEQEDIATYFCQQGNTLPYTFGGGTKLEITGGGGSGGGGSGGGGSEVK | | |
| CD8a Hinge and | LQESGPGLVAPSQSLSVTCTVSGVSLPDYGVSWIRQPPRKGLEWLGVI | | |
| Transmembrane | WGSETTYYNSALKSRLTIIKDNSKSQVFLKMNSLQTDDTAIYYCAKHY | | |
| Domain; 4-1BB | YYGGSYAMDYWGQGTSVTVSSTTTPAPRPPTPAPTIASQPLSLRPEACR | | |
| intracellular | PAAGGAVHTRGLDFACDIYIWAPLAGTCGVLLLSLVITLYCKRGRKKL | | |
| domain; | LYIFKQPFMRPVQTTQEEDGCSCRFPEEEEGGCELRVKFSRSADAPAYK | | |
| CD3 zeta | QGQNQLYNELNLGRREEYDVLDKRRGRDPEMGGKPRRKNPQEGLYN | | |
| intracellular | ELQKDKMAEAYSEIGMKGERRRGKGHDGLYQGLSTATKDTYDALHM | | |
| domain; | QALPPRGSATNFSLLKQAGDVEENPGPMCHQQLVISWFSLVFLASPLV | | |
| Linker (GS) | AIWELKKDVYVVELDWYPDAPGEMVVLTCDTPEEDGITWTLDQSSEV | | |
| (BamH1 site); | LGSGKTLTIQVKEFGDAGQYTCHKGGEVLSHSLLLLHKKEDGIWSTDI | | |
| P2A Cleavage | LKDQKEPKNKTFLRCEAKNYSGRFTCWWLTTISTDLTFSVKSSRGSSD | | |
| Site; IL12b | PQGVTCGAATLSAERVRGDNKEYEYSVECQEDSACPAAEESLPIEVMV | | |
| (p40) Leader, | DAVHKLKYENYTSSFFIRDIIKPDPPKNLQLKPLKNSRQVEVSWEYPDT | | |
| IL12B (p40) | WSTPHSYFSLTFCVQVQGKSKREKKDRVFTDKTSATVICRKNASISVR | | |
| (23-328 of WT); | AQDRYYSSSWSEWASVPCSGGGGSGGGGSGGGGSRNLPVATPDPGMF | | |
| Linker ((G4S)3); | PCLHHSQNLLRAVSNMLQKARQTLEFYPCTSEEIDHEDITKDKTSTVEA | | |
| IL12A (p35) | CLPLELTKNESCLNSRETSFITNGSCLASRKTSFMMALCLSSIYEDLKM | | |
| (57-253 | YQVEFKTMNAKLLMDPKRQIFLDQNMLAVIDELMQALNFNSETVPQK | | |
| of WT); Linker | SSLEEPDFYKTKIKLCILLHAFRIRAVTIDRVMSYLNASGSGSGSGSGSG | | |
| ((GS)15); CD8a | SGSGSGSGSGSGSGSGSGSTTTPAPRPPTPAPTIASQPLSLRPEACRPAA | | |
| Hinge and | GGAVHTRGLDFACDIYIWAPLAGTCGVLLLSLVITLYCGSSHHWGYGK | | |
| Transmembrane | HNGPEHWHKDFPIAKGELQSPVDIDTHTAKYDPSLKPLSVSYDQATSL | | |
| Domain; 4-1BB | RILNNGHAFNVEFDDSQDKAVLKGGPLDGIYRLIQFHFHWGSLDGQGS | | |
| intracellular | EHTVDKKKYAAELHLVYWNTKYGDFGKAVQQPDGLAVLGIFLKVGS | | |
| domain; | AKPGLQKVVDVLDSIKTKGKSADFTNFDPRGLLPESLDYWTYPGSLTT | | |
| Linker (GS) | PPLLECVTWIVLKEPISVSSEQVLKFRKLNFNGEGEPEELMVDNWRPA | | |
| (BamH1 site); | QPLKDRQIKASFK* | | |
| CA2 (aa 2-260 | | | |
| of WT, R27L, | | | |
| T87I, H122Y, | | | |
| N252D); | | | |
| Stop (TGA)) | | | |
| OT-001895 (CD8a | MALPVTALLLPLALLLHAARPDIQMTQTTSSLSASLGDRVTISCRASQD | 210959 | 210960 |
| leader; | ISKYLNWYQQKPDGTVKLLIYHTSRLHSGVPSRFSGSGSGTDYSLTISN | | |
| CD19 scFv; | LEQEDIATYFCQQGNTLPYTFGGGTKLEITGGGGSGGGGSGGGGSEVK | | |
| CD8a Hinge and | LQESGPGLVAPSQSLSVTCTVSGVSLPDYGVSWIRQPPRKGLEWLGVI | | |
| Transmembrane | WGSETTYYNSALKSRLTIIKDNSKSQVFLKMNSLQTDDTAIYYCAKHY | | |
| Domain; 4-1BB | YYGGSYAMDYWGQGTSVTVSSTTTPAPRPPTPAPTIASQPLSLRPEACR | | |
| intracellular | PAAGGAVHTRGLDFACDIYIWAPLAGTCGVLLLSLVITLYCKRGRKKL | | |
| domain (CD28 | LYIFKQPFMRPVQTTQEEDGCSCRFPEEEEGGCELRVKFSRSADAPAYK | | |
| co-stimula- | QGQNQLYNELNLGRREEYDVLDKRRGRDPEMGGKPRRKNPQEGLYN | | |
| tory domain); | ELQKDKMAEAYSEIGMKGERRRGKGHDGLYQGLSTATKDTYDALHM | | |
| CD3 zeta | QALPPRGSATNFSLLKQAGDVEENPGPMCHQQLVISWFSLVFLASPLV | | |
| intracellular | AIWELKKDVYVVELDWYPDAPGEMVVLTCDTPEEDGITWTLDQSSEV | | |
| domain; | LGSGKTLTIQVKEFGDAGQYTCHKGGEVLSHSLLLLHKKEDGIWSTDI | | |
| Linker (GS); | LKDQKEPKNKTFLRCEAKNYSGRFTCWWLTTISTDLTFSVKSSRGSSD | | |
| P2A | PQGVTCGAATLSAERVRGDNKEYEYSVECQEDSACPAAEESLPIEVMV | | |
| Cleavage Site; | DAVHKLKYENYTSSFFIRDIIKPDPPKNLQLKPLKNSRQVEVSWEYPDT | | |
| IL12B leader; | WSTPHSYFSLTFCVQVQGKSKREKKDRVFTDKTSATVICRKNASISVR | | |
| Interleukin- | AQDRYYSSSWSEWASVPCSGGGGSGGGGSGGGGSRNLPVATPDPGMF | | |
| 12 subunit | PCLHHSQNLLRAVSNMLQKARQTLEFYPCTSEEIDHEDITKDKTSTVEA | | |
| beta (p40) | CLPLELTKNESCLNSRETSFITNGSCLASRKTSFMMALCLSSIYEDLKM | | |
| (23-328 of WT); | YQVEFKTMNAKLLMDPKRQIFLDQNMLAVIDELMQALNFNSETVPQK | | |
| Linker (G4S)3; | SSLEEPDFYKTKIKLCILLHAFRIRAVTIDRVMSYLNASGSGSGSGSGSG | | |
| Interleukin-12 | SGSGSGSGSGSGSGSGSGSTTTPAPRPPTPAPTIASQPLSLRPEACRPAA | | |
| subunit alpha | GGAVHTRGLDFACDIYIWAPLAGTCGVLLLSLVITLYCGS* | | |
| (p35) | | | |
| (57-253 of WT); | | | |
| Linker | | | |
| ((GS)15); | | | |
| CD8a Hinge and | | | |
| Transmembrane | | | |
| Domain; Linker | | | |
| (GS); stop) | | | |
| OT-002113 (CD8a | MALPVTALLLPLALLLHAARPDIQMTQTTSSLSASLGDRVTISCRASQD | 210961 | 210962 |
| Leader, CD19 | ISKYLNWYQQKPDGTVKLLIYHTSRLHSGVPSRFSGSGSGTDYSLTISN | | |
| scFV; CD8a | LEQEDIATYFCQQGNTLPYTFGGGTKLEITGGGGSGGGGSGGGGSEVK | | |
| Hinge and | LQESGPGLVAPSQSLSVTCTVSGVSLPDYGVSWIRQPPRKGLEWLGVI | | |
| Transmembrane | WGSETTYYNSALKSRLTIIKDNSKSQVFLKMNSLQTDDTAIYYCAKHY | | |
| Domain; 4-1BB | YYGGSYAMDYWGQGTSVTVSSTTTPAPRPPTPAPTIASQPLSLRPEACR | | |
| intracellular | PAAGGAVHTRGLDFACDIYIWAPLAGTCGVLLLSLVITLYCKRGRKKL | | |
| signaling | LYIFKQPFMRPVQTTQEEDGCSCRFPEEEEGGCELRVKFSRSADAPAYK | | |
| domain; | QGQNQLYNELNLGRREEYDVLDKRRGRDPEMGGKPRRKNPQEGLYN | | |
| CD3 zeta | ELQKDKMAEAYSEIGMKGERRRGKGHDGLYQGLSTATKDTYDALHM | | |
| signaling | QALPPRGSATNFSLLKQAGDVEENPGPMCHQQLVISWFSLVFLASPLV | | |
| domain; | AIWELKKDVYVVELDWYPDAPGEMVVLTCDTPEEDGITWTLDQSSEV | | |
| Linker (GS); | LGSGKTLTIQVKEFGDAGQYTCHKGGEVLSHSLLLLHKKEDGIWSTDI | | |
| P2A cleavage | LKDQKEPKNKTFLRCEAKNYSGRFTCWWLTTISTDLTFSVKSSRGSSD | | |
| site; Met; | PQGVTCGAATLSAERVRGDNKEYEYSVECQEDSACPAAEESLPIEVMV | | |
| Interleukin- | DAVHKLKYENYTSSFFIRDIIKPDPPKNLQLKPLKNSRQVEVSWEYPDT | | |
| 12 subunit | WSTPHSYFSLTFCVQVQGKSKREKKDRVFTDKTSATVICRKNASISVR | | |
| beta (p40) | AQDRYYSSSWSEWASVPCSGGGGSGGGGSGGGGSRNLPVATPDPGMF | | |
| Leader, IL12B | PCLHHSQNLLRAVSNMLQKARQTLEFYPCTSEEIDHEDITKDKTSTVEA | | |
| (p40) (23-328 | CLPLELTKNESCLNSRETSFITNGSCLASRKTSFMMALCLSSIYEDLKM | | |
| of WT); Linker | YQVEFKTMNAKLLMDPKRQIFLDQNMLAVIDELMQALNFNSETVPQK | | |
| ((G4S)3); | SSLEEPDFYKTKIKLCILLHAFRIRAVTIDRVMSYLNASGSGSGSGSGSG | | |
| IL12A (p35) | SGSGSGSGSGSGSGSGSGSTTTPAPRPPTPAPTIASQPLSLRPEACRPAA | | |
| (57-253 | GGAVHTRGLDFACDIYIWAPLAGTCGVLLLSLVITLYCGSSHHWGYGK | | |
| of WT); Linker | HNGPEHWHKDFPIAKGERQSPVDIDTHTAKYDPSLKPLSVSYDQATSL | | |
| (GS)15; CD8a | RILNNGHAFNVEFDDSQDKAVLKGGPLDGTYRLIQFHFHWGSLDGQG | | |
| hinge; CD8a | SEHTVDKKKYAAELHLVHWNTKYGDFGKAVQQPDGLAVLGIFLKVG | | |
| Transmembrane | SAKPGLQKVVDVLDSIKTKGKSADFTNFDPRGLLPESLDYWTYPGSLT | | |
| Domain; Linker | TPPLLECVTWIVLKEPISVSSEQVLKFRKLNFNGEGEPEELMVDNWRPA | | |
| (GS); CA2 | QPLKNRQIKASFK* | | |
| (aa 2-260 | | | |
| of WT); stop) | | | |

### II. Pharmaceutical Compositions and Formulations

[0357] The present teachings further comprise pharmaceutical compositions comprising one or more of the stimuli, CA2 biocircuits, CA2 effector modules or systems of the present disclosure, and optionally at least one pharmaceutically acceptable excipient or inert ingredient.

[0358] As used herein the term “pharmaceutical composition” refers to a preparation of one or more of the CA2 biocircuits or components described herein, or pharmaceutically acceptable salts thereof, optionally with other chemical components such as physiologically suitable carriers and excipients.

[0359] The term “excipient” or “inactive ingredient” refers to an inert or inactive substance added to a pharmaceutical composition to further facilitate administration of a compound. Non-limiting examples of such inert ingredients are disclosed herein under Formulations.

[0360] In some embodiments, compositions are administered to humans, human patients or subjects. For the purposes of the present disclosure, the phrase “active ingredient” generally refers to any one or more CA2 biocircuit component to be delivered as described herein.

[0361] Although the descriptions of pharmaceutical compositions provided herein are principally directed to pharmaceutical compositions which are suitable for administration to humans, it will be understood by the skilled artisan that such compositions are generally suitable for administration to any other animal, e.g., to non-human animals, e.g. non-human mammals. Subjects to which administration of the pharmaceutical compositions is contemplated include, but are not limited to, non-human mammals, including agricultural animals such as cattle, horses, chickens and pigs, domestic animals such as cats, dogs, or research animals such as mice, rats, rabbits, dogs and non-human primates.

[0362] A pharmaceutical composition in accordance with the disclosure may be prepared, packaged, and/or sold in bulk, as a single unit dose, and/or as a plurality of single unit doses. As used herein, a “unit dose” is discrete amount of the pharmaceutical composition comprising a predetermined amount of the active ingredient. The amount of the active ingredient is generally equal to the dosage of the active ingredient which would be administered to a subject and/or a convenient fraction of such a dosage such as, for example, one-half or one-third of such a dosage.

[0363] Relative amounts of the active ingredient, the pharmaceutically acceptable excipient or inert ingredient, and/or any additional ingredients in a pharmaceutical composition in accordance with the disclosure will vary, depending upon the identity, size, and/or condition of the subject treated and further depending upon the route by which the composition is to be administered. By way of example, the composition may comprise between 0.1% and 100%, e.g., between 0.5 and 50%, between 1-30%, between 5-80%, at least 80% (w/w) active ingredient.

[0364] Efficacy of treatment or amelioration of disease can be assessed, for example by measuring disease progression, disease remission, symptom severity, reduction in pain, quality of life, dose of a medication required to sustain a treatment effect, level of a disease marker or any other measurable parameter appropriate for a given disease being treated or targeted for prevention. It is well within the ability of one skilled in the art to monitor efficacy of treatment or prevention by measuring any one of such parameters, or any combination of parameters. In connection with the administration of compositions of the present disclosure, “effective against” for example a cancer, indicates that administration in a clinically appropriate manner results in a beneficial effect for at least a statistically significant fraction of patients, such as an improvement of symptoms, a cure, a reduction in disease load, reduction in tumor mass or cell numbers, extension of life, improvement in quality of life, or other effect generally recognized as positive by medical doctors familiar with treating the particular type of cancer.

[0365] A treatment or preventive effect is evident when there is a statistically significant improvement in one or more parameters of disease status, or by a failure to worsen or to develop symptoms where they would otherwise be anticipated. As an example, a favorable change of at least 10% in a measurable parameter of disease, and preferably at least 20%, 30%, 40%, 50% or more can be indicative of effective treatment. Efficacy for a given composition or formulation of the present disclosure can also be judged using an experimental animal model for the given disease as known in the art. When using an experimental animal model, efficacy of treatment is evidenced when a statistically significant change is observed.

### Formulations

[0366] The compositions of the present disclosure may be formulated in any manner suitable for delivery. The formulation may be, but is not limited to, nanoparticles, poly (lactic-co-glycolic acid) (PLGA) microspheres, lipidoids, lipoplex, liposome, polymers, carbohydrates (including simple sugars), cationic lipids and combinations thereof.

[0367] In one embodiment, the formulation is a nanoparticle which may comprise at least one lipid. The lipid may be selected from, but is not limited to, DLin-DMA, DLin-K-DMA, 98N12-5, C12-200, DLin-MC3-DMA, DLin-KC2-DMA, DODMA, PLGA, PEG, PEG-DMG and PEGylated lipids. In another aspect, the lipid may be a cationic lipid such as, but not limited to, DLin-DMA, DLin-D-DMA, DLin-MC3-DMA, DLin-KC2-DMA and DODMA.

[0368] For polynucleotides of the disclosure, the formulation may be selected from any of those taught, for example, in International Application PCT/US2012/069610, the contents of which are incorporated herein by reference in its entirety.

### Inactive Ingredients

[0369] In some embodiments, pharmaceutical or other formulations may comprise at least one excipient which is an inactive ingredient. As used herein, the term “inactive ingredient” refers to one or more inactive agents included in formulations. In some embodiments, all, none or some of the inactive ingredients which may be used in the formulations of the present disclosure may be approved by the US Food and Drug Administration (FDA).

### III. Dosing, Delivery and Administrations

[0370] The compositions of the disclosure may be delivered to a cell or a subject through one or more routes and modalities. The viral vectors containing one or more CA2 biocircuits, CA2 effector modules, SREs, payloads and other components described herein may be used to deliver them to a cell and/or a subject. Other modalities may also be used such as mRNAs, plasmids, and as recombinant proteins.

### Delivery

### Naked Delivery

[0371] Pharmaceutical compositions, CA2 biocircuits, CA2 biocircuit components, CA2 effector modules including their SREs or payloads of the present disclosure may be delivered to cells, tissues, organs and/or organisms in naked form. As used herein in, the term “naked” refers to pharmaceutical compositions, CA2 biocircuits, CA2 biocircuit components, CA2 effector modules including their SREs or payloads delivered free from agents or modifications which promote transfection or permeability. The naked pharmaceutical compositions, CA2 biocircuits, CA2 biocircuit components, CA2 effector modules including their SREs or payloads may be delivered to the cells, tissues, organs and/or organisms using routes of administration known in the art and described herein. In some embodiments, naked delivery may include formulation in a simple buffer such as saline or PBS.

### Formulated Delivery

[0372] In some embodiments, pharmaceutical compositions, CA2 biocircuits, CA2 biocircuit components, CA2 effector modules including their SREs or payloads of the present disclosure may be formulated, using methods described herein. Formulations may comprise pharmaceutical compositions, CA2 biocircuits, CA2 biocircuit components, CA2 effector modules including their SREs or payloads which may be modified and/or unmodified. Formulations may further include, but are not limited to, cell penetration agents, pharmaceutically acceptable carriers, delivery agents, bioerodible or biocompatible polymers, solvents, and/or sustained-release delivery depots. Formulations of the present disclosure may be delivered to cells using routes of administration known in the art and described herein.

[0373] Pharmaceutical compositions, CA2 biocircuits, CA2 biocircuit components, CA2 effector modules including their SREs or payloads may also be formulated for direct delivery to organs or tissues in any of several ways in the art including, but not limited to, direct soaking or bathing, via a catheter, by gels, powder, ointments, creams, gels, lotions, and/or drops, by using substrates such as fabric or biodegradable materials coated or impregnated with compositions, and the like.

### Delivery to Cells

[0374] In another aspect of the disclosure, polynucleotides encoding CA2 biocircuits, CA2 effector modules, SREs (e.g., CA2 DDs), payloads of interest (e.g., immunotherapeutic agents) and compositions of the disclosure and vectors comprising said polynucleotides may be introduced into cells. As a non-limiting example, the cells may be effector immune cells.

[0375] In one aspect of the disclosure, polynucleotides encoding CA2 biocircuits, CA2 effector modules, SREs (e.g., CA2 DDs), payloads of interest (e.g., immunotherapeutic agents) and compositions of the disclosure, may be packaged into viral vectors or integrated into viral genomes allowing transient or stable expression of the polynucleotides. Preferable viral vectors are retroviral vectors including lentiviral vectors. In order to construct a retroviral vector, a polynucleotide molecule encoding a CA2 biocircuit, a CA2 effector module, a CA2 DD or a payload of interest (e.g., an immunotherapeutic agent) is inserted into the viral genome in the place of certain viral sequences to produce a virus that is replication-defective. The recombinant viral vector is then introduced into a packaging cell line containing the gag, pol, and env genes, but without the LTR and packaging components. The recombinant retroviral particles are secreted into the culture media, then collected, optionally concentrated, and used for gene transfer. Lentiviral vectors are especially preferred as they are capable of infecting both dividing and non-dividing cells.

[0376] Vectors may also be transferred to cells by non-viral methods by physical methods such as needles, electroporation, sonoporation, hyrdoporation; chemical carriers such as inorganic particles (e.g. calcium phosphate, silica, gold) and/or chemical methods. In some embodiments, synthetic or natural biodegradable agents may be used for delivery such as cationic lipids, lipid nano emulsions, nanoparticles, peptide-based vectors, or polymer-based vectors.

[0377] In some embodiments, the polypeptides of the disclosure may be delivered to the cell directly. In one embodiment, the polypeptides of the disclosure may be delivered using synthetic peptides comprising an endosomal leakage domain (ELD) fused to a cell penetration domain (CLD). The polypeptides of the disclosure are co introduced into the cell with the ELD-CLD-synthetic peptide. ELDs facilitate the escape of proteins that are trapped in the endosome, into the cytosol. Such domains are derived proteins of microbial and viral origin and have been described in the art. CPDs allow the transport of proteins across the plasma membrane and have also been described in the art. The ELD-CLD fusion proteins synergistically increase the transduction efficiency when compared to the co-transduction with either domain alone. In some embodiments, a histidine rich domain may optionally be added to the shuttle construct as an additional method of allowing the escape of the cargo from the endosome into the cytosol. The shuttle may also include a cysteine residue at the N or C terminus to generate multimers of the fusion peptide. Multimers of the ELD-CLD fusion peptides generated by the addition of cysteine residue to the terminus of the peptide show even greater transduction efficiency when compared to the single fusion peptide constructs. The polypeptides of the disclosure may also be appended to appropriate localization signals to direct the cargo to the appropriate sub-cellular location e.g. nucleus. In some embodiments any of the ELDs, CLDs or the fusion ELD-CLD synthetic peptides taught in the International Patent Publication, WO2016161516 and WO2017175072 may be useful in the present disclosure (the contents of each of which are herein incorporated by reference in their entirety).

Delivery Modalities and/or Vectors

[0378] The CA2 biocircuit systems, CA2 effector modules, SREs and/or payloads of the present disclosure may be delivered using one or more modalities. The present disclosure also provides vectors that package polynucleotides of the disclosure encoding CA2 biocircuits, CA2 effector modules, SREs (e.g., CA2 DDs) and payloads of interest, and combinations thereof. Vectors of the present disclosure may also be used to deliver the packaged polynucleotides to a cell, a local tissue site or a subject. These vectors may be of any kind, including DNA vectors, RNA vectors, plasmids, viral vectors and particles. Viral vector technology is well known and described in Sambrook et al. (2001, Molecular Cloning: A Laboratory Manual, Cold Spring Harbor Laboratory, New York). Viruses, which are useful as vectors include, but are not limited to lentiviral vectors, adenoviral vectors, adeno-associated viral (AAV) vectors, herpes simplex viral vectors, retroviral vectors, oncolytic viruses, and the like.

[0379] In general, vectors contain an origin of replication functional in at least one organism, a promoter sequence and convenient restriction endonuclease site, and one or more selectable markers e.g. a drug resistance gene.

[0380] In some embodiments, the recombinant expression vector may comprise regulatory sequences, such as transcription and translation initiation and termination codons, which are specific to the type of host cell into which the vector is to be introduced.

[0381] In some embodiments, the vector of the disclosure may comprise one or more payloads taught herein, wherein the two or more payloads may be included in one CA2 effector module. In this case, the two or more payloads are tuned by the same stimulus simultaneously. In other embodiments, the vector of the disclosure may comprise two or more CA2 effector modules, wherein each CA2 effector module comprises a different payload. In this case, the two or more CA2 effector modules and payloads are tuned by different stimuli, providing separately independent regulation of the two or more components. In other embodiments, the vector of the disclosure may comprise one or more CA2 effector modules and one or more non-CA2 effector modules, wherein each CA2 effector module comprises a different payload. In this case, the CA2 effector modules and payloads are tuned by different stimuli, providing separately independent regulation of the two or more components.

### Lentiviral Vehicles/Particles

[0382] In some embodiments, lentiviral vehicles/particles may be used as delivery modalities. Lentiviruses are subgroup of the Retroviridae family of viruses, named because reverse transcription of viral RNA genomes to DNA is required before integration into the host genome. As such, the most important features of lentiviral vehicles/particles are the integration of their genetic material into the genome of a target/host cell. Some examples of lentivirus include the Human Immunodeficiency Viruses: HIV-1 and HIV-2, the Simian Immunodeficiency Virus (SIV), feline immunodeficiency virus (FIV), bovine immunodeficiency virus (BIV), Jembrana Disease Virus (JDV), equine infectious anemia virus (EIAV), equine infectious anemia virus, visna-maedi and caprine arthritis encephalitis virus (CAEV).

[0383] Typically, lentiviral particles making up the gene delivery vehicle are replication defective on their own (also referred to as “self-inactivating”). Lentiviruses are able to infect both dividing and non-dividing cells by virtue of the entry mechanism through the intact host nuclear envelope (Naldini L et al., Curr. Opin. Biotechnol, 1998, 9: 457-463). Recombinant lentiviral vehicles/particles have been generated by multiply attenuating the HIV virulence genes, for example, the genes Env, Vif, Vpr, Vpu, Nef and Tat are deleted making the vector biologically safe. Correspondingly, lentiviral vehicles, for example, derived from HIV-1/HIV-2 can mediate the efficient delivery, integration and long-term expression of transgenes into non-dividing cells. As used herein, the term “recombinant” refers to a vector or other nucleic acid containing both lentiviral sequences and non-lentiviral retroviral sequences.

[0384] Lentiviral particles may be generated by co-expressing the virus packaging elements and the vector genome itself in a producer cell such as human HEK293T cells. These elements are usually provided in three or four separate plasmids. The producer cells are co-transfected with plasmids that encode lentiviral components including the core (i.e. structural proteins) and enzymatic components of the virus, and the envelope protein(s) (referred to as the packaging systems), and a plasmid that encodes the genome including a foreign transgene, to be transferred to the target cell, the vehicle itself (also referred to as the transfer vector). In general, the plasmids or vectors are included in a producer cell line. The plasmids/vectors are introduced via transfection, transduction or infection into the producer cell line. Methods for transfection, transduction or infection are well known by those of skill in the art. As non-limiting example, the packaging and transfer constructs can be introduced into producer cell lines by calcium phosphate transfection, lipofection or electroporation, generally together with a dominant selectable marker, such as neo, DHFR, Gln synthetase or ADA, followed by selection in the presence of the appropriate drug and isolation of clones.

[0385] The producer cell produces recombinant viral particles that contain the foreign gene, for example, the CA2 effector module of the present disclosure. The recombinant viral particles are recovered from the culture media and titrated by standard methods used by those of skill in the art. The recombinant lentiviral vehicles can be used to infect target cells.

[0386] Cells that can be used to produce high-titer lentiviral particles may include, but are not limited to, HEK293T cells, 293G cells, STAR cells (Relander et al., Mol. Ther., 2005, 11: 452-459), FreeStyle™ 293 Expression System (ThermoFisher, Waltham, Mass.), and other HEK293T-based producer cell lines (e.g., Stewart et al., Hum Gene Ther. 2011, 22(3):357-369; Lee et al., Biotechnol Bioeng, 2012, 10996): 1551-1560; Throm et al., Blood 2009, 113(21): 5104-5110; the contents of each of which are incorporated herein by reference in their entirety).

[0387] In some aspects, the envelope proteins may be heterologous envelop proteins from other viruses, such as the G protein of vesicular stomatitis virus (VSV G) or baculoviral gp64 envelop proteins. The VSV-G glycoprotein may especially be chosen among species classified in the vesiculovirus genus: Carajas virus (CJSV), Chandipura virus (CHPV), Cocal virus (COCV), Isfahan virus (ISFV), Maraba virus (MARAV), Piry virus (PIRYV), Vesicular stomatitis Alagoas virus (VSAV), Vesicular stomatitis Indiana virus (VSIV) and Vesicular stomatitis New Jersey virus (VSNJV) and/or stains provisionally classified in the vesiculovirus genus as Grass carp rhabdovirus, BeAn 157575 virus (BeAn 157575), Boteke virus (BTKV), Calchaqui virus (CQIV), Eel virus American (EVA), Gray Lodge virus (GLOV), Jurona virus (JURY), Klamath virus (KLAV), Kwatta virus (KWAV), La Joya virus (LJV), Malpais Spring virus (MSPV), Mount Elgon bat virus (MEBV), Perinet virus (PERV), Pike fry rhabdovirus (PFRV), Porton virus (PORV), Radi virus (RADIV), Spring viremia of carp virus (SVCV), Tupaia virus (TUPV), Ulcerative disease rhabdovirus (UDRV) and Yug Bogdanovac virus (YBV). The gp64 or other baculoviral env protein can be derived from Autographa californica nucleopolyhedrovirus (AcMNPV), Anagrapha falcifera nuclear polyhedrosis virus, Bombyx mori nuclear polyhedrosis virus, Choristoneura fumiferana nucleopolyhedrovirus, Orgyia pseudotsugata single capsid nuclear polyhedrosis virus, Epiphyas postvittana nucleopolyhedrovirus, Hyphantria cunea nucleopolyhedrovirus, Galleria mellonella nuclear polyhedrosis virus, Dhori virus, Thogoto virus, Antheraea pemyi nucleopolyhedrovirus or Batken virus.

[0388] Other elements provided in lentiviral particles may comprise retroviral LTR (long-terminal repeat) at either 5′ or 3′ terminus, a retroviral export element, optionally a lentiviral reverse response element (RRE), a promoter or active portion thereof, and a locus control region (LCR) or active portion thereof. The CA2 effector module is linked to the vector.

[0389] Methods for generating recombinant lentiviral particles are discussed in the art, for example, U.S. Pat. Nos. 8,846,385; 7,745,179; 7,629,153; 7,575,924; 7,179,903; and 6,808,905; the contents of each of which are incorporated herein by reference in their entirety.

[0390] Lentivirus vectors used may be selected from, but are not limited to pLVX, pLenti, pLenti6, pLJM1, FUGW, pWPXL, pWPI, pLenti CMV puro DEST, pLJM1-EGFP, pULTRA, pInducer20, pHIV-EGFP, pCW57.1, pTRPE, pELPS, pRRL, and pLionII.

[0391] Lentiviral vehicles are plasmid-based or virus-based and are known in the art (See, U.S. Pat. Nos. 9,260,725; 9,068,199; 9,023,646; 8,900,858; 8,748,169; 8,709,799; 8,420,104; 8,329,462; 8,076,106; 6,013,516; and 5,994,136; the contents of each of which are incorporated herein by reference in their entirety).

### Lentiviral Vectors and Cell Engineering

[0392] Lentiviral vectors are used for introducing transgenes into T cells (e.g., primary human T cells or Jurkat cells) for preclinical research and clinical applications, including recently approved products such as Tisagenlecleucel (KYMRIAH@) for relapsed/refractory B-cell lymphoma. VSV-G pseudotyped 3rd generation lentiviral vectors offer high titers, high transduction efficiency and safety, and have become the vectors of choice for T cell engineering. While not wishing to be bound by theory, T cell engineering usually involves T cell activation by CD3/CD28 antibodies, followed by lentivirus transduction, and then cell expansion which can last from 5 to 30 days (e.g., 9 to 14 days or 9 to 15 days). In general, lentivirus transgene integration may take over 7 days to fully stabilize in T cells (e.g., primary human T cells or Jurkat cells). While longer cultures can increase the cell numbers, the longer cultures can also change the T cell phenotype to a more differentiated state. Therefore, the duration of ex vivo culture can impact the persistence and efficacy of CAR T cells. For example, cells cultured for shorter duration may display a less differentiated phenotype and can be highly efficacious in preclinical models.

[0393] While not wishing to be bound by theory, the state of T cell differentiation may influence the engraftment and persistence of T cells following adoptive transfer. Ghassemi et al (Reducing Ex Vivo Culture Improves the Antileukemic Activity of Chimeric Antigen Receptor (CAR) T Cells. Cancer Immunol Res; 6(9) Sept. 2018; the contents of which are herein incorporated by reference in their entirety) describe primary human T cell differentiation over time and saw that early harvested CAR T cells exhibited enhanced effector function and proliferation, as well as enhanced potency and persistence in vivo.

[0394] Lentivirus dynamics such as transduction, integration and/or expression kinetics of lentivirally introduced transgenes in T cells (e.g., primary human T cells or Jurkat cells) ex vivo may impact the efficacy and durability of in vivo anti-tumor responses. Some type of T cells may produce different results. For example, the Jurkat cell line may not provide the dynamic range of expression as primary human T cells. Methods to evaluate these lentivirus dynamics are known in the art and are described herein.

[0395] In some embodiment, to determine the transgene expression kinetics CD3/CD28 activated primary human T cells can be transduced with lentivirus carrying a transgene (e.g., a regulated transgene or constitutive transgene such as CD19 CAR, IL12, fluorescent protein or any transgene (e.g., payload) described herein). The cells may be analyzed by methods described herein and/or known in the art for viability, viral genomic integration (e.g., by using quantitative PCR), transcript levels (e.g., by using quantitative RT-PCR), and cell surface expression of the transgene if applicable (e.g., if the transgene is or includes CD19 CAR then the surface expression of the CD19 CAR can be evaluated). The cells may be analyzed prior to transduction and/or after transduction such as 1 day, 2 days, 3 days, 4 days, 5 days, 6 days, 7 days, 8 days, 9 days, 10 days, 11 days, 12 days, 13 days, 14 days, 15 days, 16 days, 17 days, 18 days, 19 days, 20 days, 21 days, 22 days, 23 days, 24 days, 25 days, 26 days, 27 days, 28 days, 29 days, 30 or more than 30 days after transduction.

[0396] In some embodiments, the CD3/CD28 activated primary human T cells can be reactivated with CD3/CD28 beads after transduction. The cells may be reactivated 5 days, 6 days, 7 days, 8 days, 9 days, 10 days, 11 days, 12 days, 13 days, 14 days, 15 days, 16 days, 17 days, 18 days, 19 days, 20 days, 21 days, 22 days, 23 days, 24 days, 25 days, 26 days, 27 days, 28 days, 29 days, 30 or more than 30 days after transduction. The cells may be analyzed by methods described herein and/or known in the art for viability, viral genomic integration (e.g., by using quantitative PCR), transcript levels (e.g., by using quantitative RT-PCR), cell surface expression of the transgene if applicable (e.g., if the transgene is or includes CD19 CAR then the surface expression of the CD19 CAR can be evaluated), copy number, and/or mRNA levels.

[0397] In some embodiments, the cell viability of activated primary human T cells transduced with lentivirus carrying a transgene is greater than 65%, 70%, 75%, 80%, 85%, 90%, 95%, 97%, or 99%. As a non-limiting example, the cell viability is greater than 90%. As a non-limiting example, the cell viability is greater than 85%.

[0398] In some embodiments, the cell viability of Jurkat cells transduced with lentivirus carrying a transgene is greater than 65%, 70%, 75%, 80%, 85%, 90%, 95%, 97%, or 99%. As a non-limiting example, the cell viability is greater than 90%. As a non-limiting example, the cell viability is greater than 85%.

[0399] In some embodiments, the integration of the transgene into the genome of the cell may be at or above the saturation point. As a non-limiting example, the saturation point may be 3 copies per cell.

[0400] In some embodiments, the integration of the transgene into the genome may be high in the initial timepoints evaluated and then decline to a lower integration value before becoming stable for the remainder of the culture. As a non-limiting example, the integration may be up to 20 copies per cell of the transgene into the genome during the early timepoints before declining to 2 copies per cell and being stable throughout the remainder of the culture.

[0401] In some embodiments, the transduction of ability of T cells may be evaluated. T cells from at least one donor may be transduced with a lentivirus containing a transgene at a dose that is predicted to reach the saturating levels (e.g., enough virus that each cell should contain a copy if a Poisson distribution is expected) and a higher lentivirus dose that exceeds saturation 5 times. Copies per cell, percentage and MFI of cells (or concentration in media of transgene) may be detected in order to determine if all cells are expressing transgene. As a non-limiting example, T cells from two distinct donors may be transduced with lentivirus which includes a transgene. The transduction may be at two doses, saturation and 5× saturation, and show that 5-10 days after transduction that all groups may reach or exceed a predicted saturating level of integrated transgene and similar expression intensity across groups but not all cells are expressing the transgene. Not all T cells may have equal transduction susceptibility, even when sourced from the same donor. The fraction of total cells that express GFP (above the detection threshold) may vary between donors, lots and/or viral dose. The percent of total cells that express GFP from a single donor may be between 70% and 95%.

[0402] In some embodiments, a percentage of the cultured T cells (e.g., primary human T cells and/or Jurkat cells) may express the transgene. The percentage of culture T cells expressing the transgene may be, but is not limited to, 5%, 10%, 15%, 20%, 25%, 30%, 35%, 40%, 45%, 50%, 55%, 60%, 65%, 70%, 75%, 80%, 85%, 90%, 95%, 97%, 99% or greater than 99%. As a non-limiting example, the percentage may be greater than 70%. As a non-limiting example, the percentage may be greater than 75%. As a non-limiting example, the percentage may be greater than 80%. As a non-limiting example, the percentage may be greater than 85%. As a non-limiting example, the percentage may be greater than 90%. As a non-limiting example, the percentage may be greater than 95%.

[0403] In some embodiments, the mRNA levels from the culture may decline over the duration of the study. The decline may not be limited to a specific transgene and the trend may be seen across multiple classes of expressed proteins. In order to increase the mRNA levels, the cells may be reactivated after the mRNA levels decrease from the initial levels. The cells may be reactivated 5 days, 6 days, 7 days, 8 days, 9 days, 10 days, 11 days, 12 days, 13 days, 14 days, 15 days, 16 days, 17 days, 18 days, 19 days, 20 days, 21 days, 22 days, 23 days, 24 days, 25 days, 26 days, 27 days, 28 days, 29 days, 30 or more than 30 days after transduction.

[0404] In some embodiments, the surface expression from the culture may decline over the duration of the study. For example, the surface expression may decline between days 3 to 13 days, 3 to 14 days, or 3 to 15 days after transduction. In order to increase the surface expression, the cells may be reactivated after the surface expression decrease from the initial levels. The cells may be reactivated 5 days, 6 days, 7 days, 8 days, 9 days, 10 days, 11 days, 12 days, 13 days, 14 days, 15 days, 16 days, 17 days, 18 days, 19 days, 20 days, 21 days, 22 days, 23 days, 24 days, 25 days, 26 days, 27 days, 28 days, 29 days, 30 or more than 30 days after transduction.

[0405] In some embodiments, the transgene is a CAR such as, but not limited to, CD19 CAR. As a non-limiting example, the CAR is CD19 CAR. The cell viability may be greater than 90% in cells transduced with a CD19 CAR. The cell viability may be greater than 85% in cells transduced with a CD19 CAR. If the cells are primary T cells transduced with a CD19 CAR, then number of viable cells may increase over the initial timepoints before decreasing. If the cells are Jurkat cells transduced with a CD19 CAR, then the number of viable cells may increase for at least 10 days. The number of copies per cell for CD19 CAR transduced cells may be higher for the initial timepoints before decreasing by 50% or more for the later timepoints. The cell surface expression of CD19 CAR may decrease during the course of the study from about 20000 CAR MFI to less than 5000 CAR MFI over a period of 10 days (e.g., day 3 to day 13). After restimulation on day 15 the MFI may increase to above 5000 CAR MFL. The percentage of primary human T cells expressing CAR may be between 40% and 60% for 3-13 days after transduction. The percentage of Jurkat cells expressing CAR may be between 30% and 70% for 3-13 days after transduction. An initial decline of about 20% may be seen between days 3 and 6 after transduction. Restimulation of the T cells may increase the percent of CAR positive cells back to initial percentage levels (e.g., around 60%).

[0406] In some embodiments, the transgene encodes a fluorescent protein such as, but not limited to cytosolic green fluorescence protein (GFP), luciferase, and mCherry. As a non-limiting example, the fluorescent protein is GFP. The cell viability may be greater than 90% in cells transduced with GFP. The cell viability may be greater than 85% in cells transduced with GFP. If the cells are primary T cells transduced with GFP, then the number of viable cells may increase over the initial timepoints before decreasing. If the cells are Jurkat cells transduced with GFP, then the number of viable cells may increase for at least 10 days. The number of copies per cell for GFP transduced cells may be higher for the initial timepoints before decreasing by 50% or more for the later timepoints. The surface expression of the cells may have a steady and rapid decline bottoming out at day 10 with a slight increase if restimulated. The highest level of cell surface expression of GFP in Jurkat cells may be at day 10 (about 35000 GFP MFI) before decreasing for the rest of the study. The percentage of primary human T cells expressing GFP may be around 80% for 3-13 days after transduction. The percentage of Jurkat cells expressing GFP may be around 90% for 3-13 days after transduction.

[0407] In some embodiments, lentivirally engineered cells described herein have genomic DNA integration that stabilizes after an initial decline of copy number, decreasing RNA and surface expression levels over time, and an increase in RNA and surface expression after restimulation.

[0408] In some embodiments, lentivirally engineering cells may be evaluated using the following 14-day method where samples are collected 5 times throughout the culture. On day −1 the T cells (e.g., primary human T cells or Jurkat cells) may be thawed and the CD3/CD28 beads are added. On day 0, the lentivirus for each of the conditions is added (e.g., 4 mL of cells at 0.5e6/mL) and there is a control of non-transduced cells. Double media to 8 mL on day 1 and then double the media to 16 mL on day 2. On day 3, harvest 4 mL and then double media to 24 mL on day 4. Harvest 4 mL on day 6 before doubling media to 40 mL. The cells can be split (e.g., 14 mL 0.5e6 cells/mL) on day 8 and then on day 6 harvest 4 mL before doubling media to 40 mL. 4 mL may be harvested on day 10 before the media is doubled to 20 mL. On day 13, 4 mL are harvested before doubling the media to 32 mL. The culture is split in half and half of the culture is activated (CD3/CD28 activation beads 1:1) and stimulated overnight. On day 14, 4 mL of each stimulated and non-stimulated cells are harvested and the culture is ended. Transgene copy number per cell are assayed by harvesting cells and extracting genomic DNA then quantifying with standard curve qPCR against the endogenous genome and against the transgene sequence, then converting the detected quantities to a ratio. Mean Fluorescence Intensity (MFI) is assayed by FLO on an Attune with appropriate staining for each group. Percent expressing may also be assayed by FLO on an attune quantifying the percent of cells fluorescing above threshold. Soluble payloads can be quantified by harvesting culture supernatant at each marked timepoint and running MesoScale Discovery plate assay (MSD) then normalizing for cell density.

### Adeno-Associated Viral Particles

[0409] Delivery of any of the CA2 biocircuits, CA2 biocircuit components, CA2 effector modules, SREs or payloads of interest of the present disclosure may be achieved using recombinant adeno-associated viral (rAAV) vectors. Such vectors or viral particles may be designed to utilize any of the known serotype capsids or combinations of serotype capsids.

[0410] AAV vectors include not only single stranded vectors but self-complementary AAV vectors (scAAVs). scAAV vectors contain DNA which anneals together to form double stranded vector genome. By skipping second strand synthesis, scAAVs allow for rapid expression in the cell.

[0411] The rAAV vectors may be manufactured by standard methods in the art such as by triple transfection, in sf9 insect cells or in suspension cell cultures of human cells such as HEK293 cells.

[0412] The CA2 biocircuits, CA2 biocircuit components, CA2 effector modules, SREs or payloads of interest may be encoded in one or more viral genomes to be packaged in the AAV capsids taught herein.

[0413] Such vector or viral genomes may also include, in addition to at least one or two ITRs (inverted terminal repeats), certain regulatory elements necessary for expression from the vector or viral genome. Such regulatory elements are well known in the art and include for example promoters, introns, spacers, stuffer sequences, and the like.

[0414] The CA2 biocircuits, CA2 biocircuit components, CA2 effector modules, SREs or payloads of interest of the disclosure may be administered in one or more AAV particles.

[0415] In some embodiments, the CA2 effector modules may be administered in one or more AAV particles. In some embodiments, more than one CA2 effector module or SRE may be encoded in a viral genome.

### Retroviral Vehicles/Particles (γ-Retroviral Vectors)

[0416] In some embodiments, retroviral vehicles/particles may be used to deliver the CA2 biocircuits, CA2 biocircuit components, CA2 effector modules, SREs or payloads of interest of the present disclosure. Retroviral vectors (RVs) allow the permanent integration of a transgene in target cells. In addition to lentiviral vectors based on complex HIV-½, retroviral vectors based on simple gamma-retroviruses have been widely used to deliver therapeutic genes and demonstrated clinically as one of the most efficient and powerful gene delivery systems capable of transducing a broad range of cell types. Example species of Gamma retroviruses include the murine leukemia viruses (MLVs) and the feline leukemia viruses (FeLV).

[0417] In some embodiments, gamma-retroviral vectors derived from a mammalian gamma-retrovirus such as murine leukemia viruses (MLVs), are recombinant. The MLV families of gamma retroviruses include the ecotropic, amphotropic, xenotropic and polytropic subfamilies. Ecotropic viruses are able to infect only murine cells using mCAT-1 receptor. Examples of ecotropic viruses are Moloney MLV and AKV. Amphotropic viruses infect murine, human and other species through the Pit-2 receptor. One example of an amphotropic virus is the 4070A virus. Xenotropic and polytropic viruses utilize the same (Xpr1) receptor but differ in their species tropism. Xenotropic viruses such as NZB-9-1 infect human and other species but not murine species, whereas polytropic viruses such as focus-forming viruses (MCF) infect murine, human and other species.

[0418] Gamma-retroviral vectors may be produced in packaging cells by co-transfecting the cells with several plasmids including one encoding the retroviral structural and enzymatic (gag-pol) polyprotein, one encoding the envelope (env) protein, and one encoding the vector mRNA comprising polynucleotide encoding the compositions of the present disclosure that is to be packaged in newly formed viral particles.

[0419] In some aspects, the recombinant gamma-retroviral vectors are pseudotyped with envelope proteins from other viruses. Envelope glycoproteins are incorporated in the outer lipid layer of the viral particles which can increase/alter the cell tropism. Exemplary envelop proteins include the gibbon ape leukemia virus envelope protein (GALV) or vesicular stomatitis virus G protein (VSV-G), or Simian endogenous retrovirus envelop protein, or Measles Virus H and F proteins, or Human immunodeficiency virus gp120 envelop protein, or cocal vesiculovirus envelop protein (See, e.g., U.S. application publication NO.: 2012/164118; the contents of which are incorporated herein by reference in its entirety). In other aspects, envelope glycoproteins may be genetically modified to incorporate targeting/binding ligands into gamma-retroviral vectors, binding ligands including, but not limited to, peptide ligands, single chain antibodies and growth factors (Waehler et al., Nat. Rev. Genet. 2007, 8(8):573-587; the contents of which are incorporated herein by reference in its entirety). These engineered glycoproteins can retarget vectors to cells expressing their corresponding target moieties. In other aspects, a “molecular bridge” may be introduced to direct vectors to specific cells. The molecular bridge has dual specificities: one end can recognize viral glycoproteins, and the other end can bind to the molecular determinant on the target cell. Such molecular bridges, for example ligand-receptor, avidin-biotin, and chemical conjugations, monoclonal antibodies and engineered fusogenic proteins, can direct the attachment of viral vectors to target cells for transduction (Yang et al., Biotechnol. Bioeng., 2008, 101(2): 357-368; and Maetzig et al., Viruses, 2011, 3, 677-713; the contents of each of which are incorporated herein by reference in their entirety).

[0420] In some embodiments, the recombinant gamma-retroviral vectors are self-inactivating (SIN) gammaretroviral vectors. The vectors are replication incompetent. SIN vectors may harbor a deletion within the 3′ U3 region initially comprising enhancer/promoter activity. Furthermore, the 5′ U3 region may be replaced with strong promoters (needed in the packaging cell line) derived from Cytomegalovirus or RSV, or an internal promotor of choice, and/or an enhancer element. The choice of the internal promotors may be made according to specific requirements of gene expression needed for a particular purpose of the disclosure.

[0421] In some embodiments, polynucleotides encoding the CA2 biocircuit, CA2 biocircuit components, CA2 effector module, SRE are inserted within the recombinant viral genome. The other components of the viral mRNA of a recombinant gamma-retroviral vector may be modified by insertion or removal of naturally occurring sequences (e.g., insertion of an IRES, insertion of a heterologous polynucleotide encoding a polypeptide or inhibitory nucleic acid of interest, shuffling of a more effective promoter from a different retrovirus or virus in place of the wild-type promoter and the like). In some examples, the recombinant gamma-retroviral vectors may comprise modified packaging signal, and/or primer binding site (PBS), and/or 5′-enhancer/promoter elements in the U3-region of the 5′-long terminal repeat (LTR), and/or 3′-SIN elements modified in the U3-region of the 3′-LTR. These modifications may increase the titers and the ability of infection.

[0422] Gammaretroviral vectors suitable for delivering CA2 biocircuits, CA2 biocircuit components, CA2 effector modules, SREs or payloads of interest of the present disclosure may be selected from those disclosed in U.S. Pat. Nos. 8,828,718; 7,585,676; 7,351,585; U.S. application publication NO.: 2007/048285; PCT application publication NOs.: WO2010/113037; WO2014/121005; WO2015/056014; and EP Pat. Nos.: EP1757702; EP1757703 (the contents of each of which are incorporated herein by reference in their entirety).

### Oncolytic Viral Vector

[0423] In some embodiments, polynucleotides of present disclosure may be packaged into oncolytic viruses. As used herein, the term “oncolytic virus” refers to a virus that preferentially infects and kills cancer cells such as vaccine viruses. An oncolytic virus can occur naturally or can be a genetically modified virus such as oncolytic adenovirus, and oncolytic herpes virus.

[0424] In some embodiments, oncolytic vaccine viruses may include viral particles of a thymidine kinase (TK)—deficient, granulocyte macrophage (GM)—colony stimulating factor (CSF)—expressing, replication-competent vaccinia virus vector sufficient to induce oncolysis of cells in the tumor; See e.g., U.S. Pat. No. 9,226,977; the contents of which are incorporated herein by reference in their entirety.

Messenger RNA (mRNA)

[0425] In some embodiments, the CA2 effector modules of the disclosure may be designed as a messenger RNA (mRNA). As used herein, the term “messenger RNA” (mRNA) refers to any polynucleotide which encodes a polypeptide of interest and which is capable of being translated to produce the encoded polypeptide of interest in vitro, in vivo, in situ or ex vivo. Such mRNA molecules may have the structural components or features of any of those taught in International Application number PCT/US2013/030062, the contents of which are incorporated herein by reference in its entirety.

[0426] In some embodiments, the CA2 effector modules may be designed as self-amplifying RNA. “Self-amplifying RNA” as used herein refers to RNA molecules that can replicate in the host resulting in the increase in the amount of the RNA and the protein encoded by the RNA. Such self-amplifying RNA may have structural features or components of any of those taught in International Patent Application Publication No. WO2011005799 (the contents of which are incorporated herein by reference in their entirety).

### Dosing

[0427] The present disclosure provides methods comprising administering any one or more or components of a CA2 biocircuit system to a subject in need thereof. These may be administered to a subject using any amount and any route of administration effective for preventing or treating or imaging a disease, disorder, and/or condition (e.g., a disease, disorder, and/or condition relating to cancer or an autoimmune disease). The exact amount required will vary from subject to subject, depending on the species, age, and general condition of the subject, the severity of the disease, the particular composition, its mode of administration, its mode of activity, and the like.

[0428] Compositions in accordance with the disclosure are typically formulated in dosage unit form for ease of administration and uniformity of dosage. It will be understood, however, that the total daily usage of the compositions of the present disclosure may be decided by the attending physician within the scope of sound medicaljudgment. The specific therapeutically effective, prophylactically effective, or appropriate imaging dose level for any particular patient will depend upon a variety of factors including the disorder being treated and the severity of the disorder; the activity of the specific compound employed; the specific composition employed; the age, body weight, general health, sex and diet of the patient; the time of administration, route of administration, and rate of excretion of the specific compound employed; the duration of the treatment; drugs used in combination or coincidental with the specific compound employed; and like factors well known in the medical arts.

[0429] In some embodiments, compositions of the disclosure may be used in varying doses to avoid T cell exhaustion, prevent cytokine release syndrome and minimize toxicity associated with immunotherapy. For example, low doses of the compositions of the present disclosure may be used to initially treat patients with high tumor burden, while patients with low tumor burden may be treated with high and repeated doses of the compositions of the disclosure to ensure recognition of a minimal tumor antigen load. In another instance, the compositions of the present disclosure may be delivered in a pulsatile fashion to reduce tonic T cell signaling and enhance persistence in vivo. In some aspects, toxicity may be minimized by initially using low doses of the compositions of the disclosure, prior to administering high doses. Dosing may be modified if serum markers such as ferritin, serum C-reactive protein, IL6, IFN-γ, and TNF-α are elevated.

[0430] In some embodiments, the neurotoxicity may be associated with CAR or TIL therapy. Such neurotoxicity may be associated CD19-CARs. Toxicity may be due to excessive T cell infiltration into the brain. In some embodiments, neurotoxicity may be alleviated by preventing the passage of T cells through the blood brain barrier. This can be achieved by the targeted gene deletion of the endogenous alpha-4 integrin inhibitors such as tysabri/natalizumab may also be useful in the present disclosure.

[0431] Also provided herein are methods of administering ligands in accordance with the disclosure to a subject in need thereof. The ligand may be administered to a subject or to cells, using any amount and any route of administration effective for tuning the CA2 biocircuits of the present disclosure. The exact amount required will vary from subject to subject, depending on the species, age, and general condition of the subject, the severity of the disease, the particular composition, its mode of administration, its mode of activity, and the like. The subject may be a human, a mammal, or an animal. Compositions in accordance with the present disclosure are typically formulated in unit dosage form for ease of administration and uniformity of dosage. It will be understood, however, that the total daily usage of the compositions of the present disclosure may be decided by the attending physician within the scope of sound medical judgment. In certain embodiments, the ligands in accordance with the present disclosure may be administered at dosage levels sufficient to deliver from about 0.0001 mg/kg to about 100 mg/kg, from about 0.001 mg/kg to about 0.05 mg/kg, from about 0.005 mg/kg to about 0.05 mg/kg, from about 0.001 mg/kg to about 0.005 mg/kg, from about 0.05 mg/kg to about 0.5 mg/kg, from about 0.01 mg/kg to about 50 mg/kg, from about 0.1 mg/kg to about 40 mg/kg, from about 0.5 mg/kg to about 30 mg/kg, from about 0.01 mg/kg to about 10 mg/kg, from about 0.1 mg/kg to about 10 mg/kg, or from about 1 mg/kg to about 25 mg/kg, from about 10 mg/kg to about 100 mg/kg, from about 50 mg/kg to about 500 mg/kg, from about 100 mg/kg to about 1000 mg/kg, of subject body weight per day, one or more times a day, to obtain the desired effect. In some embodiments, the dosage levels may be 1 mg/kg, 5 mg/kg, 10 mg/kg, 20 mg/kg, 30 mg/kg, 40 mg/kg, 50 mg/kg, 60 mg/kg, 70 mg/kg, 80 mg/kg, 90 mg/kg, 100 mg/kg, 100 mg/kg, 110 mg/kg, 120 mg/kg, 130 mg/kg, 140 mg/kg, 150 mg/kg, 160 mg/kg, 170 mg/kg, 180 mg/kg, 190 mg/kg or mg/kg of subject body weight per day, or more times a day, to obtain the desired effect.

[0432] The present disclosure provides methods for delivering to a cell or tissue any of the ligands described herein, comprising contacting the cell or tissue with said ligand and can be accomplished in vitro, ex vivo, or in vivo. In certain embodiments, the ligands in accordance with the present disclosure may be administered to cells at dosage levels sufficient to deliver from about 1 nM to about 10 nM, from about 5 nM to about 50 nM, from about 10 nM to about 100 nM, from about 50 nM to about 500 nM, from about 100 nM to about 1000 nM, from about 1 μM to about 10 μM, from about 5 μM to about 50 μM from about 10 μM to about 100 μM from about 25 μM to about 250 μM from about 50 μM to about 500 μM. In some embodiments, the ligand may be administered to cells at doses selected from but not limited to 0.00064 μM, 0.0032 μM, 0.016 μM, 0.08 μM, 0.4 μM, 1 μM, 2 μM, 10 μM, 50 μM, 75, μM, 100 μM, 150 μM, 175 μM, 200 μM, 250 μM.

[0433] The desired dosage of the ligands of the present disclosure may be delivered only once, three times a day, two times a day, once a day, every other day, every third day, every week, every two weeks, every three weeks, or every four weeks. In certain embodiments, the desired dosage may be delivered using multiple administrations (e.g., two, three, four, five, six, seven, eight, nine, ten, eleven, twelve, thirteen, fourteen, or more administrations). When multiple administrations are employed, split dosing regimens such as those described herein may be used. As used herein, a “split dose” is the division of “single unit dose” or total daily dose into two or more doses, e.g., two or more administrations of the “single unit dose”. As used herein, a “single unit dose” is a dose of any therapeutic administered in one dose/at one time/single route/single point of contact, i.e., single administration event. The desired dosage of the ligand of the present disclosure may be administered as a “pulse dose” or as a “continuous flow”. As used herein, a “pulse dose” is a series of single unit doses of any therapeutic administered with a set frequency over a period of time. As used herein, a “continuous flow” is a dose of therapeutic administered continuously for a period of time in a single route/single point of contact, i.e., continuous administration event. A total daily dose, an amount given or prescribed in 24-hour period, may be administered by any of these methods, or as a combination of these methods, or by any other methods suitable for a pharmaceutical administration.

### Administration

[0434] In some embodiments, the compositions for immunotherapy may be administered to cells ex vivo and subsequently administered to the subject.

[0435] In some embodiments, depending upon the nature of the cells, the cells may be introduced into a host organism e.g. a mammal, in a wide variety of ways including by injection, transfusion, infusion, local instillation or implantation. In some aspects, the cells described herein may be introduced at the site of the tumor. The number of cells that are employed will depend upon a number of circumstances, the purpose for the introduction, the lifetime of the cells, the protocol to be used, for example, the number of administrations, the ability of the cells to multiply, or the like. The cells may be in a physiologically-acceptable medium.

[0436] In some embodiments, the cells described herein may be administrated in multiple doses to subjects having a disease or condition. The administrations generally effect an improvement in one or more symptoms of cancer or a clinical condition and/or treat or prevent cancer or clinical condition or symptom thereof.

[0437] In some embodiments, the compositions for immunotherapy may be administered in vivo. In some embodiments, polypeptides of the present disclosure comprising CA2 biocircuits, CA2 effector molecules, SREs, payloads of interest (immunotherapeutic agents) and compositions of the disclosure may be delivered in vivo to the subject. In vivo delivery of immunotherapeutic agents is well described in the art. For example, methods of delivery of cytokines are described in the E.P. Pat. NO. EP0930892 A1, the contents of which are incorporated herein by reference.

### Routes of Delivery

[0438] The pharmaceutical compositions, CA2 biocircuits, CA2 biocircuit components, CA2 effector modules including their SREs (e.g., CA2 DDs), payloads (e.g., immunotherapeutic agents), vectors and cells of the present disclosure may be administered by any route to achieve a therapeutically effective outcome.

[0439] The pharmaceutical compositions, CA2 biocircuits, CA2 biocircuit components, CA2 effector modules including their SREs or payloads of the present disclosure may be administered by any route to achieve a therapeutically effective outcome. These include, but are not limited to enteral (into the intestine), gastroenteral, epidural (into the dura matter), oral (by way of the mouth), transdermal, peridural, intracerebral (into the cerebrum), intracerebroventricular (into the cerebral ventricles), epicutaneous (application onto the skin), intradermal, (into the skin itself), subcutaneous (under the skin), nasal administration (through the nose), intravenous (into a vein), intravenous bolus, intravenous drip, intraarterial (into an artery), intramuscular (into a muscle), intracardiac (into the heart), intraosseous infusion (into the bone marrow), intrathecal (into the spinal canal), intraperitoneal, (infusion or injection into the peritoneum), intravesical infusion, intravitreal, (through the eye), intracavernous injection (into a pathologic cavity) intracavitary (into the base of the penis), intravaginal administration, intrauterine, extra-amniotic administration, transdermal (diffusion through the intact skin for systemic distribution), transmucosal (diffusion through a mucous membrane), transvaginal, insufflation (snorting), sublingual, sublabial, enema, eye drops (onto the conjunctiva), in ear drops, auricular (in or by way of the ear), buccal (directed toward the cheek), conjunctival, cutaneous, dental (to a tooth or teeth), electro-osmosis, endocervical, endosinusial, endotracheal, extracorporeal, hemodialysis, infiltration, interstitial, intra-abdominal, intra-amniotic, intra-articular, intrabiliary, intrabronchial, intrabursal, intracartilaginous (within a cartilage), intracaudal (within the cauda equine), intracisternal (within the cisterna magna cerebellomedularis), intracorneal (within the cornea), dental intracornal, intracoronary (within the coronary arteries), intracorporus cavernosum (within the dilatable spaces of the corporus cavernosa of the penis), intradiscal (within a disc), intraductal (within a duct of a gland), intraduodenal (within the duodenum), intradural (within or beneath the dura), intraepidermal (to the epidermis), intraesophageal (to the esophagus), intragastric (within the stomach), intragingival (within the gingivae), intraileal (within the distal portion of the small intestine), intralesional (within or introduced directly to a localized lesion), intraluminal (within a lumen of a tube), intralymphatic (within the lymph), intramedullary (within the marrow cavity of a bone), intrameningeal (within the meninges), intramyocardial (within the myocardium), intraocular (within the eye), intraovarian (within the ovary), intrapericardial (within the pericardium), intrapleural (within the pleura), intraprostatic (within the prostate gland), intrapulmonary (within the lungs or its bronchi), intrasinal (within the nasal or periorbital sinuses), intraspinal (within the vertebral column), intrasynovial (within the synovial cavity of a joint), intratendinous (within a tendon), intratesticular (within the testicle), intrathecal (within the cerebrospinal fluid at any level of the cerebrospinal axis), intrathoracic (within the thorax), intratubular (within the tubules of an organ), intratumor (within a tumor), intratympanic (within the aurus media), intravascular (within a vessel or vessels), intraventricular (within a ventricle), iontophoresis (by means of electric current where ions of soluble salts migrate into the tissues of the body), irrigation (to bathe or flush open wounds or body cavities), laryngeal (directly upon the larynx), nasogastric (through the nose and into the stomach), occlusive dressing technique (topical route administration which is then covered by a dressing which occludes the area), ophthalmic (to the external eye), oropharyngeal (directly to the mouth and pharynx), parenteral, percutaneous, periarticular, peridural, perineural, periodontal, rectal, respiratory (within the respiratory tract by inhaling orally or nasally for local or systemic effect), retrobulbar (behind the pons or behind the eyeball), intramyocardial (entering the myocardium), soft tissue, subarachnoid, subconjunctival, submucosal, topical, transplacental (through or across the placenta), transtracheal (through the wall of the trachea), transtympanic (across or through the tympanic cavity), ureteral (to the ureter), urethral (to the urethra), vaginal, caudal block, diagnostic, nerve block, biliary perfusion, cardiac perfusion, photopheresis or spinal.

### Parenteral and Injectable Administration

[0440] In some embodiments, pharmaceutical compositions, CA2 biocircuits, CA2 biocircuit components, CA2 effector modules including their SREs or payloads of the present disclosure may be administered parenterally. Liquid dosage forms for oral and parenteral administration include, but are not limited to, pharmaceutically acceptable emulsions, microemulsions, solutions, suspensions, syrups, and/or elixirs. In addition to active ingredients, liquid dosage forms may comprise inert diluents commonly used in the art such as, for example, water or other solvents, solubilizing agents and emulsifiers such as ethyl alcohol, isopropyl alcohol, ethyl carbonate, ethyl acetate, benzyl alcohol, benzyl benzoate, propylene glycol, 1,3-butylene glycol, dimethylformamide, oils (in particular, cottonseed, groundnut, corn, germ, olive, castor, and sesame oils), glycerol, tetrahydrofurfuryl alcohol, polyethylene glycols and fatty acid esters of sorbitan, and mixtures thereof. Besides inert diluents, oral compositions can include adjuvants such as wetting agents, emulsifying and suspending agents, sweetening, flavoring, and/or perfuming agents. In certain embodiments for parenteral administration, compositions are mixed with solubilizing agents such as CREMOPHOR®, alcohols, oils, modified oils, glycols, polysorbates, cyclodextrins, polymers, and/or combinations thereof. In other embodiments, surfactants are included such as hydroxypropylcellulose.

[0441] Injectable preparations, for example, sterile injectable aqueous or oleaginous suspensions may be formulated according to the known art using suitable dispersing agents, wetting agents, and/or suspending agents. Sterile injectable preparations may be sterile injectable solutions, suspensions, and/or emulsions in nontoxic parenterally acceptable diluents and/or solvents, for example, as a solution in 1,3-butanediol. Among the acceptable vehicles and solvents that may be employed are water, Ringer's solution, U.S.P., and isotonic sodium chloride solution. Sterile, fixed oils are conventionally employed as a solvent or suspending medium. For this purpose, any bland fixed oil can be employed including synthetic mono-or diglycerides. Fatty acids such as oleic acid can be used in the preparation of injectables.

[0442] Injectable formulations may be sterilized, for example, by filtration through a bacterial-retaining filter, and/or by incorporating sterilizing agents in the form of sterile solid compositions which can be dissolved or dispersed in sterile water or other sterile injectable medium prior to use.

[0443] In order to prolong the effect of active ingredients, it is often desirable to slow the absorption of active ingredients from subcutaneous or intramuscular injections. This may be accomplished by the use of liquid suspensions of crystalline or amorphous material with poor water solubility. The rate of absorption of active ingredients depends upon the rate of dissolution which, in turn, may depend upon crystal size and crystalline form. Alternatively, delayed absorption of a parenterally administered drug form is accomplished by dissolving or suspending the drug in an oil vehicle. Injectable depot forms are made by forming microencapsulated matrices of the drug in biodegradable polymers such as polylactide-polyglycolide. Depending upon the ratio of drug to polymer and the nature of the particular polymer employed, the rate of drug release can be controlled. Examples of other biodegradable polymers include poly(orthoesters) and poly(anhydrides). Depot injectable formulations are prepared by entrapping the drug in liposomes or microemulsions which are compatible with body tissues.

### Ophthalmic or Otic Administration

[0444] In some embodiments, pharmaceutical compositions, CA2 biocircuits, CA2 biocircuit components, CA2 effector modules including their SREs or payloads of the present disclosure may be prepared, packaged, and/or sold in formulations suitable for ophthalmic and/or otic administration. Such formulations may, for example, be in the form of eye and/or ear drops including, for example, a 0.1/1.0% (w/w) solution and/or suspension of the active ingredient in aqueous and/or oily liquid excipients. Such drops may further comprise buffering agents, salts, and/or one or more other of any additional ingredients described herein. Other ophthalmically-administrable formulations which are useful include those which comprise active ingredients in microcrystalline form and/or in liposomal preparations. Subretinal inserts may also be used as forms of administration.

### Detectable Agents and Labels

[0445] The stimuli, CA2 biocircuit systems and components, CA2 effector modules including the SREs and payloads may be associated with or bound to one or more radioactive agents or detectable agents.

[0446] These agents include various organic small molecules, inorganic compounds, nanoparticles, enzymes or enzyme substrates, fluorescent materials, luminescent materials (e.g., luminol), bioluminescent materials (e.g., luciferase, luciferin, and aequorin), chemiluminescent materials, radioactive materials (e.g., ¹⁸F, ⁶⁷Ga, ^{81m}Kr, ⁸²Rb, ¹¹¹In, ¹²³I, ¹³³Xe, ²⁰¹TI, ¹²⁵I, ³⁵S, ¹⁴C, ³H, or ⁹⁹Tc (e.g., as pertechnetate (technetate(VII), TcO₄⁻)), and contrast agents (e.g., gold (e.g., gold nanoparticles), gadolinium (e.g., chelated Gd), iron oxides (e.g., superparamagnetic iron oxide (SPIO), monocrystalline iron oxide nanoparticles (MIONs), and ultrasmall superparamagnetic iron oxide (USPIO)), manganese chelates (e.g., Mn-DPDP), barium sulfate, iodinated contrast media (iohexol), microbubbles, or perfluorocarbons).

[0447] In some embodiments, the detectable agent may be a non-detectable precursor that becomes detectable upon activation (e.g., fluorogenic tetrazine-fluorophore constructs (e.g., tetrazine-BODIPY FL, tetrazine-Oregon Green 488, or tetrazine-BODIPY TMR-X) or enzyme activatable fluorogenic agents (e.g., PROSENSE@ (VisEn Medical))). In vitro assays in which the enzyme labeled compositions can be used include, but are not limited to, enzyme linked immunosorbent assays (ELISAs), immunoprecipitation assays, immunofluorescence, enzyme immunoassays (EIA), radioimmunoassays (RIA), and Western blot analysis.

### Kits

[0448] The present disclosure includes a variety of kits for conveniently and/or effectively carrying out methods of the present disclosure. Typically, kits will comprise sufficient amounts and/or numbers of components to allow a user to perform one or multiple treatments of a subject(s) and/or to perform one or multiple experiments.

[0449] In one embodiment, the present disclosure provides kits for inhibiting genes in vitro or in vivo, comprising a CA2 biocircuit of the present disclosure or a combination of CA2 biocircuits of the present disclosure, optionally in combination with any other suitable active agents.

[0450] The kit may further comprise packaging and instructions and/or a delivery agent to form a formulation composition. The delivery agent may comprise, for example, saline, a buffered solution.

[0451] In additional embodiments, assay screening kits are provided. The kit includes a container for the screening assay. An instruction for the use of the assay and the information about the screening method are to be included in the kit.

### IV. Applications

[0452] The CA2 biocircuits, CA2 effector modules, SREs, stimuli, compositions or systems comprising one or more of the stimuli, CA2 biocircuits, CA2 effector modules of the present disclosure may be utilized in a large variety of applications including, but not limited to, therapeutics, diagnosis and prognosis, bioengineers, bioprocessing, biofactory, research agents, metabolomics, gene expression, enzyme replacement, etc.

### Therapeutic Uses

### Cancer Immunotherapy

[0453] Cancer immunotherapy aims at the induction or restoration of the reactivity of the immune system towards cancer. Significant advances in immunotherapy research have led to the development of various strategies which may broadly be classified into active immunotherapy and passive immunotherapy. In general, these strategies may be utilized to directly kill cancer cells or to counter the immunosuppressive tumor microenvironment. Active immunotherapy aims at induction of an endogenous, long-lasting tumor-antigen specific immune response. The response can further be enhanced by non-specific stimulation of immune response modifiers such as cytokines. In contrast, passive immunotherapy includes approaches where effector immune molecules such as tumor-antigen specific cytotoxic T cells or antibodies are administered to the host. This approach is short lived and requires multiple applications.

[0454] Despite significant advances, the efficacy of current immunotherapy strategies is limited by associated toxicities. These are often related to the narrow therapeutic window associated with immunotherapy, which in part, emerges from the need to push therapy dose to the edge of potentially fatal toxicity to get a clinically meaningful treatment effect. Further, dose expands in vivo since adoptively transferred immune cells continue to proliferate within the patient, often unpredictably.

[0455] A major risk involved in immunotherapy is the on-target but off tumor side effects resulting from T-cell activation in response to normal tissue expression of the tumor associated antigen (TAA). Clinical trials utilizing T cells expressing T-cell receptor against specific TAA reported skin rash, colitis and hearing loss in response to immunotherapy.

[0456] Immunotherapy may also produce on target, on-tumor toxicities that emerge when tumor cells are killed in response to the immunotherapy. The adverse effects include tumor lysis syndrome, cytokine release syndrome and the related macrophage activation syndrome. Importantly, these adverse effects may occur during the destruction of tumors, and thus even a successful on-tumor immunotherapy might result in toxicity. Approaches to regulatably control immunotherapy are thus highly desirable since they have the potential to reduce toxicity and maximize efficacy.

[0457] The present disclosure provides systems, compositions, immunotherapeutic agents and methods for cancer immunotherapy. These compositions provide tunable regulation of gene expression and function in immunotherapy. The present disclosure also provides CA2 biocircuits, CA2 effector modules, stimulus response elements (SREs) and payloads, as well as polynucleotides encoding any of the foregoing. In one aspect, the systems, compositions, immunotherapeutic agents and other components of the disclosure can be controlled by a separately added stimulus, which provides a significant flexibility to regulate cancer immunotherapy. Further, the systems, compositions and the methods of the present disclosure may also be combined with therapeutic agents such as chemotherapeutic agents, small molecules, gene therapy, and antibodies.

[0458] The tunable nature of the systems and compositions of the disclosure has the potential to improve the potency and duration of the efficacy of immunotherapies. Reversibly silencing the biological activity of adoptively transferred cells using compositions of the present disclosure allows maximizing the potential of cell therapy without irretrievably killing and terminating the therapy.

[0459] The present disclosure provides methods for fine tuning of immunotherapy after administration to patients. This in turn improves the safety and efficacy of immunotherapy and increases the subject population that may benefit from immunotherapy.

[0460] In one embodiment, the CA2 biocircuits, CA2 effector modules, SREs, and components that tune expression levels and activities of any agents may be used for immunotherapy. As non-limiting examples, an immunotherapeutic agent may be an antibody and fragments and variants thereof, a cancer specific T cell receptor (TCR) and variants thereof, an anti-tumor specific chimeric antigen receptor (CAR), a chimeric switch receptor, an inhibitor of a co-inhibitory receptor or ligand, an agonist of a co-stimulatory receptor and ligand, a cytokine, chemokine, a cytokine receptor, a chemokine receptor, a soluble growth factor, a metabolic factor, a suicide gene, a homing receptor, or any agent that induces an immune response in a cell and a subject.

[0461] In some embodiments, the composition for inducing an immune response may comprise a CA2 effector module. In some embodiments, the CA2 effector module may comprise a stimulus response element (SRE) operably linked to at least one payload. In one aspect, the payload may be an immunotherapeutic agent.

[0462] In some embodiments, CA2 biocircuits, CA2 effector modules, and compositions of the present disclosure relate to post-translational regulation of protein (payload) function anti-tumor immune responses of immunotherapeutic agents.

### 1. Adoptive Cell Transfer (Adoptive Immunotherapy)

[0463] In some embodiments, cells which are genetically modified to express at least one CA2 biocircuit, CA2 effector module, SRE (e.g., CA2 DD), and/or payload of interest (immunotherapeutic agent) may be used for adoptive cell therapy (ACT). As used herein, Adoptive cell transfer refers to the administration of immune cells (from autologous, allogenic or genetically modified hosts) with direct anticancer activity. ACT has shown promise in clinical application against malignant and infectious disease. For example, T cells genetically engineered to recognize CD19 have been used to treat follicular B cell lymphoma (Kochenderfer et al., Blood, 2010, 116:4099-4102; and Kochenderfer and Rosenberg, Nat Rev Clin Oncol., 2013, 10(5): 267-276) and ACT using autologous lymphocytes genetically-modified to express anti-tumor T cell receptors has been used to treat metastatic melanoma (Rosenberg and Dudley, Curr. Opin. Immunol. 2009, 21: 233-240).

[0464] According to the present disclosure, the CA2 biocircuits and systems may be used in the development and implementation of cell therapies such as adoptive cell therapy. Certain effector modules useful in cell therapy are given in FIGS. 7-12 in International Publication No. WO2017/180587, the contents of which are herein incorporated by reference in their entirety. The CA2 biocircuits, CA2 effector modules and their SREs and payloads may be used in cell therapies to effect CAR therapies, in the manipulation or regulation of TILs, in allogeneic cell therapy, in combination T cell therapy with other treatment lines (e.g. radiation, cytokines), to encode engineered TCRs, or modified TCRs, or to enhance T cells other than TCRs (e.g. by introducing cytokine genes, genes for the checkpoint inhibitors PD1, CTLA4).

[0465] Provided herein are methods for use in adoptive cell therapy. The methods involve preconditioning a subject in need thereof, modulating immune cells with SRE, CA2 biocircuits and compositions of the present disclosure, administering to a subject, engineered immune cells expressing compositions of the disclosure and the successful engraftment of engineered cells within the subject.

[0466] In some embodiments, SREs, CA2 biocircuits and compositions of the present disclosure may be used to minimize preconditioning regimens associated with adoptive cell therapy. As used herein “preconditioning” refers to any therapeutic regimen administered to a subject to improve the outcome of adoptive cell therapy. Preconditioning strategies include but are not limited to total body irradiation and/or lymphodepleting chemotherapy. Adoptive therapy clinical trials without preconditioning have failed to demonstrate any clinical benefit, indicating its importance in ACT. Yet, preconditioning is associated with significant toxicity and limits the subject cohort that is suitable for ACT. In some instances, immune cells for ACT may be engineered to express cytokines such as IL12 and IL15 as payload using SREs of the present disclosure to reduce the need for preconditioning (Pengram et al. (2012) Blood 119 (18): 4133-41; the contents of which are incorporated by reference in their entirety).

[0467] In some embodiments, immune cells for ACT may be dendritic cells, T cells such as CD8+ T cells and CD4+ T cells, natural killer (NK) cells, NK T cells, Cytotoxic T lymphocytes (CTLs), tumor infiltrating lymphocytes (TILs), lymphokine activated killer (LAK) cells, memory T cells, regulatory T cells (Tregs), helper T cells, cytokine-induced killer (CIK) cells, and any combination thereof. In other embodiments, immune stimulatory cells for ACT may be generated from embryonic stem cell (ESC) and induced pluripotent stem cell (iPSC). In some embodiments, autologous or allogeneic immune cells are used for ACT.

[0468] In some embodiments, cells used for ACT may be T cells engineered to express CARs comprising an antigen-binding domain specific to an antigen on tumor cells of interest. In other embodiments, cells used for ACT may be NK cells engineered to express CARs comprising an antigen-binding domain specific to an antigen on tumor cells of interest. In addition to adoptive transfer of genetically modified T cells (e.g., CAR T cells) for immunotherapy, alternate types of CAR-expressing leukocytes, either alone, or in combination with CAR T cells may be used for adoptive immunotherapy. In one example, a mixture of T cells and NK cells may be used for ACT. The expression level of CARs in T cells and NK cells, according to the present disclosure, is tuned and controlled by a small molecule that binds to the DD(s) operably linked to the CAR in the CA2 effector module.

[0469] In some embodiments, the CARs of the present disclosure may be placed under the transcriptional control of the T cell receptor alpha constant (TRAC) locus in the T cells to achieve uniform CAR expression while enhancing T cell potency. The TRAC locus may be disrupted using the CRISPR/Cas 9, zinc finger nucleases (ZFNs), TALENs followed by the insertion of the CAR construct. Methods of engineering CAR constructs directed to the TRAC locus are described in Eyquem J. et al (2017) Nature. 543(7643):113-117 (the contents of which are incorporated herein by reference in their entirety).

[0470] In some embodiments, NK cells engineered to express the present compositions may be used for ACT. NK cell activation induces perforin/granzyme-dependent apoptosis in target cells. NK cell activation also induces cytokine secretion such as IFN γ, TNF-α and GM-CSF. These cytokines enhance the phagocytic function of macrophages and their antimicrobial activity and augment the adaptive immune response via up-regulation of antigen presentation by antigen presenting cells such as dendritic cells (DCs) (Reviewed by Vivier et al., Nat. Immunol., 2008, 9(5): 503-510).

[0471] Other examples of genetic modification may include the introduction of chimeric antigen receptors (CARs) and the down-regulation of inhibitory NK cell receptors such as NKG2A.

[0472] NK cells may also be genetically reprogrammed to circumvent NK cell inhibitory signals upon interaction with tumor cells. For example, using CRISPR, ZFN, or TALEN to genetically modify NK cells to silence their inhibitory receptors may enhance the anti-tumor capacity of NK cells.

[0473] Immune cells can be isolated and expanded ex vivo using a variety of methods known in the art. For example, methods of isolating and expanding cytotoxic T cells are described in U.S. Pat. Nos. 6,805,861 and 6,531,451; US Patent Publication NO. US20160348072A1 and International Patent Publication NO. WO2016168595A1; the contents of each of which are incorporated herein by reference in their entirety. Isolation and expansion of NK cells is described in US Patent Publication NO. US20150152387A1, U.S. Pat. No. 7,435,596; and Oyer, J. L. (2016). Cytotherapy.18(5):653-63; the contents of each of which are incorporated by reference herein in its entirety. Specifically, human primary NK cells may be expanded in the presence of feeder cells e.g. a myeloid cell line that has been genetically modified to express membrane bound IL15, IL21, IL12 and 4-1BBL.

[0474] In some instances, sub populations of immune cells may be enriched for ACT. Methods for immune cell enrichment are taught in International Patent Publication NO. WO2015039100A1. In another example, T cells positive for B and T lymphocyte attenuator marker BTLA) may be used to enrich for T cells that are anti-cancer reactive as described in U.S. Pat. No. 9,512,401 (the content of each of which are incorporated herein by reference in their entirety).

[0475] In some embodiments, immune cells for ACT may be depleted of select sub populations to enhance T cell expansion. For example, immune cells may be depleted of Foxp3+ T lymphocytes to minimize the ant-tumor immune response using methods taught in US Patent Publication NO. US 20160298081A1; the contents of which are incorporated by reference herein in their entirety.

[0476] In some embodiments, activation and expansion of T cells for ACT is achieved antigenic stimulation of a transiently expressed Chimeric Antigen Receptor (CAR) on the cell surface. Such activation methods are taught in International Patent NO. WO2017015427, the content of which are incorporated herein by reference in their entirety.

[0477] In some embodiments, immune cells may be activated by antigens associated with antigen presenting cells (APCs). In some embodiments, the APCs may be dendritic cells, macrophages or B cells that antigen specific or nonspecific. The APCs may autologous or homologous in their organ. In some embodiments, the APCs may be artificial antigen presenting cells (aAPCs) such as cell based aAPCs or acellular aAPCs. Cell based aAPCs are may be selected from either genetically modified allogeneic cells such as human erythroleukemia cells or xenogeneic cells such as murine fibroblasts and Drosophila cells. Alternatively, the APCs maybe be acellular wherein the antigens or costimulatory domains are presented on synthetic surfaces such as latex beads, polystyrene beads, lipid vesicles or exosomes.

[0478] In some embodiments, cells of the disclosure, specifically T cells may be expanded using artificial cell platforms. In one embodiment, the mature T cells may be generated using artificial thymic organoids (ATOs) described by Seet CS et al. 2017. Nat Methods. 14, 521-530 (the contents of which are incorporated herein by reference in their entirety). ATOs are based on a stromal cell line expressing delta like canonical notch ligand (DLL1). In this method, stromal cells are aggregated with hematopoietic stem and progenitor cells by centrifugation and deployed on a cell culture insert at the air-fluid interface to generate organoid cultures. ATO-derived T cells exhibit naive phenotypes, a diverse T cell receptor (TCR) repertoire and TCR-dependent function.

[0479] In some embodiments, adoptive cell therapy is carried out by autologous transfer, wherein the cells are derived from a subject in need of a treatment and the cells, following isolation and processing are administered to the same subject. In other instances, ACT may involve allogenic transfer wherein the cells are isolated and/or prepared from a donor subject other than the recipient subject who ultimately receives cell therapy. The donor and recipient subject may be genetically identical, or similar or may express the same HLA class or subtype.

[0480] In some embodiments, the multiple immunotherapeutic agents introduced into the immune cells for ACT (e.g., T cells and NK cells) may be controlled by the same CA2 biocircuit. In other embodiments, the multiple immunotherapeutic agents introduced into the immune cells for ACT (e.g., T cells and NK cells) may be controlled by different CA2 biocircuits. In another example, a suicide gene and a CAR construct may be linked to two separate CA2 effector modules.

[0481] Following genetic modulation using SREs, CA2 biocircuits and compositions of the disclosure, cells are administered to the subject in need thereof. Methods for administration of cells for adoptive cell therapy are known and may be used in connection with the provided methods and compositions. For example, adoptive T cell therapy methods are described, e.g., in US Patent Application Publication No. 2003/0170238 to Gruenberg et al; U.S. Pat. No. 4,690,915 to Rosenberg; Rosenberg (2011) Nat Rev Clin Oncol. 8(10):577-85). See, e.g., Themeli et al. (2013) Nat Biotechnol. 31(10): 928-933; Tsukahara et al. (2013) Biochem Biophys Res Commun 438(1): 84-9; Davila et al. (2013) PLoS ONE 8(4): e61338; the contents of each of which are incorporated herein by reference in their entirety.

[0482] In some embodiments, immune cells for ACT may be modified to express one or more immunotherapeutic agents which facilitate immune cells activation, infiltration, expansion, survival and anti-tumor functions. The immunotherapeutic agents may be a second CAR or TCR specific to a different target molecule; a cytokine or a cytokine receptor; a chimeric switch receptor that converts an inhibitory signal to a stimulatory signal; a homing receptor that guides adoptively transferred cells to a target site such as the tumor tissue; an agent that optimizes the metabolism of the immune cell; or a safety switch gene (e.g., a suicide gene) that kills activated T cells when a severe event is observed after adoptive cell transfer or when the transferred immune cells are no-longer needed.

[0483] In some embodiments, immune cells used for adoptive cell transfer can be genetically manipulated to improve their persistence, cytotoxicity, tumor targeting capacity, and ability to home to disease sites in vivo, with the overall aim of further improving upon their capacity to kill tumors in cancer patients. One example is to introduce CA2 effector modules of the disclosure comprising cytokines such as gamma-cytokines (IL2 and IL15) into immune cells to promote immune cell proliferation and survival. Transduction of cytokine genes (e.g., gamma-cytokines IL2 and IL15) into cells will be able to propagate immune cells without addition of exogenous cytokines and cytokine expressing NK cells have enhanced tumor cytotoxicity.

[0484] In some embodiments, CA2 biocircuits, SREs or CA2 effector modules may be utilized to prevent T cell exhaustion. As used herein, “T cell exhaustion” refers to the stepwise and progressive loss of T cell function caused by chronic T cell activation. T cell exhaustion is a major factor limiting the efficacy of antiviral and antitumor immunotherapies. Exhausted T cells have low proliferative and cytokine producing capabilities concurrent with high rates of apoptosis and high surface expression of multiple inhibitory receptors. T cell activation leading to exhaustion may occur either in the presence or absence of the antigen.

[0485] In some embodiments, the CA2 biocircuits and their components may be utilized to prevent T cell exhaustion in the context of Chimeric Antigen Receptor-T cell therapy (CAR-T). In this context, exhaustion in some instances, may be caused by the oligomerization of the scFvs of the CAR on the cell surface which leads to continuous activation of the intracellular domains of the CAR. As a non-limiting example, CARs of the present disclosure may include scFvs that are unable to oligomerize. As another non-limiting example, CARs that are rapidly internalized and re-expressed following antigen exposure may also be selected to prevent chronic scFv oligomerization on cell surface. In one embodiment, the framework region of the scFvs may be modified to prevent constitutive CAR signaling (Long et al. 2014. Cancer Research. 74(19) S1; the contents of which are incorporated by reference in their entirety). Tunable CA2 biocircuits of the present disclosure may also be used to regulate the surface expression of the CAR on the T cell surface to prevent chronic T cell activation. The CARs of the disclosure may also be engineered to minimize exhaustion. As a non-limiting example, the 41-BB signaling domain may be incorporated into CAR design to ameliorate T cell exhaustion. In some embodiments, any of the strategies disclosed by Long H A et al. may be utilized to prevent exhaustion (Long A H et al. (2015) Nature Medicine 21, 581-590; the contents of which are incorporated herein by reference in their entirety).

[0486] In some embodiments, the tunable nature of the CA2 biocircuits of the present disclosure may be utilized to reverse human T cell exhaustion observed with tonic CAR signaling. Reversibly silencing the biological activity of adoptively transferred cells using compositions of the present disclosure may be used to reverse tonic signaling which, in turn, may reinvigorate the T cells. Reversal of exhaustion may be measured by the downregulation of multiple inhibitory receptors associated with exhaustion.

[0487] In some embodiments, T cell metabolic pathways may be modified to diminish the susceptibility of T cells to exhaustion. Metabolic pathways may include, but are not limited to glycolysis, urea cycle, citric acid cycle, beta oxidation, fatty acid biosynthesis, pentose phosphate pathway, nucleotide biosynthesis, and glycogen metabolic pathways. As a non-limiting example, payloads that reduce the rate of glycolysis may be utilized to restrict or prevent T cell exhaustion (Long et al. Journal for Immunotherapy of Cancer 2013, 1(Suppl 1): P21; the contents of which are incorporated by reference in their entirety). In one embodiment, T cells of the present disclosure may be used in combination with inhibitors of glycolysis such as 2-deoxyglucose, and rapamycin.

[0488] In some embodiments, payloads of the disclosure may be used in conjunction with antibodies or fragments that target T cell surface markers associated with T cell exhaustion. T-cell surface markers associated with T cell exhaustion that may be used include, but are not limited to, CTLA-1, PD-1, TGIT, LAG-3, 2B4, BTLA, TIM3, VISTA, and CD96.

[0489] In one embodiment, the payload of the disclosure may be a CD276 CAR (with CD28, 4-IBB, and CD3 zeta intracellular domains), that does not show an upregulation of the markers associated with early T cell exhaustion (see International patent publication No. WO2017044699; the contents of which are incorporated by reference in their entirety).

[0490] In some embodiments, the compositions of the present disclosure may be utilized to alter TIL (tumor infiltrating lymphocyte) populations in a subject. In one embodiment, any of the payloads described herein may be utilized to change the ratio of CD4 positive cells to CD8 positive populations. In some embodiments, TILs may be sorted ex vivo and engineered to express any of the cytokines described herein. Payloads of the disclosure may be used to expand CD4 and/or CD8 populations of TILs to enhance TIL mediated immune response.

### 2. Cancer Vaccines

[0491] In some embodiments, CA2 biocircuits, CA2 effector modules, payloads of interest (e.g., immunotherapeutic agents), vectors, cells and compositions of the present disclosure may be used in conjunction with cancer vaccines.

[0492] In some embodiments, cancer vaccine may comprise peptides and/or proteins derived from tumor associated antigen (TAA). Such strategies may be utilized to evoke an immune response in a subject, which in some instances may be a cytotoxic T lymphocyte (CTL) response. Peptides used for cancer vaccines may also modified to match the mutation profile of a subject. For example, EGFR derived peptides with mutations matched to the mutations found in the subject in need of therapy have been successfully used in patients with lung cancer (Li F et al. (2016) Oncoimmunology. October 7; 5(12): e1238539; the contents of which are incorporated herein by reference in their entirety).

[0493] In one embodiment, cancer vaccines of the present disclosure may superagonist altered peptide ligands (APL) derived from TAAs. These are mutant peptide ligands deviate from the native peptide sequence by one or more amino acids, which activate specific CTL clones more effectively than native epitopes. These alterations may allow the peptide to bind better to the restricting Class I MHC molecule or interact more favorably with the TCR of a given tumor-specific CTL subset. APLs may be selected using methods taught in US Patent Publication NO. US20160317633A1, the contents of which are incorporated herein by reference in their entirety.

### 3. Combination Treatments

[0494] In some embodiments, it is desirable to combine compositions, vectors and cells of the disclosure for administration to a subject. Compositions of the disclosure comprising different immunotherapeutic agents may be used in combination for enhancement of immunotherapy.

[0495] In some embodiments, it is desirable to combine compositions of the disclosure with adjuvants, that can enhance the potency and longevity of antigen-specific immune responses. Adjuvants used as immunostimulants in combination therapy include biological molecules or delivery carriers that deliver antigens. As non-limiting examples, the compositions of the disclosure may be combined with biological adjuvants such as cytokines, Toll Like Receptors, bacterial toxins, and/or saponins. In other embodiments, the compositions of the present disclosure may be combined with delivery carriers. Exemplary delivery carriers include, polymer microspheres, immune stimulating complexes, emulsions (oil-in-water or water-in-oil), aluminum salts, liposomes or virosomes.

[0496] In some embodiments, effector immune cells modified to express CA2 biocircuits, CA2 effector modules, SREs (e.g., DDs) and payloads of the disclosure may be combined with the biological adjuvants described herein. Dual regulation of CAR and cytokines and ligands to segregate the kinetic control of target-mediated activation from intrinsic cell T cell expansion. Such dual regulation also minimizes the need for pre-conditioning regimens in patients. As a non-limiting example, DD regulated CAR e.g. CD19 CAR may be combined with cytokines e.g. IL12 to enhance the anti-tumor efficacy of the CAR (Pegram H. J., et al. Tumor-targeted T cells modified to secrete IL12 eradicate systemic tumors without need for prior conditioning. Blood.2012; 119:4133-41; the contents of each of which are incorporated herein by reference in their entirety). As another non-limiting example, Merchant et al. combined dendritic cell-based vaccinations with recombinant human IL7 to improve outcome in high-risk pediatric sarcomas patients (Merchant, M. S. et. al. Adjuvant immunotherapy to Improve Outcome in High-Risk Pediatric Sarcomas. Clin Cancer Res. 2016. 22(13):3182-91; the contents of each of which are incorporated herein by reference in their entirety).

[0497] In some embodiments, effector immune cells modified to express one or more antigen-specific TCRs or CARs may be combined with compositions of the disclosure comprising immunotherapeutic agents that convert the immunosuppressive tumor microenvironment.

[0498] In one aspect, effector immune cells modified to express CARs specific to different target molecules on the same cell may be combined. In another aspect, different immune cells modified to express the same CAR construct such as NK cells and T cells may be used in combination for a tumor treatment, for instance, a T cell modified to express a CD19 CAR may be combined with a NK cell modified to express the same CD19 CAR to treat B cell malignancy.

[0499] In other embodiments, immune cells modified to express CARs may be combined with checkpoint blockade agents.

[0500] In some embodiments, effector immune cells modified to expressed CA2 biocircuits, CA2 effector modules, SREs (e.g., CA2 DDs) and payloads of the disclosure may be combined with cancer vaccines of the disclosure.

[0501] In some embodiments, methods of the disclosure may include combination of the compositions of the disclosure with other agents effective in the treatment of cancers, infection diseases and other immunodeficient disorders, such as anti-cancer agents. As used herein, the term “anti-cancer agent” refers to any agent which is capable of negatively affecting cancer in a subject, for example, by killing cancer cells, inducing apoptosis in cancer cells, reducing the growth rate of cancer cells, reducing the incidence or number of metastases, reducing tumor size, inhibiting tumor growth, reducing the blood supply to a tumor or cancer cells, promoting an immune response against cancer cells or a tumor, preventing or inhibiting the progression of cancer, or increasing the lifespan of a subject with cancer.

[0502] In some embodiments, anti-cancer agent or therapy may be a chemotherapeutic agent, or radiotherapy, immunotherapeutic agent, surgery, or any other therapeutic agent which, in combination with the present disclosure, improves the therapeutic efficacy of treatment.

[0503] In one embodiment, a CA2 effector module comprising a CD19 CAR may be used in combination with amino pyrimidine derivatives such as the Burkit's tyrosine receptor kinase (BTK) inhibitor using methods taught in International Patent Application NO. WO2016164580, the contents of which are incorporated herein by reference in their entirety.

[0504] In some embodiments, compositions of the present disclosure may be used in combination with immunotherapeutics other than the inventive therapy described herein, such as antibodies specific to some target molecules on the surface of a tumor cell.

[0505] Exemplary chemotherapies include, without limitation, Acivicin; Aclarubicin; Acodazole hydrochloride; Acronine; Adozelesin; Aldesleukin; Altretamine; Ambomycin; Ametantrone acetate; Amsacrine; Anastrozole; Anthramycin; Asparaginase; Asperrin, Sulindac, Curcumin, alkylating agents including: Nitrogen mustards such as mechlor-ethamine, cyclophosphamide, ifosfamide, melphalan and chlorambucil; nitrosoureas such as carmustine (BC U), lomustine (CCNU), and semustine (methyl-CC U); thylenimines/methylmelamine such as thriethylenemelamine (TEM), triethylene, thiophosphoramide (thiotepa), hexamethylmelamine (HMM, altretamine); alkyl sulfonates such as busulfan; triazines such as dacarbazine (DTIC); antimetabolites including folic acid analogs such as methotrexate and trimetrexate, pyrrolidine analogs such as 5-fluorouracil, fluorodeoxyuridine, gemcitabine, cytosine arabinoside (AraC, cytarabine), 5-azacytidine, 2,2′-difluorodeoxycytidine, purine analogs such as 6-mercaptopurine, 6-thioguanine, azathioprine, 2′-deoxycoformycin (pentostatin), erythrohydroxynonyladenine (EHNA), fludarabine phosphate, and 2-chlorodeoxyadenosine (cladribine, 2-CdA); natural products including antimitotic drugs such as paclitaxel, vinca alkaloids including vinblastine (VLB), vincristine, and vinorelbine, taxotere, estramustine, and estramustine phosphate; epipodophylotoxins such as etoposide and teniposide; antibiotics, such as actimomycin D, daunomycin (rubidomycin), doxorubicin, mitoxantrone, idarubicin, bleomycins, plicamycin (mithramycin), mitomycinC, and actinomycin; enzymes such as L-asparaginase, cytokines such as interferon (IFN)—gamma, tumor necrosis factor (TNF)-alpha, TNF-beta and GM-CSF, anti-angiogenic factors, such as angiostatin and endostatin, inhibitors of FGF or VEGF such as soluble forms of receptors for angiogenic factors, including soluble VGF/VEGF receptors, platinum coordination complexes such as cisplatin and carboplatin, anthracenediones such as mitoxantrone, substituted urea such as hydroxyurea, methylhydrazine derivatives including N-methylhydrazine (MIFf) and procarbazine, adrenocortical suppressants such as mitotane (o,p′-DDD) and aminoglutethimide; hormones and antagonists including adrenocorticosteroid antagonists such as prednisone and equivalents, dexamethasone and aminoglutethimide; progestin such as hydroxyprogesterone caproate, medroxyprogesterone acetate and megestrol acetate; estrogen such as diethylstilbestrol and ethinyl estradiol equivalents; antiestrogen such as tamoxifen; androgens including testosterone propionate and fluoxymesterone/equivalents; antiandrogens such as flutamide, gonadotropin-releasing hormone analogs and leuprolide; non-steroidal antiandrogens such as flutamide; kinase inhibitors, histone deacetylase inhibitors, methylation inhibitors, proteasome inhibitors, monoclonal antibodies, oxidants, anti-oxidants, telomerase inhibitors, BH3 mimetics, ubiquitin ligase inhibitors, stat inhibitors and receptor tyrosin kinase inhibitors such as imatinib mesylate (marketed as Gleevac or Glivac) and erlotinib (an EGF receptor inhibitor) now marketed as Tarveca; anti-virals such as oseltamivir phosphate, Amphotericin B, and palivizumab; Sdi 1 mimetics; Semustine; Senescence derived inhibitor 1; Sparfosic acid; Spicamycin D; Spiromustine; Splenopentin; Spongistatin 1; Squalamine; Stipiamide; Stromelysin inhibitors; Sulfinosine; Superactive vasoactive intestinal peptide antagonist; Velaresol; Veramine; Verdins; Verteporfin; Vinorelbine; Vinxaltine; Vitaxin; Vorozole; Zanoterone; Zeniplatin; Zilascorb; and Zinostatin stimalamer; PI3Kβ small-molecule inhibitor, GSK2636771; pan-PI3K inhibitor (BKM120); BRAF inhibitors. Vemurafenib (Zelboraf) and dabrafenib (Tafinlar); or any analog or derivative and variant of the foregoing.

[0506] Radiotherapeutic agents and factors include radiation and waves that induce DNA damage for example, β-irradiation, X-rays, UV-irradiation, microwaves, electronic emissions, radioisotopes, and the like. Therapy may be achieved by irradiating the localized tumor site with the above described forms of radiations. It is most likely that all of these factors effect a broad range of damage DNA, on the precursors of DNA, the replication and repair of DNA, and the assembly and maintenance of chromosomes. Dosage ranges for X-rays range from daily doses of 50 to 200 roentgens for prolonged periods of time (3 to 4 weeks), to single doses of 2000 to 6000 roentgens. Dosage ranges for radioisotopes vary widely, and depend on the half-life of the isotope, the strength and type of radiation emitted, and the uptake by the neoplastic cells.

[0507] In some embodiments, the chemotherapeutic agent may be an immunomodulatory agent such as lenalidomide (LEN). Recent studies have demonstrated that lenalidomide can enhance antitumor functions of CAR modified T cells (Otahal et al., Oncoimmunology, 2015, 5(4): e1115940). Some examples of anti-tumor antibodies include tocilizumab, siltuximab.

[0508] Other agents may be used in combination with compositions of the disclosure may also include, but not limited to, agents that affect the upregulation of cell surface receptors and their ligands such as Fas/Fas ligand, DR4 or DR5/TRAIL and GAP junctions, cytostatic and differentiation agents, inhibitors of cell adhesion such as focal adhesion kinase (FAKs) inhibitors and Lovastatin, or agents that increase the sensitivity of the hyper proliferative cells to apoptotic inducers such as the antibody C225.

[0509] The combinations may include administering the compositions of the disclosure and other agents at the same time or separately. Alternatively, the present immunotherapy may precede or follow the other agent/therapy by intervals ranging from minutes, days, weeks to months.

### 4. Diseases

[0510] Provided in the present disclosure is a method of reducing a tumor volume or burden in a subject in need, the method comprising introducing into the subject a composition of the disclosure.

[0511] The present disclosure also provides methods for treating a cancer in a subject, comprising administering to the subject an effective amount of an effector immune cell genetically modified to express at least one CA2 effector module of the disclosure.

### Cancer

[0512] Various cancers may be treated with pharmaceutical compositions, CA2 biocircuits, CA2 biocircuit components, CA2 effector modules including their SREs or payloads of the present disclosure. As used herein, the term “cancer” refers to any of various malignant neoplasms characterized by the proliferation of anaplastic cells that tend to invade surrounding tissue and metastasize to new body sites and also refers to the pathological condition characterized by such malignant neoplastic growths. Cancers may be tumors or hematological malignancies, and include but are not limited to, all types of lymphomas/leukemias, carcinomas and sarcomas, such as those cancers or tumors found in the anus, bladder, bile duct, bone, brain, breast, cervix, colon/rectum, endometrium, esophagus, eye, gallbladder, head and neck, liver, kidney, larynx, lung, mediastinum (chest), mouth, ovaries, pancreas, penis, prostate, skin, small intestine, stomach, spinal marrow, tailbone, testicles, thyroid and uterus.

[0513] Types of carcinomas which may be treated with the compositions of the present disclosure include, but are not limited to, papilloma/carcinoma, choriocarcinoma, endodermal sinus tumor, teratoma, adenoma/adenocarcinoma, melanoma, fibroma, lipoma, leiomyoma, rhabdomyoma, mesothelioma, angioma, osteoma, chondroma, glioma, lymphoma/leukemia, squamous cell carcinoma, small cell carcinoma, large cellundifferentiated carcinomas, basal cell carcinoma and sinonasal undifferentiated carcinoma.

[0514] Types of sarcomas which may be treated with the compositions of the present disclosure include, but are not limited to, soft tissue sarcoma such as alveolar soft part sarcoma, angiosarcoma, dermatofibrosarcoma, desmoid tumor, desmoplastic small round cell tumor, extraskeletal chondrosarcoma, extraskeletal osteosarcoma, fibrosarcoma, hemangiopericytoma, hemangiosarcoma, Kaposi's sarcoma, leiomyosarcoma, liposarcoma, lymphangiosarcoma, lymphosarcoma, malignant fibrous histiocytoma, neurofibrosarcoma, rhabdomyosarcoma, synovial sarcoma, and Askin's tumor, Ewing's sarcoma (primitive neuroectodermal tumor), malignant hemangioendothelioma, malignant schwannoma, osteosarcoma, and chondrosarcoma.

### Infectious Diseases

[0515] In some embodiment, CA2 biocircuits of the disclosure may be used for the treatment of infectious diseases. CA2 biocircuits of the disclosure may be introduced in cells suitable for adoptive cell transfer such as macrophages, dendritic cells, natural killer cells, and or T cells. Infectious diseases treated by the CA2 biocircuits of the disclosure may be diseases caused by viruses, bacteria, fungi, and/or parasites. IL15-IL15Ra payloads of the disclosure may be used to increase immune cell proliferation and/or persistence of the immune cells useful in treating infectious diseases.

[0516] “Infectious diseases” herein refer to diseases caused by any pathogen or agent that infects mammalian cells, preferably human cells and causes a disease condition. Examples thereof include bacteria, yeast, fungi, protozoans, mycoplasma, viruses, prions, and parasites. Examples include those involved in (a) viral diseases such as, for example, diseases resulting from infection by an adenovirus, a herpesvirus (e.g., HSV-I, HSV-II, CMV, or VZV), a poxvirus (e-g-, an orthopoxvirus such as variola or vaccinia, or molluscum contagiosum), a picornavirus (e.g., rhinovirus or enterovirus), an orthomyxovirus (e.g., influenzavirus), a paramyxovirus (e.g., parainfluenza virus, mumps virus, measles virus, and respiratory syncytial virus (RSV)), a coronavirus (e.g., SARS), a papovavirus (e.g., papillomaviruses, such as those that cause genital warts, common warts, or plantar warts), a hepadnavirus (e.g., hepatitis B virus), a flavivirus (e.g., hepatitis C virus or Dengue virus), or a retrovirus (e.g., a lentivirus such as HIV); (b) bacterial diseases such as, for example, diseases resulting from infection by bacteria of, for example, the genus Escherichia, Enterobacter, Salmonella, Staphylococcus, Shigella, Listeria, Aerobacter, Helicobacter, Klebsiella, Proteus, Pseudomonas, Streptococcus, Chlamydia, Mycoplasma, Pneumococcus, Neisseria, Clostridium, Bacillus, Corynebacterium, Mycobacterium, Campylobacter, Vibrio, Serratia, Providencia, Chromobacterium, Brucella, Yersinia, Haemophilus, or Bordetella; (c) other infectious diseases, such chlamydia, fungal diseases including but not limited to candidiasis, aspergillosis, histoplasmosis, cryptococcal meningitis, parasitic diseases including but not limited to malaria, Pneumocystis carnii pneumonia, leishmaniasis, cryptosporidiosis, toxoplasmosis, and trypanosome infection and prions that cause human disease such as Creutzfeldt-Jakob Disease (CJD), variant Creutzfeldt-Jakob Disease (vCJD), Gerstmann-Straassler-Scheinker syndrome, Fatal Familial Insomnia and kuru.

### Combination Treatments

[0517] The disclosure further relates to the use of pharmaceutical compositions, CA2 biocircuits, CA2 biocircuit components, CA2 effector modules including their SREs or payloads of the present disclosure for treating one or more forms of cancer, in combination with other pharmaceuticals and/or other therapeutic methods, e.g., with known pharmaceuticals and/or known therapeutic methods, such as, for example, those which are currently employed for treating these disorders. For example, the pharmaceutical compositions, CA2 biocircuits, CA2 biocircuit components, CA2 effector modules including their SREs or payloads of the present disclosure can also be administered in conjunction with one or more additional anti-cancer treatments, such as biological, chemotherapy and radiotherapy. Accordingly, a treatment can include, for example, imatinib (Gleevac), all-trans-retinoic acid, a monoclonal antibody treatment (gemtuzumab, ozogamicin), chemotherapy (for example, chlorambucil, prednisone, prednisolone, vincristine, cytarabine, clofarabine, farnesyl transferase inhibitors, decitabine, inhibitors of MDR1), rituximab, interferon-α, anthracycline drugs (such as daunorubicin or idarubicin), L-asparaginase, doxorubicin, cyclophosphamide, doxorubicin, bleomycin, fludarabine, etoposide, pentostatin, or cladribine), bone marrow transplant, stem cell transplant, radiation therapy, anti-metabolite drugs (methotrexate and 6-mercaptopurine), or any of the antibodies taught in Table 5 of International Publication No. WO2017/180587 (the contents of which are herein incorporated by reference in their entirety) or combinations thereof.

Combinations with Radiation

[0518] Radiation therapy (also called radiotherapy, X-ray therapy, or irradiation) is the use of ionizing radiation to kill cancer cells and shrink tumors. Radiation therapy can be administered externally via external beam radiotherapy (EBRT) or internally via brachytherapy. The effects of radiation therapy are localized and confined to the region being treated. Radiation therapy may be used to treat almost every type of solid tumor, including cancers of the brain, breast, cervix, larynx, lung, pancreas, prostate, skin, stomach, uterus, or soft tissue sarcomas. Radiation is also used to treat leukemia and lymphoma.

Combination with Chemotherapy

[0519] Chemotherapy is the treatment of cancer with drugs that can destroy cancer cells. In current usage, the term “chemotherapy” usually refers to cytotoxic drugs which affect rapidly dividing cells in general, in contrast with targeted therapy. Chemotherapy drugs interfere with cell division in various possible ways, e.g. with the duplication of DNA or the separation of newly formed chromosomes. Most forms of chemotherapy target all rapidly dividing cells and are not specific to cancer cells, although some degree of specificity may come from the inability of many cancer cells to repair DNA damage, while normal cells generally can.

[0520] Most chemotherapy regimens are given in combination. Exemplary chemotherapeutic agents include, but are not limited to, 5-FU Enhancer, 9-AC, AG2037, AG3340, Aggrecanase Inhibitor, Aminoglutethimide, Amsacrine (m-AMSA), Asparaginase, Azacitidine, Batimastat (BB94), BAY 12-9566, BCH-4556, Bis-Naphtalimide, Busulfan, Capecitabine, Carboplatin, 6

[0521] Osan, cdk4/cdk2 inhibitors, Chlorombucil, CI-994, Cisplatin, Cladribine, CS-682, Cytarabine HCl, D2163, Dactinomycin, Daunorubicin HCl, DepoCyt, Dexifosamide, Docetaxel, Dolastain, Doxifluridine, Doxorubicin, DX8951f, E 7070, EGFR, Epirubicin, Erythropoietin, Estramustine phosphate sodium, Etoposide (VP16-213), Farnesyl Transferase Inhibitor, FK 317, Flavopiridol, Floxuridine, Fludarabine, Fluorouracil (5-FU), Flutamide, Fragyline, Gemcitabine, Hexamethylmelamine (HMM), Hydroxyurea (hydroxycarbamide), Ifosfamide, Interferon Alfa-2a, Interferon Alfa-2b, Interleukin-2, Irinotecan, ISI 641, Krestin, Lemonal DP 2202, Leuprolide acetate (LHRH-releasing factor analogue), Levamisole, LiGLA (lithium-gamma linolenate), Lodine Seeds, Lometexol, Lomustine (CCNU), Marimistat, Mechlorethamine HCl (nitrogen mustard), Megestrol acetate, Meglamine GLA, Mercaptopurine, Mesna, Mitoguazone (methyl-GAG; methyl glyoxal bis-guanylhydrazone; MGBG), Mitotane (o.p′-DDD), Mitoxantrone, Mitoxantrone HCl, MMI 270, MMP, MTA/LY 231514, Octreotide, ODN 698, OK-432, Oral Platinum, Oral Taxoid, Paclitaxel (TAXOL.RTM.), PARP Inhibitors, PD 183805, Pentostatin (2′ deoxycoformycin), PKC 412, Plicamycin, Procarbazine HCl, PSC 833, Ralitrexed, RAS Farnesyl Transferase Inhibitor, RAS Oncogene Inhibitor, Semustine (methyl-CCNU), Streptozocin, Suramin, Tamoxifen citrate, Taxane Analog, Temozolomide, Teniposide (VM-26), Thioguanine, Thiotepa, Topotecan, Tyrosine Kinase, UFT (Tegafur/Uracil), Valrubicin, Vinblastine sulfate, Vindesine sulfate, VX-710, VX-853, YM 116, ZD 0101, ZD 0473/Anormed, ZD 1839, ZD 9331.

### Immuno-Oncology and Cell Therapies

[0522] Recent progress in the field of cancer immunology has allowed the development of several approaches to help the immune system keep the cancer at bay. Such immunotherapy approaches include the targeting of cancer antigens through monoclonal antibodies or through adoptive transfer of ex vivo engineered T cells (e.g., which contain chimeric antigen receptors or engineered T cell receptors).

[0523] In some embodiments, pharmaceutical compositions, CA2 biocircuits, CA2 biocircuit components, CA2 effector modules including their SREs or payloads of the present disclosure may be used in the modulation or alteration or exploitation of the immune system to target one or more cancers. This approach may also be considered with other such biological approaches, e.g., immune response modifying therapies such as the administration of interferons, interleukins, colony-stimulating factors, other monoclonal antibodies, vaccines, gene therapy, and nonspecific immunomodulating agents are also envisioned as anti-cancer therapies to be combined with the pharmaceutical compositions, CA2 biocircuits, CA2 biocircuit components, CA2 effector modules including their SREs or payloads of the present disclosure.

[0524] Cancer immunotherapy refers to a diverse set of therapeutic strategies designed to induce the patient's own immune system to fight the cancer. In some embodiments, pharmaceutical compositions, CA2 biocircuits, CA2 biocircuit components, CA2 effector modules including their SREs or payloads of the present disclosure are designed as immune-oncology therapeutics.

### Cell Therapies

[0525] There are several types of cellular immunotherapies, including tumor infiltrating lymphocyte (TIL) therapy, genetically engineered T cells bearing chimeric antigen receptors (CARs), and recombinant TCR technology.

[0526] According to the present disclosure, the CA2 biocircuits and systems may be used in the development and implementation of cell therapies such as adoptive cell therapy. Certain CA2 effector modules useful in cell therapy are given in FIGS. 8-13 of the International Publication WO2017/180587 (the contents each of which are herein incorporated by reference in their entirety). The CA2 biocircuits, CA2 effector modules and their SREs and payloads may be used in cell therapies to effect TCR removal-TCR gene disruption, TCR engineering, to regulate epitope tagged receptors, in APC platforms for stimulating T cells, as a tool to enhance ex vivo APC stimulation, to improve methods of T cell expansion, in ex vivo stimulation with antigen, in TCR/CAR combinations, in the manipulation or regulation of TILs, in allogeneic cell therapy, in combination T cell therapy with other treatment lines (e.g. radiation, cytokines), to encode engineered TCRs, or modified TCRs, or to enhance T cells other than TCRs (e.g. by introducing cytokine genes, genes for the checkpoint inhibitors PD1, CTLA4).

[0527] In some embodiments, improved response rates are obtained in support of cell therapies.

[0528] Expansion and persistence of cell populations may be achieved through regulation or fine tuning of the payloads, e.g., the receptors or pathway components in T cells, NK cells or other immune-related cells. In some embodiments, CA2 biocircuits, SREs or CA2 effector modules are designed to spatially and/or temporally control the expression of proteins which enhance T-cell or NK cell response. In some embodiments, CA2 biocircuits, SREs or CA2 effector modules are designed to spatially and/or temporally control the expression of proteins which inhibit T-cell or NK cell response.

[0529] In some embodiments, CA2 biocircuits, SREs or CA2 effector modules are designed to reshape the tumor microenvironment to extend utility of the biocircuit or a pharmaceutical composition beyond direct cell killing.

[0530] In some embodiments, CA2 biocircuits, SREs or CA2 effector modules are designed to reduce, mitigate or eliminate the CAR cytokine storm. In some embodiments, such reduction, mitigation and/or elimination occurs in solid tumors or tumor microenvironments.

[0531] In some embodiments, the CA2 effector modules may encode one or more cytokines.

[0532] In some embodiments, the CA2 effector modules of the present disclosure used for the expansion of cells may include a payload comprising any of the genes of the Ras superfamily.

[0533] The immune system can be harnessed for the treatment of diseases beyond cancer. CA2 biocircuits, their components, SREs or CA2 effector modules may be utilized in immunotherapy for the treatment of diseases including, but not limited to, autoimmune diseases, allergies, graft versus host disease, and diseases and disorders that may result in immunodeficiency such as acquired immune deficiency syndrome (AIDS).

[0534] In some embodiments, payloads of the present disclosure may be a chimeric antigen receptor (CAR), which when transduced into immune cells (e.g., T cells and NK cells), can re-direct the immune cells against the target (e.g., a tumor cell) which expresses a molecule recognized by the extracellular target moiety of the CAR.

[0535] In some embodiments, the targeting moiety of a CAR construct may be a natural ligand of the target molecule, or a variant and/or fragment thereof capable of binding the target molecule. In some aspects, the targeting moiety of a CAR may be a receptor of the target molecule.

[0536] In some embodiments, the targeting moiety of a CAR may recognize a tumor specific antigen (TSA), for example a cancer neoantigen whose expression is restricted to tumor cells.

[0537] As non-limiting examples, the CAR of the present disclosure may comprise the extracellular targeting domain capable of binding to a tumor specific antigen selected from 5T4, 707-AP, A33, AFP (α-fetoprotein), AKAP-4 A kinase anchor protein 4), ALK, α5β1-integrin, androgen receptor, annexin II, alpha-actinin-4, ART-4, B1, B7H3, B7H4, BAGE (B melanoma antigen), BCMA, BCR-ABL fusion protein, beta-catenin, BKT-antigen, BTAA, CA-I (carbonic anhydrase I), CA50 (cancer antigen 50), CA125, CA15-3, CA195, CA242, calretinin, CAIX (carbonic anhydrase), CAMEL (cytotoxic T-lymphocyte recognized antigen on melanoma), CAM43, CAP-1, Caspase-8/m, CD4, CD5, CD7, CD19, CD20, CD22, CD23, CD25, CD27, CD27/m, CD28, CD30, CD33, CD34, CD36, CD38, CD40/CD154, CD41, CD44v6, CD44v7/8, CD45, CD49f, CD56, CD68\KP1, CD74, CD79a/CD79b, CD103, CD123, CD133, CD138, CD171, cdc27/m, CDK4 (cyclin dependent kinase 4), CDKN2A, CDS, CEA (carcinoembryonic antigen), CEACAM5, CEACAM6, chromogranin, c-Met, c-Myc, coa-1, CSAp, CT7, CT10, cyclophilin B, cyclin B1, cytoplasmic tyrosine kinases, cytokeratin, DAM-10, DAM-6, dek-can fusion protein, desmin, DEPDC1 (DEP domain containing 1), E2A-PRL, EBNA, EGF-R (epidermal growth factor receptor), EGP-1(epithelial glycoprotein-1) (TROP-2), EGP-2, EGP-40, EGFR (epidermal growth factor receptor), EGFRvIII, EF-2, ELF2M, EMMPRIN, EpCAM (epithelial cell adhesion molecule), EphA2, Epstein Barr virus antigens, Erb (ErbB1; ErbB3; ErbB4), ETA (epithelial tumor antigen), ETV6-AML1 fusion protein, FAP (fibroblast activation protein), FBP (folate-binding protein), FGF-5, folate receptor a, FOS related antigen 1, fucosyl GM1, G250, GAGE (GAGE-1; GAGE-2), galactin, GD2 (ganglioside), GD3, GFAP (glial fibrillary acidic protein), GM2 (oncofetal antigen-immunogenic-1; OFA-I-1), GnT-V, Gp100, H4-RET, HAGE (helicase antigen), HER-2/neu, HIFs (hypoxia inducible factors), HIF-1α, HIF-2α, HLA-A2, HLA-A*0201-R170I, HLA-A11, HMWMAA, Hom/Mel-40, HSP70-2M (Heat shock protein 70), HST-2, HTgp-175, hTERT (or hTRT), human papillomavirus-E6/human papillomavirus-E7 and E6, iCE (immune-capture EIA), IGF-1R, IGH-IGK, IL2R, IL5, ILK (integrin-linked kinase), IMP3 (insulin-like growth factor II mRNA-binding protein 3), IRF4 (interferon regulatory factor 4), KDR (kinase insert domain receptor), KIAA0205, KRAB-zinc finger protein (KID)-3; KID31, KSA (17-1A), K-ras, LAGE, LCK, LDLR/FUT (LDLR-fucosyltransferaseAS fusion protein), LeY (Lewis Y), MAD-CT-1, MAGE (tyrosinase, melanoma-associated antigen) (MAGE-1; MAGE-3), melan-A tumor antigen (MART), MART-2/Ski, MC1R (melanocortin 1 receptor), MDM2, mesothelin, MPHOSPH1, MSA(muscle-specific actin), mTOR (mammalian targets of rapamycin), MUC-1, MUC-2, MUM-1 (melanoma associated antigen (mutated) 1), MUM-2, MUM-3, Myosin/m, MYL-RAR, NA88-A, N-acetylglucosaminyltransferase, neo-PAP, NF-KB (nuclear factor-kappa B), neurofilament, NSE (neuron-specific enolase), Notch receptors, NuMa, N-Ras, NY-BR-1, NY-CO-1, NY-ESO-1, Oncostatin M, OS-9, OY-TES1, p53 mutants, p190 minor bcr-abl, p15(58), p185erbB2, p80erbB-3, PAGE (prostate associated gene), PAP (prostatic acid phosphatase), PAX3, PAX5, PDGFR (platelet derived growth factor receptor), cytochrome P450 involved in piperidine and pyrrolidine utilization (PIPA), Pml-RAR alpha fusion protein, PR-3 (proteinase 3), PSA (prostate specific antigen), PSM, PSMA (Prostate stem cell antigen), PRAME (preferentially expressed antigen of melanoma), PTPRK, RAGE (renal tumor antigen), Raf (A-Raf, B-Raf and C-Raf), Ras, receptor tyrosine kinases, RCAS1, RGSS, ROR1 (receptor tyrosine kinase-like orphan receptor 1), RU1, RU2, SAGE, SART-1, SART-3, SCP-1, SDCCAG16, SP-17 (sperm protein 17), src-family, SSX (synovial sarcoma×breakpoint)-1, SSX-2(HOM-MEL-40), SSX-3, SSX-4, SSX-5, STAT-3, STAT-5, STAT-6, STEAD, STn, survivin, syk-ZAP70, TA-90 (Mac-2 binding protein\clophilin C-associated protein), TAAL6, TACSTD1 (tumor associated calcium signal transducer 1), TACSTD2, TAG-72-4, TAGE, TARP (T cell receptor gamma alternate reading frame protein), TEL/AML1 fusion protein, TEM1, TEM8 (endosialin or CD248), TGFβ, TIE2, TLP, TMPRSS2 ETS fusion gene, TNF-receptor (TNF-α receptor, TNF-β receptor; or TNF-γ receptor), transferrin receptor, TPS, TRP-1 (tyrosine related protein 1), TRP-2, TRP-2/INT2, TSP-180, VEGF receptor, WNT, WT-1 (Wilm's tumor antigen) and XAGE.

[0538] As non-limiting examples, the targeting moiety of the present disclosure may be a scFv antibody that recognizes a tumor specific antigen (TSA), for example scFvs of antibodies SS, SS1 and HN1 that specifically recognize and bind to human mesothelin (U.S. Pat. No. 9,359,447), scFv of antibody of GD2 (U.S. Pat. No. 9,315,585), a CD19 antigen binding domain (U.S. Pat. No. 9,328,156); a NKG2D ligand binding domain (U.S. Pat. No. 9,273,283; US patent publication NO.: US20160311906A1); human anti-mesothelin scFvs comprising the amino acid sequences of SEQ ID NO.: 11 and 12 of U.S. Pat. No. 9,272,002; an anti-CS1 binding agent (US patent publication NO.: US20160075784); an anti-BCMA binding domain (International Patent Publication NO.: WO2016/014565); anti-CD19 scFv antibody of SEQ ID NO.: 20 in U.S. Pat. No. 9,102,761; GFR alpha 4 antigen binding fragments having the amino acid sequences of SEQ ID NOs.: 59 and 79 of International patent publication NO.: 2016/025880; anti-CLL-1 (C-type lectin-like molecule 1) binding domains having the amino acid sequences of SEQ ID NO.:47, 44, 48, 49, 50, 39, 40, 41, 42, 43, 45, 46, 51, 73, 70, 74, 75, 76, 65, 66, 67, 68, 69, 71, 72, 77, 195, 86, 83, 87, 88, 89, 78, 79, 80, 81, 82, 84, 85, 90 and 196 of International Patent Publication NO.: WO2016014535); CD33 binding domains having the amino acid sequences of SEQ ID NOs.: 39-46 of International patent publication NO.: WO2016014576; a GPC3 (glypican-3) binding domain (SEQ ID NO.: 2 and SEQ ID NO.: 4 of International patent publication NO.: WO2016036973); a GFR alpha4 (Glycosyl-phosphatidylinositol (GPI)-linked GDNF family α-receptor 4 cell-surface receptor) binding domain (International Patent Publication NO.: WO2016025880); CD123 binding domains having the amino acid sequences of SEQ ID NOs.: 480, 483, 485, 478, 158, 159, 160, 157, 217, 218, 219, 216, 276, 277, 278, and 275 of International patent publication NO.: WO20160258896; an anti-ROR1 antibody or fragments thereof (International patent publication NO.: WO2016016344); scFvs specific to GPC-3 (SEQ ID NOs.: 1 and 24 of International patent publication NO.: WO2016049459); scFv for CSPG4 (SEQ ID NO.: 2 of International patent publication NO.: WO2015080981; scFv for folate receptor alpha (US Patent Publication NO.: US20170002072A1); the contents of each of which are incorporated herein by reference in their entirety.

[0539] The intracellular domain of a CAR fusion polypeptide, after binding to its target molecule, transmits a signal to the effector immune cell, activating at least one of the normal effector functions of effector immune cells, including cytolytic activity (e.g., cytokine secretion) or helper activity. Therefore, the intracellular domain comprises an “intracellular signaling domain” of a T cell receptor (TCR). In some embodiments, the intracellular signaling domain of the present disclosure may contain signaling motifs which are known as immunoreceptor tyrosine-based activation motifs (ITAMs). In some embodiments, the intracellular region of the present disclosure further comprises one or more costimulatory signaling domains which provide additional signals to the effector immune cells. These costimulatory signaling domains, in combination with the signaling domain can further improve expansion, activation, memory, persistence, and tumor-eradicating efficiency of CAR engineered immune cells (e.g., CAR T cells). In some cases, the costimulatory signaling region contains 1, 2, 3, or 4 cytoplasmic domains of one or more intracellular signaling and/or costimulatory molecules.

[0540] In one embodiment of the present disclosure, the CAR of the present disclosure is a CD19 specific CAR. In the context of the disclosure, an effector module may comprise an CA2 DD operably linked to a CD19 CAR fusion construct.

[0541] In some embodiments, pharmaceutical compositions, CA2 biocircuits, CA2 biocircuit components, CA2 effector modules including their SREs or payloads of the present disclosure may be used in the modulation or alteration or exploitation of the immune system to target one or more self-reactive immune components such as auto antibodies and self-reactive immune cells to attenuate autoimmune diseases. In some embodiments, the SREs of the present disclosure may be utilized in regulating or tuning the Chimeric Auto Antibody Receptor (CAAR) based T cell therapy in order to optimize its utility in the treatment of autoimmune diseases (Ellebrecht C. T. et al., Science. 2016. Jul. 8; 353(6295):179-84; the contents of which are incorporated herein by reference in their entirety). In some embodiments, CA2 biocircuits, SREs or CA2 effector modules are designed to modulate Tregs to attenuate autoimmune disorders. In such a case, IL2 may be regulated using a singly tuned module or one having multiple tuned features as described herein.

[0542] In some embodiments, CA2 biocircuits, SREs or CA2 effector modules may be utilized in immunotherapy-based treatments to attenuate or mitigate Graft vs. Host disease (GVHD). GVHD refers to a condition following stem cell or bone marrow transplant where in the allogeneic donor immune cells react against host tissue. In some embodiments, CA2 biocircuits, SREs or CA2 effector modules are designed to modulate Tregs for the treatment of GVHD. In one embodiment, CA2 biocircuits containing an CA2 effector module encoding TNF-alpha may be used to modulate Tregs to minimize GVHD (Pierini, A. et al., Blood. 2016. Aug. 11; 128(6):866-71; the contents of which are incorporated herein by reference in their entirety).

[0543] In some embodiments, CA2 biocircuits, SREs or CA2 effector modules are designed to be significantly less immunogenic than other biocircuits or switches in the art.

[0544] As used herein, “significantly less immunogenic” refers to a detectable decrease in immunogenicity. In another embodiment, the term refers to a fold decrease in immunogenicity. In another embodiment, the term refers to a decrease such that an effective amount of the CA2 biocircuits, SREs or CA2 effector modules which can be administered without triggering a detectable immune response. In another embodiment, the term refers to a decrease such that the CA2 biocircuits, SREs or CA2 effector modules can be repeatedly administered without eliciting an immune response. In another embodiment, the decrease is such that the CA2 biocircuits, SREs or CA2 effector modules can be repeatedly administered without eliciting an immune response.

[0545] In another embodiment, the CA2 biocircuits, SREs or CA2 effector modules is 2-fold less immunogenic than its unmodified counterpart or reference compound. In another embodiment, immunogenicity is reduced by a 3-fold factor. In another embodiment, immunogenicity is reduced by a 5-fold factor. In another embodiment, immunogenicity is reduced by a 7-fold factor. In another embodiment, immunogenicity is reduced by a 10-fold factor. In another embodiment, immunogenicity is reduced by a 15-fold factor. In another embodiment, immunogenicity is reduced by a fold factor. In another embodiment, immunogenicity is reduced by a 50-fold factor. In another embodiment, immunogenicity is reduced by a 100-fold factor. In another embodiment, immunogenicity is reduced by a 200-fold factor. In another embodiment, immunogenicity is reduced by a 500-fold factor. In another embodiment, immunogenicity is reduced by a 1000-fold factor. In another embodiment, immunogenicity is reduced by a 2000-fold factor. In another embodiment, immunogenicity is reduced by another fold difference.

[0546] Methods of determining immunogenicity are well known in the art, and include, e.g. measuring secretion of cytokines (e.g. IL12, IFN alpha, TNF-alpha, RANTES, MIP-1alpha or beta, IL6, IFN-beta, or IL8), measuring expression of DC activation markers (e.g. CD83, HLA-DR, CD80 and CD86), or measuring ability to act as an adjuvant for an adaptive immune response.

### Diseases and Toxins

[0547] Various infectious diseases may be treated with pharmaceutical compositions, CA2 biocircuits, CA2 biocircuit components, CA2 effector modules including their SREs or payloads of the present disclosure. As used herein, the term “infectious disease” refers to any disorders caused by organisms such as bacteria, viruses, fungi or parasites.

[0548] Various toxins may be treated with pharmaceutical compositions, CA2 biocircuits, CA2 biocircuit components, CA2 effector modules including their SREs or payloads of the present disclosure. Non-limited examples of toxins include Ricin, Bacillus anthracis, Shiga toxin and Shiga-like toxin, Botulinum toxins.

[0549] Various tropical diseases may be treated with pharmaceutical compositions, CA2 biocircuits, CA2 biocircuit components, CA2 effector modules including their SREs or payloads of the present disclosure. Non-limiting examples of tropical diseases include Chikungunya fever, Dengue fever, Chagas disease, Rabies, Malaria, Ebola virus, Marburg virus, West Nile Virus, Yellow Fever, Japanese encephalitis virus, St. Louis encephalitis virus.

[0550] Various foodborne illnesses and gastroenteritis may be treated with pharmaceutical compositions, CA2 biocircuits, CA2 biocircuit components, CA2 effector modules including their SREs or payloads of the present disclosure. Non-limiting examples of foodborne illnesses and gastroenteritis include Rotavirus, Norwalk virus (Norovirus), Campylobacter jejuni, Clostridium difficile, Entamoeba histolytica, Helicobacter pylori, Enterotoxin B of Staphylococcus aureus, Hepatitis A virus (HAV), Hepatitis E, Listeria monocytogenes, Salmonella, Clostridium perfringens, and Salmonella.

[0551] Various infectious agents may be treated with pharmaceutical compositions, CA2 biocircuits, CA2 biocircuit components, CA2 effector modules including their SREs or payloads of the present disclosure. Non-limiting examples of infectious agents include adenoviruses, Anaplasma phagocytophilium, Ascaris lumbricoides, Bacillus anthracis, Bacillus cereus, Bacteroides sp, Barmah Forest virus, Bartonella bacilliformis, Bartonella henselae, Bartonella quintana, beta-toxin of Clostridium perfringens, Bordetella pertussis, Bordetella parapertussis, Borrelia burgdorferi, Borrelia miyamotoi, Borrelia recurrentis, Borrelia sp., Botulinum toxin, Brucella sp., Burkholderia pseudomallei, California encephalitis virus, Campylobacter, Candida albicans, chikungunyavirus, Chlamydia psittaci, Chlamydia trachomatis, Clonorchis sinensis, Clostridium difficile bacteria, Clostridium tetani, Colorado tick fever virus, Corynebacterium diphtheriae, Corynebacterium minutissimum, Coxiella burnetii, coxsackie A, coxsackie B, Crimean-Congo hemorrhagic fever virus, cytomegalovirus, dengue virus, Eastern Equine encephalitis virus, Ebola viruses, echovirus, Ehrlichia chaffeensis., Ehrlichia equi., Ehrlichia sp., Entamoeba histolytica, Enterobacter sp., Enterococcus faecalis, Enterovirus 71, Epstein-Barr virus (EBV), Erysipelothrix rhusiopathiae, Escherichia coli, Flavivirus, Fusobacterium necrophorum, Gardnerella vaginalis, Group B streptococcus, Haemophilus aegyptius, Haemophilus ducreyi, Haemophilus influenzae, hantavirus, Helicobacter pylori, Hepatitis A, Hepatitis B, Hepatitis C, Hepatitis D, Hepatitis E, herpes simplex virus 1 and 2, human herpes virus 6, human herpes Virus 8, human immunodeficiency virus 1 and 2, human T-cell leukemia viruses I and II, influenza viruses (A, B, C), Jamestown Canyon virus, Japanese encephalitis antigenic, Japanese encephalitis virus, John Cunninham virus, juninvirus, Kaposi's Sarcoma-associated Herpes Virus (KSHV), Klebsiella granulomatis, Klebsiella sp., Kyasanur Forest Disease virus, La Crosse virus, Lassavirus, Legionella pneumophila, Leptospira interrogans, Listeria monocytogenes, lymphocytic choriomeningitis virus, lyssavirus, Machupovirus, Marburg virus, measles virus, MERS coronavirus (MERS-CoV), Micrococcus sedentarius, Mobiluncus sp., Molluscipoxvirus, Moraxella catarrhalis, Morbilli-Rubeola virus, Mumpsvirus, Mycobacterium leprae, Mycobacterium tuberculosis, Mycobacterium ulcerans, Mycoplasma genitalium, Mycoplasma sp, Nairovirus, Neisseria gonorrhoeae, Neisseria meningitidis, Nocardia, Norwalk virus, norovirus, Omsk hemorrhagic fever virus, papilloma virus, parainfluenza viruses 1-3, parapoxvirus, parvovirus B19, Peptostreptococccus sp., Plasmodium sp., polioviruses types I, II, and III, Proteus sp., Pseudomonas aeruginosa, Pseudomonas pseudomallei, Pseudomonas sp., rabies virus, respiratory syncytial virus, ricin toxin, Rickettsia australis, Rickettsia conori, Rickettsia honei, Rickettsia prowazekii, Ross River Virus, rotavirus, rubellavirus, Saint Louis encephalitis, Salmonella Typhi, Sarcoptes scabiei, SARS-associated coronavirus (SARS-CoV), Serratia sp., Shiga toxin and Shiga-like toxin, Shigella sp., Sin Nombre Virus, Snowshoe hare virus, Staphylococcus aureus, Staphylococcus epidermidis, Streptobacillus moniliformis, Streptococcus pneumoniae, Streptococcus agalactiae, Streptococcus agalactiae, Streptococcus group A-H, Streptococcus pneumoniae, Streptococcus pyogenes, Treponema pallidum subsp. Pallidum, Treponema pallidum var. carateum, Treponema pallidum var. endemicum, Tropheryma whippelii, Ureaplasma urealyticum, Varicella-Zoster virus, variola virus, Vibrio cholerae, West Nile virus, yellow fever virus, Yersinia enterocolitica, Yersinia pestis, and Zika virus.

[0552] Various rare diseases may be treated with pharmaceutical compositions, CA2 biocircuits, CA2 biocircuit components, CA2 effector modules including their SREs or payloads of the present disclosure. As used herein, the term “rare disease” refers to any disease that affects a small percentage of the population.

[0553] Various autoimmune diseases and autoimmune-related diseases may be treated with pharmaceutical compositions, CA2 biocircuits, CA2 biocircuit components, CA2 effector modules including their SREs or payloads of the present disclosure. As used herein, the term “autoimmune disease” refers to a disease in which the body produces antibodies that attack its own tissues. As a non-limiting example, the autoimmune disease may be Acute Disseminated Encephalomyelitis (ADEM), Acute necrotizing hemorrhagic leukoencephalitis, Addison's disease, Agammaglobulinemia, Alopecia areata, Amyloidosis, Ankylosing spondylitis, Anti-GBM/Anti-TBM nephritis, Antiphospholipid syndrome (APS), Autoimmune angioedema, Autoimmune aplastic anemia, Autoimmune dysautonomia, Autoimmune hepatitis, Autoimmune hyperlipidemia, Autoimmune immunodeficiency, Autoimmune inner ear disease (AIED), Autoimmune myocarditis, Autoimmune oophoritis, Autoimmune pancreatitis, Autoimmune retinopathy, Autoimmune thrombocytopenic purpura (ATP), Autoimmune thyroid disease, Autoimmune urticaria, Axonal & neuronal neuropathies, Balo disease, Behcet's disease, Bullous pemphigoid, Cardiomyopathy, Castleman disease, Celiac disease, Chagas disease, Chronic fatigue syndrome”, Chronic inflammatory demyelinating polyneuropathy (CIDP), Chronic recurrent multifocal ostomyelitis (CRMO), Churg-Strauss syndrome, Cicatricial pemphigoid/benign mucosal pemphigoid, Crohn's disease, Cogans syndrome, Cold agglutinin disease, Congenital heart block, Coxsackie myocarditis, CREST disease, Essential mixed cryoglobulinemia, Demyelinating neuropathies, Dermatitis herpetiformis, Dermatomyositis, Devic's disease (neuromyelitis optica), Discoid lupus, Dressler's syndrome, Endometriosis, Eosinophilic esophagitis, Eosinophilic fasciitis, Erythema nodosum, Experimental allergic encephalomyelitis, Evans syndrome, Fibromyalgia**, Fibrosing alveolitis, Giant cell arteritis (temporal arteritis), Giant cell myocarditis, Glomerulonephritis, Goodpasture's syndrome, Granulomatosis with Polyangiitis (GPA) (formerly called Wegener's Granulomatosis), Graves' disease, Guillain-Barre syndrome, Hashimoto's encephalitis, Hashimoto's thyroiditis, Hemolytic anemia, Henoch-Schonlein purpura, Herpes gestationis, Hypogammaglobulinemia, Idiopathic thrombocytopenic purpura (ITP), IgA nephropathy, IgG4-related sclerosing disease, Immunoregulatory lipoproteins, Inclusion body myositis, Interstitial cystitis, Juvenile arthritis, Juvenile diabetes (Type 1 diabetes), Juvenile myositis, Kawasaki syndrome, Lambert-Eaton syndrome, Leukocytoclastic vasculitis, Lichen planus, Lichen sclerosis, Ligneous conjunctivitis, Linear IgA disease (LAD), Lupus (SLE), Lyme disease, chronic, Meniere's disease, Microscopic polyangiitis, Mixed connective tissue disease (MCTD), Mooren's ulcer, Mucha-Habermann disease, Multiple sclerosis, Myasthenia gravis, Myositis, Narcolepsy, Neuromyelitis optica (Devic's), Neutropenia, Ocular cicatricial pemphigoid, Optic neuritis, Palindromic rheumatism, PANDAS (Pediatric Autoimmune Neuropsychiatric Disorders Associated with Streptococcus), Paraneoplastic cerebellar degeneration, Paroxysmal nocturnal hemoglobinuria (PNH), Parry Romberg syndrome, Parsonnage-Turner syndrome, Pars planitis (peripheral uveitis), Pemphigus, Peripheral neuropathy, Perivenous encephalomyelitis, Pernicious anemia, POEMS syndrome, Polyarteritis nodosa, Type I, II, & III autoimmune polyglandular syndromes, Polymyalgia rheumatica, Polymyositis, Postmyocardial infarction syndrome, Postpericardiotomy syndrome, Progesterone dermatitis, Primary biliary cirrhosis, Primary sclerosing cholangitis, Psoriasis, Psoriatic arthritis, Idiopathic pulmonary fibrosis, Pyoderma gangrenosum, Pure red cell aplasia, Raynauds phenomenon, Reactive Arthritis, Reflex sympathetic dystrophy, Reiter's syndrome, Relapsing polychondritis, Restless legs syndrome, Retroperitoneal fibrosis, Rheumatic fever, Rheumatoid arthritis, Sarcoidosis, Schmidt syndrome, Scleritis, Scleroderma, Sjogren's syndrome, Sperm & testicular autoimmunity, Stiff person syndrome, Subacute bacterial endocarditis (SBE), Susac's syndrome, Sympathetic ophthalmia, Takayasu's arteritis, Temporal arteritis/Giant cell arteritis, Thrombocytopenic purpura (TTP), Tolosa-Hunt syndrome, Transverse myelitis, Ulcerative colitis, Undifferentiated connective tissue disease (UCTD), Uveitis, Vasculitis, Vesiculobullous dermatosis, Vitiligo, and Wegener's granulomatosis (now termed Granulomatosis with Polyangiitis (GPA).

[0554] Various kidney diseases may be treated with pharmaceutical compositions, CA2 biocircuits, CA2 biocircuit components, CA2 effector modules including their SREs or payloads of the present disclosure.

[0555] Various cardiovascular diseases may be treated with pharmaceutical compositions, CA2 biocircuits, CA2 biocircuit components, CA2 effector modules including their SREs or payloads of the present disclosure. As a non-limiting example, the cardiovascular disease may be Ischemic heart disease also known as coronary artery disease, Cerebrovascular disease (Stroke), Peripheral vascular disease, Heart failure, Rheumatic heart disease, and Congenital heart disease.

[0556] Various antibody deficiencies may be treated with pharmaceutical compositions, CA2 biocircuits, CA2 biocircuit components, CA2 effector modules including their SREs or payloads of the present disclosure. As a non-limiting example, the antibody deficiencies may be X-Linked Agammaglobulinemia (XLA), Autosomal Recessive Agammaglobulinemia (ARA), Common Variable Immune Deficiency (CVID), IgG (IgG1, IgG2, IgG3 and IgG4) Subclass Deficiency, Selective IgA Deficiency, Specific Antibody Deficiency (SAD), Transient Hypogammaglobulinemia of Infancy, Antibody Deficiency with Normal or Elevated Immunoglobulins, Selective IgM Deficiency, Immunodeficiency with Thymoma (Good's Syndrome), Transcobalamin II Deficiency, Warts, Hypogammaglobulinemia, Infection, Myelokathexis (WHIM) Syndrome, Drug-Induced Antibody Deficiency, Kappa Chain Deficiency, Heavy Chain Deficiencies, Post-Meiotic Segregation (PMS2) Disorder, and Unspecified Hypogammaglobulinemia.

[0557] Various ocular diseases may be treated with pharmaceutical compositions, CA2 biocircuits, CA2 biocircuit components, CA2 effector modules including their SREs or payloads of the present disclosure. As a non-limiting example, the ocular disease may be thyroid eye disease (TED), Graves' disease (GD) and orbitopathy, Retina Degeneration, Cataract, optic atrophy, macular degeneration, Leber congenital amaurosis, retinal degeneration, cone-rod dystrophy, Usher syndrome, leopard syndrome, photophobia, and photoaversion.

[0558] Various neurological diseases may be treated with pharmaceutical compositions, CA2 biocircuits, CA2 biocircuit components, CA2 effector modules including their SREs or payloads of the present disclosure.

[0559] Various psychological disorders may be treated with pharmaceutical compositions, CA2 biocircuits, CA2 biocircuit components, CA2 effector modules including their SREs or payloads of the present disclosure.

[0560] Various lung diseases may be treated with pharmaceutical compositions, CA2 biocircuits, CA2 biocircuit components, CA2 effector modules including their SREs or payloads of the present disclosure. As a non-limiting example, the lung diseases may be Asbestosis, Asthma, Bronchiectasis, Bronchitis, Chronic Cough, Chronic Obstructive Pulmonary Disease (COPD), Croup, Cystic Fibrosis, Hantavirus, Idiopathic Pulmonary Fibrosis, Pertussis, Pleurisy, Pneumonia, Pulmonary Embolism, Pulmonary Hypertension, Sarcoidosis, Sleep Apnea, Spirometry, Sudden Infant Death Syndrome (SIDS), Tuberculosis, Alagille Syndrome, Autoimmune Hepatitis, Biliary Atresia, Cirrhosis, ERCP (Endoscopic Retrograde Cholangiopancreatography), and Hemochromatosis. Nonalcoholic Steatohepatitis, Porphyria, Primary Biliary Cirrhosis, Primary Sclerosing Cholangitis.

[0561] Various bone diseases may be treated with pharmaceutical compositions, CA2 biocircuits, CA2 biocircuit components, CA2 effector modules including their SREs or payloads of the present disclosure. As a non-limiting example, the bone diseases may be osteoporosis, neurofibromatosis, osteogenesis imperfecta (0I), rickets, osteosarcoma, achondroplasia, fracture, osteomyelitis, Ewing tumor of bone, osteomalacia, hip dysplasia, Paget disease of bone, marble bone disease, osteochondroma, bone cancer, bone disease, osteochondrosis, osteoma, fibrous dysplasia, cleidocranial dysostosis, osteoclastoma, bone cyst, metabolic bone disease, melorheostosis, callus, Caffey syndrome, and mandibulofacial dysostosis.

[0562] Various blood diseases may be treated with pharmaceutical compositions, CA2 biocircuits, CA2 biocircuit components, CA2 effector modules including their SREs or payloads of the present disclosure. As a non-limiting example, the blood diseases may be Anemia and CKD (for health care professionals), Aplastic Anemia and Myelodysplastic Syndromes, Deep Vein Thrombosis, Hemochromatosis, Hemophilia, Henoch-Schönlein Purpura, Idiopathic Thrombocytopenic Purpura, Iron-Deficiency Anemia, Pernicious Anemia, Pulmonary Embolism, Sickle Cell Anemia, Sickle Cell Trait and Other Hemoglobinopathies, Thalassemia, Thrombotic Thrombocytopenic Purpura, and Von Willebrand Disease.

### Central Nervous System (CNS)

[0563] In some embodiments, pharmaceutical compositions, CA2 biocircuits, CA2 biocircuit components, CA2 effector modules including their SREs or payloads of the present disclosure may be used in the modulation or alteration or exploitation of proteins in the central nervous system including cerebrospinal (CSF) proteins.

[0564] In some examples, pharmaceutical compositions, CA2 biocircuits, CA2 biocircuit components, CA2 effector modules including their SREs or payloads of the present disclosure may be used to provide tunable ERT (enzyme replacement therapy) products to the central nervous system. Many lysosomal storage diseases (LSD) involve the CNS symptoms, such as mental retardation, seizures, profound neurodegeneration, behavioral abnormalities, and psycho-motor defects. ERT for LSDs is one of the true success stories in modern molecular medicine. The successful application of ERT relies on controlled lysosomal proteins (e.g., enzymes) and delivery to CNS cells.

[0565] In some examples, pharmaceutical compositions, CA2 biocircuits, CA2 biocircuit components, CA2 effector modules including their SREs or payloads of the present disclosure may be used to locally produce monoclonal antibodies against protein aggregates in the CNS and CSF. Such antibodies may be used to treat degenerative diseases like Alzheimer's disease (AD), Huntington's Disease (HD) and Parkinson's disease (PD).

[0566] In other examples, pharmaceutical compositions, CA2 biocircuits, CA2 biocircuit components, CA2 effector modules including their SREs or payloads of the present disclosure may be used to regulate neurotrophic factors in the central nervous system.

### Gene Editing

[0567] CRISPR-Cas9 systems have been developed and modified for use in genetic editing and prove to be a high effective and specific technology for editing a nucleic acid sequence even in eukaryotic cells. Many researchers disclosed various modifications to the bacterial CRISPR-Cas systems and demonstrated that CRISPR-Cas systems can be used to manipulate a nucleic acid in a cell, such as in a mammalian cell and in a plant cell. Representative references include U.S. Pat. Nos. 8,993,233; 8,999,641; 8,945,839; 8,932,814; 8,906, 616; 8,895,308; 8,889,418; 8,889,356; 8,871,445; 8,865,406; 8,771,945; and 8,697,359; US patent publication NOs.: 20150031134; 20150203872; 20150218253; 20150176013; 20150191744; 20150071889; 20150067922; and 20150167000; each of which is incorporated herein by reference in their entirety.

[0568] However, controlling the effects and activity of the CRISPR-Cas system (e.g., guide RNA and nuclease) has been challenging and often can be problematic.

[0569] The CA2 biocircuits of the present disclosure and/or any of their components may be utilized in regulating or tuning the CRISPR/Cas9 system in order to optimize its utility.

[0570] Examples for tuning the system are shown in FIG. 19A and FIG. 19B of International Publication No. WO2017/180587 (the contents of which are herein incorporated by reference in their entirety).

[0571] In some embodiments, the payloads of the CA2 effector modules of the disclosure may include alternative isoforms or orthologs of the Cas9 enzyme.

[0572] The most commonly used Cas9 is derived from Streptococcus pyogenes and the RuvC domain can be inactivated by a D10A mutation and the HNH domain can be inactivated by an H840A mutation.

[0573] In addition to Cas9 derived from S. pyogenes, other RNA guided endonucleases (RGEN) may also be used for programmable genome editing. Cas9 sequences have been identified in more than 600 bacterial strains. Though Cas9 family shows high diversity of amino acid sequences and protein sizes, A11 Cas9 proteins share a common architecture with a central HNH nuclease domain and a split RuvC/RHase H domain.

[0574] In some embodiments, the payload of the present disclosure may be a split Cas-9 (Zetsche B et al. A split-Cas9 architecture for inducible genome editing and transcription modulation. NatBiotechnol. 2015 February; 33(2):139-42; the contents of which are incorporated by reference in their entirety).

[0575] In addition to Cas9 orthologs, other Cas9 variants such as fusion proteins of inactive dCas9 and effector domains with different functions may serve as a platform for genetic modulation. Any of the foregoing enzymes may be useful in the present disclosure.

[0576] CRISPR/Cas9 based CA2 biocircuits may be generated by any of the methods taught in International Publication No.: WO2016106244 and Gao Y et al. Complex transcriptional modulation with orthogonal and inducible dCas9 regulators. Nat Methods. 2016 December; 13(12):1043-1049; the contents of each of which are incorporated herein by reference in their entirety).

[0577] The CRISPR/Cas9 system may also be utilized to modulate gene expression, which may be combined with its gene editing utility. In some embodiments, the payloads of the CA2 effector modules of the disclosure may include CRISPR associated transcriptional activators e.g. VP64-p65-Rta (VPR); or repressors e.g. Kruppel-associated box (KRAB) associated with the CRISPR/Cas9 system.

### Stem Cell Applications

[0578] The CA2 biocircuits of the present disclosure and/or any of their components may be utilized in the regulated reprogramming of cells, stem cell engraftment or other application where controlled or tunable expression of such reprogramming factors are useful.

[0579] The CA2 biocircuits of the present disclosure may be used in reprogramming cells including stem cells or induced stem cells. Induction of induced pluripotent stem cells (iPSC) was first achieved by Takahashi and Yamanaka (Cell, 2006. 126(4):663-76; herein incorporated by reference in its entirety) using viral vectors to express KLF4, c-MYC, OCT4 and SOX2 otherwise collectively known as KMOS.

[0580] The CA2 effector modules of the present disclosure may include a payload comprising any of the genes including, but not limited to, OCT such as OCT4, SOX such as SOX1, SOX2, SOX3, SOX15 and SOX18, NANOG, KLF such as KLF1, KLF2, KLF4 and KLF5, MYC such as c-MYC and n-MYC, REM2, TERT and LIN28 and variants thereof in support of reprogramming cells. Sequences of such reprogramming factors are taught in for example International Application PCT/US2013/074560, the contents of which are incorporated herein by reference in their entirety.

[0581] The CA2 effector modules of the present disclosure may include a payload comprising any of factors that contribute stem cell mobilization. In autologous stem cell therapy, sources of stem cells for transplantation may include the bone marrow, peripheral blood mononuclear cells and cord blood. Stem cells are stimulated out of these sources (e.g., the bone marrow) into the blood stream. So sufficient stem cells are available for collection for future reinfusion. One or a combination of cytokines strategies may be used to mobilize the stem cells including but not limited to G-CSF (filgrastim), GM-CSF, and chemotherapy preceding with cytokines (chemomobilization).

### Metabolic Peptides and Hormones

[0582] In some embodiments, the CA2 biocircuits of the present disclosure and/or any of their components may be used to regulate peptides, natural or synthetic. Naturally occurring peptides may include but are not limited to, peptide hormones, natriuretic peptides, food peptides, and derivatives and precursors.

[0583] The CA2 biocircuits of the present disclosure and/or any of their components may also be utilized for pulsatile release of hormones or other peptide drugs.

### Enzyme Replacement Therapy (ERT)

[0584] Enzyme replacement therapy (ERT) is a medical treatment replacing an enzyme in a patient. ERT provides therapeutic interventions that address the underlying metabolic defect in many disorders caused by defective enzymes. Such disorders include, but are not limited to, lysosomal storage diseases (LSDs), congenital disorders of glycosylation, and metabolic disorders characterized by missing or reduced enzyme activity in the cytoplasm.

[0585] In some embodiments, the CA2 biocircuits of the present disclosure and/or any of their components may also be utilized to regulate enzymatic activities during ERT. As a non-limiting example, payloads of the CA2 biocircuits of the present disclosure may be a functional lysosomal enzyme for ERT, such as a-D-mannosidase, N-aspartyl-β-glucosaminidase, acid lipase; hexosaminidase A, a-galactosidase A, β-galactosidase, lysosomal protease, ceramidase, fucosidase; β-glucosidase, N-acetylglucosamine-1-phosphotransferase, sulfatase, hyaluronidase, galactocerebrosidase; arylsulfatase A; N-acetylglucosamine-1-phosphotransferase; a-L-iduronidase; iduronate sulfatase; heparan sulfamidase; N-acetylglucosaminidase; acetyl-CoA:a-glucosaminide acetyltransferase; N-acetylglucosamine 6-sulfatase; N-acetylgalactosamine-6-sulfate sulfatase; N-acetylgalactosamine-4-sulfatase; β-glucuronidase; hyaluronidase; sialidase; sulfatase; sphingomyelinase; acid a-glucosidase; β-mannosidase; cathepsin K; β-hexosaminidase A; β-hexosaminidase B, a-N-acetylgalactosaminidase, sialin, and hexosaminidase.

### Coagulation

[0586] Coagulation defects often cause hemorrhage and/or thrombosis. The best-known coagulation factor disorders are the hemophilias. The three main forms are hemophilia A (factor VIII deficiency), hemophilia B (factor IX deficiency or “Christmas disease”) and hemophilia C (factor XI deficiency, mild bleeding tendency). Other disorders caused by defective coagulation factors also include, but are not limited to, Von Willebrand disease (caused by a defect in von Willebrand factor (vWF), Bernard-Soulier syndrome (caused by a defect or deficiency in GPIb, a receptor of vWF), thrombophlebitis (caused by mutations in Factor XII), Congenital afibrinogenemia, Familial renal amyloidosis (caused by mutations in Factor I), congenital proconvertin/factor VII deficiency, Thrombophilia (caused by Factor II deficiency), Congenital Factor×deficiency, Congenital Factor XIIIa/b deficiency, Prekallikrein/Fletcher Factor deficiency, Kininogen deficiency, Glomerulopathy with fibronectin deposits, Heparin cofactor II deficiency, Protein C deficiency, Protein S deficiency, Protein Z deficiency, Antithrombin III deficiency, Plasminogen deficiency, type I (ligneous conjunctivitis), Antiplasmin deficiency, Plasminogen activator inhibitor-1 deficiency, and Quebec platelet disorder.

[0587] Gene therapy for coagulation factor replacement is a medical treatment of disorders caused be coagulation deficiency. In accordance with the present disclosure, the CA2 biocircuits of the present disclosure and/or any of their components may also be utilized to regulate a coagulation factor used for gene therapy. In some examples, the coagulation factor may be selected from Factor I (fibrinogen), Factor II (prothrombin), Factor III (tissue factor), Factor IV, Factor V (proaccelerin), Factor VI, Factor VII (stable factor), Factor VIII (antihemophilic factor A), Factor IX (antihemophilic factor B), Factor X (Stuart-Prower factor), Factor XI (plasma thromboplastin antecedent), Factor XII (Hageman factor), Factor XIII (fibrin-stabilizing factor), von Willebrand factor, Prekallikrein (Fletcher factor), high-molecular-weight kininogen (HMWK) (Fitzgerald factor), fibronectin, antithrombin III, heparin cofactor II, protein C, protein S, protein Z, protein Z related protease inhibitor (ZPI), plasminogen, tissue plasminogen activator (tPA), urokiase, plasminogen, plasminogen activator inhibitor 1 (PAI1), and plasminogen activator inhibitor 2 (PAI2)

[0588] In one embodiment, the coagulate factor is Factor VIII for gene therapy of hemophilia, including wild type factor VIII, engineered Factor VIII, activated fVIII (fVIIIa), or the equivalent. Exemplary engineered Factor VIII may include those discussed by Roberts et al (J. Genet. Syndr. Gene Ther., 2011, 1: S1-006; the contents of which are incorporated herein by reference in their entirety).

### Patient Stratification

[0589] In one embodiment, patients may also be stratified according to the immunogenic peptides presented by their immune cells and may be utilized as a parameter to determine suitable patient cohorts that may therapeutically benefit for the compositions of the disclosure.

### Microbiome

[0590] The CA2 biocircuits of the present disclosure and/or any of their components may be utilized in regulating or tuning the microbiome. A diverse community of symbiotic, commensal and pathogenic microorganisms exist in all environmentally exposed sites in the body and is herein referred to as the “Microbiome.” Environmentally exposed sites of the body that may be inhabited by a microbiome include the skin, nasopharynx, the oral cavity, respiratory tract, gastrointestinal tract, and the reproductive tract. The intimate association of the microbiome with the body has profound implications on human health and disease, including asthma, inflammatory bowel diseases, metabolic, cardiovascular diseases and cancer. Accordingly, in some embodiments, CA2 biocircuits, CA2 biocircuit components, CA2 effector modules including their SREs or payloads of the present disclosure may be used in the modulation or alteration or exploitation of the microbiome and/or the microenvironment of the microbiome.

[0591] In some embodiments, the microbiome may be engineered with CA2 biocircuits consisting of non-microbial biomolecules as payloads. Non-limiting examples of payloads include, antiviral peptide, enzymes, neuropeptides, cytokines, and other soluble factors. Such strategies transform the microbiome into therapeutic agents for the treatment of diseases. As a non-limiting example, Glucagon like peptide-1 may be used as a payload. Administration of Lactobacillus gasseri engineered to express Glucagon like peptide-1, induced insulin production in the host and decreased hyperglycemia (Duan, F., et al., Diabetes, 64, 1794-1803 (2015); the contents of which are incorporated by reference in their entirety).

[0592] In some embodiments, the microbiome may comprise a kill switch. As used herein the term “kill switch” refers to biocircuits of the present disclosure that include one or more toxins as a payload. Microorganisms engineered for in vivo administration may be programmed to die at a specific time, after the delivery of gene or genes, and/or after the host has experienced the therapeutic effect. Specifically, it may be useful to prevent long-term colonization of the host by the organisms or spread of the microorganisms outside the area of interest. Examples of toxins that can be used in kill switches include, but are not limited to, bacteriocins, lysins, and other molecules that cause cell death by lysing cell membranes, degrading cellular DNA, or other mechanisms.

### Transgenic Organisms

[0593] In some embodiments, the present disclosure provides transgenic organisms that expresses nucleic acids that encode polypeptides of the present disclosure. As used herein the term “transgenic organism” refers to any non-human entity that contains artificially transferred, exogenous genetic material. This approach provides the ability to temporally regulate payloads within defined cells, tissues or in the entire organism. Such methods may be useful in creating transgenic models for certain disease states, or for studying embryonic development.

[0594] Transgenic organisms described herein may include rodents, fish, reptiles, as well as invertebrates. In a preferred embodiment, such transgenic organisms may be selected from the rodent family including mouse, and rat.

### Tunable Regulations

[0595] The CA2 biocircuits of the present disclosure and/or any of their components may also be utilized to regulate the expression of another effector module such as a recombinant construct comprising a PO. In some embodiments, the CA2 biocircuits and/or CA2 effector modules may comprise a protease (also called peptidase or proteinase). The tunable protease could cleave an inactive construct to an active construct when the two components are co-introduced into a cell, a tissue or an organism.

[0596] In other examples, the CA2 biocircuits and/or CA2 effector modules comprising a protease may also be utilized to regulate protein processing including cleavage of the initial protein product to produce a smaller active protein or peptide.

[0597] In some embodiments, the CA2 biocircuits of the present disclosure and/or any of their components may comprise any of factors that play a role in protein processing and modification. Protein post-translational modification may include, but are not limited to, addition of hydrophobic groups by an enzyme (e.g., myristoylation, palmitoylation, isoprenylation, prenylation, farnesylation, geranylgeranylation, glypiation, and glycosylphosphatidylinositol (GPI) anchor); attachment of cofactors for enhanced function (e.g., lipoylation, flavin, phosphopantetheinylation, and heme C); addition of small chemical groups (e.g., acylation, formylation, alkylation, phosphorylation, methylation, arginylation, polyglutamylation, polyglycylation, butyrylation, glycosylation, propionylation, S-glutathionylation, S-nitrosylation, S-sulfenylation, succinylation, sulfation, and acetylation); linkage of other proteins and/or peptides such as ISGylation, SUMOylation, ubiquitination, neddylation, and pupylation; chemical modification of amino acids; and structural changes.

### Boolean Switches

[0598] CA2 biocircuits of the present disclosures may also be incorporated into the design of cellular Boolean Switches. As used herein, a Boolean switch refers to a circuit that is designed to perform a logical operation based on one or more inputs and which produces an output. Logical operations performed by Boolean switches but are not limited to, AND, OR, NOR, NAND, NOT, IMPLY, NIMPLY, XOR, and XNOR. OR as well as AND gates represent the most fundament logical operations where OR represents a scenario where any of the one or more inputs is required to produce an output, while AND represents a scenario where all of the inputs are required to generate an output. Compound Boolean switches that consist of multiple logical operations may also be generated using CA2 biocircuits of the disclosure. In some embodiments, CA2 biocircuits and/or any of their components may represent one or more inputs in a Boolean switch. In other embodiments, CA2 biocircuits of the disclosure may be combined with switches known in the art to generate Boolean Switches. The output of a Boolean Switches may depend on the payload utilized. As a non-limiting example, an AND based Boolean Switch may be generated where a first input comprises a CA2 biocircuit with gene editing nuclease, Cas9, as the payload and a second input comprises a CA2 biocircuit with transcriptional activator, VPR, as the payload. In the presence of the target gene guide RNA, addition of the stimuli to both inputs is required for the transcriptional activation of target gene (Gao Y et al. (2016) Nat Methods.13(12):1043-1049; the contents of which are incorporated by reference in their entirety).

### Biofactories

[0599] The CA2 biocircuits of the present disclosure and/or any of their components may be utilized to regulate the levels of protein production in a biofactory. As used herein, the term “biofactory” refers to a cell, a tissue, an organ or an organism genetically modified or not, which can produce proteins with a number of applications including therapeutic purposes (inhibitors, enzymes, antibodies, antigens, etc.) or primary or secondary products of industrial interest. In some examples, the cell may be a prokaryotic cell, a eukaryotic cell, a mammalian cell, a plant cell, etc.

[0600] In some embodiments, the CA2 biocircuits of the present disclosure may be used to regulate medicament proteins produced in a target tissue, for example, the liver and the kidney. The liver is an organ that produces secreted proteins including major plasma proteins, factors in hemostasis and fibrinolysis, carrier proteins, hormones, prohormones and apolipoproteins, or a variety of short-lived metabolic peptides and enzymes which are usually tightly regulated, or other non-hepatic proteins. In the context, the liver fills a role of gene expression factory (biofactory), supplying a protein for treatment of a disease for example a metabolic disease.

[0601] In other embodiments, the CA2 biocircuits of the present disclosure may be used to regulate proteins for industrial processes.

### Liver Targeting

[0602] The liver is an important organ that produces proteins and involves blood clotting and a number of metabolic functions. A variety of diseases can affect liver and targeting the liver for disease treatment has been a promising approach, especially liver-targeted gene therapy. The CA2 biocircuits of the present disclosure and/or any of their components may be utilized to regulate liver targeted gene therapy and gene transfer.

[0603] Proteins that can be targeted to the liver and constructed to the present CA2 biocircuits for regulation may include those in liver cancers such as hepatocellular carcinoma (HCC), Fibrolamellar HCC, Cholangiocarcinoma, Angiosarcoma and secondary liver cancer; inherited disorders caused by defective genes such as hemochromatosis, Wilson disease, tyrosinemia, alpha 1 antitrypsin deficiency, glycogen storage disease; metabolic disorders due to enzyme deficiency such as Gilbert's syndrome, lysosomal acid lipase deficiency (LALD) and Gaucher disease; autoimmune hepatitis; fatty liver diseases; and viral hepatitis (A, B and C). In some examples, the present CA2 biocircuits may be used to direct IL12 for hepatocellular carcinoma (HCC), and IL10 for diabetic neuropathy.

[0604] In some embodiments, the present CA2 biocircuits may be used to control liver specific gene products for gene therapy.

[0605] In some embodiments, the present CA2 biocircuits may be used to control liver proteins that are secreted (e.g., to blood).

### Micro Fluidics

[0606] In some embodiments, cells containing CA2 biocircuits of the present disclosure and/or any of their components may be utilized in microfluidics devices. As used herein a “microfluidics device” refers to the manipulation of picoliter to nanoliter-scale volumes of fluids within artificially fabricated microsystems. Microfluidic devices comprising CA2 biocircuits of the present disclosure may be utilized to study cell culture models, cellular microenvironment, cell secretions, chemotaxis, apoptosis, vascular function, neuron cell growth, embryonic development, single cell metabolomics, gene expression, drug research, cellular separation, stem cell biology, bioreactors, three-dimensional cell culture, and tissue engineering.

### Tools and Agents for Making Therapeutics

[0607] Provided in the present disclosure are tools and agents that may be used in generating therapeutics such as, but not limited to, immunotherapeutics for reducing a tumor volume or burden in a subject in need. A considerable number of variables are involved in producing a therapeutic agent, such as structure of the payload, type of cells, method of gene transfers, method and time of ex vivo expansion, pre-conditioning and the amount and type of tumor burden in the subject. Such parameters may be optimized using tools and agents described herein.

### Cell Lines

[0608] The present disclosure provides a mammalian cell that has been genetically modified with the compositions of the disclosure. Suitable mammalian cells include primary cells and immortalized cell lines. Suitable mammalian cell lines include but are not limited to Human embryonic kidney cell line 293, fibroblast cell line NIH 3T3, human colorectal carcinoma cell line HCT116, ovarian carcinoma cell line SKOV-3, immortalized T cell lines (e.g. Jurkat cells and SupT1 cells), lymphoma cell line Raji cells, NALM-6 cells, K562 cells, HeLa cells, PC12 cells, HL-60 cells, NK cell lines (e.g. NKL, NK92, NK962, and YTS), and the like. In some instances, the cell is not an immortalized cell line, but instead a cell obtained from an individual and is herein referred to as a primary cell. For example, the cell is a T lymphocyte obtained from an individual. Other examples include, but are not limited to cytotoxic cells, stem cells, peripheral blood mononuclear cells or progenitor cells obtained from an individual.

### Tracking SREs, Biocircuits and Cell Lines

[0609] In some embodiments, it may be desirable to track the compositions of the disclosure or the cells modified by the compositions of the disclosure. Tracking may be achieved by using payloads such as reporter moieties, which, as used herein, refers to any protein capable of creating a detectable signal, in response to an input. Examples include alkaline phosphatase, β-galactosidase, chloramphenicol acetyltransferase, β-glucuronidase, peroxidase, β-lactamase, catalytic antibodies, bioluminescent proteins e.g. luciferase, and fluorescent proteins such as Green fluorescent protein (GFP).

[0610] Reporter moieties may be used to monitor the response of the SREs upon addition of the ligand corresponding to the SRE. In other instances, reporter moieties may be used to track cell survival, persistence, cell growth, and/or localization in vitro, in vivo, or ex vivo.

[0611] In some embodiments, the preferred reporter moiety may be luciferase proteins.

### Chaperones

[0612] In some embodiments, CA2 effector modules of the present disclosure may include one or more chaperones to regulate the expression of the payload. Chaperones useful in the present disclosure may be cellular chaperones or small molecules referred to as pharmacological chaperones. Cellular chaperones refer to a large group of unrelated protein families whose role is to stabilize unfolded client proteins, or to unfold client proteins for translocation across membranes or for degradation, and/or to assist in their correct folding and assembly. Chaperones also cooperate with other components of the proteostasis network such as the proteasome system and autophagy to promote protein clearance. Examples of molecular chaperone families include small heat shock proteins such as hsp25; Heat shock protein 60 family proteins such as cpn60 and GroEL; Heat shock protein 70 family proteins such as DnaK and BiP; Heat shock protein 90 family proteins; Heat shock protein 100 family proteins such as CIp; lectin chaperones such as calnexin and calreticulin; and folding chaperones such as Protein disulfide isomerases (PDI), peptidyl prolyl ci-trans isomerase (PPI) and ERp57. In some embodiments, the payload of the present disclosure may be a cellular chaperone. In the absence of a stimulus which stabilizes the SRE, the cellular chaperone may bind to the SRE and is therefore unavailable to interact with its client proteins. In the presence of the stimulus specific to the SRE, the SRE is stabilized and the chaperone is available to interact with client proteins. In some embodiments, payloads of the present disclosures may be appended to chaperones such that the stability or instability of the payload may be enhanced. In other embodiments, the SREs of the present disclosure may consist of one or more molecular chaperones.

[0613] Chaperones useful in the present disclosure may also include pharmacological chaperones which utilizes small molecules to facilitate the correct folding and stabilization of cellular proteins. Mutations in cellular proteins can result in protein misfolding and/or aggregation which ultimately results in their degradation. Pharmacological chaperones have been designed to bind to misfolded target proteins, facilitate their correct folding and thereby prevent their degradation. In some embodiments, SREs of the present disclosure may comprise one or more misfolded proteins and the stimulus specific to the SRE may include one or pharmacological chaperones such that the CA2 effector module is stabilized only in the presence of the pharmacological chaperone.

### Animal Models

[0614] The utility and efficacy of the compositions of the present disclosure may be tested in in vivo animal models, preferably mouse models. Mouse models used may be syngeneic mouse models wherein mouse cells are modified with compositions of the disclosure and tested in mice of the same genetic background. Examples include pMEL-1 and 4T1 mouse models. Alternatively, xenograft models where human cells such as tumor cells and immune cells are introduced into immunodeficient mice may also be utilized in such studies. Immunodeficient mice used may be CByJ.Cg-Foxn1nu/J, B6; 129S7-Rag1tm1Mom/J, B6.129S7-Rag1tm1Mom/J, B6. CB17-Prkdcscid/SzJ, NOD.129S7(B6)-Rag1tm1Mom/J, NOD.Cg-Rag1tm1MomPrf1tm1Sdz/Sz, NOD.CB17-Prkdcscid/SzJ, NOD.Cg-PrkdcscidB2mtm1Unc/J, NOD-scid IL2Rgnull, Nude (nu) mice, SCID mice, NOD mice, RAG1/RAG2 mice, NOD-Scid mice, IL2rgnull mice, b2mnull mice, NOD-scid IL2r□null mice, NOD-scid-B2mnull mice, beige mouse, and HLA transgenc mice.

### Cellular Assays

[0615] In some embodiments, the effectiveness of the compositions of the disclosures as immunotherapeutic agents may be evaluated using cellular assays. Levels of expression and/or identity of the compositions of the disclosure may be determined according to any methods known in the art for identifying proteins and/or quantitating proteins levels. In some embodiments, such methods may include Western Blotting, flow cytometry, and immunoassays.

[0616] Provided herein are methods for functionally characterizing cells expressing SRE, CA2 biocircuits and compositions of the disclosure. In some embodiments, functional characterization is carried out in primary immune cells or immortalized immune cell lines and may be determined by expression of cell surface markers. Examples of cell surface markers for T cells include, but are not limited to, CD3, CD4, CD8, CD 14, CD20, CD11b, CD16, CD45 and HLA-DR, CD 69, CD28, CD44, IFNgamma. Markers for T cell exhaustion include PD1, TIM3, BTLA, CD160, 2B4, CD39, and LAG3. Examples of cell surface markers for antigen presenting cells include, but are not limited to, MHC class I, MHC Class II, CD40, CD45, B7-1, B7-2, IFN γ receptor and 112 receptor, ICAM-1 and/or Fcγ receptor. Examples of cell surface markers for dendritic cells include, but are not limited to, MHC class I, MHC Class II, B7-2, CD18, CD29, CD31, CD43, CD44, CD45, CD54, CD58, CD83, CD86, CMRF-44, CMRF-56, DCIR and/or Dectin-1 and the like; while in some cases also having the absence of CD2, CD3, CD4, CD8, CD14, CD15, CD16, CD 19, CD20, CD56, and/or CD57. Examples of cell surface markers for NK cells include, but are not limited to, CCL3, CCL4, CCL5, CCR4, CXCR4, CXCR3, NKG2D, CD71, CD69, CCR5, Phospho JAK/STAT, phospho ERK, phospho p38/MAPK, phospho AKT, phospho STAT3, Granulysin, Granzyme B, Granzyme K, IL10, IL22, IFNg, LAP, Perform, and TNFa.

### Diagnostics

[0617] In some embodiments, scFvs, CARs and compositions of the disclosure may be used as diagnostics. In some cases, scFvs, CARs and/compositions of the disclosure may be used to identify, label or stain cells, tissues, organs, etc. expressing target antigens. In further embodiments, scFvs, CARs and/compositions of the disclosure may be used to identify CD19 antigen present in tissue sections (i.e., histological tissue sections), including tissue known or suspected of having cancerous cells. Such methods of using scFvs of the disclosure may in some cases be used to identify cancerous cells or tumors in tissue sections. Tissue sections may be from any tissue or organ including, but not limited to breast, colon, pancreatic, ovarian, brain, liver, kidney, spleen, lung, skin, stomach, intestine, esophagus, and bone. scFvs, CARs and/compositions of the present disclosure may also be used to identify blood samples suspected to have or known to be cancerous blood sample and distinguish it from the normal tissue.

### T Cell Exhaustion

[0618] In some embodiments, CA2 biocircuits, SREs or CA2 effector modules may be utilized to prevent T cell exhaustion. As used herein, “T cell exhaustion” refers to the stepwise and progressive loss of T cell function caused by chronic T cell activation. T cell exhaustion is a major factor limiting the efficacy of antiviral and antitumor immunotherapies. Exhausted T cells have low proliferative and cytokine producing capabilities concurrent with high rates of apoptosis and high surface expression of multiple inhibitory receptors. T cell activation leading to exhaustion may occur either in the presence or absence of the antigen.

### Cells

[0619] In accordance with the present disclosure, cells genetically modified to express at least one CA2 biocircuit, SRE (e.g., CA2 DD), CA2 effector module and immunotherapeutic agent of the disclosure, are provided. Cells of the disclosure may include, without limitation, immune cells, stem cells and tumor cells. In some embodiments, immune cells are effector immune cells, including, but not limiting to, T cells such as CD8+ T cells and CD4+ T cells (e.g., Th1, Th2, Th17, Foxp3+ cells), memory T cells such as T memory stem cells, central T memory cells, and effector memory T cells, terminally differentiated effector T cells, natural killer (NK) cells, NK T cells, tumor infiltrating lymphocytes (TILs), cytotoxic T lymphocytes (CTLs), regulatory T cells (Tregs), and dendritic cells (DCs), other immune cells that can elicit an effector function, or the mixture thereof. T cells may be Tαβ cells and Tγδ cells. In some embodiments, stem cells may be from human embryonic stem cells, mesenchymal stem cells, and neural stem cells. In some embodiments, T cells may be depleted endogenous T cell receptors (See U.S. Pat. Nos. 9,273,283; 9,181,527; and 9,028,812; the contents of each of which are incorporated herein by reference in their entirety).

[0620] In some embodiments, cells of the disclosure may be autologous, allogeneic, syngeneic, or xenogeneic in relation to a particular individual subject.

[0621] In some embodiments, cells of the disclosure may be mammalian cells, particularly human cells. Cells of the disclosure may be primary cells or immortalized cell lines.

[0622] In some embodiments, cells of the disclosure may include expansion factors as payload to trigger proliferation and expansion of the cells. Exemplary payloads include members of the RAS superfamily.

[0623] Engineered immune cells can be accomplished by transducing a cell composition with a polypeptide of a CA2 biocircuit, a CA2 effector module, a SRE and/or a payload of interest (e.g., immunotherapeutic agent), or a polynucleotide encoding said polypeptide, or a vector comprising said polynucleotide. The vector may be a viral vector such as a lentiviral vector, a gamma-retroviral vector, a recombinant AAV, an adenoviral vector and an oncolytic viral vector. In other aspects, non-viral vectors for example, nanoparticles and liposomes may also be used. In some embodiments, immune cells of the disclosure are genetically modified to express at least one immunotherapeutic agent of the disclosure which is tunable using a stimulus. In some examples, two, three or more immunotherapeutic agents constructed in the same CA2 biocircuit and CA2 effector module are introduced into a cell. In other examples, two, three, or more CA2 biocircuits, CA2 effector modules, each of which comprises an immunotherapeutic agent, may be introduced into a cell.

[0624] In some embodiments, immune cells of the disclosure may be T cells modified to express an antigen-specific T cell receptor (TCR), or an antigen specific chimeric antigen receptor (CAR) taught herein (known as CAR T cells). Accordingly, at least one polynucleotide encoding a CAR system (or a TCR) described herein, or a vector comprising the polynucleotide is introduced into a T cell. The T cell expressing the CAR or TCR binds to a specific antigen via the extracellular targeting moiety of the CAR or TCR, thereby a signal via the intracellular signaling domain (s) is transmitted into the T cell, and as a result, the T cell is activated. The activated CAR T cell changes its behavior including release of a cytotoxic cytokine (e.g., a tumor necrosis factor, and lymphotoxin, etc.), improvement of a cell proliferation rate, change in a cell surface molecule, or the like. Such changes cause destruction of a target cell expressing the antigen recognized by the CAR or TCR. In addition, release of a cytokine or change in a cell surface molecule stimulates other immune cells, for example, a B cell, a dendritic cell, a NK cell, and a macrophage.

[0625] In some embodiments, CAR T cells of the disclosure may be further modified to express another one, two, three or more immunotherapeutic agents. The immunotherapeutic agents may be another CAR or TCR specific to a different target molecule; a cytokine such as IL2, IL12, IL15 and IL18, or a cytokine receptor such as IL15Ra; a chimeric switch receptor that converts an inhibitory signal to a stimulatory signal; a homing receptor that guides adoptively transferred cells to a target site such as the tumor tissue; an agent that optimizes the metabolism of the immune cell; or a safety switch gene (e.g., a suicide gene) that kills activated T cells when a severe event is observed after adoptive cell transfer or when the transferred immune cells are no-longer needed. These molecules may be included in the same effector module or in separate effector modules.

[0626] In one embodiment, the CAR T cell (including TCR T cell) of the disclosure may be an “armed” CAR T cell which is transformed with a CA2 effector module comprising a CAR and a CA2 effector module comprising a cytokine. The inducible or constitutively secreted active cytokines further armor CAR T cells to improve efficacy and persistence. In this context, such CAR T cell is also referred to as “armored CAR T cell”. The “armor” molecule may be selected based on the tumor microenvironment and other elements of the innate and adaptive immune systems. In some embodiments, the molecule may be a stimulatory factor such as IL2, IL12, IL15, IL18, type I IFN, CD40L and 4-1BBL which have been shown to further enhance CAR T cell efficacy and persistence in the face of a hostile tumor microenvironment via different mechanisms (Yeku et al., Biochem Soc Trans., 2016, 44(2): 412-418).

[0627] In some embodiments, immune cells of the disclosure may be NK cells modified to express an antigen-specific T cell receptor (TCR), or an antigen specific chimeric antigen receptor (CAR) taught herein.

[0628] NK cells may be isolated from peripheral blood mononuclear cells (PBMCs) or derived from human embryonic stem (ES) cells and induced pluripotent stem cells (iPSCs). The primary NK cells isolated from PBMCs may be further expanded for adoptive immunotherapy. Strategies and protocols useful for the expansion of NK cells may include interleukin 2 (IL2) stimulation and the use of autologous feeder cells, or the use of genetically modified allogeneic feeder cells. In some aspects, NK cells can be selectively expanded with a combination of stimulating ligands including IL15, IL21, IL2, 41BBL, IL12, IL18, MICA, 2B4, LFA-1, and BCM1/SLAMF2 (e.g., US patent publication NO. US20150190471).

[0629] Immune cells expressing CA2 effector modules comprising a CAR and/or other immunotherapeutic agents can be used as cancer immunotherapy. The immunotherapy comprises the cells expressing a CAR and/or other immunotherapeutic agents as an active ingredient and may further comprise a suitable excipient. Examples of the excipient may include the aforementioned pharmaceutically acceptable excipients, including various cell culture media, and isotonic sodium chloride.

[0630] In some embodiments, cells of the present disclosure may be dendritic cells that are genetically modified to express the compositions of the disclosure. Such cells may be used as cancer vaccines.

### V. Definitions

[0631] At various places in the present specification, features or functions of the compositions of the present disclosure are disclosed in groups or in ranges. It is specifically intended that the present disclosure include each and every individual sub combination of the members of such groups and ranges. The following is a non-limiting list of term definitions.

[0632] Activity: As used herein, the term “activity” refers to the condition in which things are happening or being done. Compositions of the disclosure may have activity and this activity may involve one or more biological events. In some embodiments, biological events may include cell signaling events. In some embodiments, biological events may include cell signaling events associated protein interactions with one or more corresponding proteins, receptors, small molecules or any of the biocircuit components described herein.

[0633] Adoptive cell therapy (ACT): The terms “Adoptive cell therapy” or “Adoptive cell transfer”, as used herein, refer to a cell therapy involving in the transfer of cells into a patient, wherein cells may have originated from the patient, or from another individual, and are engineered (altered) before being transferred back into the patient. The therapeutic cells may be derived from the immune system, such as effector immune cells: CD4+ T cell; CD8+ T cell, Natural Killer cell (NK cell); and B cells and tumor infiltrating lymphocytes (TILs) derived from the resected tumors. Most commonly transferred cells are autologous anti-tumor T cells after ex vivo expansion or manipulation. For example, autologous peripheral blood lymphocytes can be genetically engineered to recognize specific tumor antigens by expressing T-cell receptors (TCR) or chimeric antigen receptor (CAR).

[0634] Agent: As used herein, the term “agent” refers to a biological, pharmaceutical, or chemical compound. Non-limiting examples include simple or complex organic or inorganic molecule, a peptide, a protein, an oligonucleotide, an antibody, an antibody derivative, antibody fragment, a receptor, and soluble factor.

[0635] Agonist: the term “agonist” as used herein, refers to a compound that, in combination with a receptor, can produce a cellular response. An agonist may be a ligand that directly binds to the receptor. Alternatively, an agonist may combine with a receptor indirectly by, for example, (a) forming a complex with another molecule that directly binds to the receptor, or (b) otherwise resulting in the modification of another compound so that the other compound directly binds to the receptor. An agonist may be referred to as an agonist of a particular receptor or family of receptors, e.g., agonist of a co-stimulatory receptor.

[0636] Antagonist: the term “antagonist” as used herein refers to any agent that inhibits or reduces the biological activity of the target(s) it binds.

[0637] Antigen: the term “antigen” as used herein is defined as a molecule that provokes an immune response when it is introduced into a subject or produced by a subject such as tumor antigens which arise by the cancer development itself. This immune response may involve either antibody production, or the activation of specific immunologically-competent cells such as cytotoxic T lymphocytes and T helper cells, or both. An antigen can be derived from organisms, subunits of proteins/antigens, killed or inactivated whole cells or lysates. In the context of the disclosure, the terms “antigens of interest” or “desired antigens” refers to those proteins and/or other biomolecules provided herein that are immunospecifically bound or interact with antibodies of the present disclosure and/or fragments, mutants, variants, and/or alterations thereof described herein. In some embodiments, antigens of interest may comprise any of the polypeptides or payloads or proteins described herein, or fragments or portions thereof.

[0638] Approximately: As used herein, the term “approximately” or “about,” as applied to one or more values of interest, refers to a value that is similar to a stated reference value. In certain embodiments, the term “approximately” or “about” refers to a range of values that fall within 25, 20, 19, 18, 17, 16, 15, 14, 13, 12, 11, 10, 9, 8, 7, 6, 5, 4, 3, 2, 1, or less in either direction (greater than or less than) of the stated reference value unless otherwise stated or otherwise evident from the context (except where such number would exceed 100 of a possible value).

[0639] Associated with: As used herein, the terms “associated with,” “conjugated,” “linked,” “attached,” and “tethered,” when used with respect to two or more moieties, mean that the moieties are physically associated or connected with one another, either directly or via one or more additional moieties that serve as linking agents, to form a structure that is sufficiently stable so that the moieties remain physically associated under the conditions in which the structure is used, e.g., physiological conditions. An“association” need not be strictly through direct covalent chemical bonding. It may also suggest ionic or hydrogen bonding or a hybridization-based connectivity sufficiently stable such that the “associated” entities remain physically associated.

[0640] Autologous: the term “autologous” as used herein is meant to refer to any material derived from the same individual to which it is later to be re-introduced into the individual.

[0641] Barcode: the term “barcode” as used herein refers to polynucleotide or amino acid sequence that distinguishes one polynucleotide or amino acid from another.

[0642] Cancer: the term “cancer” as used herein refers a broad group of various diseases characterized by the uncontrolled growth of abnormal cells in the body. Unregulated cell division and growth results in the formation of malignant tumors that invade neighboring tissues ultimately metastasize to distant parts of the body through the lymphatic system or bloodstream.

[0643] Co-stimulatory molecule: As used herein, in accordance with its meaning in immune T cell activation, refers to a group of immune cell surface receptor/ligands which engage between T cells and APCs and generate a stimulatory signal in T cells which combines with the stimulatory signal in T cells that results from T cell receptor (TCR) recognition of antigen/MHC complex (pMHC) on APCs

[0644] Cytokines: the term “cytokines”, as used herein, refers to a family of small soluble factors with pleiotropic functions that are produced by many cell types that can influence and regulate the function of the immune system.

[0645] Delivery: the term “delivery” as used herein refers to the act or manner of delivering a compound, substance, entity, moiety, cargo or payload. A “delivery agent” refers to any agent which facilitates, at least in part, the in vivo delivery of one or more substances (including, but not limited to a compound and/or composition of the present disclosure) to a cell, subject or other biological system cells.

[0646] Destabilized: As used herein, the term “destable,” “destabilize,” “destabilizing region” or “destabilizing domain” means a region or molecule that is less stable than a starting, reference, wild-type or native form of the same region or molecule.

[0647] Engineered: As used herein, embodiments of the disclosure are “engineered” when they are designed to have a feature or property, whether structural or chemical, that varies from a starting point, wild type or native molecule.

[0648] Expression: As used herein, “expression” of a nucleic acid sequence refers to one or more of the following events: (1) production of an RNA template from a DNA sequence (e.g., by transcription); (2) processing of an RNA transcript (e.g., by splicing, editing, 5′ cap formation, and/or 3′ end processing); (3) translation of an RNA into a polypeptide or protein; (4) folding of a polypeptide or protein; and (5) post-translational modification of a polypeptide or protein.

[0649] Feature: As used herein, a “feature” refers to a characteristic, a property, or a distinctive element.

[0650] Formulation: As used herein, a “formulation” includes at least a compound and/or composition of the present disclosure and a delivery agent.

[0651] Fragment: A “fragment,” as used herein, refers to a portion. For example, fragments of proteins may comprise polypeptides obtained by digesting full-length protein. In some embodiments, a fragment of a protein includes at least 3, 4, 5, 6, 7, 8, 9, 10, 11, 12, 13, 14, 15, 16, 17, 18, 19, 20, 25, 30, 35, 40, 45, 50, 55, 60, 65, 70, 75, 80, 85, 90, 95, 100, 150, 200, 250 or more amino acids. In some embodiments, fragments of an antibody include portions of an antibody.

[0652] Functional: As used herein, a “functional” biological molecule is a biological entity with a structure and in a form in which it exhibits a property and/or activity by which it is characterized.

[0653] Immune cells: the term “an immune cell”, as used herein, refers to any cell of the immune system that originates from a hematopoietic stem cell in the bone marrow, which gives rise to two major lineages, a myeloid progenitor cell (which give rise to myeloid cells such as monocytes, macrophages, dendritic cells, megakaryocytes and granulocytes) and a lymphoid progenitor cell (which give rise to lymphoid cells such as T cells, B cells and natural killer (NK) cells). Exemplary immune system cells include a CD4+ T cell, a CD8+ T cell, a CD4− CD8− double negative T cell, a T γδ cell, a Tαβ cell, a regulatory T cell, a natural killer cell, and a dendritic cell. Macrophages and dendritic cells may be referred to as “antigen presenting cells” or “APCs,” which are specialized cells that can activate T cells when a major histocompatibility complex (MHC) receptor on the surface of the APC complexed with a peptide interacts with a TCR on the surface of a T cell.

[0654] Immunotherapy: the term “immunotherapy” as used herein, refers to a type of treatment of a disease by the induction or restoration of the reactivity of the immune system towards the disease.

[0655] Immunotherapeutic agent: the term “immunotherapeutic agent” as used herein, refers to the treatment of disease by the induction or restoration of the reactivity of the immune system towards the disease with a biological, pharmaceutical, or chemical compound.

[0656] In vitro: As used herein, the term “in vitro” refers to events that occur in an artificial environment, e.g., in a test tube or reaction vessel, in cell culture, in a Petri dish, etc., rather than within an organism (e.g., animal, plant, or microbe).

[0657] In vivo: As used herein, the term “in vivo” refers to events that occur within an organism (e.g., animal, plant, or microbe or cell or tissue thereof).

[0658] Linker: As used herein, a linker refers to a moiety that connects two or more domains, moieties or entities. In one embodiment, a linker may comprise 10 or more atoms. In a further embodiment, a linker may comprise a group of atoms, e.g., 10-1,000 atoms, and can be comprised of the atoms or groups such as, but not limited to, carbon, amino, alkylamino, oxygen, sulfur, sulfoxide, sulfonyl, carbonyl, and imine. In some embodiments, a linker may comprise one or more nucleic acids comprising one or more nucleotides. In some embodiments, the linker may comprise an amino acid, peptide, polypeptide or protein. In some embodiments, a moiety bound by a linker may include, but is not limited to an atom, a chemical group, a nucleoside, a nucleotide, a nucleobase, a sugar, a nucleic acid, an amino acid, a peptide, a polypeptide, a protein, a protein complex, a payload (e.g., a therapeutic agent). or a marker (including, but not limited to a chemical, fluorescent, radioactive or bioluminescent marker). The linker can be used for any useful purpose, such as to form multimers or conjugates, as well as to administer a payload, as described herein. Examples of chemical groups that can be incorporated into the linker include, but are not limited to, alkyl, alkenyl, alkynyl, amido, amino, ether, thioether, ester, alkylene, heteroalkylene, aryl, or heterocyclyl, each of which can be optionally substituted, as described herein. Examples of linkers include, but are not limited to, unsaturated alkanes, polyethylene glycols (e.g., ethylene or propylene glycol monomeric units, e.g., diethylene glycol, dipropylene glycol, triethylene glycol, tripropylene glycol, tetraethylene glycol, or tetraethylene glycol), and dextran polymers, Other examples include, but are not limited to, cleavable moieties within the linker, such as, for example, a disulfide bond (—S—S—) or an azo bond (—N═N—), which can be cleaved using a reducing agent or photolysis. Non-limiting examples of a selectively cleavable bonds include an amido bond which may be cleaved for example by the use of tris(2-carboxyethyl) phosphine (TCEP), or other reducing agents, and/or photolysis, as well as an ester bond which may be cleaved for example by acidic or basic hydrolysis.

[0659] Checkpoint/factor: As used herein, a checkpoint factor is any moiety or molecule whose function acts at the junction of a process. For example, a checkpoint protein, ligand or receptor may function to stall or accelerate the cell cycle.

[0660] Metabolite: Metabolites are the intermediate products of metabolic reactions catalyzed by enzymes that naturally occur within cells. This term is usually used to describe small molecules, fragments of larger biomolecules or processed products.

[0661] Modified: As used herein, the term “modified” refers to a changed state or structure of a molecule or entity as compared with a parent or reference molecule or entity. Molecules may be modified in many ways including chemically, structurally, and functionally. In some embodiments, compounds and/or compositions of the present disclosure are modified by the introduction of non-natural amino acids.

[0662] Mutation: As used herein, the term “mutation” refers to a change and/or alteration. In some embodiments, mutations may be changes and/or alterations to proteins (including peptides and polypeptides) and/or nucleic acids (including polynucleic acids). In some embodiments, mutations comprise changes and/or alterations to aprotein and/or nucleic acid sequence. Such changes and/or alterations may comprise the addition, substitution and or deletion of one or more amino acids (in the case of proteins and/or peptides) and/or nucleotides (in the case of nucleic acids and or polynucleic acids e.g., polynucleotides). In some embodiments, wherein mutations comprise the addition and/or substitution of amino acids and/or nucleotides, such additions and/or substitutions may comprise 1 or more amino acid and/or nucleotide residues and may include modified amino acids and/or nucleotides. The resulting construct, molecule or sequence of a mutation, change or alteration may be referred to herein as a mutant.

[0663] Neoantigen: the term “neoantigen”, as used herein, refers to a tumor antigen that is present in tumor cells but not normal cells and do not induce deletion of their cognate antigen specific T cells in thymus (i.e., central tolerance). These tumor neoantigens may provide a “foreign” signal, similar to pathogens, to induce an effective immune response needed for cancer immunotherapy. A neoantigen may be restricted to a specific tumor. A neoantigen be a peptide/protein with a missense mutation (missense neoantigen), or a new peptide with long, completely novel stretches of amino acids from novel open reading frames (neoORFs). The neoORFs can be generated in some tumors by out-of-frame insertions or deletions (due to defects in DNA mismatch repair causing microsatellite instability), gene-fusion, read-through mutations in stop codons, or translation of improperly spliced RNA (e.g., Saeterdal et al., Proc Natl Acad Sci USA, 2001, 98: 13255-13260).

[0664] Off-target: As used herein, “off target” refers to any unintended effect on any one or more target, gene, cellular transcript, cell, and/or tissue.

[0665] Operably linked: As used herein, the phrase “operably linked” refers to a functional connection between two or more molecules, constructs, transcripts, entities, moieties or the like.

[0666] Payload or payload of interest (POI): the terms “payload” and “payload of interest (POI)”, as used herein, are used interchangeable. A payload of interest (POI) refers to any protein or compound whose function is to be altered. In the context of the present disclosure, the POI is a component in the immune system, including both innate and adaptive immune systems. Payloads of interest may be a protein, a fusion construct encoding a fusion protein, or non-coding gene, or variant and fragment thereof. Payload of interest may, when amino acid based, may be referred to as a protein of interest.

[0667] Pharmaceutically acceptable excipients: the term “pharmaceutically acceptable excipient,” as used herein, refers to any ingredient other than active agents (e.g., as described herein) present in pharmaceutical compositions and having the properties of being substantially nontoxic and non-inflammatory in subjects. In some embodiments, pharmaceutically acceptable excipients are vehicles capable of suspending and/or dissolving active agents. Excipients may include, for example: antiadherents, antioxidants, binders, coatings, compression aids, disintegrants, dyes (colors), emollients, emulsifiers, fillers (diluents), film formers or coatings, flavors, fragrances, glidants (flow enhancers), lubricants, preservatives, printing inks, sorbents, suspending or dispersing agents, sweeteners, and waters of hydration. Exemplary excipients include, but are not limited to: butylated hydroxytoluene (BHT), calcium carbonate, calcium phosphate (dibasic), calcium stearate, croscarmellose, crosslinked polyvinyl pyrrolidone, citric acid, crospovidone, cysteine, ethylcellulose, gelatin, hydroxypropyl cellulose, hydroxypropyl methylcellulose, lactose, magnesium stearate, maltitol, mannitol, methionine, methylcellulose, methyl paraben, microcrystalline cellulose, polyethylene glycol, polyvinyl pyrrolidone, povidone, pregelatinized starch, propyl paraben, retinyl palmitate, shellac, silicon dioxide, sodium carboxymethyl cellulose, sodium citrate, sodium starch glycolate, sorbitol, starch (corn), stearic acid, sucrose, tale, titanium dioxide, vitamin A, vitamin E, vitamin C, and xylitol.

[0668] Pharmaceutically acceptable salts: Pharmaceutically acceptable salts of the compounds described herein are forms of the disclosed compounds wherein the acid or base moiety is in its salt form (e.g., as generated by reacting a free base group with a suitable organic acid). Examples of pharmaceutically acceptable salts include, but are not limited to, mineral or organic acid salts of basic residues such as amines; alkali or organic salts of acidic residues such as carboxylic acids; and the like. Representative acid addition salts include acetate, adipate, alginate, ascorbate, aspartate, benzenesulfonate, benzoate, bisulfate, borate, butyrate, camphorate, camphorsulfonate, citrate, cyclopentanepropionate, digluconate, dodecylsulfate, ethanesulfonate, fumarate, glucoheptonate, glycerophosphate, hemisulfate, heptonate, hexanoate, hydrobromide, hydrochloride, hydroiodide, 2-hydroxy-ethanesulfonate, lactobionate, lactate, laurate, lauryl sulfate, malate, maleate, malonate, methanesulfonate, 2-naphthalenesulfonate, nicotinate, nitrate, oleate, oxalate, palmitate, pamoate, pectinate, persulfate, 3-phenylpropionate, phosphate, picrate, pivalate, propionate, stearate, succinate, sulfate, tartrate, thiocyanate, toluenesulfonate, undecanoate, valerate salts, and the like. Representative alkali or alkaline earth metal salts include sodium, lithium, potassium, calcium, magnesium, and the like, as well as nontoxic ammonium, quaternary ammonium, and amine cations, including, but not limited to ammonium, tetramethylammonium, tetraethylammonium, methylamine, dimethylamine, trimethylamine, triethylamine, ethylamine, and the like. Pharmaceutically acceptable salts include the conventional non-toxic salts, for example, from non-toxic inorganic or organic acids. In some embodiments, a pharmaceutically acceptable salt is prepared from a parent compound which contains a basic or acidic moiety by conventional chemical methods. Generally, such salts can be prepared by reacting the free acid or base forms of these compounds with a stoichiometric amount of the appropriate base or acid in water or in an organic solvent, or in a mixture of the two; generally, nonaqueous media like ether, ethyl acetate, ethanol, isopropanol, or acetonitrile are preferred. Lists of suitable salts are found in Remington's Pharmaceutical Sciences, 17th ed., Mack Publishing Company, Easton, Pa., 1985, p. 1418, Pharmaceutical Salts: Properties, Selection, and Use, P. H. Stahl and C. G. Wermuth (eds.), Wiley-VCH, 2008, and Berge et al., Journal of Pharmaceutical Science, 66, 1-19 (1977), each of which is incorporated herein by reference in its entirety. Pharmaceutically acceptable solvate: The term “pharmaceutically acceptable solvate,” as used herein, refers to a crystalline form of a compound wherein molecules of a suitable solvent are incorporated in the crystal lattice. For example, solvates may be prepared by crystallization, recrystallization, or precipitation from a solution that includes organic solvents, water, or a mixture thereof. Examples of suitable solvents are ethanol, water (for example, mono-, di-, and tri-hydrates), N-methylpyrrolidinone (NMP), dimethyl sulfoxide (DMSO), N, N′-dimethylformamide (DMF), N, N′-dimethylacetamide (DMAC), 1,3-dimethyl-2-imidazolidinone (DMEU), 1,3-dimethyl-3,4,5,6-tetrahydro-2-(1H)-pyrimidinone (DMPU), acetonitrile (ACN), propylene glycol, ethyl acetate, benzyl alcohol, 2-pyrrolidone, benzyl benzoate, and the like. When water is the solvent, the solvate is referred to as a “hydrate.” In some embodiments, the solvent incorporated into a solvate is of a type or at a level that is physiologically tolerable to an organism to which the solvate is administered (e.g., in a unit dosage form of a pharmaceutical composition).

[0669] Stable: As used herein “stable” refers to a compound or entity that is sufficiently robust to survive isolation to a useful degree of purity from a reaction mixture, and preferably capable of formulation into an efficacious therapeutic agent.

[0670] Stabilized: As used herein, the term “stabilize”, “stabilized,” “stabilized region” means to make or become stable. In some embodiments, stability is measured relative to an absolute value. In some embodiments, stability is measured relative to a secondary status or state or to a reference compound or entity.

[0671] Standard CAR: As used herein, the term “standard CAR” refers to the standard design of a chimeric antigen receptor. The components of a CAR fusion protein including the extracellular scFv fragment, transmembrane domain and one or more intracellular domains are linearly constructed as a single fusion protein.

[0672] Stimulus response element (SRE): the term “stimulus response element (SRE), as used herein, is a component of an effector module which is joined, attached, linked to or associated with one or more payloads of the effector module and in some instances, is responsible for the responsive nature of the effector module to one or more stimuli. As used herein, the “responsive” nature of an SRE to a stimulus may be characterized by a covalent or non-covalent interaction, a direct or indirect association or a structural or chemical reaction to the stimulus. Further, the response of any SRE to a stimulus may be a matter of degree or kind. The response may be a partial response. The response may be a reversible response. The response may ultimately lead to a regulated signal or output. Such output signal may be of a relative nature to the stimulus, e.g., producing a modulatory effect of between 1 and 100 or a factored increase or decrease such as 2-fold, 3-fold, 4-fold, 5-fold, 10-fold or more. One non-limiting example of an SRE is a destabilizing domain (DD).

[0673] Subject: As used herein, the term “subject” or “patient” refers to any organism to which a composition in accordance with the disclosure may be administered, e.g., for experimental, diagnostic, prophylactic, and/or therapeutic purposes. Typical subjects include animals (e.g., mammals such as mice, rats, rabbits, non-human primates, and humans) and/or plants.

[0674] T cell: A T cell is an immune cell that produces T cell receptors (TCRs). T cells can be naïve (not exposed to antigen; increased expression of CD62L, CCR7, CD28, CD3, CD127, and CD45RA, and decreased expression of CD45RO as compared to T_{CM}), memory T cells (T_{M}) (antigen-experienced and long-lived), and effector cells (antigen-experienced, cytotoxic). T_{M} can be further divided into subsets of central memory T cells (T_{CM}, increased expression of CD62L, CCR7, CD28, CD127, CD45RO, and CD95, and decreased expression of CD54RA as compared to naïve T cell and effector memory T cells (T_{EM}, decreased expression of CD62L, CCR7, CD28, CD45RA, and increased expression of CD127 as compared to naïve T cells or T_{CM}). Effector T cells (T_{E}) refers to antigen-experienced CD8+ cytotoxic T lymphocytes that have decreased expression of CD62L, CCR7, CD28, and are positive for granzyme and perform as compared to T_{CM}. Other exemplary T cells include regulatory T cells, such as CD4+ CD25+ (Foxp3+) regulatory T cells and Treg17 cells, as well as Tr1, Th3, CD8+CD28-, and Qa-1 restricted T cells.

[0675] T cell receptor: T cell receptor (TCR) refers to an immunoglobulin superfamily member having a variable antigen binding domain, a constant domain, a transmembrane region, and a short cytoplasmic tail, which is capable of specifically binding to an antigen peptide bound to a MHC receptor. A TCR can be found on the surface of a cell or in soluble form and generally is comprised of a heterodimer having α and β chains (also known as TCRα and TCRβ, respectively), or γ and δ chains (also known as TCRγ and TCRδ, respectively). The extracellular portion of TCR chains (e.g., α-chain, β-chain) contains two immunoglobulin domains, a variable domain (e.g., α-chain variable domain or V_{α}, β-chain variable domain or V_{β}) at the N terminus, and one constant domain (e.g., α-chain constant domain or C_{α} and β-chain constant domain or C_{β},) adjacent to the cell membrane. Similar to immunoglobulin, the variable domains contain complementary determining regions (CDRs) separated by framework regions (FRs). A TCR is usually associated with the CD3 complex to form a TCR complex. As used herein, the term “TCR complex” refers to a complex formed by the association of CD3 with TCR. For example, a TCR complex can be composed of a CD3γ chain, a CD3δ chain, two CD3ε chains, a homodimer of CD3ζ chains, a TCRα chain, and a TCRβ chain. Alternatively, a TCR complex can be composed of a CD3γ chain, a CD3δ chain, two CD3ε chains, a homodimer of CD3ζ chains, a TCRγ chain, and a TCRδ chain. A “component of a TCR complex,” as used herein, refers to a TCR chain (i.e., TCRα, TCRβ, TCRγ or TCRδ), a CD3 chain (i.e., CD3γ, CD3δ, CD3ε or CD3ζ, or a complex formed by two or more TCR chains or CD3 chains (e.g., a complex of TCRα and TCRβ, a complex of TCRγ and TCRδ, a complex of CD3ε and CD3δ, a complex of CD3γ and CD3ε, or a sub-TCR complex of TCRα, TCRβ, CD3γ, CD3δ, and two CD3ε chains.

[0676] Therapeutically effective amount: As used herein, the term “therapeutically effective amount” means an amount of an agent to be delivered (e.g., nucleic acid, drug, therapeutic agent, diagnostic agent, prophylactic agent, etc.) that is sufficient, when administered to a subject suffering from or susceptible to an infection, disease, disorder, and/or condition, to treat, improve symptoms of, diagnose, prevent, and/or delay the onset of the infection, disease, disorder, and/or condition. In some embodiments, a therapeutically effective amount is provided in a single dose. In some embodiments, a therapeutically effective amount is administered in a dosage regimen comprising a plurality of doses. Those skilled in the art will appreciate that in some embodiments, a unit dosage form may be considered to comprise a therapeutically effective amount of a particular agent or entity if it comprises an amount that is effective when administered as part of such a dosage regimen.

[0677] Treatment or treating: As used herein, the terms “treatment” or “treating” denote an approach for obtaining a beneficial or desired result including and preferably a beneficial or desired clinical result. Such beneficial or desired clinical results include, but are not limited to, one or more of the following: reducing the proliferation of (or destroying) cancerous cells or other diseased, reducing metastasis of cancerous cells found in cancers, shrinking the size of the tumor, decreasing symptoms resulting from the disease, increasing the quality of life of those suffering from the disease, decreasing the dose of other medications required to treat the disease, delaying the progression of the disease, and/or prolonging survival of individuals.

[0678] Tune: As used herein, the term “tune” means to adjust, balance or adapt one thing in response to a stimulus or toward a particular outcome. In one non-limiting example, the SREs and/or DDs of the present disclosure adjust, balance or adapt the function or structure of compositions to which they are appended, attached or associated with in response to particular stimuli and/or environments.

### EQUIVALENTS AND SCOPE

[0679] Those skilled in the art will recognize or be able to ascertain using no more than routine experimentation, many equivalents to the specific embodiments in accordance with the disclosure described herein. The scope of the present disclosure is not intended to be limited to the above Description, but rather is as set forth in the appended claims.

[0680] In the claims, articles such as “a,” “an,” and “the” may mean one or more than one unless indicated to the contrary or otherwise evident from the context. Claims or descriptions that include “or” between one or more members of a group are considered satisfied if one, more than one, or all of the group members are present in, employed in, or otherwise relevant to a given product or process unless indicated to the contrary or otherwise evident from the context. The disclosure includes embodiments in which exactly one member of the group is present in, employed in, or otherwise relevant to a given product or process. The disclosure includes embodiments in which more than one, or the entire group members are present in, employed in or otherwise relevant to a given product or process.

[0681] It is also noted that the term “comprising” is intended to be open and permits but does not require the inclusion of additional elements or steps. When the term “comprising” is used herein, the term “consisting of” is thus also encompassed and disclosed.

[0682] Where ranges are given, endpoints are included. Furthermore, it is to be understood that unless otherwise indicated or otherwise evident from the context and understanding of one of ordinary skill in the art, values that are expressed as ranges can assume any specific value or subrange within the stated ranges in different embodiments of the disclosure, to the tenth of the unit of the lower limit of the range, unless the context clearly dictates otherwise.

[0683] In addition, it is to be understood that any particular embodiment of the present disclosure that falls within the prior art may be explicitly excluded from any one or more of the claims. Since such embodiments are deemed to be known to one of ordinary skill in the art, they may be excluded even if the exclusion is not set forth explicitly herein. Any particular embodiment of the compositions of the disclosure (e.g., any antibiotic, therapeutic or active ingredient; any method of production; any method of use; etc.) can be excluded from any one or more claims, for any reason, whether or not related to the existence of prior art.

[0684] It is to be understood that the words which have been used are words of description rather than limitation, and that changes may be made within the purview of the appended claims without departing from the true scope and spirit of the disclosure in its broader aspects.

[0685] While the present disclosure has been described at some length and with some particularity with respect to the several described embodiments, it is not intended that it should be limited to any such particulars or embodiments or any particular embodiment, but it is to be construed with references to the appended claims so as to provide the broadest possible interpretation of such claims in view of the prior art and, therefore, to effectively encompass the intended scope of the disclosure. The present disclosure is further illustrated by the following nonlimiting examples.

### EXAMPLES

[0686] In the examples below, constructs and DDs are referred to by their identifiers (e.g., OT-001976). Additional information regarding the constructs and DDs may be found throughout the specification.

### Example 1. CA2 Mutant Saturation Library

[0687] A mutant library wherein every amino acid within position 2 to 260 of SEQ ID NO. 11717 was mutated, was generated. The library of mutations was fused to a reporter protein e.g. AcGFP via a linker and transduced into Jurkat cells. The library expressing cells were selected using the selectable marker, mCherry. The library expressing cells were subject to a “low sort” where the bottom 10% of the GFP positive population were sorted to collect only the lowest basal expressing clones. The library expressing cells were treated with 10 μM Celecoxib for 24 hours and top 10% and top 10-30% GFP positive cells were sorted separately and collected to ensure that only cells with high GFP expression in the presence of ligand were selected at this step. The two populations i.e. top 10% and top 10-30% were combined for the subsequent sorting step where the bottom 22% of GFP expressing cells were sorted and collected. The final library was treated with DMSO or 10 μM Celecoxib and compared with OT-001987 and OT-001515 (with a W208S mutation of CA2) under similar conditions. Low basal expression and ligand dependent stabilization was observed with ligand treatment, although the maximal expression was not quite as high as with the OT-001987 construct. Compared to the OT-001987, the OT-001515 showed ligand dependent stabilization with Celecoxib. The genomic DNA was isolated from the final library, amplified and inserted into lentiviral vector by Gibson assembly. Table 16 provides the carbonic anhydrase 2 mutants generated by this method and the frequency of their occurrence in the final library. In Table 16, “*” represents the translation of the stop codon. In Table 16, the Construct ID (OT-XXXXXX) refers to the construct which includes the referenced CA2 mutant and the Library ID (LibCXXXXXX) refers to the CA2 mutant itself.

TABLE 16
CA2 saturation library mutants

| Construct ID/ | | |
|---|---|---|
| Library ID | Mutation | Frequency |
| OT-001976 | Y51N | 28 |
| OT-001977 | S56N | 23 |
| LibC000098; | Y51T | 19 |
| LibC000097 | | |
| OT-001978 | D72F; V241F; P249L | 13 |
| LibC000084 | D71F; N231F | 9 |
| LibC000079; | S56F | 9 |
| LibC000078 | | |
| LibC000094 | T35K; D72F; K260D | 7 |
| OT-001979 | D71L; T87N; L250R | 5 |
| OT-001980 | L183S | 5 |
| LibC000076 | A77I; P249F | 4 |
| LibC000099 | D71K; P249H | 4 |
| LibC000081 | D72F; P249F | 4 |
| LibC000065 | Q53N; N61Y | 4 |
| LibC000066; | Y193I | 3 |
| LibC000069 | | |
| LibC000056 | S73N, R89Y | 2 |
| LibC000057 | D71K, T192F | 2 |
| LibC000061 | E238* | 2 |
| LibC000083 | G144D | 2 |
| LibC000092 | Y193L, K260L | 2 |
| LibC000053 | V206M | 1 |
| LibC000054 | D71F, V241F, P249L | 1 |
| LibC000055 | Y193F | 1 |
| LibC000058 | L147F, Q248F | 1 |
| LibC000059 | D52I, S258P | 1 |
| LibC000060 | D72S, T192N | 1 |
| LibC000062 | D179E, T192I | 1 |
| LibC000063 | Y193L | 1 |
| LibC000064 | S56N, Q103K | 1 |
| LibC000067 | D71Y, Q248L | 1 |
| LibC000068 | S73N, R89F | 1 |
| LibC000070 | D71K, N231L, E235G, | 1 |
| | L239F | |
| LibC000071 | D71F | 1 |
| LibC000072 | D72F, P249I | 1 |
| LibC000074 | T192N | 1 |
| LibC000075 | D72X, V241X, P249X | 1 |
| LibC000077 | A54X, S56X, L57X, T192X | 1 |
| LibC000080 | Y193V, K260F | 1 |
| LibC000085 | G63D, M240L | 1 |
| LibC000086 | V134F, L228F | 1 |
| LibC000087 | D71G, N231K | 1 |
| LibC000088 | S56F, D71S | 1 |
| LibC000089 | D52L, G128R, Q248F | 1 |
| LibC000091 | S73X, R89X | 1 |
| LibC000093 | Y193X | 1 |
| LibC000096 | Y51X ,D72X, V241X, P249X | 1 |
| LibC000100 | D72I, W97C | 1 |
| LibC000102 | D71K, T192F, N231F | 1 |

[0688] Select constructs were transduced into NIH3T3 cells and response of the mutants to increasing doses of Acetazolamide, Celecoxib or vehicle control for 24 hours was tested using FACS. Table 17 and Table 18 shows the MFI without treatment with ligand, the maximum fold change, and the EC₅₀. The MFI for all constructs tested showed an increase with increase in dose of the ligand utilized. In general OT-001977 and OT-001979 showed the strongest increases in MFI with both ligands. The MFI values obtained with Acetazolamide were much higher than the MFIs obtained with Celecoxib treatment.

TABLE 17
Acetazolamide dose response

| | Basal | Max fold | |
|---|---|---|---|
| Construct ID | MFI | change | EC50 |
| OT-001515 | 179 | 6.5 | 1.41 |
| OT-001977 | 496 | 5.98 | 0.185 |
| OT-001978 | 135.67 | 13.92 | 0.493 |
| OT-001979 | 576.33 | 5.43 | 0.371 |
| OT-001980 | 367.33 | 6.29 | 0.179 |

TABLE 18
Celecoxib dose response

| | | Max | |
|---|---|---|---|
| | Basal | fold | |
| Construct ID | MFI | change | EC50 |
| OT-001515 | 230.33 | 3.85 | 2.949 |
| OT-001977 | 652 | 4.47 | 0.943 |
| OT-001978 | 175.33 | 9.83 | 0.911 |
| OT-001979 | 835 | 3.32 | 1.181 |
| OT-001980 | 496 | 4.53 | 0.548 |

[0689] Alternatively, single cell clones were generated by fluorescence activated cell sorting of the final sorted library pool. Clones were tested by treatment with 10 μM acetazolamide. Clones showing at least 5-fold increase in GFP expression over vehicle treatment were expanded. Genomic DNA was isolated and DRD was amplified by PCR and inserted in lentiviral vector by Gibson assembly. Lentivirus was generated and used to infect Jurkat cells and create stable cell lines. Cell lines were characterized by treating with acetazolamide for 24 hours and measuring GFP expression by flow cytometry.

### Example 2. CA2 Cysteine to Serine Mutants

[0690] Mutations in cysteine at position 205 of SEQ ID NO. 11717 may help destabilize the protein, which may then be stabilized by the addition of ligand. To test this the cysteine at position 205 was mutated to serine and combined with other mutations shown in Table 19. The CA2 DDs thus generated were linked to AcGFP and cloned into lentiviral vectors. Jurkat cells were transduced with lentivirus, treated with 10 μM for 24 hours and GFP expression was analyzed by FACS. Table 19 shows Median fluorescence intensity of GFP for each condition.

TABLE 19
Celecoxib dose response with serine mutants

| Sample name | Treatment | MFI (AcGFP) | Stabilization Ratio |
|---|---|---|---|
| Parental Jurkat | DMSO | 71 | — |
| | Celecoxib | 85.7 | 1.21 |
| OT-001570 | DMSO | 87.9 | — |
| | Celecoxib | 101 | 1.15 |
| OT-001681 | DMSO | 90.7 | — |
| | Celecoxib | 103 | 1.14 |
| OT-001682 | DMSO | 83.6 | — |
| | Celecoxib | 101 | 1.21 |

[0691] As shown in Table 19 addition of ligand only induced up to 1.2 increase in stabilization ratio in the combination mutations suggesting that the cysteine residue did not significantly contribute to the destabilization of the DD.

### Example 3. CA2 Regulated Chimeric Antigen Receptors

[0692] CA2 DD described herein were operably linked to CARs to generate tunable CAR constructs. Activated T cells from human donor were transduced with 10 μL of lentivirus for indicated constructs. On day 6 of the T cell expansion, the cells were incubated overnight with 10 μM Acetazolamide, or Valdecoxib as indicated, or DMSO vehicle control. Cell surface CAR expression was detected the following day by staining the cells with 10 ug/mL CD19-Fc followed by an anti-human-BV421 conjugated secondary antibody. Histograms were plotted from a live cell gate. Similar experiments were also performed at day 8 and the cells were harvested at day 9. The data are shown in Table 20 as percentage CAR positive cells. The stabilization ratio was also calculated and is included in Table 20 as SR.

TABLE 20
% CA2 CAR positive cells

| | Day of | | 10 μM | | 10 μM | |
|---|---|---|---|---|---|---|
| | T cell | DMSO | Acetazolamide | | Valdecoxib | |
| Construct | Expansion | % CAR | % CAR | SR | % CAR | SR |
| OT-001988 | 7 | 23.7 | 59.2 | 2.5 | 40.3 | 1.7 |
| | 9 | 3.5 | 36.7 | 10.5 | 6.4 | 1.8 |
| OT-001989 | 7 | 45.1 | 65 | 1.4 | 59.3 | 1.3 |
| | 9 | 5.9 | 42 | 7.1 | 19.0 | 3.2 |

[0693] As shown in Table 20, basal CAR expression decreased from day 7 to day 9. Both constructs showed ligand dependent stabilization with both Acetazolamide and Valdecoxib. Greater CAR regulation was observed with Acetazolamide compared to Valdecoxib both at day 7 and 9, whereas regulation was more evident at day 7 with Valdecoxib treatment.

[0694] Activated T cells from human donor were transduced with 10 μL of lentivirus for indicated constructs. On day 8 of the T cell expansion, the cells were incubated overnight with titrations of Acetazolamide, or Valdecoxib starting at 10 μM and diluting 3-fold as indicated. Cell surface CAR expression was detected the following day by staining the cells with 10 ug/mL CD19-Fc followed by an anti-human-BV421 conjugated secondary antibody. The percent of ligand induced CAR+ cells are plotted from a live cell gate relative to vehicle treated negative control cells. As shown in FIG. 1 and Table 21, acetazolamide was able to regulate CAR expression in both OT-001988 and OT-001989 at clinically achievable doses. Little to no ligand dependent regulation of CAR was observed with Valdecoxib.

TABLE 21
Regulation of CAR expression at clinically achievable ligand doses

| Ligand | OT-001988 | | OT-001989 | |
|---|---|---|---|---|
| (uM) | Acetazolamide | Valdecoxib | Acetazolamide | Valdecoxib |
| 0 | 3.91 | 3.11 | 6.07 | 5.73 |
| 0.000169 | 4.22 | 3.50 | 8.07 | 6.80 |
| 0.000508 | 4.41 | 4.59 | 6.28 | 6.44 |
| 0.00152 | 3.71 | 3.76 | 7.72 | 6.54 |
| 0.0045 | 4.67 | 3.91 | 7.19 | 7.31 |
| 0.0137 | 4.91 | 3.97 | 8.05 | 6.75 |
| 0.041 | 4.59 | 3.74 | 9.31 | 7.18 |
| 0.123 | 6.05 | 4.50 | 13.30 | 8.53 |
| 0.37 | 7.58 | 3.74 | 20.30 | 7.81 |
| 1.11 | 12.8 | 3.87 | 31.20 | 7.65 |
| 3.33 | 25.4 | 4.72 | 38.30 | 11.00 |
| 10 | 36.7 | 6.35 | 42.00 | 19.00 |

[0695] Activated T cells from human donor were transduced with 10 μL of lentivirus for constructs OT-001988 and OT-001989. On day 10 of the T cell expansion, the cells were mixed with Nalm6-NucLightRed cells at Effector: Target (E: T) cell ratios of 10:1, 3:1, 1:1, 0.3:1, 0.1:1, 0.03:1 and treated with either 10 μM acetazolamide, or vehicle (DMSO) control for 5 days. Red fluorescent images were collected and quantitated every 2 hours using the Incucyte Zoom as a measure of Nalm6 tumor cell proliferation. As shown in Table 22, over the course of the experiment i.e. 120 hours, vector transduced T cells did not inhibit Nalm6 proliferation, but OT-001407 (SEQ ID NO. 210963; encoded by SEQ ID NO. 210964) constitutive CAR transduced T cells inhibit proliferation when cultured at E:T ratios of 10:1, 3:1 or 1:1. T cells transduced with OT-001988 and OT-001989 show Nalm6 cell killing in the absence of ligand at high E:T ratios of 10:1 and 3:1 suggesting basal activity, but specific and regulated killing in the presence of Acetazolamide at lower E:T ratios 1:1, 0.3:1, 0.1:1, 0.03:1.

TABLE 22
Specific and regulated cell killing at low Effector:Target ratios

| E:T | pELNS- | | OT-001988 | | OT-001989 | |
|---|---|---|---|---|---|---|
| ratio | 001CD19 | OT-001407 | DMSO | Acetazolamide | DMSO | Acetazolamide |
| 10:1 | 959649.6 | 5249.566 | 74146.59 | 7893.327 | 12465.3 | 7622.067 |
| 3:1 | 1127883 | 11229.93 | 1088639 | 19106.14 | 71778.56 | 23231.23 |
| 1:1 | 882079.4 | 42540.54 | 1003951 | 95252.77 | 774615.1 | 37405.95 |
| 0.3:1 | 926912.4 | 709645.5 | 1101745 | 751518.2 | 988053.8 | 441702.9 |
| 0.1:1 | 1049394 | 987900.1 | 977582.9 | 1005333 | 1024032 | 801499.2 |
| 0.03:1 | 1002171 | 919210 | 1042175 | 929015.9 | 978911.8 | 966327.7 |

[0696] At 72 hours, supernatants were collected from the co-culture and analyzed for IFNgamma and IL2 levels by MSD assay. Cytokine levels were normalized as a fold change over co-culture of untransduced T cells with Nalm6-NucLightRed cells. Results, shown in Table 23 and Table 24, demonstrate that vector transduced T cells did not secrete IFNg or IL2, but OT-001407 constitutive CAR transduced T cells did so in a cell dose dependent manner. CA2 DD transduced T cells show some cytokine secretion in the absence of ligand at high E:T ratios such as 10:1 and 3:1, but specific and regulated cytokine secretion at 1:1, 0.3:1, 0.1:1, and 0.03:1 ratios in the presence of ligand.

TABLE 23
Specific and regulated IFNgamma secretion at low Effector:Target cell ratios

| E:T | pELNS- | | OT-001988 | | OT-001989 | |
|---|---|---|---|---|---|---|
| ratio | 001CD19 | OT-001407 | DMSO | Acetazolamide | DMSO | Acetazolamide |
| 10:1 | 1.2 | 9 | 3.4 | 8.5 | 2.7 | 10.4 |
| 3:1 | 1.1 | 64 | 1.5 | 76.8 | 24.1 | 100.3 |
| 1:1 | 1 | 158.4 | 0.6 | 163.8 | 6.7 | 216.8 |
| 0.3:1 | 0.9 | 282.1 | 1 | 186.4 | 1 | 281.6 |
| 0.1:1 | 0.8 | 126.9 | 0.9 | 37.6 | 1.4 | 63.3 |
| 0.03:1 | 1 | 19.6 | 1 | 45.1 | 1 | 12.2 |

TABLE 24
Specific and regulated IL2 secretion at low Effector:Target cell ratios

| E:T | pELNS- | | OT-001988 | | OT-001989 | |
|---|---|---|---|---|---|---|
| ratio | 001CD19 | OT-001407 | DMSO | Acetazolamide | DMSO | Acetazolamide |
| 10:1 | 1.1 | 3.9 | 80.3 | 0.7 | 3.5 | 0.9 |
| 3:1 | 0.6 | 8.7 | 49.3 | 58.2 | 112.4 | 148 |
| 1:1 | 0.9 | 1016.7 | 8.3 | 1504.6 | 158.7 | 2105.2 |
| 0.3:1 | | 1023 | 6.5 | 904.7 | 12.9 | 998.4 |
| 0.1:1 | | 434.2 | 1.7 | 182.6 | 10.2 | 245.9 |
| 0.03:1 | | 126.4 | 1 | 297.3 | 1.8 | 125.2 |

### Example 4. Destabilization Mutant Screening of Human Carbonic Anhydrase 2

[0697] To identify destabilizing mutations of human CA2 that are stabilized upon ligand binding to CA2, two rounds of mutant screening were performed, using a lentivirus CA2 mutant library provided by Genscript (China). These methods were used to generate a library of mutant polypeptides using mutagenesis primers and error prone PCR. Lentiviral vectors expressing the template, wild-type human CA2 operably linked to GFP(OT-001986) was also provided by Genscript along with the CA2 mutant library. The library was packaged into lentivirus, transduced into NIH3T3 cells at a multiplicity of infection (MOI) of approximately 0.3 and select stable cell pools were derived by selecting with selection marker puromycin.

[0698] To identify cell pools containing destabilizing mutants of CA2 that are stabilizing when CA2 is bound to its corresponding ligand, cells were sorted using FACS. In the initial round, the bottom 15% of population that was GFP negative in the absence of ligand was selected. Cells were expanded and then treated with 10 μM Celecoxib for 24 hours and harvested for cell sorting. The top 11% GFP positive cells which were also responsive to ligand treatment compared to untreated were collected. Celecoxib was removed from the cultures and replaced with DMSO. The cells were analyzed by FACS and only cell populations that did not overlap with the populations from the previous sort that showed GFP expression in the presence of Celecoxib were selected. In contrast to the initial CA2 library, the library after final sort showed 4-6-fold induction in GFP expression when treated with Celecoxib or Valdecoxib relative to DMSO control treatment. Genomic DNA was isolated and amplified CA2 mutants were reintroduced to the lentiviral vectors where CA2 was operably linked to GFP. The constructs were transduced into NIH3T3 cells with lentivirus vectors for each clone. The cells were treated with 10 μM Valdecoxib or 10 μM Celecoxib for 24 hours and analyzed by FACS. Table 25 shows the median fluorescence intensity denoted as “Median PE” and the stabilization ratio indicated as SR. In Table 25, the Construct ID (OT-XXXXXX) refers to the construct which includes the referenced CA2 mutant and the Library ID (LibCXXXXXX) refers to the CA2 mutant itself.

TABLE 25
Ligand dependent response of CA2 mutants

| | | | | 10 μM | 10 μM |
|---|---|---|---|---|---|
| Construct | Treatment | Parent | DMSO | Valdecoxib | Celecoxib |
| OT-001986 | Median PE | 93.7 | 33200 | 33000 | 35000 |
| | SR | | 1 | 0.99 | 1.05 |
| LibC000226 | Median PE | 93.7 | 441 | 3588 | 3816 |
| | SR | | 1 | 7.93 | 8.65 |
| OT-002006 | Median PE | 93.7 | 1763 | 9453 | 6983 |
| | SR | | 1 | 5.36 | 3.96 |
| OT-002001 | Median PE | 93.7 | 209 | 251 | 236 |
| | SR | | 1 | 1.2 | 1.13 |
| LibC000186 | Median PE | 93.7 | 816 | 6570 | 8156 |
| | SR | | 1 | 8.05 | 10 |
| LibC000193 | Median PE | 93.7 | 693 | 6445 | 7428 |
| | SR | | 1 | 9.3 | 10.71 |
| LibC000191 | Median PE | 93.7 | 160 | 177 | 173 |
| | SR | | 1 | 1.11 | 1.08 |
| LibC000208 | Median PE | 93.7 | 926 | 8006 | 8690 |
| | SR | | 1 | 8.65 | 9.38 |
| LibC000188 | Median PE | 93.7 | 206 | 228 | 225 |
| | SR | | 1 | 1.11 | 1.09 |
| LibC000211 | Median PE | 93.7 | 13000 | 19800 | 20800 |
| | SR | | 1 | 1.52 | 1.6 |
| LibC000212 | Median PE | 93.7 | 30100 | 30700 | 30700 |
| | SR | | 1 | 1.02 | 1.02 |
| LibC000198 | Median PE | 93.7 | 275 | 552 | 535 |
| | SR | | 1 | 2 | 1.95 |
| LibC000220 | Median PE | 93.7 | 311 | 408 | 384 |
| | SR | | 1 | 1.31 | 1.2 |

[0699] In response to ligand treatment, LibC000198, LibC000208, LibC000193; LibC000186; OT-002006; LibC000226 showed stabilization ratios greater than 2.

[0700] The response of NIH3T3 cells to varying doses of Valdecoxib or Celecoxib for 24 hours was measured and analyzed by FACS. Table 26 and Table 27 shows the median fluorescence intensity denoted as “Med”, parental cells as “P” and the stabilization ratio indicated as SR with Valdecoxib or Celecoxib treatment respectively.

TABLE 26
CA2 mutant dose response with Valdecoxib

| Val | OT-001986 | | LibC000226 | | OT-002006 | | LibC000186 | | LibC000193 | | LibC000208 | | LibC000218 | |
|---|---|---|---|---|---|---|---|---|---|---|---|---|---|---|
| (μM) | Med | SR | Med | SR | Med | SR | Med | SR | Med | SR | Med | SR | Med | SR |
| P | 82.7 | | 83.3 | | 83.3 | | 82.7 | | 82.7 | | 82.7 | | 82.7 | |
| 0 | 21600 | 1 | 531 | 1 | 1663 | 1 | 934 | 1 | 826 | 1 | 906 | 1 | 145 | 1 |
| 0.03 | — | — | 580 | 1.09 | 1962 | 1.18 | 1223 | 1.31 | 932 | 1.13 | 1049 | 1.16 | 156 | 1.08 |
| 0.1 | — | — | 623 | 1.17 | 1978 | 1.19 | 1217 | 1.3 | 1013 | 1.23 | 1131 | 1.25 | 157 | 1.08 |
| 0.3 | — | — | 655 | 1.23 | 2038 | 1.23 | 1363 | 1.46 | 1064 | 1.29 | 1219 | 1.35 | 157 | 1.08 |
| 1 | — | — | 873 | 1.64 | 2185 | 1.31 | 1711 | 1.83 | 1583 | 1.92 | 1747 | 1.93 | 159 | 1.1 |
| 3 | 22400 | 1.04 | 1572 | 2.96 | 3023 | 1.82 | 3357 | 3.59 | 3667 | 4.44 | 3603 | 3.98 | 161 | 1.11 |
| 10 | 23600 | 1.09 | 3902 | 7.35 | 6301 | 3.79 | 7890 | 8.45 | 7449 | 9.02 | 8284 | 9.14 | 157 | 1.08 |
| 30 | 23700 | 1.1 | 6245 | 11.76 | 9736 | 5.85 | 11800 | 12.63 | 9460 | 11.45 | 11300 | 12.48 | 150 | 1.03 |

TABLE 27
CA2 mutant dose response with Celecoxib

| Cel | OT-001986 | | LibC000226 | | OT-002006 | | LibC000186 | | LibC000193 | | LibC000208 | | LibC000218 | |
|---|---|---|---|---|---|---|---|---|---|---|---|---|---|---|
| (μM) | Med | SR | Med | SR | Med | SR | Med | SR | Med | SR | Med | SR | Med | SR |
| P | 82.7 | | 83.3 | | 83.3 | | 82.7 | | 82.7 | | 82.7 | | 82.7 | |
| 0 | 21600 | 1 | 531 | 1 | 1663 | 1 | 934 | 1 | 826 | 1 | 906 | 1 | 145 | 1 |
| 0.03 | | | 711 | 1.34 | 2006 | 1.21 | 1177 | 1.26 | 935 | 1.13 | 1017 | 1.12 | 155 | 1.07 |
| 0.1 | | | 661 | 1.24 | 2159 | 1.3 | 1290 | 1.38 | 1005 | 1.22 | 1194 | 1.32 | 160 | 1.1 |
| 0.3 | | | 750 | 1.41 | 2458 | 1.49 | 1470 | 1.57 | 1211 | 1.47 | 1457 | 1.61 | 162 | 1.12 |
| 1 | | | 1207 | 2.27 | 3649 | 2.19 | 2065 | 2.21 | 2058 | 2.49 | 2221 | 2.45 | 160 | 1.1 |
| 3 | 21700 | 1 | 2544 | 4.79 | 6341 | 3.81 | 4171 | 4.47 | 4283 | 5.19 | 5404 | 5.96 | 165 | 1.14 |
| 10 | 23900 | 1.11 | 5227 | 9.84 | 10200 | 6.13 | 8202 | 8.78 | 7751 | 9.38 | 9766 | 10.78 | 182 | 1.26 |
| 30 | 23700 | 1.1 | 7171 | 13.5 | 13100 | 7.88 | 10200 | 10.92 | 11100 | 13.44 | 13200 | 14.57 | 236 | 1.63 |

[0701] LibC000226, OT-002006, LibC000186, LibC000193, and LibC000208, showed dose dependent stabilization when treated with either Valdecoxib or Celecoxib.

[0702] Ligand dependent stabilization of LibC000226, OT-002006, LibC000186, LibC000193 and LibC000208 was also confirmed by treating NIH3T3 cells with 1, 3, 10 or 30 μM Celecoxib or Valdecoxib for 24 hours. The protein expression in the presence of ligand was measured by immunoblotting the cell lysates for GFP. All constructs tested showed stabilization of GFP with increasing ligand doses. No change in expression either in the presence or absence of ligand was observed with the OT-001986 construct.

[0703] The response of NIH3T3 cells to varying doses of Acetazolamide for 24 hours was measured and analyzed by FACS. Table 28 shows the median fluorescence intensity denoted as “Median FITC” and the stabilization ratio indicated as SR with Acetazolamide.

TABLE 28
CA2 mutant dose response with Acetazolamide

| | | | | Acetazolamide (μM) | | | | | | |
|---|---|---|---|---|---|---|---|---|---|---|
| Construct | Description | Parent | DMSO | 0.03 | 0.1 | 0.3 | 1 | 3 | 10 | 30 |
| OT-001986 | Median | 74 | 17100 | 17400 | 17800 | 18400 | 19300 | 20200 | 20900 | 22400 |
| | FITC | | | | | | | | | |
| | Fold change | — | 1 | 1.02 | 1.04 | 1.08 | 1.13 | 1.18 | 1.22 | 1.31 |
| LibC000226 | Median PE | 74 | 380 | 499 | 704 | 1360 | 3594 | 6645 | 9295 | 10900 |
| | Fold change | — | 1 | 1.31 | 1.85 | 3.58 | 9.46 | 17.49 | 24.46 | 28.68 |
| OT-002006 | Median PE | 74 | 1529 | 2096 | 2836 | 1564 | 9825 | 14400 | 17300 | 18400 |
| | Fold change | — | 1 | 1.37 | 1.85 | 1.02 | 6.43 | 9.42 | 11.31 | 12.03 |
| LibC000186 | Median PE | 74 | 734 | 872 | 867 | 903 | 936 | 943 | 1189 | 1827 |
| | Fold change | — | 1 | 1.19 | 1.18 | 1.23 | 1.28 | 1.28 | 1.62 | 2.49 |
| LibC000193 | Median PE | 74 | 557 | 854 | 1628 | 3669 | 7445 | 10200 | 11900 | 12900 |
| | Fold change | — | 1 | 1.53 | 2.92 | 6.59 | 13.34 | 18.31 | 21.36 | 23.16 |
| LibC000208 | Median PE | 74 | 757 | 1190 | 2137 | 4715 | 9970 | 13900 | 16900 | 17800 |
| | Fold change | — | 1 | 1.57 | 2.82 | 6.23 | 13.17 | 18.36 | 22.32 | 23.51 |

[0704] All CA2 DDs/CA2 constructs tested including LibC000208 showed dose response stabilization of GFP expression in the response to Acetazolamide.

[0705] Ligand dependent stabilization of LibC000184, OT-002006, LibC000186, LibC000193 and LibC000208 was also confirmed by treating NIH3T3 cells with 0.3, 1, 3, 10 or 30 μM Acetazolamide 24 hours. The protein expression in the presence of ligand was measured by immunoblotting cell lysates for GFP. All constructs tested showed stabilization of GFP with increasing ligand doses. No change in expression either in the presence or absence of ligand was observed with the OT-001986 construct.

[0706] Clones treated with different ligands were compared to examine the behavior of each mutant with the ligands. To enable comparison across different experiments performed on different days, celecoxib and valdecoxib data were normalized as follows: (MFI (experiment day x)/MFI (parental day x))*MFI (parental day 1) wherein parental day 1 represented DMSO values of Acetazolamide treated clones. The results are shown in Table 29.

TABLE 29
Comparative analysis of CA2 mutants

| | | Acetazolamide | Acetazolamide | Celecoxib | Valdecoxib |
|---|---|---|---|---|---|
| Clone ID | DMSO | 10 μM | 30 μM | μM | μM |
| LibC000184 | 380 | 9295 | 10900 | 4660.217 | 3478.892 |
| LibC000193 | 557 | 11900 | 12900 | 6910.53 | 6641.277 |
| LibC000186 | 734 | 1189 | 1827 | 7312.627 | 7034.458 |
| LibC000208 | 757 | 16900 | 17800 | 8707.036 | 7385.735 |
| OT-002006 | 1529 | 17300 | 18400 | 9093.976 | 5617.759 |
| LibC000211 | 10344.09 | — | — | 16550.54 | 15754.84 |
| OT-001986 | 17100 | 20900 | 22400 | — | — |

### Example 5. In Vitro Activity of Chimeric Constructs

[0707] In vitro activity of IL15 chimeric constructs OT-002019 ((Met; CD34 (aa 1-32 of WT, M1G, S32A); IL15 (30-162 of WT); Linker ((GS)15); CD8a Hinge and Transmembrane Domain; Linker (GS); stop), amino acid SEQ ID NO: 210876, nucleic acid SEQ ID NO: 210877) and OT-002090 ((Ig Kappa light chain leader; IL15 (49-162 of WT); Linker ((GS)15); B7-1 Hinge, Transmembrane Domain and Tail; Linker (GS); stop), amino acid SEQ ID NO: 210878, nucleic acid SEQ ID NO: 210879) and CA2 regulated IL15 chimeric construct (OT-002094) were tested in human primary T cells. Human primary T cells were transduced with lentivirus 24 hours after activation with CD3/CD28 beads. Cells were expanded for 10 days. Expression of regulated IL15 was analyzed on day 6 by flow cytometry after 24 hour treatment with 10 μM of Acetazolamide (Acz). The percentage of IL15 positive cells obtained for each treatment group is as follows (a) OT-002019: 82.3% (b) OT-002090: 43.6% (c) OT-002094 with DMSO: 0.7% (d) OT-002094 with 10 μM Acz: 27.9% and (e) untransduced (UT): 0.3%.

[0708] To test IL15-dependent expansion, beads were removed on day 10 and cells were washed. IL15 expressing or control T cells were then cultured in fresh culture media alone or in the presence of Acetazolamide or exogenous IL15 (1 ng/ml) for 10 days. The T cell numbers (Table 30) and the change in CD4/CD8 ratio (Table 31) were determined by flow cytometry. The percent of cells positive for IL15 is shown in Table 32.

TABLE 30
T Cell Numbers

| | | | | OT- | OT- | | | OT- | OT- |
|---|---|---|---|---|---|---|---|---|---|
| | | | | 002019 + | 002019 + | | | 002094 + | 002094 + |
| Days in | | | OT- | 3 uM | 10 uM | OT- | OT- | 3 uM | 10 uM |
| culture | UT | UT +IL15 | 002019 | ACZ | ACZ | 002090 | 002094 | ACZ | ACZ |
| 0 | 1.0E+06 | 1.0E+06 | 1.0E+06 | 1.0E+06 | 1.0E+06 | 1.0E+06 | 1.0E+06 | 1.0E+06 | 1.0E+06 |
| 3 | 8.1E+05 | 3.2E+06 | 2.0E+06 | 1.7E+06 | 1.7E+06 | 1.3E+06 | 6.3E+05 | 9.3E+05 | 8.7E+05 |
| 7 | 1.4E+05 | 5.4E+06 | 6.7E+06 | 5.7E+06 | 5.6E+06 | 4.1E+06 | 2.5E+05 | 1.8E+06 | 1.9E+06 |
| 10 | 3.0E+04 | 1.2E+07 | 2.1E+07 | 1.7E+07 | 1.6E+07 | 1.0E+07 | 2.3E+05 | 3.3E+06 | 3.6E+06 |

TABLE 31
CD4/CD8 Ratio

| | | | | | OT- | OT- | | OT- | OT- |
|---|---|---|---|---|---|---|---|---|---|
| | | | | | 002019 + | 002019 + | | 002094 + | 002094 + |
| Days in | | UT | OT- | OT- | 3 uM | 10 uM | OT- | 3 uM | 10 uM |
| culture | UT | +IL15 | 002090 | 002019 | ACZ | ACZ | 002094 | ACZ | ACZ |
| 0 | 5.64 | 5.64 | 3.79 | 2.51 | 2.51 | 2.51 | 3.83 | 3.83 | 3.83 |
| 3 | 1.58 | 2.57 | 0.66 | 0.45 | 0.46 | 0.47 | 1.00 | 0.83 | 0.84 |
| 7 | 0.49 | 0.64 | 0.09 | 0.06 | 0.06 | 0.07 | 0.48 | 0.15 | 0.15 |
| 10 | 0.98 | 0.28 | 0.04 | 0.02 | 0.02 | 0.03 | 0.35 | 0.07 | 0.08 |

TABLE 32
Percent of cells IL15 positive

| | | Untransduced | | | OT-002019 + | OT-002019 + |
|---|---|---|---|---|---|---|
| Days in culture | Untransduced | +IL15 | OT-002090 | OT-002019 | 3 uM ACZ | 10 uM ACZ |
| 0 | 0 | 0 | 30 | 75 | 75 | 75 |
| 3 | 0 | 1 | 40 | 82 | 82 | 82 |
| 7 | 0 | 0 | 38 | 84 | 84 | 85 |
| 10 | 0 | 1 | 16 | 76 | 78 | 79 |

[0709] Continuous Acetazolamide in culture resulted in 3.6-fold expansion in 10 days and Acetazolamide treatment decreased CD4/CD8 ratio.

### Example 6. Regulation of CD40L In Vitro in T Cells

[0710] CD40L constructs regulated by Carbonic anhydrase DDs were generated and cloned into lentiviral vectors. Purified T cells were thawed and cultured with aCD3 aCD28 Dynabeads (in the ratio of 3 beads to 1 T cell).

[0711] The constructs were transduced in T cells the next day. 48 hours after addition of virus, ligand dependent regulation was tested using 50 μM of Acetazolamide, or vehicle control (DMSO). 24 hours after the addition of ligand T cells were stained for CD40L expression and analyzed using FACS. In the presence of Acetazolamide, OT-001990 demonstrated an increase in CD40L expression compared to vehicle control and T cells expressing the empty vector without the insert. CD40L expression in response to increasing doses of Acetazolamide were measured in CD4+ and CD8+ T cells. Cells were treated with Acetazolamide for 24 hours and CD40L expression was measured using FACS. The results are shown as median fluorescence intensity in Table 33 and as percentage CD40L positive cells in Table 34.

TABLE 33
CD40L MFI

| Acetazolamide | | |
|---|---|---|
| (μM) | CD4+ | CD8+ |
| 0.01 | 112 | 105 |
| 0.05 | 123 | 104 |
| 0.2 | 185 | 136 |
| 0.8 | 481 | 307 |
| 3.1 | 840 | 380 |
| 12.5 | 2783 | 1599 |
| 50 | 3728 | 2184 |

TABLE 34
Percentage CD40L positive cells

| Acetazolamide | | |
|---|---|---|
| (μM) | CD4+ | CD8+ |
| 0.01 | 4.13 | 0.59 |
| 0.05 | 5.44 | 0.44 |
| 0.2 | 10.3 | 1.48 |
| 0.8 | 45.6 | 25.2 |
| 3.1 | 69.3 | 41.2 |
| 12.5 | 90.3 | 77.2 |
| 50 | 91.1 | 80.7 |

[0712] As shown in Table 33 and Table 34, ligand dependent regulation was observed both in CD4+ T cells as well as CD8+ T cells. however, the absolute MFI values and the percentage CD40L positive cells were higher in the CD4+ cells. The amount of Acetazolamide required to achieve stabilization of CD40L within the level of the ligand that can be achieved in humans.

### Example 7. Regulation of Membrane Bound IL12-CA2 in Primary Human CAR-T Cells

[0713] T cells were transduced with a bicistronic construct (OT-002008) conferring CD19-CAR expression with CA2 DD-regulated expression of a membrane-bound form of IL12. T cells were activated, transduced with the indicated constructs, and expanded as described above. Transduced cells were treated with 100 μM acetazolamide (or vehicle as control) for 20 hours. Surface IL12 expression was detected with an anti-IL12p70 antibody (BD, Franklin Lakes, N.J.). Acetazolamide treatment induced a 6-fold increase in expression of surface IL12 when compared to vehicle control. The expression of IL12 by OT-002008 expressing cells was higher than IL12 levels observed with T cells transduced with CAR only construct OT-001407.

[0714] On day 0, primary human T cells were stimulated with Dynabeads (T-expander CD3/CD28) at a 3:1 bead: cell ratio in media containing 10% fetal bovine serum (FBS). The next day, lentivirus produced with constructs expressing CD19-CAR and membrane-bound flexi IL12 OT-002007, OT-002008, OT-002010, and OT-002012 were added in the presence of reduced serum (5% FBS). On day 2, the cells were diluted 1:2 with fresh 10% FBS media. Cells were expanded for a total of 10-11 days and then frozen in liquid nitrogen. Next, T cells were thawed and counted. 1-2e5 cells were plated per well of a 96-well V-bottom plate, re-stimulated with soluble CD3/CD28 Immunocult reagent (Stem Cell Technologies) and treated with a dose response of acetazolamide ranging from 0-100 μM. After incubation for 24 hours, payload expression was analyzed by flow cytometry using CD19-Fc to detect surface CAR expression. Surface IL12 expression was detected with an anti-IL12p70 antibody (BD). The Geometric MFI of surface IL12p70 expression on CAR+ cells (Table 35) was plotted and dose response curve fits performed using Prism Software. The dose response curve fit is shown in FIG. 2.

TABLE 35
Surface IL12 MFI

| Ligand | | | | |
|---|---|---|---|---|
| Concentration | | | | |
| (μM) | OT-002007 | OT-002008 | OT-002010 | OT-002012 |
| 100 | 7835 | 6432 | 9871 | 6616 |
| 33 | 5592 | 5222 | 7760 | 5061 |
| 11.1 | 4383 | 3869 | 5678 | 3822 |
| 3.7 | 4132 | 3281 | 5043 | 3070 |
| 1.2 | 3800 | 3315 | 4385 | 2894 |
| 0.41 | 3743 | 2778 | 4531 | 2778 |
| 0.14 | 3716 | 2919 | 4530 | 2734 |
| 0.046 | 3597 | 3018 | 4581 | 2934 |
| 0.015 | 3749 | 3099 | 4700 | 2814 |
| 0.001 | 3665 | 2971 | 4411 | 2858 |

[0715] As shown in Table 35, OT-002010 showed dynamic dose response to Acetazolamide with low expression at the lowest concentrations of ligand and strong induction in the presence of ligand. These data show that CA2 DDs are able to regulate membrane bound IL12 payloads.

### Example 8. Time Course Regulation of CD40L In Vitro in T Cells

[0716] CD40L constructs regulated by Carbonic anhydrase DDs were generated and cloned into lentiviral vectors. Purified T cells were thawed and cultured with aCD3 aCD28 Dynabeads (in the ratio of 3 beads to 1 T cell).

[0717] The constructs were transduced in T cells and dosed with 50 μM of Acetazolamide or vehicle control (DMSO) for 48 hours. A control of empty vector (EV) and constitutive CD40L (OT-001661) was also evaluated. Cells were fixed at 2, 4, 6, 8, 24, and 48 hours and then T cells were stained for CD40L expression and analyzed using FACS. The results are shown as median fluorescence intensity in Table 36 and as percentage CD40L positive cells in Table 37.

TABLE 36
CD40L MFI

| | | | | | | | CA2 regulated CD40L (OT- | |
|---|---|---|---|---|---|---|---|---|
| | | | Constitutive CD40L | | CA2 regulated CD40L | | 001990) 50 μM of | |
| | EV | | (OT-001661) | | (OT-001990) DMSO | | Acetazolamide | |
| Time (hours) | CD4+ | CD8+ | CD4+ | CD8+ | CD4+ | CD8+ | CD4+ | CD8+ |
| 2 | 1030 | 482 | 4042 | 2212 | 406 | 305 | 620 | 351 |
| 4 | 1371 | 457 | 4651 | 2994 | 381 | 270 | 1731 | 540 |
| 6 | 1239 | 360 | 3156 | 1773 | 302 | 224 | 2410 | 742 |
| 24 | 1533 | 321 | 9491 | 3563 | 400 | 221 | 10982 | 2376 |
| 48 | 1282 | 283 | 5639 | 2313 | 396 | 210 | 10384 | 3050 |

TABLE 37
Percentage CD40L positive cells

| | | | | | | | CA2 regulated CD40L (OT- | |
|---|---|---|---|---|---|---|---|---|
| | | | Constitutive CD4 (OT- | | CA2 regulated CD40L | | 001990) 50 μM of | |
| | EV | | 001661) | | (OT-001990) DMSO | | Acetazolamide | |
| Time (hours) | CD4+ | CD8+ | CD4+ | CD8+ | CD4+ | CD8+ | CD4+ | CD8+ |
| 2 | 52 | 28.6 | 72.8 | 56.9 | 12.1 | 4.9 | 34.7 | 10.8 |
| 4 | 67.6 | 17.8 | 77 | 63.2 | 11.6 | 5.9 | 72.2 | 28 |
| 6 | 65 | 9.6 | 67.2 | 48.5 | 6.6 | 1 | 81.2 | 42.7 |
| 24 | 77.5 | 10.7 | 93.3 | 71.2 | 10.5 | 1.1 | 96.3 | 73.7 |
| 48 | 69.3 | 6.8 | 88.5 | 71.1 | 11.2 | 2.2 | 97.4 | 79.2 |

[0718] In the presence of Acetazolamide, OT-001990 demonstrated an increase in CD40L expression compared to vehicle control and T cells expressing the empty vector without the insert. CD40L expression in response to increasing doses of Acetazolamide were measured in CD4+ and CD8+ T cells. As shown in Table 36 and Table 37, ligand dependent regulation was observed both in CD4+ T cells as well as CD8+ T cells. The absolute MFI values and the percentage CD40L positive cells were higher in the CD4+ cells. Expression reached its peak at 24 hours with highest doses expressing higher than constitutive levels.

### Example 9. Regulation of CD40L in T Cells by CA2

[0719] To test regulation, activated T cells were lentivirally transduced with CA2 regulated CD40L (OT-001990) and a control of CD40L (OT-001661). Two days later, cells were treated with vehicle or 50 mM ligand for 24h as described in Table 38 after which they were analyzed for CD40L surface expression. The results for CD4+ and CD8+ cells and total cells are shown below. In the table, “Acz” is Acetazolamide.

TABLE 38
Percent of Cells expressing CD40L

| | | CD4+ | | CD8+ | | All Cells | |
|---|---|---|---|---|---|---|---|
| | | CD40L | | CD40L | | CD40L | |
| Construct (DD) | Ligand | positive | MFI | positive | MFI | positive | MFI |
| OT-001661 (CD40L | N/A | 98.7% | 24489 | 97.8% | 14352 | 98% | 20451 |
| control) | | | | | | | |
| OT-001990 (CA2) | DMSO | 4.9% | 112 | 0.1% | 97.9 | 4% | 110 |
| OT-001990 (CA2) | 50 uM Acz | 91.1% | 3728 | 80.7% | 2184 | 88.8% | 3304 |

[0720] Regulated expression with destabilizing domains significantly enhanced CD40L expression beyond endogenous levels. CA2 destabilizing domains show levels close to constitutive expression with ligand doses that are near clinically relevant levels.

### Example 10. Titration of Ligand Dose

[0721] To evaluate CA2 regulated CAR expression in response to acetazolamide, T cells were thawed and activated overnight in the presence of CD3/CD28 Dynabeads at a 3:1 bead:cell ratio. The following day, cells were transduced with indicated constructs or empty vector. Cells were expanded by addition of fresh media over the course of 10 days, maintaining cells around 0.5×10\hat{ }6 cells/mL. On day 8 of the expansion, an aliquot of cells was seeded into 96 well plates and treated with a titration of acetazolamide, then analyzed for CAR expression after a 24 hr incubation by FACS staining with 10 ug/mL CD19-Fc.

[0722] As shown in Table 39, OT-002175, e.g., demonstrates good characteristics of low basal CAR expression, with greater than 10-fold increase in regulated expression at low (<1 uM) ligand concentration.

TABLE 39
CA2 regulated CAR expression in response to acetazolamide (ACZ)

| ACZ | OT- | OT- | OT- | OT- | OT- | OT- | OT- | OT- | OT- | OT- |
|---|---|---|---|---|---|---|---|---|---|---|
| (uM) | 001988 | 001989 | 002173 | 002174 | 002175 | 002176 | 002177 | 002178 | 002179 | 002180 |
| 0 | 13.9 | 14.6 | 23.9 | 19.8 | 3.49 | 3.27 | 10.1 | 1.56 | 15.1 | 10 |
| 0.015 | 12.6 | 17.1 | 26.3 | 19.9 | 4.6 | 4.2 | 13 | 2.18 | 17.3 | |
| 0.046 | 16.8 | 20.4 | 27.6 | 23.2 | 6.5 | 5.26 | 16.2 | 2.88 | 19.4 | |
| 0.137 | 15.9 | 28.5 | 32.7 | 20.7 | 13 | 7.78 | 20.4 | 7.05 | 22.5 | |
| 0.412 | 22.6 | 39.4 | 40 | 20.4 | 24.8 | 13.2 | 23.3 | 10.7 | 25.8 | |
| 1.235 | 39.9 | 47.5 | 44.4 | 20.3 | 33.9 | 21.5 | 25.1 | 12.3 | 27.9 | |
| 3.704 | 51.2 | 50.4 | 47.9 | 21.9 | 38.1 | 27.2 | 25.7 | 13.9 | 28.8 | |
| 11.111 | 55.1 | 52.2 | 48.8 | 22.3 | 39.6 | 29 | 26.2 | 13.9 | 28.6 | 29 |
| 33.333 | 56.2 | 51.2 | 49.1 | 26.2 | 40 | 30.4 | 26.4 | 14.3 | 28.7 | |
| 100 | 58 | 52.7 | 48.3 | 33.3 | 41.6 | 31.5 | 25.9 | 14.2 | 28.6 | |

[0723] EC50 values, shown in Table 40, were calculated in Spotfire by fitting a 4-parameter curve to the % CAR+ cells in a Singlet Live Cell gate versus the dose of ligand.

TABLE 40
CA2 regulated CAR expression in response
to acetazolamide - EC50 values

| Construct | Mutant | EC50 (uM) |
|---|---|---|
| OT-001988 | I59N G102R | 0.98 |
| OT-001989 | L156H | 0.23 |
| OT-002173 | G63D E69V N231I | 0.27 |
| OT-002174 | L197P | >10 |
| OT-002175 | L156H S172C F178Y E186D | 0.33 |
| OT-002176 | R27L T87I H122Y N252D | 0.72 |
| OT-002177 | S56N | 0.08 |
| OT-002178 | D72F V241F P249L | 0.18 |
| OT-002179 | D71L T87N L250R | 0.14 |
| OT-002180 | L183S | ND |

### Example 11. Confirming CA2 Regulated CAR Expression and Cytotoxicity in Large Batch of Cells for In Vivo Study

[0724] To confirm CA2 regulated CAR expression in large batch of cells for in vivo study, T cells were thawed and activated overnight in the presence of CD3/CD28 Dynabeads at a 3:1 bead:cell ratio. The following day, cells were transduced with lentivirus from constructs pELDS-001, OT-001407, or OT-002175. Cells were expanded by addition of fresh media over the course of 10 days, maintaining cells around 0.5×10\hat{ }6 cells/mL, then frozen. To check CAR expression, cells were thawed and cultured overnight either in T cell media, with CD3/CD28 beads (at a 1:1 bead:cell ratio), or with cytokines (10 ng/mL each of L2, IL7, IL15, and IL21) in the presence of DMSO or 10 μM Acetazolamide. The cells were analyzed for CAR expression after a 24 hr incubation by FACS staining with 1 ug/mL CD19-Fc and % CAR+ cells was determined using a Singlet|Live Cell gate.

[0725] As shown in Table 41, about 40-50% of cells were CAR positive after culturing thawed cells overnight.

TABLE 41
Percent CAR+ post-thaw cells in large batch

| | pELNS-001: | OT-001407: | OT-002175: | OT-002175: |
|---|---|---|---|---|
| | DMSO | DMSO | DMSO | ACZ 10 uM |
| No beads | 1.01 | 42.8 | 3.17 | 17.8 |
| CD3/28 beads | 1.61 | 52.2 | 31.6 | 42.8 |
| No cytokines | 0.091 | 41.1 | 0.91 | 18.3 |
| Cytokines | 0.12 | 37.2 | 4 | 39.6 |

[0726] To confirm cytotoxicity in large batch of cells for in vivo study, T cells were thawed and activated overnight in the presence of CD3/CD28 Dynabeads at a 3:1 bead:cell ratio. The following day, cells were transduced with lentivirus from constructs pELDS-001, OT-001407, or OT-002175. Cells were expanded by addition of fresh media over the course of 10 days, maintaining cells around 0.5×10\hat{ }6 cells/mL, then frozen. To confirm cytotoxicity, cells were thawed and mixed with Nalm6-NucLightRed cells at Effector:Target (E:T) cell ratios of 10:1, 3:1, 1:1, 0.3:1, 0.1:1, 0.03:1 and treated with either 10 μM acetazolamide, or vehicle (DMSO) control for 5 days. Red fluorescence images were collected and quantitated every 2 hours using the Incucyte Zoom as a measure of Nalm6 tumor cell proliferation.

[0727] Results, shown in Table 42, indicate over the course of the experiment i.e. 120 hours that vector transduced T cells did not inhibit Nalm6 proliferation, but OT-001407 (SEQ ID NO. 210963; encoded by SEQ ID NO. 210964) constitutive CAR transduced T cells inhibit proliferation when cultured at E:T ratios of 10:1, 3:1 or 1:1. T cells transduced with OT-002175 show Nalm6 cell killing in the absence of ligand at high E:T ratios of 10:1 suggesting basal activity, but increased killing in the presence of Acetazolamide.

TABLE 42
Cytotoxicity of post-thaw cells in large batch

| E:T | pELNS-001: | OT-001407: | OT-002175: | OT-002175: |
|---|---|---|---|---|
| ratio | DMSO | DMSO | DMSO | ACZ 10 uM |
| 10:1 | 692374 | 5715 | 255406 | 42811 |
| 3:1 | 1010606 | 13781 | 720078 | 580132 |
| 1:1 | 1104630 | 341838 | 834657 | 887002 |

[0728] At 72 hours, supernatants were collected from the co-culture and analyzed for IFN-g and IL-2 levels by MSD assay. Results, shown in Table 43, demonstrate that vector transduced T cells did not secrete IFN-g or IL-2, but OT-001407 constitutive CAR transduced T cells did so in a cell dose dependent manner. OT-002175 transduced T cells show regulated cytokine secretion at 10:1, and 3:1 ratios in the presence of ligand.

TABLE 43
IFN-g and IL-2 levels correspond with
the duration and level of cytotoxicity

| | pELNS-001: | OT-001407: | OT-002175: | OT-002175: |
|---|---|---|---|---|
| | DMSO | DMSO | DMSO | ACZ 10 uM |
| 10:1 IFN-g | 0 | 56251 | 473 | 9338 |
| 3:1 IFN-g | 0 | 33337 | 30 | 1096 |
| 10:1 IL-2 | 0.3 | 243 | 46 | 530 |
| 3:1 IL-2 | 0.1 | 5501 | 10 | 295 |

### Example 12. In Vivo Efficacy, Pharmacodynamics, and Pharmacokinetics of CA2 Regulated CD19 CAR

[0729] Following promising in vitro results from OT-002175, efficacy, pharmacodynamics, and pharmacokinetics of this construct was tested in vivo in a Nalm6-1uc xenograft model in eight-week old female NSG mice. The experimental design is summarized in Table 44.

TABLE 44
Experimental design of OT-002175 in vivo analysis

| | | | in vivo | Dosing | Cell |
|---|---|---|---|---|---|
| Group | N | Construct | Treatment | Schedule | Dose |
| 1A, 1B | 8 | pELDS-001-013 | Vehicle | QD | 5M |
| 2A, 2B | 8 | OT-001407 | Vehicle | QD | 5M |
| 3A, 3B | 8 | OT-001407 | Acetazolamide | QD 200 mg/kg | 5M |
| 4A, 4B | 8 | OT-002175 | Vehicle | QD | 5M |
| 5A, 5B | 8 | OT-002175 | Acetazolamide | QD 200 mg/kg | 5M |
| 6A, 6B | 8 | OT-002175 | Acetazolamide | QD 100 mg/kg | 5M |
| 7A, 7B | 8 | OT-002175 | Acetazolamide | QD 30 mg/kg | 5M |
| 1C | 4 | pELNS-001 | Vehicle | QD | 5M |
| 2C | 4 | OT-001407 | Vehicle | QD | 5M |
| 4C | 4 | OT-002175 | Vehicle | QD | 5M |
| 5C | 4 | OT-002175 | Acetazolamide | QD 200 mg/kg | 5M |

[0730] Single and repeated oral doses of acetazolamide at 200 mg/kg were administered in vehicle (10% DMSO; 20% Kolliphor RH40; 30% PEG 400; 40% (12%) Captisol in water). Plasma concentration of acetazolamide was measured for up to 24 hr post single dose, and after repeated daily doses for up to 100 hr (data not shown). Body weights were measured for up to 12 days post daily repeated doses on days 0-4 and 8-11 (data not shown). The multidose paradigms showed that repeated doses of acetazolamide do not elevate daily 1 hr Cmax values, and that body weight changes from dosing begin to level off by the end of the first week of daily doses, suggesting that animals receiving multi-doses of acetazolamide would be able to tolerate long-term repeated dosing.

[0731] Dose responsiveness of OT-002175 was tested by measuring total flux in mice receiving repeated ligand dosing for up to 32 days post tumor implant (data not shown). Concentrations of 30 mg/kg, 100 mg/kg, and 200 mg/kg of acetazolamide showed respectively increasing anti-tumor activity with comparable effects on body weight.

[0732] These results demonstrate that initial impacts of dosing acetazolamide on body weights is overcome beginning in the second week of dosing, suggesting good long-term tolerability of the ligand and maintenance of high CAR expression. Dose-dependent anti-tumor efficacy was achieved with OT-002175.

[0733] CA2 regulated CAR expression in whole blood post CAR-T cell infusion was monitored. Number of human T cells in 50 ul of blood was counted at 7 days post infusion and found to be lower than cell expansion observed in constitutively expressed CD19 CAR expressing controls, but still regulated by acetazolamide treatment (data not shown). CD19 OT-002175 CAR-T cells were harvested and assessed for CD69 and CD25 expression, and were found to skew towards an activated CD8+ phenotype (data not shown).

[0734] These results demonstrate that CA2 regulated CARs exhibited anti-tumor activity consistent with efficacy experiments, and acetazolamide treatment enabled CAR mediated T cell expansion and regulated CAR expression in blood with acetazolamide being dosed at clinically achievable levels, and with CD19 CARs skewing toward CD8+ phenotype.

[0735] Terminal collection was performed to assess CD19 antigen status of Nalm6 in bone marrow and metastases to determine if antigen escape might explain the reduced regulated efficacy of CD19 OT-002175 CAR-T cells compared to constitutive CAR controls. CD19 expression was observed in tumor and bone marrow samples, and no evidence of antigen escape was observed (data not shown).

### Example 13. Characterizing Individual Mutations and Combinations of Mutations Identified in Screens and Structure-Guided Mutations

[0736] CA2 DDs were designed with individual or pairwise point mutations derived from mutants identified in screens. Additionally, CA2 DDs with rationally designed novel mutations were also designed. The CA2 DDs thus generated were linked to AcGFP and cloned into lentiviral vectors. Jurkat cells were transduced with lentivirus, treated with acetazolamide for 24 hours and GFP expression was analyzed by FACS.

[0737] Tables 45-51 show characterization of various CA2 DD mutants.

TABLE 45
Characterization of CA2 DDs

| Construct | DRD | Basal | Max | [ACZ], μM | fold-change | EC50, μM |
|---|---|---|---|---|---|---|
| OT-CA2-058 | CA2(G63D, M240L) | 171 | 1346 | 30 | 7.9 | 0.54 |
| OT-CA2-059 | CA2(A77I, P249F) | 124 | 1208 | 30 | 9.8 | 1.1 |
| OT-CA2-060 | CA2(D71K, T192F) | 234 | 1352 | 30 | 5.8 | 0.14 |

TABLE 46
Characterization of CA2 DDs

| Construct | DRD | Basal | Max | [ACZ], μM | fold-change | EC50, μM |
|---|---|---|---|---|---|---|
| OT-CA2-085 | CA2(Y51T) | 19078 | 54252 | 30 | 2.8 | 0.15 |
| OT-CA2-086 | CA2(S73N, R89F) | 16867 | 48989 | 30 | 2.9 | 0.07 |
| OT-CA2-087 | CA2(D72F, P249F) | 11516 | 60576 | 30 | 5.3 | 0.11 |
| OT-CA2-088 | CA2(T55K, G63N, Q248N) | 7266 | 82304 | 30 | 11.3 | 0.73 |
| OT-CA2-089 | CA2(Y193I) | 9777 | 58225 | 30 | 6 | 0.25 |
| OT-CA2-090 | CA2(S56F) | 8070 | 87425 | 30 | 10.8 | 0.77 |
| OT-CA2-091 | CA2(S56F, D71S) | 3395 | 67527 | 30 | 19.9 | 1.6 |
| OT-CA2-092 | CA2(S73N, R89Y) | 23056 | 75755 | 30 | 3.3 | 0.07 |
| OT-CA2-093 | CA2(V134F, L228F) | 26215 | 50435 | 30 | 1.9 | 0.02 |

TABLE 47
Characterization of CA2 DDs

| | | | | [ACZ], | fold- |
|---|---|---|---|---|---|
| Construct | DRD | Basal | Max | μM | change |
| OT-CA2-096 | CA2(L156H, 4AA del | 30.85 | 217.6 | 30 | 7.1 |
| | C-term) | | | | |
| OT-CA2-097 | CA2(L156H, 4AA del | 40.5 | 131.6 | 30 | 3.2 |
| | N-term) | | | | |
| OT-CA2-098 | CA2(W4Y, L156H) | 39 | 533.1 | 30 | 13.7 |
| OT-CA2-099 | CA2(L156H, GEP del | 27.7 | 356.6 | 30 | 12.9 |
| | loop P2) | | | | |
| OT-CA2-101 | CA2(L156H, F225L) | 67.1 | 960.6 | 30 | 14.3 |
| OT-CA2-102 | CA2 (D70N, D74N, | 38.05 | 180.6 | 30 | 4.7 |
| | D100N, L156H) | | | | |

TABLE 48
Characterization of CA2 DDs

| | | | | [ACZ], | fold- |
|---|---|---|---|---|---|
| Construct | DRD | Basal | Max | μM | change |
| OT-CA2-073 | CA2(R27L, H122Y) | 173.5 | 725 | 30 | 4.2 |
| OT-CA2-075 | CA2(T87I, H122Y) | 493.5 | 1277.5 | 30 | 2.6 |
| OT-CA2-077 | CA2(H122Y, | 318.5 | 1091.5 | 30 | 3.4 |
| | N252D) | | | | |
| OT-CA2-078 | CA2(D72F, V241F) | 395 | 1569.5 | 30 | 4 |
| OT-CA2-079 | CA2(V241F, | 1376 | 2262.5 | 30 | 1.6 |
| | P249L) | | | | |
| OT-CA2-080 | CA2(D72F, P249L) | 578 | 1563.5 | 30 | 2.7 |
| OT-CA2-081 | CA2(D71L, T87N) | 1567.5 | 2372.5 | 30 | 1.5 |
| OT-CA2-082 | CA2(D71L, L250R) | 454 | 1674 | 30 | 3.7 |

TABLE 49
Characterization of CA2 DDs

| | | | | [ACZ], | fold- |
|---|---|---|---|---|---|
| Construct | DRD | Basal | Max | μM | change |
| OT-CA2-006 | CA2(E106D) | 98943 | 268996 | 50 | 2.8 |

TABLE 50
Characterization of CA2 DDs

| | | | | [ACZ], | fold- |
|---|---|---|---|---|---|
| Construct | DRD | Basal | Max | μM | change |
| OT-CA2-038 | CA2(I59N) | 76.6 | 1156.6 | 30 | 15.1 |
| OT-CA2-039 | CA2(G63D) | 644.1 | 2086.6 | 30 | 3.2 |
| OT-CA2-046 | CA2(H122Y) | 237.8 | 220.8 | 30 | 0.9 |

TABLE 51
Characterization of CA2 DDs

| | | | | [ACZ], | fold- |
|---|---|---|---|---|---|
| Construct | DRD | Basal | Max | μM | change |
| OT-CA2-031 | CA2(L197P) | 660 | 1753 | 30 | 2.7 |
| OT-CA2-032 | CA2(L156H, S172C, | 483 | 12826 | 30 | 26.6 |
| | F178Y, E186D) | | | | |
| OT-CA2-033 | CA2(L156H) | 683 | 17726 | 30 | 26 |
| OT-CA2-034 | CA2(R27L, T87I, | 306 | 10826 | 30 | 35.4 |
| | H122Y, N252D) | | | | |

[0738] Table 52 and FIG. 3 shows dose response results for OT-002347 and OT-001978.

TABLE 52
Dose response of CA2 DDs

| [ACZ], μM | OT-002347 | OT-001978 |
|---|---|---|
| 30 | 87667.5 | 28337.5 |
| 10 | 81749 | 25959.83 |
| 3.3 | 75551.67 | 24250.17 |
| 1.1 | 65318.33 | 20978.83 |
| 0.36 | 48149.33 | 15438.67 |
| 0.12 | 29860.33 | 9858.5 |
| 0.04 | 21283.67 | 6473.5 |
| 0.0133 | 18682.67 | 5499.333 |
| 0.004433 | 16782.17 | 5327.167 |
| 0 | 16539.67 | 5077.667 |
| EC50, μM | 0.4796 | 0.4589 |

[0739] While the present disclosure has been described at some length and with some particularity with respect to the several described embodiments, it is not intended that it should be limited to any such particulars or embodiments or any particular embodiment, but it is to be construed with references to the appended claims so as to provide the broadest possible interpretation of such claims in view of the prior art and, therefore, to effectively encompass the intended scope of the disclosure.

[0740] All publications, patent applications, patents, and other references mentioned herein are incorporated by reference in their entirety. In case of conflict, the present specification, including definitions, will control. In addition, section headings, the materials, methods, and examples are illustrative only and not intended to be limiting.

The application's sequence listing, which the Patent Office published only in electronic form, follows.

SEQUENCE LISTING (211141 sequences)

SEQ ID NO: 1 - protein, 165 aa, Homo sapiens
  Payload ID: 1;
  Gene Symbol: SEP15;
  Gene Name: 15 kDa selenoprt;
  ENSP ID: ENSP00000328729
  MOD_RES (96)..(96): Selenocysteine
MVAMAAGPSGCLVPAFGLRLLLATVLQAVSAFGAEFSSEACRELGFSSNLLCSSCDLLGQFNLLQLDPDCRGCCQEEAQFETKKLYAGAILEVCGXKLGRFPQVQAFVRSDKPKLFRGLQIKYVRGSDPVLKLLDDNGNIAEELSILKWNTDSVEEFLSEKLERI

SEQ ID NO: 2 - protein, 124 aa, Homo sapiens
  Payload ID: 1;
  Gene Symbol: SEP15;
  Gene Name: 15 kDa selenoprt;
  ENSP ID: ENSP00000359585
  MOD_RES (96)..(96): Selenocysteine
MVAMAAGPSGCLVPAFGLRLLLATVLQAVSAFGAEFSSEACRELGFSSNLLCSSCDLLGQFNLLQLDPDCRGCCQEEAQFETKKLYAGAILEVCGXKLGRFPQVQVCPWFRPCIKAFGRQWEHC

SEQ ID NO: 3 - protein, 144 aa, Homo sapiens
  Payload ID: 1;
  Gene Symbol: SEP15;
  Gene Name: 15 kDa selenoprt;
  ENSP ID: ENSP00000383810
MVAMAAGPSGCLVPAFGLRLLLATVLQAVSAFGAEFSSEACRELGFSSNLLCSSCDLLGQFNLLQLDPDCRGCCQEEAQFETKKYSSIVSKQECHHSNCMQELFLKFVDENWEGSLKSKLLLGVINPNCSEDCKSSMSVVQTLY

SEQ ID NO: 4 - protein, 123 aa, Homo sapiens
  Payload ID: 1;
  Gene Symbol: SEP15;
  Gene Name: 15 kDa selenoprt;
  ENSP ID: ENSP00000481113
MVAMAAGPSGCLVPAFGLRLLLATVLQAVSAFGAEFSSEACRELGFSSNLLCSSCDLLGQFNLLQLDPDCRGCCQEEAQFETKKLYAGAILEVCGKLGRFPQVQVCPWFRPCIKAFGRQWEHC

SEQ ID NO: 5 - protein, 164 aa, Homo sapiens
  Payload ID: 1;
  Gene Symbol: SEP15;
  Gene Name: 15 kDa selenoprt;
  ENSP ID: ENSP00000484190
MVAMAAGPSGCLVPAFGLRLLLATVLQAVSAFGAEFSSEACRELGFSSNLLCSSCDLLGQFNLLQLDPDCRGCCQEEAQFETKKLYAGAILEVCGKLGRFPQVQAFVRSDKPKLFRGLQIKYVRGSDPVLKLLDDNGNIAEELSILKWNTDSVEEFLSEKLERI

SEQ ID NO: 6 - protein, 88 aa, Homo sapiens
  Payload ID: 1;
  Gene Symbol: SEP15;
  Gene Name: 15 kDa selenoprt;
  ENSP ID: ENSP00000488294
FNLLQLDPDCRGCCQEEAQFETKKYSSIVSKQECHHSNCMQELFLKFVDENWEGSLKSKYVRGSDPVLKLLDDNGNIAEELSILKWNT

SEQ ID NO: 7 - protein, 31 aa, Homo sapiens
  Payload ID: 1;
  Gene Symbol: SEP15;
  Gene Name: 15 kDa selenoprt;
  ENSP ID: ENSP00000488471
  MOD_RES (1)..(1): Any amino acid
XGLRLLLATVLQAVSVDHLRSCHRESRSDCS

SEQ ID NO: 8 - protein, 283 aa, Homo sapiens
  Payload ID: 2;
  Gene Symbol: AGPAT1;
  Gene Name: 1-acylglycerol-3-phosphate O-acyltransferase 1;
  Uniprot ID:  Q99943;
  ENSP ID: ENSP00000337463
MDLWPGAWMLLLLLFLLLLFLLPTLWFCSPSAKYFFKMAFYNGWILFLAVLAIPVCAVRGRNVENMKILRLMLLHIKYLYGIRVEVRGAHHFPPSQPYVVVSNHQSSLDLLGMMEVLPGRCVPIAKRELLWAGSAGLACWLAGVIFIDRKRTGDAISVMSEVAQTLLTQDVRVWVFPEGTRNHNGSMLPFKRGAFHLAVQAQVPIVPIVMSSYQDFYCKKERRFTSGQCQVRVLPPVPTEGLTPDDVPALADRVRHSMLTVFREISTDGRGGGDYLKKPGGGG

SEQ ID NO: 9 - protein, 283 aa, Homo sapiens; identical to SEQ ID NO: 8
  Payload ID: 2;
  Gene Symbol: AGPAT1;
  Gene Name: 1-acylglycerol-3-phosphate O-acyltransferase 1;
  Uniprot ID:  Q99943;
  ENSP ID: ENSP00000364245

SEQ ID NO: 10 - protein, 283 aa, Homo sapiens; identical to SEQ ID NO: 8
  Payload ID: 2;
  Gene Symbol: AGPAT1;
  Gene Name: 1-acylglycerol-3-phosphate O-acyltransferase 1;
  Uniprot ID:  Q99943;
  ENSP ID: ENSP00000364248

SEQ ID NO: 11 - protein, 283 aa, Homo sapiens; identical to SEQ ID NO: 8
  Payload ID: 2;
  Gene Symbol: AGPAT1;
  Gene Name: 1-acylglycerol-3-phosphate O-acyltransferase 1;
  Uniprot ID:  Q99943;
  ENSP ID: ENSP00000372782

SEQ ID NO: 12 - protein, 283 aa, Homo sapiens; identical to SEQ ID NO: 8
  Payload ID: 2;
  Gene Symbol: AGPAT1;
  Gene Name: 1-acylglycerol-3-phosphate O-acyltransferase 1;
  Uniprot ID:  Q99943;
  ENSP ID: ENSP00000378874

SEQ ID NO: 13 - protein, 283 aa, Homo sapiens; identical to SEQ ID NO: 8
  Payload ID: 2;
  Gene Symbol: AGPAT1;
  Gene Name: 1-acylglycerol-3-phosphate O-acyltransferase 1;
  Uniprot ID:  Q99943;
  ENSP ID: ENSP00000378875

SEQ ID NO: 14 - protein, 283 aa, Homo sapiens; identical to SEQ ID NO: 8
  Payload ID: 2;
  Gene Symbol: AGPAT1;
  Gene Name: 1-acylglycerol-3-phosphate O-acyltransferase 1;
  Uniprot ID:  Q99943;
  ENSP ID: ENSP00000378877

SEQ ID NO: 15 - protein, 283 aa, Homo sapiens; identical to SEQ ID NO: 8
  Payload ID: 2;
  Gene Symbol: AGPAT1;
  Gene Name: 1-acylglycerol-3-phosphate O-acyltransferase 1;
  Uniprot ID:  Q99943;
  ENSP ID: ENSP00000382721

SEQ ID NO: 16 - protein, 283 aa, Homo sapiens; identical to SEQ ID NO: 8
  Payload ID: 2;
  Gene Symbol: AGPAT1;
  Gene Name: 1-acylglycerol-3-phosphate O-acyltransferase 1;
  Uniprot ID:  Q99943;
  ENSP ID: ENSP00000382723

SEQ ID NO: 17 - protein, 283 aa, Homo sapiens; identical to SEQ ID NO: 8
  Payload ID: 2;
  Gene Symbol: AGPAT1;
  Gene Name: 1-acylglycerol-3-phosphate O-acyltransferase 1;
  Uniprot ID:  Q99943;
  ENSP ID: ENSP00000382725

SEQ ID NO: 18 - protein, 283 aa, Homo sapiens; identical to SEQ ID NO: 8
  Payload ID: 2;
  Gene Symbol: AGPAT1;
  Gene Name: 1-acylglycerol-3-phosphate O-acyltransferase 1;
  Uniprot ID:  Q99943;
  ENSP ID: ENSP00000382726

SEQ ID NO: 19 - protein, 283 aa, Homo sapiens; identical to SEQ ID NO: 8
  Payload ID: 2;
  Gene Symbol: AGPAT1;
  Gene Name: 1-acylglycerol-3-phosphate O-acyltransferase 1;
  Uniprot ID:  Q99943;
  ENSP ID: ENSP00000382728

SEQ ID NO: 20 - protein, 283 aa, Homo sapiens; identical to SEQ ID NO: 8
  Payload ID: 2;
  Gene Symbol: AGPAT1;
  Gene Name: 1-acylglycerol-3-phosphate O-acyltransferase 1;
  Uniprot ID:  Q99943;
  ENSP ID: ENSP00000387738

SEQ ID NO: 21 - protein, 283 aa, Homo sapiens; identical to SEQ ID NO: 8
  Payload ID: 2;
  Gene Symbol: AGPAT1;
  Gene Name: 1-acylglycerol-3-phosphate O-acyltransferase 1;
  Uniprot ID:  Q99943;
  ENSP ID: ENSP00000387810

SEQ ID NO: 22 - protein, 283 aa, Homo sapiens; identical to SEQ ID NO: 8
  Payload ID: 2;
  Gene Symbol: AGPAT1;
  Gene Name: 1-acylglycerol-3-phosphate O-acyltransferase 1;
  Uniprot ID:  Q99943;
  ENSP ID: ENSP00000388090

SEQ ID NO: 23 - protein, 283 aa, Homo sapiens; identical to SEQ ID NO: 8
  Payload ID: 2;
  Gene Symbol: AGPAT1;
  Gene Name: 1-acylglycerol-3-phosphate O-acyltransferase 1;
  Uniprot ID:  Q99943;
  ENSP ID: ENSP00000388253

SEQ ID NO: 24 - protein, 283 aa, Homo sapiens; identical to SEQ ID NO: 8
  Payload ID: 2;
  Gene Symbol: AGPAT1;
  Gene Name: 1-acylglycerol-3-phosphate O-acyltransferase 1;
  Uniprot ID:  Q99943;
  ENSP ID: ENSP00000388815

SEQ ID NO: 25 - protein, 283 aa, Homo sapiens; identical to SEQ ID NO: 8
  Payload ID: 2;
  Gene Symbol: AGPAT1;
  Gene Name: 1-acylglycerol-3-phosphate O-acyltransferase 1;
  Uniprot ID:  Q99943;
  ENSP ID: ENSP00000388870

SEQ ID NO: 26 - protein, 283 aa, Homo sapiens; identical to SEQ ID NO: 8
  Payload ID: 2;
  Gene Symbol: AGPAT1;
  Gene Name: 1-acylglycerol-3-phosphate O-acyltransferase 1;
  Uniprot ID:  Q99943;
  ENSP ID: ENSP00000389516

SEQ ID NO: 27 - protein, 283 aa, Homo sapiens; identical to SEQ ID NO: 8
  Payload ID: 2;
  Gene Symbol: AGPAT1;
  Gene Name: 1-acylglycerol-3-phosphate O-acyltransferase 1;
  Uniprot ID:  Q99943;
  ENSP ID: ENSP00000390988

SEQ ID NO: 28 - protein, 283 aa, Homo sapiens; identical to SEQ ID NO: 8
  Payload ID: 2;
  Gene Symbol: AGPAT1;
  Gene Name: 1-acylglycerol-3-phosphate O-acyltransferase 1;
  Uniprot ID:  Q99943;
  ENSP ID: ENSP00000392083

SEQ ID NO: 29 - protein, 283 aa, Homo sapiens; identical to SEQ ID NO: 8
  Payload ID: 2;
  Gene Symbol: AGPAT1;
  Gene Name: 1-acylglycerol-3-phosphate O-acyltransferase 1;
  Uniprot ID:  Q99943;
  ENSP ID: ENSP00000392820

SEQ ID NO: 30 - protein, 283 aa, Homo sapiens; identical to SEQ ID NO: 8
  Payload ID: 2;
  Gene Symbol: AGPAT1;
  Gene Name: 1-acylglycerol-3-phosphate O-acyltransferase 1;
  Uniprot ID:  Q99943;
  ENSP ID: ENSP00000394919

SEQ ID NO: 31 - protein, 283 aa, Homo sapiens; identical to SEQ ID NO: 8
  Payload ID: 2;
  Gene Symbol: AGPAT1;
  Gene Name: 1-acylglycerol-3-phosphate O-acyltransferase 1;
  Uniprot ID:  Q99943;
  ENSP ID: ENSP00000395613

SEQ ID NO: 32 - protein, 283 aa, Homo sapiens; identical to SEQ ID NO: 8
  Payload ID: 2;
  Gene Symbol: AGPAT1;
  Gene Name: 1-acylglycerol-3-phosphate O-acyltransferase 1;
  Uniprot ID:  Q99943;
  ENSP ID: ENSP00000395863

SEQ ID NO: 33 - protein, 283 aa, Homo sapiens; identical to SEQ ID NO: 8
  Payload ID: 2;
  Gene Symbol: AGPAT1;
  Gene Name: 1-acylglycerol-3-phosphate O-acyltransferase 1;
  Uniprot ID:  Q99943;
  ENSP ID: ENSP00000397765

SEQ ID NO: 34 - protein, 283 aa, Homo sapiens; identical to SEQ ID NO: 8
  Payload ID: 2;
  Gene Symbol: AGPAT1;
  Gene Name: 1-acylglycerol-3-phosphate O-acyltransferase 1;
  Uniprot ID:  Q99943;
  ENSP ID: ENSP00000398016

SEQ ID NO: 35 - protein, 283 aa, Homo sapiens; identical to SEQ ID NO: 8
  Payload ID: 2;
  Gene Symbol: AGPAT1;
  Gene Name: 1-acylglycerol-3-phosphate O-acyltransferase 1;
  Uniprot ID:  Q99943;
  ENSP ID: ENSP00000401287

SEQ ID NO: 36 - protein, 283 aa, Homo sapiens; identical to SEQ ID NO: 8
  Payload ID: 2;
  Gene Symbol: AGPAT1;
  Gene Name: 1-acylglycerol-3-phosphate O-acyltransferase 1;
  Uniprot ID:  Q99943;
  ENSP ID: ENSP00000401410

SEQ ID NO: 37 - protein, 283 aa, Homo sapiens; identical to SEQ ID NO: 8
  Payload ID: 2;
  Gene Symbol: AGPAT1;
  Gene Name: 1-acylglycerol-3-phosphate O-acyltransferase 1;
  Uniprot ID:  Q99943;
  ENSP ID: ENSP00000404106

SEQ ID NO: 38 - protein, 283 aa, Homo sapiens; identical to SEQ ID NO: 8
  Payload ID: 2;
  Gene Symbol: AGPAT1;
  Gene Name: 1-acylglycerol-3-phosphate O-acyltransferase 1;
  Uniprot ID:  Q99943;
  ENSP ID: ENSP00000405565

SEQ ID NO: 39 - protein, 283 aa, Homo sapiens; identical to SEQ ID NO: 8
  Payload ID: 2;
  Gene Symbol: AGPAT1;
  Gene Name: 1-acylglycerol-3-phosphate O-acyltransferase 1;
  Uniprot ID:  Q99943;
  ENSP ID: ENSP00000405864

SEQ ID NO: 40 - protein, 283 aa, Homo sapiens; identical to SEQ ID NO: 8
  Payload ID: 2;
  Gene Symbol: AGPAT1;
  Gene Name: 1-acylglycerol-3-phosphate O-acyltransferase 1;
  Uniprot ID:  Q99943;
  ENSP ID: ENSP00000406582

SEQ ID NO: 41 - protein, 283 aa, Homo sapiens; identical to SEQ ID NO: 8
  Payload ID: 2;
  Gene Symbol: AGPAT1;
  Gene Name: 1-acylglycerol-3-phosphate O-acyltransferase 1;
  Uniprot ID:  Q99943;
  ENSP ID: ENSP00000406614

SEQ ID NO: 42 - protein, 283 aa, Homo sapiens; identical to SEQ ID NO: 8
  Payload ID: 2;
  Gene Symbol: AGPAT1;
  Gene Name: 1-acylglycerol-3-phosphate O-acyltransferase 1;
  Uniprot ID:  Q99943;
  ENSP ID: ENSP00000406615

SEQ ID NO: 43 - protein, 283 aa, Homo sapiens; identical to SEQ ID NO: 8
  Payload ID: 2;
  Gene Symbol: AGPAT1;
  Gene Name: 1-acylglycerol-3-phosphate O-acyltransferase 1;
  Uniprot ID:  Q99943;
  ENSP ID: ENSP00000407189

SEQ ID NO: 44 - protein, 283 aa, Homo sapiens; identical to SEQ ID NO: 8
  Payload ID: 2;
  Gene Symbol: AGPAT1;
  Gene Name: 1-acylglycerol-3-phosphate O-acyltransferase 1;
  Uniprot ID:  Q99943;
  ENSP ID: ENSP00000408032

SEQ ID NO: 45 - protein, 283 aa, Homo sapiens; identical to SEQ ID NO: 8
  Payload ID: 2;
  Gene Symbol: AGPAT1;
  Gene Name: 1-acylglycerol-3-phosphate O-acyltransferase 1;
  Uniprot ID:  Q99943;
  ENSP ID: ENSP00000408842

SEQ ID NO: 46 - protein, 283 aa, Homo sapiens; identical to SEQ ID NO: 8
  Payload ID: 2;
  Gene Symbol: AGPAT1;
  Gene Name: 1-acylglycerol-3-phosphate O-acyltransferase 1;
  Uniprot ID:  Q99943;
  ENSP ID: ENSP00000410831

SEQ ID NO: 47 - protein, 283 aa, Homo sapiens; identical to SEQ ID NO: 8
  Payload ID: 2;
  Gene Symbol: AGPAT1;
  Gene Name: 1-acylglycerol-3-phosphate O-acyltransferase 1;
  Uniprot ID:  Q99943;
  ENSP ID: ENSP00000412304

SEQ ID NO: 48 - protein, 283 aa, Homo sapiens; identical to SEQ ID NO: 8
  Payload ID: 2;
  Gene Symbol: AGPAT1;
  Gene Name: 1-acylglycerol-3-phosphate O-acyltransferase 1;
  Uniprot ID:  Q99943;
  ENSP ID: ENSP00000412805

SEQ ID NO: 49 - protein, 283 aa, Homo sapiens; identical to SEQ ID NO: 8
  Payload ID: 2;
  Gene Symbol: AGPAT1;
  Gene Name: 1-acylglycerol-3-phosphate O-acyltransferase 1;
  Uniprot ID:  Q99943;
  ENSP ID: ENSP00000415015

SEQ ID NO: 50 - protein, 246 aa, Homo sapiens
  Payload ID: 3;
  Gene Symbol: AGPAT2;
  Gene Name: 1-acylglycerol-3-phosphate O-acyltransferase 2;
  Uniprot ID:  O15120;
  ENSP ID: ENSP00000360759
MELWPCLAAALLLLLLLVQLSRAAEFYAKVALYCALCFTVSAVASLVCLLRHGGRTVENMSIIGWFVRSFKYFYGLRFEVRDPRRLQEARPCVIVSNHQSILDMMGLMEVLPERCVQIAKRELLFLGPVGLIMYLGGVFFINRQRSSTAMTVMADLGERMVRENVPIVPVVYSSFSSFYNTKKKFFTSGTVTVQVLEAIPTSGLTAADVPALVDTCHRAMRTTFLHISKTPQENGATAGSGVQPAQ

SEQ ID NO: 51 - protein, 278 aa, Homo sapiens
  Payload ID: 3;
  Gene Symbol: AGPAT2;
  Gene Name: 1-acylglycerol-3-phosphate O-acyltransferase 2;
  Uniprot ID:  O15120;
  ENSP ID: ENSP00000360761
MELWPCLAAALLLLLLLVQLSRAAEFYAKVALYCALCFTVSAVASLVCLLRHGGRTVENMSIIGWFVRSFKYFYGLRFEVRDPRRLQEARPCVIVSNHQSILDMMGLMEVLPERCVQIAKRELLFLGPVGLIMYLGGVFFINRQRSSTAMTVMADLGERMVRENLKVWIYPEGTRNDNGDLLPFKKGAFYLAVQAQVPIVPVVYSSFSSFYNTKKKFFTSGTVTVQVLEAIPTSGLTAADVPALVDTCHRAMRTTFLHISKTPQENGATAGSGVQPAQ

SEQ ID NO: 52 - protein, 278 aa, Homo sapiens; identical to SEQ ID NO: 51
  Payload ID: 3;
  Gene Symbol: AGPAT2;
  Gene Name: 1-acylglycerol-3-phosphate O-acyltransferase 2;
  Uniprot ID:  O15120;
  ENSP ID: ENSP00000438919

SEQ ID NO: 53 - protein, 376 aa, Homo sapiens
  Payload ID: 4;
  Gene Symbol: AGPAT3;
  Gene Name: 1-acylglycerol-3-phosphate O-acyltransferase 3;
  Uniprot ID:  Q9NRZ7;
  ENSP ID: ENSP00000291572
MGLLAFLKTQFVLHLLVGFVFVVSGLVINFVQLCTLALWPVSKQLYRRLNCRLAYSLWSQLVMLLEWWSCTECTLFTDQATVERFGKEHAVIILNHNFEIDFLCGWTMCERFGVLGSSKVLAKKELLYVPLIGWTWYFLEIVFCKRKWEEDRDTVVEGLRRLSDYPEYMWFLLYCEGTRFTETKHRVSMEVAAAKGLPVLKYHLLPRTKGFTTAVKCLRGTVAAVYDVTLNFRGNKNPSLLGILYGKKYEADMCVRRFPLEDIPLDEKEAAQWLHKLYQEKDALQEIYNQKGMFPGEQFKPARRPWTLLNFLSWATILLSPLFSFVLGVFASGSPLLILTFLGFVGAASFGVRRLIGVTEIEKGSSYGNQEFKKKE

SEQ ID NO: 54 - protein, 376 aa, Homo sapiens; identical to SEQ ID NO: 53
  Payload ID: 4;
  Gene Symbol: AGPAT3;
  Gene Name: 1-acylglycerol-3-phosphate O-acyltransferase 3;
  Uniprot ID:  Q9NRZ7;
  ENSP ID: ENSP00000332989

SEQ ID NO: 55 - protein, 376 aa, Homo sapiens; identical to SEQ ID NO: 53
  Payload ID: 4;
  Gene Symbol: AGPAT3;
  Gene Name: 1-acylglycerol-3-phosphate O-acyltransferase 3;
  Uniprot ID:  Q9NRZ7;
  ENSP ID: ENSP00000381135

SEQ ID NO: 56 - protein, 376 aa, Homo sapiens; identical to SEQ ID NO: 53
  Payload ID: 4;
  Gene Symbol: AGPAT3;
  Gene Name: 1-acylglycerol-3-phosphate O-acyltransferase 3;
  Uniprot ID:  Q9NRZ7;
  ENSP ID: ENSP00000381138

SEQ ID NO: 57 - protein, 376 aa, Homo sapiens; identical to SEQ ID NO: 53
  Payload ID: 4;
  Gene Symbol: AGPAT3;
  Gene Name: 1-acylglycerol-3-phosphate O-acyltransferase 3;
  Uniprot ID:  Q9NRZ7;
  ENSP ID: ENSP00000381140

SEQ ID NO: 58 - protein, 79 aa, Homo sapiens
  Payload ID: 4;
  Gene Symbol: AGPAT3;
  Gene Name: 1-acylglycerol-3-phosphate O-acyltransferase 3;
  ENSP ID: ENSP00000389318
MGLLAFLKTQFVLHLLVGFVFVVSGLVINFVQLCTLALWPVSKQLYRRLNCRLAYSLWSQLVMLLEWWSCTECTLFTDQ

SEQ ID NO: 59 - protein, 38 aa, Homo sapiens
  Payload ID: 4;
  Gene Symbol: AGPAT3;
  Gene Name: 1-acylglycerol-3-phosphate O-acyltransferase 3;
  ENSP ID: ENSP00000394102
MGLLAFLKTQFVLHLLVGFVFVVSGLVINFVQLCTLAL

SEQ ID NO: 60 - protein, 128 aa, Homo sapiens
  Payload ID: 4;
  Gene Symbol: AGPAT3;
  Gene Name: 1-acylglycerol-3-phosphate O-acyltransferase 3;
  ENSP ID: ENSP00000412079
MGLLAFLKTQFVLHLLVGFVFVVSGLVINFVQLCTLALWPVSKQLYRRLNCRLAYSLWSQLVMLLEWWSCTECTLFTDQATVERFGKEHAVIILNHNFEIDFLCGWTMCERFGVLGSSKVLAKKELLY

SEQ ID NO: 61 - protein, 255 aa, Homo sapiens
  Payload ID: 4;
  Gene Symbol: AGPAT3;
  Gene Name: 1-acylglycerol-3-phosphate O-acyltransferase 3;
  ENSP ID: ENSP00000413906
MGLLAFLKTQFVLHLLVGFVFVVSGLVINFVQLCTLALWPVSKQLYRRLNCRLAYSLWSQLVMLLEWWSCTECTLFTDQATVERFGKEHAVIILNHNFEIDFLCGWTMCERFGVLGSSKVLAKKELLYVPLIGWTWYFLEIVFCKRKWEEDRDTVVEGLRRLSDYPEYMWFLLYCEGTRFTETKHRVSMEVAAAKGLPVLKYHLLPRTKGFTTAVKCLRGTVAAVYDVTLNFRGNKNPSLLGILYGKKYEADMCV

SEQ ID NO: 62 - protein, 255 aa, Homo sapiens; identical to SEQ ID NO: 61
  Payload ID: 4;
  Gene Symbol: AGPAT3;
  Gene Name: 1-acylglycerol-3-phosphate O-acyltransferase 3;
  ENSP ID: ENSP00000414440

SEQ ID NO: 63 - protein, 376 aa, Homo sapiens; identical to SEQ ID NO: 53
  Payload ID: 4;
  Gene Symbol: AGPAT3;
  Gene Name: 1-acylglycerol-3-phosphate O-acyltransferase 3;
  Uniprot ID:  Q9NRZ7;
  ENSP ID: ENSP00000443510

SEQ ID NO: 64 - protein, 378 aa, Homo sapiens
  Payload ID: 5;
  Gene Symbol: AGPAT4;
  Gene Name: 1-acylglycerol-3-phosphate O-acyltransferase 4;
  Uniprot ID:  Q9NRZ5;
  ENSP ID: ENSP00000314036
MDLAGLLKSQFLCHLVFCYVFIASGLIINTIQLFTLLLWPINKQLFRKINCRLSYCISSQLVMLLEWWSGTECTIFTDPRAYLKYGKENAIVVLNHKFEIDFLCGWSLSERFGLLGGSKVLAKKELAYVPIIGWMWYFTEMVFCSRKWEQDRKTVATSLQHLRDYPEKYFFLIHCEGTRFTEKKHEISMQVARAKGLPRLKHHLLPRTKGFAITVRSLRNVVSAVYDCTLNFRNNENPTLLGVLNGKKYHADLYVRRIPLEDIPEDDDECSAWLHKLYQEKDAFQEEYYRTGTFPETPMVPPRRPWTLVNWLFWASLVLYPFFQFLVSMIRSGSSLTLASFILVFFVASVGVRWMIGVTEIDKGSAYGNSDSKQKLND

SEQ ID NO: 65 - protein, 159 aa, Homo sapiens
  Payload ID: 5;
  Gene Symbol: AGPAT4;
  Gene Name: 1-acylglycerol-3-phosphate O-acyltransferase 4;
  ENSP ID: ENSP00000355872
MDLAGLLKSQFLCHLVFCYVFIASGLIINTIQLFTLLLWPINKQLFRKINCRLSYCISSQLVMLLEWWSGTECTIFTDPRAYLKYGKENAIVVLNHKFEIDFLCGWSLSERFGLLGVSQKCIPPCLTHFSGSAPPLVFLLLVIQNLQKNQQSFYLMKWS

SEQ ID NO: 66 - protein, 118 aa, Homo sapiens
  Payload ID: 5;
  Gene Symbol: AGPAT4;
  Gene Name: 1-acylglycerol-3-phosphate O-acyltransferase 4;
  ENSP ID: ENSP00000355878
MDLAGLLKSQFLCHLVFCYVFIASGLIINTIQLFTLLLWPINKQLFRKINCRLSYCISSRLQGPGQERAGLCPNYRLDVVLHRDGLLFAQVGAGSQDGCHQFAAPPGLPREVFFPDSL

SEQ ID NO: 67 - protein, 105 aa, Homo sapiens
  Payload ID: 5;
  Gene Symbol: AGPAT4;
  Gene Name: 1-acylglycerol-3-phosphate O-acyltransferase 4;
  ENSP ID: ENSP00000400211
  MOD_RES (1)..(1): Any amino acid
XSAVYDCTLNFRNNENPTLLGVLNGKKYHADLYVRRIPLEDIPEDDDECSAWLHKLYQEKGWGDTEFSKQYVSVSRPGRLALCPSEKIAEQQVEVVHGFSKQSGE

SEQ ID NO: 68 - protein, 133 aa, Homo sapiens
  Payload ID: 5;
  Gene Symbol: AGPAT4;
  Gene Name: 1-acylglycerol-3-phosphate O-acyltransferase 4;
  ENSP ID: ENSP00000413901
MDLAGLLKSQFLCHLVFCYVFIASGLIINTIQLFTLLLWPINKQLFRKINCRLSYCISSQLVMLLEWWSGTECTIFTDPRAYLKYGKENAIVVLNHKFEIDFLCGWSLSERFGLLGFDLLHVACMPLELGLFS

SEQ ID NO: 69 - protein, 364 aa, Homo sapiens [sequence omitted]

SEQ ID NO: 70 - protein, 71 aa, Homo sapiens
  Payload ID: 6;
  Gene Symbol: AGPAT5;
  Gene Name: 1-acylglycerol-3-phosphate O-acyltransferase 5;
  ENSP ID: ENSP00000428152
  MOD_RES (1)..(1): Any amino acid
XFFENYTGVQVSRLPLPGLGVHPSSRGRGPLRSPTAGEGHPAGPADPARRARAASPPSSPHASCRSAEIAL

SEQ ID NO: 71 - protein, 88 aa, Homo sapiens
  Payload ID: 6;
  Gene Symbol: AGPAT5;
  Gene Name: 1-acylglycerol-3-phosphate O-acyltransferase 5;
  ENSP ID: ENSP00000430016
MLLSLVLHTYSMRYLLPSVVLLGTAPTYVLAWGVWRLLSAFLPARFYQALDDRLYCVYQSMVLFFFENYTGVQLTGLLLTSWPSGRMR

SEQ ID NO: 72 - protein, 181 aa, Homo sapiens
  Payload ID: 6;
  Gene Symbol: AGPAT5;
  Gene Name: 1-acylglycerol-3-phosphate O-acyltransferase 5;
  ENSP ID: ENSP00000430751
  MOD_RES (1)..(1): Any amino acid
XVLHALPAAQRRAPGHGAHLRVGLGGLAAALRLPARPLLPSAGRPALLRLPEHGALLLRELHRGPEFLCKECPKIHIHIDRIDKKDVPEEQEHMRRWLHERFEIKDKMLIEFYESPDPERRKRFPGKSVNSKLSIKKTLPSMLILSGLTAGMLMTDAGRKLYVNTWIYGTLLGCLWVTIKA

SEQ ID NO: 73 - protein, 501 aa, Homo sapiens
  Payload ID: 7;
  Gene Symbol: ACCS;
  Gene Name: 1-aminocyclopropane-1-carboxylate synthase homolog (Arabidopsis) (non-functional);
  Uniprot ID:  Q96QU6;
  ENSP ID: ENSP00000263776
MFTLPQKDFRAPTTCLGPTCMQDLGSSHGEDLEGECSRKLDQKLPELRGVGDPAMISSDTSYLSSRGRMIKWFWDSAEEGYRTYHMDEYDEDKNPSGIINLGTSENKLCFDLLSWRLSQRDMQRVEPSLLQYADWRGHLFLREEVAKFLSFYCKSPVPLRPENVVVLNGGASLFSALATVLCEAGEAFLIPTPYYGAITQHVCLYGNIRLAYVYLDSEVTGLDTRPFQLTVEKLEMALREAHSEGVKVKGLILISPQNPLGDVYSPEELQEYLVFAKRHRLHVIVDEVYMLSVFEKSVGYRSVLSLERLPDPQRTHVMWATSKDFGMSGLRFGTLYTENQDVATAVASLCRYHGLSGLVQYQMAQLLRDRDWINQVYLPENHARLKAAHTYVSEELRALGIPFLSRGAGFFIWVDLRKYLPKGTFEEEMLLWRRFLDNKVLLSFGKAFECKEPGWFRFVFSDQVHRLCLGMQRVQQVLAGKSQVAEDPRPSQSQEPSDQRR

SEQ ID NO: 74 - protein, 139 aa, Homo sapiens
  Payload ID: 7;
  Gene Symbol: ACCS;
  Gene Name: 1-aminocyclopropane-1-carboxylate synthase homolog (Arabidopsis) (non-functional);
  ENSP ID: ENSP00000434156
MFTLPQKDFRAPTTCLGPTCMQDLGSSHGEDLEGECSRKLDQKLPELRGVGDPAMISSDTSYLSSRGRMIKWFWDSAEEGYRTYHMDEYDEDKNPSGIINLGTSENKLCFDLLSWRLSQRDMQRVEPSLLQYADWRGHL

SEQ ID NO: 75 - protein, 77 aa, Homo sapiens
  Payload ID: 7;
  Gene Symbol: ACCS;
  Gene Name: 1-aminocyclopropane-1-carboxylate synthase homolog (Arabidopsis) (non-functional);
  ENSP ID: ENSP00000435919
MFTLPQKDFRAPTTCLGPTCMQDLGSSHGEDLEGECSRKLDQKLPELRGVGDPAMISSDTSYLSSRGRMIKWFWDSA

SEQ ID NO: 76 - protein, 568 aa, Homo sapiens
  Payload ID: 8;
  Gene Symbol: ACCSL;
  Gene Name: 1-aminocyclopropane-1-carboxylate synthase homolog (Arabidopsis) (non-functional)-like;
  Uniprot ID:  Q4AC99;
  ENSP ID: ENSP00000368109
MSHRSDTLPVPSGQRRGRVPRDHSIYTQLLEITLHLQQAMTEHFVQLTSRQGLSLEERRHTEAICEHEALLSRLICRMINLLQSGAASGLELQVPLPSEDSRGDVRYGQRAQLSGQPDPVPQLSDCEAAFVNRDLSIRGIDISVFYQSSFQDYNAYQKDKYHKDKNTLGFINLGTSENKLCMDLMTERLQESDMNCIEDTLLQYPDWRGQPFLREEVARFLTYYCRAPTRLDPENVVVLNGCCSVFCALAMVLCDPGEAFLVPAPFYGGFAFSSRLYAKVELIPVHLESEVTVTNTHPFQLTVDKLEEALLEARLEGKKVRGLVLINPQNPLGDIYSPDSLMKYLEFAKRYNLHVIIDEIYMLSVFDESITFHSILSMKSLPDSNRTHVIWGTSKDFGISGFRFGALYTHNKEVASAVSAFGYLHSISGITQHKLCQLLQNTEWIDKVYLPTNCYRLREAHKYITAELKALEIPFHNRSSGLYVWINLKKYLDPCTFEEERLLYCRFLDNKLLLSRGKTYMCKEPGWFCLIFADELPRLKLAMRRFCDVLQEQKEALIVKQLEDAMRE

SEQ ID NO: 77 - protein, 175 aa, Homo sapiens
  Payload ID: 8;
  Gene Symbol: ACCSL;
  Gene Name: 1-aminocyclopropane-1-carboxylate synthase homolog (Arabidopsis) (non-functional)-like;
  ENSP ID: ENSP00000436505
MSHRSDTLPVPSGQRRGRVPRDHSIYTQLLEITLHLQQAMTEHFVQLTSRQGLSLEERRHTEAICEHEALLSRLICRMINLLQSGAASGLELQVPLPSEDSRGDVRYGQRAQLSGQPDPVPQLSDCEAAFVNRDLSIRGIDISVFYQSSFQDYNAYQKDKYHKDKNTLGGARGLT

SEQ ID NO: 78 - protein, 259 aa, Homo sapiens
  Payload ID: 9;
  Gene Symbol: BPGM;
  Gene Name: 2,3-bisphosphoglycerate mutase;
  Uniprot ID:  P07738;
  ENSP ID: ENSP00000342032
MSKYKLIMLRHGEGAWNKENRFCSWVDQKLNSEGMEEARNCGKQLKALNFEFDLVFTSVLNRSIHTAWLILEELGQEWVPVESSWRLNERHYGALIGLNREQMALNHGEEQVRLWRRSYNVTPPPIEESHPYYQEIYNDRRYKVCDVPLDQLPRSESLKDVLERLLPYWNERIAPEVLRGKTILISAHGNSSRALLKHLEGISDEDIINITLPTGVPILLELDENLRAVGPHQFLGDQEAIQAAIKKVEDQGKVKQAKK

SEQ ID NO: 79 - protein, 259 aa, Homo sapiens; identical to SEQ ID NO: 78
  Payload ID: 9;
  Gene Symbol: BPGM;
  Gene Name: 2,3-bisphosphoglycerate mutase;
  Uniprot ID:  P07738;
  ENSP ID: ENSP00000376840

SEQ ID NO: 80 - protein, 259 aa, Homo sapiens; identical to SEQ ID NO: 78
  Payload ID: 9;
  Gene Symbol: BPGM;
  Gene Name: 2,3-bisphosphoglycerate mutase;
  Uniprot ID:  P07738;
  ENSP ID: ENSP00000399838

SEQ ID NO: 81 - protein, 78 aa, Homo sapiens
  Payload ID: 9;
  Gene Symbol: BPGM;
  Gene Name: 2,3-bisphosphoglycerate mutase;
  ENSP ID: ENSP00000403050
MSKYKLIMLRHGEGAWNKENRFCSWVDQKLNSEGMEEARNCGKQLKALNFEFDLVFTSVLNRSIHTAWLILEELGQEW

SEQ ID NO: 82 - protein, 401 aa, Homo sapiens
  Payload ID: 10;
  Gene Symbol: CNP;
  Gene Name: 2',3'-cyclic nucleotide 3' phosphodiesterase;
  Uniprot ID:  P09543;
  ENSP ID: ENSP00000377466
MSSSGAKDKPELQFPFLQDEDTVATLLECKTLFILRGLPGSGKSTLARVIVDKYRDGTKMVSADAYKITPGARGAFSEEYKRLDEDLAAYCRRRDIRILVLDDTNHERERLEQLFEMADQYQYQVVLVEPKTAWRLDCAQLKEKNQWQLSADDLKKLKPGLEKDFLPLYFGWFLTKKSSETLRKAGQVFLEELGNHKAFKKELRQFVPGDEPREKMDLVTYFGKRPPGVLHCTTKFCDYGKAPGAEEYAQQDVLKKSYSKAFTLTISALFVTPKTTGARVELSEQQLQLWPSDVDKLSPTDNLPRGSRAHITLGCAADVEAVQTGLDLLEILRQEKGGSRGEEVGELSRGKLYSLGNGRWMLTLAKNMEVRAIFTGYYGKGKPVPTQGSRKGGALQSCTII

SEQ ID NO: 83 - protein, 421 aa, Homo sapiens
  Payload ID: 10;
  Gene Symbol: CNP;
  Gene Name: 2',3'-cyclic nucleotide 3' phosphodiesterase;
  Uniprot ID:  P09543;
  ENSP ID: ENSP00000377470
MNRGFSRKSHTFLPKIFFRKMSSSGAKDKPELQFPFLQDEDTVATLLECKTLFILRGLPGSGKSTLARVIVDKYRDGTKMVSADAYKITPGARGAFSEEYKRLDEDLAAYCRRRDIRILVLDDTNHERERLEQLFEMADQYQYQVVLVEPKTAWRLDCAQLKEKNQWQLSADDLKKLKPGLEKDFLPLYFGWFLTKKSSETLRKAGQVFLEELGNHKAFKKELRQFVPGDEPREKMDLVTYFGKRPPGVLHCTTKFCDYGKAPGAEEYAQQDVLKKSYSKAFTLTISALFVTPKTTGARVELSEQQLQLWPSDVDKLSPTDNLPRGSRAHITLGCAADVEAVQTGLDLLEILRQEKGGSRGEEVGELSRGKLYSLGNGRWMLTLAKNMEVRAIFTGYYGKGKPVPTQGSRKGGALQSCTII

SEQ ID NO: 84 - protein, 144 aa, Homo sapiens
  Payload ID: 10;
  Gene Symbol: CNP;
  Gene Name: 2',3'-cyclic nucleotide 3' phosphodiesterase;
  ENSP ID: ENSP00000413104
MSSSGAKDKPELQFPFLQDEDTVATLLECKTLFILRGLPGSGKSTLARVIVDKYRDGTKMVSADAYKITPGARGAFSEEYKRLDEDLAAYCRRRDIRILVLDDTNHERERLEQLFEMADQYQYQVVLVEPKTAWRLDCAQLKEK

SEQ ID NO: 85 - protein, 120 aa, Homo sapiens
  Payload ID: 10;
  Gene Symbol: CNP;
  Gene Name: 2',3'-cyclic nucleotide 3' phosphodiesterase;
  ENSP ID: ENSP00000466807
MSSSGAKDKPELQFPFLQDEDTVATLLECKTLFILRGLPGSGKSTLARVIVDKYRDGTKMVSADAYKITPGARGAFSEEYKRLDEDLAAYCRRRDIRILVLDDTNHERERLEQLFEMADQ

SEQ ID NO: 86 - protein, 49 aa, Homo sapiens
  Payload ID: 10;
  Gene Symbol: CNP;
  Gene Name: 2',3'-cyclic nucleotide 3' phosphodiesterase;
  ENSP ID: ENSP00000467641
MSSLGMSPGRRWTWSPTLERDPQACCIAQPSFVTTGRLPGQRSTLNKMC

SEQ ID NO: 87 - protein, 164 aa, Homo sapiens
  Payload ID: 10;
  Gene Symbol: CNP;
  Gene Name: 2',3'-cyclic nucleotide 3' phosphodiesterase;
  ENSP ID: ENSP00000468198
MDEDTVATLLECKTLFILRGLPGSGKSTLARVIVDKYRDGTKMVSADAYKITPGARGAFSEEYKRLDEDLAAYCRRRDIRILVLDDTNHERERLEQLFEMADQYQYQVVLVEPKTAWRLDCAQLKEKNQWQLSADDLKKLKPGLEKDFLPLYFGWFLTKKSSET

SEQ ID NO: 88 - protein, 153 aa, Homo sapiens
  Payload ID: 10;
  Gene Symbol: CNP;
  Gene Name: 2',3'-cyclic nucleotide 3' phosphodiesterase;
  ENSP ID: ENSP00000468471
MSSSGAKDKPELQFPFLQDEDTVATLLECKTLFILRGLPGSGKSTLARVIVDKYRDGTKMVSADAYKITPGARGAFSEEYKRLDEDLAAYCRRRDIRILVLDDTNHERERLEQLFEMADQYQYQVVLVEPKTAWRLDCAQLKEKNQWQLSADD

SEQ ID NO: 89 - protein, 335 aa, Homo sapiens
  Payload ID: 11;
  Gene Symbol: DECR1;
  Gene Name: 2,4-dienoyl CoA reductase 1, mitochondrial;
  Uniprot ID:  Q16698;
  ENSP ID: ENSP00000220764
MKLPARVFFTLGSRLPCGLAPRRFFSYGTKILYQNTEALQSKFFSPLQKAMLPPNSFQGKVAFITGGGTGLGKGMTTLLSSLGAQCVIASRKMDVLKATAEQISSQTGNKVHAIQCDVRDPDMVQNTVSELIKVAGHPNIVINNAAGNFISPTERLSPNAWKTITDIVLNGTAFVTLEIGKQLIKAQKGAAFLSITTIYAETGSGFVVPSASAKAGVEAMSKSLAAEWGKYGMRFNVIQPGPIKTKGAFSRLDPTGTFEKEMIGRIPCGRLGTVEELANLAAFLCSDYASWINGAVIKFDGGEEVLISGEFNDLRKVTKEQWDTIEELIRKTKGS

SEQ ID NO: 90 - protein, 205 aa, Homo sapiens
  Payload ID: 11;
  Gene Symbol: DECR1;
  Gene Name: 2,4-dienoyl CoA reductase 1, mitochondrial;
  ENSP ID: ENSP00000427936
MTAYLATGILWKEMFFSYGTKILYQNTEALQSKFFSPLQKAMLPPNSFQGKVAFITGGGTGLGKGMTTLLSSLGAQCVIASRKMDVLKATAEQISSQTGNKVHAIQCDVRDPDMVQNTVSELIKVAGHPNIVINNAAGNFISPTERLSPNAWKTITDIVLNGTAFVTLEIGKQLIKAQKGAAFLSITTIYAETGSGFVVPSASAK

SEQ ID NO: 91 - protein, 43 aa, Homo sapiens
  Payload ID: 11;
  Gene Symbol: DECR1;
  Gene Name: 2,4-dienoyl CoA reductase 1, mitochondrial;
  ENSP ID: ENSP00000428162
  MOD_RES (1)..(1): Any amino acid
XAAEWGKYGMRFNVIQPGPIKTKECVWGREVCCGTNPDNAECH

SEQ ID NO: 92 - protein, 48 aa, Homo sapiens
  Payload ID: 11;
  Gene Symbol: DECR1;
  Gene Name: 2,4-dienoyl CoA reductase 1, mitochondrial;
  ENSP ID: ENSP00000428533
MKLPARVFFTLGSRLPCGLAPRRRCYHLIVFKEKWHSLLGEVLALVKE

SEQ ID NO: 93 - protein, 41 aa, Homo sapiens
  Payload ID: 11;
  Gene Symbol: DECR1;
  Gene Name: 2,4-dienoyl CoA reductase 1, mitochondrial;
  ENSP ID: ENSP00000428701
MKLPARVFFTLGSRLPCGLAPRREDGCFESYRRTNFFSNWK

SEQ ID NO: 94 - protein, 151 aa, Homo sapiens
  Payload ID: 11;
  Gene Symbol: DECR1;
  Gene Name: 2,4-dienoyl CoA reductase 1, mitochondrial;
  ENSP ID: ENSP00000429096
MLPPNSFQGKVAFITGGGTGLGKGMTTLLSSLGAQCVIASRKMDVLKATAEQISSQTGNKVHAIQCDVRDPDMVQNTVSELIKVAGHPNIVINNAAGNFISPTERLSPNAWKTITDIVLNGTAFVTLEIGKQLIKAQKGAAFLSITTIYAE

SEQ ID NO: 95 - protein, 41 aa, Homo sapiens; identical to SEQ ID NO: 93
  Payload ID: 11;
  Gene Symbol: DECR1;
  Gene Name: 2,4-dienoyl CoA reductase 1, mitochondrial;
  ENSP ID: ENSP00000429551

SEQ ID NO: 96 - protein, 326 aa, Homo sapiens
  Payload ID: 11;
  Gene Symbol: DECR1;
  Gene Name: 2,4-dienoyl CoA reductase 1, mitochondrial;
  Uniprot ID:  Q16698;
  ENSP ID: ENSP00000429779
MSGLGKKHLLLMGEFFSYGTKILYQNTEALQSKFFSPLQKAMLPPNSFQGKVAFITGGGTGLGKGMTTLLSSLGAQCVIASRKMDVLKATAEQISSQTGNKVHAIQCDVRDPDMVQNTVSELIKVAGHPNIVINNAAGNFISPTERLSPNAWKTITDIVLNGTAFVTLEIGKQLIKAQKGAAFLSITTIYAETGSGFVVPSASAKAGVEAMSKSLAAEWGKYGMRFNVIQPGPIKTKGAFSRLDPTGTFEKEMIGRIPCGRLGTVEELANLAAFLCSDYASWINGAVIKFDGGEEVLISGEFNDLRKVTKEQWDTIEELIRKTKGS

SEQ ID NO: 97 - protein, 181 aa, Homo sapiens
  Payload ID: 11;
  Gene Symbol: DECR1;
  Gene Name: 2,4-dienoyl CoA reductase 1, mitochondrial;
  ENSP ID: ENSP00000430561
MFFSYGTKILYQNTEALQSKFFSPLQKAMLPPNSFQGKVAFITGGGTGLGKGMTTLLSSLGAQCVIASRKMDVLKATAEQISSQTGNKVHAIQCDVRDPDMVQNTVSELIKVAGHPNIVINNAAGNFISPTERLSPNAWKTITDIVLNGTAFVTLEIGKQLIKAQKGAAFLSITTIYAETG

SEQ ID NO: 98 - protein, 95 aa, Homo sapiens
  Payload ID: 11;
  Gene Symbol: DECR1;
  Gene Name: 2,4-dienoyl CoA reductase 1, mitochondrial;
  ENSP ID: ENSP00000430759
MKLPARVFFTLGSRLPCGLAPRRFFSYGTKILYQNTEALQSKFFSPLQKAMLPPNSFQGKVAFITGGGTGLGKGMTTLLSSLGAQCVIASRNAFL

SEQ ID NO: 99 - protein, 41 aa, Homo sapiens; identical to SEQ ID NO: 93
  Payload ID: 11;
  Gene Symbol: DECR1;
  Gene Name: 2,4-dienoyl CoA reductase 1, mitochondrial;
  ENSP ID: ENSP00000431045

SEQ ID NO: 100 - protein, 292 aa, Homo sapiens
  Payload ID: 12;
  Gene Symbol: DECR2;
  Gene Name: 2,4-dienoyl CoA reductase 2, peroxisomal;
  Uniprot ID:  Q9NUI1;
  ENSP ID: ENSP00000219481
MAQPPPDVEGDDCLPAYRHLFCPDLLRDKVAFITGGGSGIGFRIAEIFMRHGCHTVIASRSLPRVLTAARKLAGATGRRCLPLSMDVRAPPAVMAAVDQALKEFGRIDILINCAAGNFLCPAGALSFNAFKTVMDIDTSGTFNVSRVLYEKFFRDHGGVIVNITATLGNRGQALQVHAGSAKAAVDAMTRHLAVEWGPQNIRVNSLAPGPISGTEGLRRLGGPQASLSTKVTASPLQRLGNKTEIAHSVLYLASPLASYVTGAVLVADGGAWLTFPNGVKGLPDFASFSAKL

SEQ ID NO: 101 - protein, 94 aa, Homo sapiens
  Payload ID: 12;
  Gene Symbol: DECR2;
  Gene Name: 2,4-dienoyl CoA reductase 2, peroxisomal;
  ENSP ID: ENSP00000393382
  MOD_RES (1)..(1): Any amino acid
XARKLAGATGRRCLPLSMDVRAPPAVMAAVDQALKEFGRIDILINCAAGNFLCPAGALSFNAFKTVMDIDTSGTFNVSRVLYEKFFRVGASCAL

SEQ ID NO: 102 - protein, 81 aa, Homo sapiens
  Payload ID: 12;
  Gene Symbol: DECR2;
  Gene Name: 2,4-dienoyl CoA reductase 2, peroxisomal;
  ENSP ID: ENSP00000395913
MAQPPPDVEGDDCLPAYRHLFCPDLLRDKVAFITGGGSGIGFRIAEIFMRHGCHTVIASRSLPRVLTRWVFTTLTRLVSNS

SEQ ID NO: 103 - protein, 211 aa, Homo sapiens
  Payload ID: 12;
  Gene Symbol: DECR2;
  Gene Name: 2,4-dienoyl CoA reductase 2, peroxisomal;
  Uniprot ID:  Q9NUI1;
  ENSP ID: ENSP00000399697
MAQPPPDVEGDDCLPAYRHLFCPDLLRDKVAFITGGGSGIGFRIAEIFMRASEDQMGHCSSSGTCLAGVATFMVIVGKQPPNQKSRETKEQGRQIPFVCVRHGCHTVIASRSLPRVLTAARKLAGATGRRCLPLSMDVRAPPAVMAAVDQALKEFGRIDILINCSSSSCGLPFCRCGRELPVPRWRLVLQRLQDRDGHRYQRHLQCVSCAL

SEQ ID NO: 104 - protein, 280 aa, Homo sapiens
  Payload ID: 12;
  Gene Symbol: DECR2;
  Gene Name: 2,4-dienoyl CoA reductase 2, peroxisomal;
  ENSP ID: ENSP00000400374
MAQPPPDVEGDDCLPAYRHLFCPDLLRDKVAFITGGGSGIGFRIAEIFMRHGCHTAARKLAGATGRRCLPLSMDVRAPPAVMAAVDQALKEFGRIDILINCAAGNFLCPAGALSFNAFKTVMDIDTSGTFNVSRVLYEKFFRDHGGVIVNITATLGNRGQALQVHAGSAKAAVDAMTRHLAVEWGPQNIRVNSLAPGPISGTEGLRRLGGPQASLSTKVTASPLQRLGNKTEIAHSVLYLASPLASYVTGAVLVADGGAWLTFPNGVKGLPDFASFSAKL

SEQ ID NO: 105 - protein, 81 aa, Homo sapiens; identical to SEQ ID NO: 102
  Payload ID: 12;
  Gene Symbol: DECR2;
  Gene Name: 2,4-dienoyl CoA reductase 2, peroxisomal;
  ENSP ID: ENSP00000402180

SEQ ID NO: 106 - protein, 292 aa, Homo sapiens; identical to SEQ ID NO: 100
  Payload ID: 12;
  Gene Symbol: DECR2;
  Gene Name: 2,4-dienoyl CoA reductase 2, peroxisomal;
  Uniprot ID:  Q9NUI1;
  ENSP ID: ENSP00000481547

SEQ ID NO: 107 - protein, 81 aa, Homo sapiens; identical to SEQ ID NO: 102
  Payload ID: 12;
  Gene Symbol: DECR2;
  Gene Name: 2,4-dienoyl CoA reductase 2, peroxisomal;
  ENSP ID: ENSP00000486613

SEQ ID NO: 108 - protein, 81 aa, Homo sapiens; identical to SEQ ID NO: 102
  Payload ID: 12;
  Gene Symbol: DECR2;
  Gene Name: 2,4-dienoyl CoA reductase 2, peroxisomal;
  ENSP ID: ENSP00000486679

SEQ ID NO: 109 - protein, 280 aa, Homo sapiens; identical to SEQ ID NO: 104
  Payload ID: 12;
  Gene Symbol: DECR2;
  Gene Name: 2,4-dienoyl CoA reductase 2, peroxisomal;
  ENSP ID: ENSP00000487756

SEQ ID NO: 110 - protein, 142 aa, Homo sapiens
  Payload ID: 12;
  Gene Symbol: DECR2;
  Gene Name: 2,4-dienoyl CoA reductase 2, peroxisomal;
  ENSP ID: ENSP00000487776
MAQPPPDVEGDDCLPAYRHLFCPDLLRDKVAFITGGGSGIGFRIAEIFMRIQVPARGTGERSRIALGGVRTSRPLQAARKLAGATGRRCLPLSMDVRAPPAVMAAVDQALKEFGRIDILINCAAGNFLCPAGALSFNAFKTV

SEQ ID NO: 111 - protein, 81 aa, Homo sapiens; identical to SEQ ID NO: 102
  Payload ID: 12;
  Gene Symbol: DECR2;
  Gene Name: 2,4-dienoyl CoA reductase 2, peroxisomal;
  ENSP ID: ENSP00000487820

SEQ ID NO: 112 - protein, 81 aa, Homo sapiens; identical to SEQ ID NO: 102
  Payload ID: 12;
  Gene Symbol: DECR2;
  Gene Name: 2,4-dienoyl CoA reductase 2, peroxisomal;
  ENSP ID: ENSP00000487947

SEQ ID NO: 113 - protein, 238 aa, Homo sapiens
  Payload ID: 12;
  Gene Symbol: DECR2;
  Gene Name: 2,4-dienoyl CoA reductase 2, peroxisomal;
  ENSP ID: ENSP00000487969
MAQPPPDVEGDDCLPAYRHLFCPDLLRDKVAFITGGGSGIGFRIAEIFMRHGCHTVIASRSLPRVLTAARKLAGATGRRCLPLSMDVRAPPAVMAAVDQALKEFGRIDILINCESVLSEAPAAPAVSHSAGAAGNFLCPAGALSFNAFKTVMDIDTSGTFNVSRVLYEKFFRDHGGVIVNITATLGNRGQALQVHAGSAKAAVDAMTRHLAVEWGPQNIRVNSLAPGPISGTEGLRRL

SEQ ID NO: 114 - protein, 81 aa, Homo sapiens; identical to SEQ ID NO: 102
  Payload ID: 12;
  Gene Symbol: DECR2;
  Gene Name: 2,4-dienoyl CoA reductase 2, peroxisomal;
  ENSP ID: ENSP00000488142

SEQ ID NO: 115 - protein, 238 aa, Homo sapiens; identical to SEQ ID NO: 113
  Payload ID: 12;
  Gene Symbol: DECR2;
  Gene Name: 2,4-dienoyl CoA reductase 2, peroxisomal;
  ENSP ID: ENSP00000488501

SEQ ID NO: 116 - protein, 82 aa, Homo sapiens
  Payload ID: 12;
  Gene Symbol: DECR2;
  Gene Name: 2,4-dienoyl CoA reductase 2, peroxisomal;
  ENSP ID: ENSP00000488619
MAQPPPDVEGDDCLPAYRHLFCPDLLRDKVAFITGGGSGIGFRIAEIFMRHGCHTVIASRSLPRVLTVIRPPQPPKVPGLQV

SEQ ID NO: 117 - protein, 81 aa, Homo sapiens; identical to SEQ ID NO: 102
  Payload ID: 12;
  Gene Symbol: DECR2;
  Gene Name: 2,4-dienoyl CoA reductase 2, peroxisomal;
  ENSP ID: ENSP00000488728

SEQ ID NO: 118 - protein, 142 aa, Homo sapiens; identical to SEQ ID NO: 110
  Payload ID: 12;
  Gene Symbol: DECR2;
  Gene Name: 2,4-dienoyl CoA reductase 2, peroxisomal;
  ENSP ID: ENSP00000488732

SEQ ID NO: 119 - protein, 211 aa, Homo sapiens; identical to SEQ ID NO: 103
  Payload ID: 12;
  Gene Symbol: DECR2;
  Gene Name: 2,4-dienoyl CoA reductase 2, peroxisomal;
  Uniprot ID:  Q9NUI1;
  ENSP ID: ENSP00000488824

SEQ ID NO: 120 - protein, 94 aa, Homo sapiens; identical to SEQ ID NO: 101
  Payload ID: 12;
  Gene Symbol: DECR2;
  Gene Name: 2,4-dienoyl CoA reductase 2, peroxisomal;
  ENSP ID: ENSP00000488844
  MOD_RES (1)..(1): Any amino acid

SEQ ID NO: 121 - protein, 82 aa, Homo sapiens; identical to SEQ ID NO: 116
  Payload ID: 12;
  Gene Symbol: DECR2;
  Gene Name: 2,4-dienoyl CoA reductase 2, peroxisomal;
  ENSP ID: ENSP00000488859

SEQ ID NO: 122 - protein, 516 aa, Homo sapiens
  Payload ID: 13;
  Gene Symbol: DHCR24;
  Gene Name: 24-dehydrocholesterol reductase;
  Uniprot ID:  Q15392;
  ENSP ID: ENSP00000360316
MEPAVSLAVCALLFLLWVRLKGLEFVLIHQRWVFVCLFLLPLSLIFDIYYYVRAWVVFKLSSAPRLHEQRVRDIQKQVREWKEQGSKTFMCTGRPGWLTVSLRVGKYKKTHKNIMINLMDILEVDTKKQIVRVEPLVTMGQVTALLTSIGWTLPVLPELDDLTVGGLIMGTGIESSSHKYGLFQHICTAYELVLADGSFVRCTPSENSDLFYAVPWSCGTLGFLVAAEIRIIPAKKYVKLRFEPVRGLEAICAKFTHESQRQENHFVEGLLYSLDEAVIMTGVMTDEAEPSKLNSIGNYYKPWFFKHVENYLKTNREGLEYIPLRHYYHRHTRSIFWELQDIIPFGNNPIFRYLFGWMVPPKISLLKLTQGETLRKLYEQHHVVQDMLVPMKCLQQALHTFQNDIHVYPIWLCPFILPSQPGLVHPKGNEAELYIDIGAYGEPRVKHFEARSCMRQLEKFVRSVHGFQMLYADCYMNREEFWEMFDGSLYHKLREKLGCQDAFPEVYDKICKAARH

SEQ ID NO: 123 - protein, 154 aa, Homo sapiens
  Payload ID: 13;
  Gene Symbol: DHCR24;
  Gene Name: 24-dehydrocholesterol reductase;
  ENSP ID: ENSP00000416585
  MOD_RES (1)..(1): Any amino acid
XSLLKLTQGETLRKLYEQHHVVQDMLVPMKCLQQALHTFQNDIHVYPIWLCPFILPSQPGLVHPKGNEAELYIDIGAYGEPRVKHFEARSCMRQLEKFVRSVHGFQMLYADCYMNREEFWEMFDGSLYHKLREKLGCQDAFPEVYDKICKAARH

SEQ ID NO: 124 - protein, 427 aa, Homo sapiens
  Payload ID: 13;
  Gene Symbol: DHCR24;
  Gene Name: 24-dehydrocholesterol reductase;
  ENSP ID: ENSP00000440191
MCTGRPGWLTVSLRVGKYKKTHKNIMINLMDILEVDTKKQIVRVEPLVTMGQVTALLTSIGWTLPVLPELDDLTVGGLIMGTGIESSSHKYGLFQHICTAYELVLADGSFVRCTPSENSDLFYAVPWSCGTLGFLVAAEIRIIPAKKYVKLRFEPVRGLEAICAKFTHESQRQENHFVEGLLYSLDEAVIMTGVMTDEAEPSKLNSIGNYYKPWFFKHVENYLKTNREGLEYIPLRHYYHRHTRSIFWELQDIIPFGNNPIFRYLFGWMVPPKISLLKLTQGETLRKLYEQHHVVQDMLVPMKCLQQALHTFQNDIHVYPIWLCPFILPSQPGLVHPKGNEAELYIDIGAYGEPRVKHFEARSCMRQLEKFVRSVHGFQMLYADCYMNREEFWEMFDGSLYHKLREKLGCQDAFPEVYDKICKAARH

SEQ ID NO: 125 - protein, 400 aa, Homo sapiens
  Payload ID: 14;
  Gene Symbol: OAS1;
  Gene Name: 2'-5'-oligoadenylate synthetase 1, 40/46kDa;
  Uniprot ID:  P00973;
  ENSP ID: ENSP00000202917
MMDLRNTPAKSLDKFIEDYLLPDTCFRMQINHAIDIICGFLKERCFRGSSYPVCVSKVVKGGSSGKGTTLRGRSDADLVVFLSPLTTFQDQLNRRGEFIQEIRRQLEACQRERAFSVKFEVQAPRWGNPRALSFVLSSLQLGEGVEFDVLPAFDALGQLTGGYKPNPQIYVKLIEECTDLQKEGEFSTCFTELQRDFLKQRPTKLKSLIRLVKHWYQNCKKKLGKLPPQYALELLTVYAWERGSMKTHFNTAQGFRTVLELVINYQQLCIYWTKYYDFKNPIIEKYLRRQLTKPRPVILDPADPTGNLGGGDPKGWRQLAQEAEAWLNYPCFKNWDGSPVSSWILLAESNSADDETDDPRRYQKYGYIGTHEYPHFSHRPSTLQAASTPQAEEDWTCTIL

SEQ ID NO: 126 - protein, 414 aa, Homo sapiens
  Payload ID: 14;
  Gene Symbol: OAS1;
  Gene Name: 2'-5'-oligoadenylate synthetase 1, 40/46kDa;
  Uniprot ID:  P00973;
  ENSP ID: ENSP00000388001
MMDLRNTPAKSLDKFIEDYLLPDTCFRMQINHAIDIICGFLKERCFRGSSYPVCVSKVVKGGSSGKGTTLRGRSDADLVVFLSPLTTFQDQLNRRGEFIQEIRRQLEACQRERAFSVKFEVQAPRWGNPRALSFVLSSLQLGEGVEFDVLPAFDALGQLTGGYKPNPQIYVKLIEECTDLQKEGEFSTCFTELQRDFLKQRPTKLKSLIRLVKHWYQNCKKKLGKLPPQYALELLTVYAWERGSMKTHFNTAQGFRTVLELVINYQQLCIYWTKYYDFKNPIIEKYLRRQLTKPRPVILDPADPTGNLGGGDPKGWRQLAQEAEAWLNYPCFKNWDGSPVSSWILLTQHTPGSIHPTGRRGLDLHHPLNASASWGKGLQCYLDQFLHFQVGLLIQRGQSSSVSWCIIQDRTQVS

SEQ ID NO: 127 - protein, 364 aa, Homo sapiens
  Payload ID: 14;
  Gene Symbol: OAS1;
  Gene Name: 2'-5'-oligoadenylate synthetase 1, 40/46kDa;
  Uniprot ID:  P00973;
  ENSP ID: ENSP00000415721
MMDLRNTPAKSLDKFIEDYLLPDTCFRMQINHAIDIICGFLKERCFRGSSYPVCVSKVVKGGSSGKGTTLRGRSDADLVVFLSPLTTFQDQLNRRGEFIQEIRRQLEACQRERAFSVKFEVQAPRWGNPRALSFVLSSLQLGEGVEFDVLPAFDALGQLTGGYKPNPQIYVKLIEECTDLQKEGEFSTCFTELQRDFLKQRPTKLKSLIRLVKHWYQNCKKKLGKLPPQYALELLTVYAWERGSMKTHFNTAQGFRTVLELVINYQQLCIYWTKYYDFKNPIIEKYLRRQLTKPRPVILDPADPTGNLGGGDPKGWRQLAQEAEAWLNYPCFKNWDGSPVSSWILLVRPPASSLPFIPAPLHEA

SEQ ID NO: 128 - protein, 177 aa, Homo sapiens
  Payload ID: 14;
  Gene Symbol: OAS1;
  Gene Name: 2'-5'-oligoadenylate synthetase 1, 40/46kDa;
  ENSP ID: ENSP00000448001
MMDLRNTPAKSLDKFIEDYLLPDTCFRMQINHAIDIICGFLKERCFRGSSYPVCVSKVVKGGSSGKGTTLRGRSDADLVVFLSPLTTFQDQLNRRGEFIQEIRRQLEACQRERAFSVKFEVQAPRWGNPRALSFVLSSLQLGEGVEFDVLPAFDALGESSQLLFLPLPISEQKSPTV

SEQ ID NO: 129 - protein, 302 aa, Homo sapiens
  Payload ID: 14;
  Gene Symbol: OAS1;
  Gene Name: 2'-5'-oligoadenylate synthetase 1, 40/46kDa;
  ENSP ID: ENSP00000448348
RNTPAKSLDKFIEDYLLPDTCFRMQINHAIDIICGFLKERCFRGSSYPVCVSKVVKGGSSGKGTTLRGRSDADLVVFLSPLTTFQDQLNRRGEFIQEIRRQLEACQRERAFSVKFEVQAPRWGNPRALSFVLSSLQLGEGVEFDVLPAFDALGQLTGGYKPNPQIYVKLIEECTDLQKEGEFSTCFTELQRDFLKQRPTKLKSLIRLVKHWYQNCKKKLGKLPPQYALELLTVYAWERGSMKTHFNTAQGFRTVLELVINYQQLCIYWTKYYDFKNPIIEKYLRRQLTKPRYAIPTWLSSPM

SEQ ID NO: 130 - protein, 360 aa, Homo sapiens
  Payload ID: 14;
  Gene Symbol: OAS1;
  Gene Name: 2'-5'-oligoadenylate synthetase 1, 40/46kDa;
  ENSP ID: ENSP00000448790
MMDLRNTPAKSLDKFIEDYLLPDTCFRMQINHAIDIICGFLKERCFRGSSYPVCVSKVVKGGSSGKGTTLRGRSDADLVVFLSPLTTFQDQLNRRGEFIQEIRRQLEACQRERAFSVKFEVQAPRWGNPRALSFVLSSLQLGEGVEFDVLPAFDALGQLTGGYKPNPQIYVKLIEECTDLQKEGEFSTCFTELQRDFLKQRPTKLKSLIRLVKHWYQNCKKKLGKLPPQYALELLTVYAWERGSMKTHFNTAQGFRTVLELVINYQQLCIYWTKYYDFKNPIIEKYLRRQLTKPRPVILDPADPTGNLGGGDPKGWRQLAQEAEAWLNYPCFKNWDGSPVSSWILLVNLTLVGRRNYTNN

SEQ ID NO: 131 - protein, 130 aa, Homo sapiens
  Payload ID: 14;
  Gene Symbol: OAS1;
  Gene Name: 2'-5'-oligoadenylate synthetase 1, 40/46kDa;
  ENSP ID: ENSP00000449053
FRTVLELVINYQQLCIYWTKYYDFKNPIIEKYLRRQLTKPRPVILDPADPTGNLGGGDPKGWRQLAQEAEAWLNYPCFKNWDGSPVSSWILLMRQRLREVRSLAQGHQLTSGGNGIQAQWTLKPVLMSLC

SEQ ID NO: 132 - protein, 83 aa, Homo sapiens
  Payload ID: 14;
  Gene Symbol: OAS1;
  Gene Name: 2'-5'-oligoadenylate synthetase 1, 40/46kDa;
  ENSP ID: ENSP00000450286
MMDLRNTPAKSLDKFIEDYLLPDTCFRMQINHAIDIICGFLKERCFRGSSYPVCVSKVVKCKKKLGKLPPQYALELLTVYAWE

SEQ ID NO: 133 - protein, 22 aa, Homo sapiens
  Payload ID: 14;
  Gene Symbol: OAS1;
  Gene Name: 2'-5'-oligoadenylate synthetase 1, 40/46kDa;
  ENSP ID: ENSP00000474083
  MOD_RES (1)..(1): Any amino acid
XPSTLQAASTPQAEEDWTCTIL

SEQ ID NO: 134 - protein, 15 aa, Homo sapiens
  Payload ID: 14;
  Gene Symbol: OAS1;
  Gene Name: 2'-5'-oligoadenylate synthetase 1, 40/46kDa;
  ENSP ID: ENSP00000475139
AESNSADDETDDPRR

SEQ ID NO: 135 - protein, 719 aa, Homo sapiens
  Payload ID: 15;
  Gene Symbol: OAS2;
  Gene Name: 2'-5'-oligoadenylate synthetase 2, 69/71kDa;
  Uniprot ID:  P29728;
  ENSP ID: ENSP00000342278
MGNGESQLSSVPAQKLGWFIQEYLKPYEECQTLIDEMVNTICDVLQEPEQFPLVQGVAIGGSYGRKTVLRGNSDGTLVLFFSDLKQFQDQKRSQRDILDKTGDKLKFCLFTKWLKNNFEIQKSLDGFTIQVFTKNQRISFEVLAAFNALSLNDNPSPWIYRELKRSLDKTNASPGEFAVCFTELQQKFFDNRPGKLKDLILLIKHWHQQCQKKIKDLPSLSPYALELLTVYAWEQGCRKDNFDIAEGVRTVLELIKCQEKLCIYWMVNYNFEDETIRNILLHQLQSARPVILDPVDPTNNVSGDKICWQWLKKEAQTWLTSPNLDNELPAPSWNVLPAPLFTTPGHLLDKFIKEFLQPNKCFLEQIDSAVNIIRTFLKENCFRQSTAKIQIVRGGSTAKGTALKTGSDADLVVFHNSLKSYTSQKNERHKIVKEIHEQLKAFWREKEEELEVSFEPPKWKAPRVLSFSLKSKVLNESVSFDVLPAFNALGQLSSGSTPSPEVYAGLIDLYKSSDLPGGEFSTCFTVLQRNFIRSRPTKLKDLIRLVKHWYKECERKLKPKGSLPPKYALELLTIYAWEQGSGVPDFDTAEGFRTVLELVTQYQQLCIFWKVNYNFEDETVRKFLLSQLQKTRPVILDPAEPTGDVGGGDRWCWHLLAKEAKEWLSSPCFKDGTGNPIPPWKVPTMQTPGSCGARIHPIVNEMFSSRSHRILNNNSKRNF

SEQ ID NO: 136 - protein, 687 aa, Homo sapiens
  Payload ID: 15;
  Gene Symbol: OAS2;
  Gene Name: 2'-5'-oligoadenylate synthetase 2, 69/71kDa;
  Uniprot ID:  P29728;
  ENSP ID: ENSP00000376362
MGNGESQLSSVPAQKLGWFIQEYLKPYEECQTLIDEMVNTICDVLQEPEQFPLVQGVAIGGSYGRKTVLRGNSDGTLVLFFSDLKQFQDQKRSQRDILDKTGDKLKFCLFTKWLKNNFEIQKSLDGFTIQVFTKNQRISFEVLAAFNALSLNDNPSPWIYRELKRSLDKTNASPGEFAVCFTELQQKFFDNRPGKLKDLILLIKHWHQQCQKKIKDLPSLSPYALELLTVYAWEQGCRKDNFDIAEGVRTVLELIKCQEKLCIYWMVNYNFEDETIRNILLHQLQSARPVILDPVDPTNNVSGDKICWQWLKKEAQTWLTSPNLDNELPAPSWNVLPAPLFTTPGHLLDKFIKEFLQPNKCFLEQIDSAVNIIRTFLKENCFRQSTAKIQIVRGGSTAKGTALKTGSDADLVVFHNSLKSYTSQKNERHKIVKEIHEQLKAFWREKEEELEVSFEPPKWKAPRVLSFSLKSKVLNESVSFDVLPAFNALGQLSSGSTPSPEVYAGLIDLYKSSDLPGGEFSTCFTVLQRNFIRSRPTKLKDLIRLVKHWYKECERKLKPKGSLPPKYALELLTIYAWEQGSGVPDFDTAEGFRTVLELVTQYQQLCIFWKVNYNFEDETVRKFLLSQLQKTRPVILDPAEPTGDVGGGDRWCWHLLAKEAKEWLSSPCFKDGTGNPIPPWKVPVKVI

SEQ ID NO: 137 - protein, 172 aa, Homo sapiens
  Payload ID: 15;
  Gene Symbol: OAS2;
  Gene Name: 2'-5'-oligoadenylate synthetase 2, 69/71kDa;
  Uniprot ID:  P29728;
  ENSP ID: ENSP00000411763
MGNGESQLSSVPAQKLGWFIQEYLKPYEECQTLIDEMVNTICDVLQEPEQFPLVQGVAIGGSYGRKTVLRGNSDGTLVLFFSDLKQFQDQKRSQRDILDKTGDKLKFCLFTKWLKNNFEIQKSLDGFTIQVFTKNQRISFEVLAAFNALSKHCWVSGEKSQRSGCQTALCNL

SEQ ID NO: 138 - protein, 270 aa, Homo sapiens
  Payload ID: 15;
  Gene Symbol: OAS2;
  Gene Name: 2'-5'-oligoadenylate synthetase 2, 69/71kDa;
  ENSP ID: ENSP00000446977
MGNGESQLSSVPAQKLGWFIQEYLKPYEECQTLIDEMVNTICDVLQEPEQFPLVQGVAIGGSYGRKTVLRGNSDGLNDNPSPWIYRELKRSLDKTNASPGEFAVCFTELQQKFFDNRPGKLKDLILLIKHWHQQCQKKIKDLPSLSPYALELLTVYAWEQGCRKDNFDIAEGVRTVLELIKCQEKLCIYWMVNYNFEDETIRNILLHQLQSARPVILDPVDPTNNVSGDKICWQWLKKEAQTWLTSPNLDNELPAPSWNVLPAPLFTTPG

SEQ ID NO: 139 - protein, 60 aa, Homo sapiens
  Payload ID: 15;
  Gene Symbol: OAS2;
  Gene Name: 2'-5'-oligoadenylate synthetase 2, 69/71kDa;
  ENSP ID: ENSP00000450307
MGNGESQLSSVPAQKLGWFIQEYLKPYEECQTLIDEMVNTICDVLQEPEQFPLVQGVAIA

SEQ ID NO: 140 - protein, 726 aa, Homo sapiens
  Payload ID: 15;
  Gene Symbol: OAS2;
  Gene Name: 2'-5'-oligoadenylate synthetase 2, 69/71kDa;
  ENSP ID: ENSP00000483679
MGNGESQLSSVPAQKLGWFIQEYLKPYEECQTLIDEMVNTICDVLQEPEQFPLVQGVAIGGSYGRKTVLRGNSDGTLVLFFSDLKQFQDQKRSQRDILDKTGDKLKFCLFTKWLKNNFEIQKSLDGFTIQVFTKNQRISFEVLAAFNALSLNDNPSPWIYRELKRSLDKTNASPGEFAVCFTELQQKFFDNRPGKLKDLILLIKHWHQQCQKKIKDLPSLSPYALELLTVYAWEQGCRKDNFDIAEGVRTVLELIKCQEKLCIYWMVNYNFEDETIRNILLHQLQSARPVILDPVDPTNNVSGDKICWQWLKKEAQTWLTSPNLDNELPAPSWNVLPAPLFTTPGHLLDKFIKEFLQPNKCFLEQIDSAVNIIRTFLKENCFRQSTAKIQIVRGGSTAKGTALKTGSDADLVVFHNSLKSYTSQKNERHKIVKEIHEQLKAFWREKEEELEVSFEPPKWKAPRVLSFSLKSKVLNESVSFDVLPAFNALGQLSSGSTPSPEVYAGLIDLYKSSDLPGGEFSTCFTVLQRNFIRSRPTKLKDLIRLVKHWYKECERKLKPKGSLPPKYALELLTIYAWEQGSGVPDFDTAEGFRTVLELVTQYQQLCIFWKVNYNFEDETVRKFLLSQLQKTRPVILDPAEPTGDVGGGDRWCWHLLAKEAKEWLSSPCFKDGTGNPIPPWKVPTMQTPGSCGARIHPIVNEMFSSRSHRILNNNSKRNFRSSGNRF

SEQ ID NO: 141 - protein, 1087 aa, Homo sapiens
  Payload ID: 16;
  Gene Symbol: OAS3;
  Gene Name: 2'-5'-oligoadenylate synthetase 3, 100kDa;
  Uniprot ID:  Q9Y6K5;
  ENSP ID: ENSP00000228928
MDLYSTPAAALDRFVARRLQPRKEFVEKARRALGALAAALRERGGRLGAAAPRVLKTVKGGSSGRGTALKGGCDSELVIFLDCFKSYVDQRARRAEILSEMRASLESWWQNPVPGLRLTFPEQSVPGALQFRLTSVDLEDWMDVSLVPAFNVLGQAGSGVKPKPQVYSTLLNSGCQGGEHAACFTELRRNFVNIRPAKLKNLILLVKHWYHQVCLQGLWKETLPPVYALELLTIFAWEQGCKKDAFSLAEGLRTVLGLIQQHQHLCVFWTVNYGFEDPAVGQFLQRQLKRPRPVILDPADPTWDLGNGAAWHWDLLAQEAASCYDHPCFLRGMGDPVQSWKGPGLPRAGCSGLGHPIQLDPNQKTPENSKSLNAVYPRAGSKPPSCPAPGPTGAASIVPSVPGMALDLSQIPTKELDRFIQDHLKPSPQFQEQVKKAIDIILRCLHENCVHKASRVSKGGSFGRGTDLRDGCDVELIIFLNCFTDYKDQGPRRAEILDEMRAQLESWWQDQVPSLSLQFPEQNVPEALQFQLVSTALKSWTDVSLLPAFDAVGQLSSGTKPNPQVYSRLLTSGCQEGEHKACFAELRRNFMNIRPVKLKNLILLVKHWYRQVAAQNKGKGPAPASLPPAYALELLTIFAWEQGCRQDCFNMAQGFRTVLGLVQQHQQLCVYWTVNYSTEDPAMRMHLLGQLRKPRPLVLDPADPTWNVGHGSWELLAQEAAALGMQACFLSRDGTSVQPWDVMPALLYQTPAGDLDKFISEFLQPNRQFLAQVNKAVDTICSFLKENCFRNSPIKVIKVVKGGSSAKGTALRGRSDADLVVFLSCFSQFTEQGNKRAEIISEIRAQLEACQQERQFEVKFEVSKWENPRVLSFSLTSQTMLDQSVDFDVLPAFDALGQLVSGSRPSSQVYVDLIHSYSNAGEYSTCFTELQRDFIISRPTKLKSLIRLVKHWYQQCTKISKGRGSLPPQHGLELLTVYAWEQGGKDSQFNMAEGFRTVLELVTQYRQLCIYWTINYNAKDKTVGDFLKQQLQKPRPIILDPADPTGNLGHNARWDLLAKEAAACTSALCCMGRNGIPIQPWPVKAAV

SEQ ID NO: 142 - protein, 166 aa, Homo sapiens
  Payload ID: 16;
  Gene Symbol: OAS3;
  Gene Name: 2'-5'-oligoadenylate synthetase 3, 100kDa;
  ENSP ID: ENSP00000447323
  MOD_RES (1)..(1): Any amino acid
XTICSFLKENCFRNSPIKVIKVVKERQFEVKFEVSKWENPRVLSFSLTSQTMLDQSVDFDVLPAFDALGQLVSGSRPSSQVYVDLIHSYSNAGEYSTCFTELQRDFIISRPTKLKSLIRLVKHWYQQCTKISKGRGSLPPQHGLELLTVYAWEQGGKDSQFNMAEG

SEQ ID NO: 143 - protein, 223 aa, Homo sapiens
  Payload ID: 16;
  Gene Symbol: OAS3;
  Gene Name: 2'-5'-oligoadenylate synthetase 3, 100kDa;
  ENSP ID: ENSP00000448388
MDLYSTPAAALDRFVARRLQPRKEFVEKARRALGALAAALRERGGRLGAAAPRVLKTVKGGSSGRGTALKGGCDSELVIFLDCFKSYVDQRARRAEILSEMRASLESWWQNPVPGLRLTFPEQSVPGALQFRLTSVDLEDWMDVSLVPAFNVLGQAGSGVKPKPQVYSTLLNSGCQGGEHAACFTELRRNFVNIRPAKLKNLILLVKHWYHQVKPLGRVSPDM

SEQ ID NO: 144 - protein, 177 aa, Homo sapiens
  Payload ID: 16;
  Gene Symbol: OAS3;
  Gene Name: 2'-5'-oligoadenylate synthetase 3, 100kDa;
  ENSP ID: ENSP00000449299
MDLYSTPAAALDRFVARRLQPRKEFVEKARRALGALAAALRERGGRLGAAAPRVLKTVKGGSSGRGTALKGGCDSELVIFLDCFKSYVDQRARRAEILSEMRASLESWWQNPVPGLRLTFPEQSVPGALQFRLTSVDLEDWMDVSLVPAFNVLGEGFLDHSRVGGKRSLGTTQDFQF

SEQ ID NO: 145 - protein, 514 aa, Homo sapiens
  Payload ID: 17;
  Gene Symbol: OASL;
  Gene Name: 2'-5'-oligoadenylate synthetase-like;
  Uniprot ID:  Q15646;
  ENSP ID: ENSP00000257570
MALMQELYSTPASRLDSFVAQWLQPHREWKEEVLDAVRTVEEFLRQEHFQGKRGLDQDVRVLKVVKVGSFGNGTVLRSTREVELVAFLSCFHSFQEAAKHHKDVLRLIWKTMWQSQDLLDLGLEDLRMEQRVPDALVFTIQTRGTAEPITVTIVPAYRALGPSLPNSQPPPEVYVSLIKACGGPGNFCPSFSELQRNFVKHRPTKLKSLLRLVKHWYQQYVKARSPRANLPPLYALELLTIYAWEMGTEEDENFMLDEGFTTVMDLLLEYEVICIYWTKYYTLHNAIIEDCVRKQLKKERPIILDPADPTLNVAEGYRWDIVAQRASQCLKQDCCYDNRENPISSWNVKRARDIHLTVEQRGYPDFNLIVNPYEPIRKVKEKIRRTRGYSGLQRLSFQVPGSERQLLSSRCSLAKYGIFSHTHIYLLETIPSEIQVFVKNPDGGSYAYAINPNSFILGLKQQIEDQQGLPKKQQQLEFQGQVLQDWLGLGIYGIQDSDTLILSKKKGEALFPAS

SEQ ID NO: 146 - protein, 255 aa, Homo sapiens
  Payload ID: 17;
  Gene Symbol: OASL;
  Gene Name: 2'-5'-oligoadenylate synthetase-like;
  Uniprot ID:  Q15646;
  ENSP ID: ENSP00000341125
MALMQELYSTPASRLDSFVAQWLQPHREWKEEVLDAVRTVEEFLRQEHFQGKRGLDQDVRVLKVVKVGSFGNGTVLRSTREVELVAFLSCFHSFQEAAKHHKDVLRLIWKTMWQSQDLLDLGLEDLRMEQRVPDALVFTIQTRGTAEPITVTIVPAYRALGPSLPNSQPPPEVYVSLIKACGGPGNFCPSFSELQRNFVKHRPTKLKSLLRLVKHWYQQAHHPGSGRPHPQRGRRVQMGHRCSEGLPVPETGLLL

SEQ ID NO: 147 - protein, 153 aa, Homo sapiens
  Payload ID: 17;
  Gene Symbol: OASL;
  Gene Name: 2'-5'-oligoadenylate synthetase-like;
  ENSP ID: ENSP00000444127
  MOD_RES (1)..(1): Any amino acid
XHTSLQAGLLRGSVAAAPPGVEGRGARRCADRGGVSEAGAFPGEAWAGPGCAGAEGSQGPSLPNSQPPPEVYVSLIKACGGPGNFCPSFSELQRNFVKHRPTKLKSLLRLVKHWYQQAHHPGSGRPHPQRGRRVQMGHRCSEGLPVPETGLLL

SEQ ID NO: 148 - protein, 384 aa, Homo sapiens
  Payload ID: 17;
  Gene Symbol: OASL;
  Gene Name: 2'-5'-oligoadenylate synthetase-like;
  Uniprot ID:  Q15646;
  ENSP ID: ENSP00000479512
MALMQELYSTPASRLDSFVAQWLQPHREWKEEVLDAVRTVEEFLRQEHFQGKRGLDQDVRVLKVVKVGSFGNGTVLRSTREVELVAFLSCFHSFQEAAKHHKDVLRLIWKTMWQSQDLLDLGLEDLRMEQRVPDALVFTIQTRGTAEPITVTIVPAYRALGPSLPNSQPPPEVYVSLIKACGGPGNFCPSFSELQRNFVKHRPTKLKSLLRLVKHWYQQRARDIHLTVEQRGYPDFNLIVNPYEPIRKVKEKIRRTRGYSGLQRLSFQVPGSERQLLSSRCSLAKYGIFSHTHIYLLETIPSEIQVFVKNPDGGSYAYAINPNSFILGLKQQIEDQQGLPKKQQQLEFQGQVLQDWLGLGIYGIQDSDTLILSKKKGEALFPAS

SEQ ID NO: 149 - protein, 270 aa, Homo sapiens
  Payload ID: 18;
  Gene Symbol: ADO;
  Gene Name: 2-aminoethanethiol (cysteamine) dioxygenase;
  Uniprot ID:  Q96SZ5;
  ENSP ID: ENSP00000362888
MPRDNMASLIQRIARQACLTFRGSGGGRGASDRDAASGPEAPMQPGFPENLSKLKSLLTQLRAEDLNIAPRKATLQPLPPNLPPVTYMHIYETDGFSLGVFLLKSGTSIPLHDHPGMHGMLKVLYGTVRISCMDKLDAGGGQRPRALPPEQQFEPPLQPREREAVRPGVLRSRAEYTEASGPCILTPHRDNLHQIDAVEGPAAFLDILAPPYDPDDGRDCHYYRVLEPVRPKEASSSACDLPREVWLLETPQADDFWCEGEPYPGPKVFP

SEQ ID NO: 150 - protein, 174 aa, Homo sapiens
  Payload ID: 19;
  Gene Symbol: DNPH1;
  Gene Name: 2'-deoxynucleoside 5'-phosphate N-hydrolase 1;
  Uniprot ID:  O43598;
  ENSP ID: ENSP00000230431
MAAAMVPGRSESWERGEPGRPALYFCGSIRGGREDRTLYERIVSRLRRFGTVLTEHVAAAELGARGEEAAGGDRLIHEQDLEWLQQADVVVAEVTQPSLGVGYELGRAVAFNKRILCLFRPQSGRVLSAMIRGAADGSRFQVWDYEEGEVEALLDRYFEADPPGQVAASPDPTT

SEQ ID NO: 151 - protein, 148 aa, Homo sapiens
  Payload ID: 19;
  Gene Symbol: DNPH1;
  Gene Name: 2'-deoxynucleoside 5'-phosphate N-hydrolase 1;
  Uniprot ID:  O43598;
  ENSP ID: ENSP00000377556
MAAAMVPGRSESWERGEPGRPALYFCGSIRGGREDRTLYERIVSRLRRFGTVLTEHVAAAELGARGEEAAGGDRLIHEQDLEWLQQADVVVAEVTQPSLGVGYELGRAVAFNKRILCLFRPQSGRGEHPKPPSWLSMDPALSSFPGGL

SEQ ID NO: 152 - protein, 243 aa, Homo sapiens
  Payload ID: 19;
  Gene Symbol: DNPH1;
  Gene Name: 2'-deoxynucleoside 5'-phosphate N-hydrolase 1;
  ENSP ID: ENSP00000422440
AAAMVPGRSESWERGEPGRPALYFCGSIRGGREDRTLYERIVSRLRRFGTVLTEHVAAAELGARGEALGPRDAGTRARTWLGWQGPGLSAPPTPGSCAPGARSPPSYPGAPSSAPAREGNGPGLGLRGSQQACGWEEAAGGDRLIHEQDLEWLQQADVVVAEVTQPSLGVGYELGRAVAFNKRILCLFRPQSGRVLSAMIRGAADGSRFQVWDYEEGEVEALLDRYFEADPPGQVAASPDPTT

SEQ ID NO: 153 - protein, 578 aa, Homo sapiens [sequence omitted]

SEQ ID NO: 154 - protein, 119 aa, Homo sapiens
  Payload ID: 20;
  Gene Symbol: HACL1;
  Gene Name: 2-hydroxyacyl-CoA lyase 1;
  ENSP ID: ENSP00000373289
MPDSNFAERSEEQVSGAKVIAQALKTQDVEYIFGIVGIPVTEIAIAAQQLGIKYIGMRNEQAACYAASAIGYLTSRPGVCLVVSGPGLIHALGGMANANMNCWLKLVDYIPSSLPAQAA

SEQ ID NO: 155 - protein, 551 aa, Homo sapiens
  Payload ID: 20;
  Gene Symbol: HACL1;
  Gene Name: 2-hydroxyacyl-CoA lyase 1;
  Uniprot ID:  Q9UJ83;
  ENSP ID: ENSP00000390699
MPDSNFAERSEEQVSGAKVIAQALKTQDVEYIFGIVGIPVTEIAIAAQQLGIKYIGMRNEQAACYAASAIGYLTSRPLLVIGGSSERNQETMGAFQEFPQVEACRLYTKFSARPSSIEAIPFVIEKAVRSSIYGRPGACYVDIPADFVNLQVNVNSIKYMERCMSPPISMAETSAVCTAASVIRNAKQPLLIIGKGAAYAHAEESIKKLVEQYKLPFLPTPMGKGVVPDNHPYCVGAARSRALQFADVIVLFGARLNWILHFGLPPRYQPDVKFIQVDICAEELGNNVKPAVTLLGNIHAVTKQLLEELDKTPWQYPPESKWWKTLREKMKSNEAASKELASKKSLPMNYYTVFYHVQEQLPRDCFVVSEGANTMDIGRTVLQNYLPRHRLDAGTFGTMGVGLGFAIAAAVVAKDRSPGQWIICVEGDSAFGFSGMEVETICRYNLPIILLVVNNNGIYQGFDTDTWKEMLKFQDATAVVPPMCLLPNSHYEQVMTAFGGKGYFVQTPEELQKSLRQSLADTTKPSLINIMIEPQATRKAQDFHWLTRSNM

SEQ ID NO: 156 - protein, 244 aa, Homo sapiens
  Payload ID: 20;
  Gene Symbol: HACL1;
  Gene Name: 2-hydroxyacyl-CoA lyase 1;
  ENSP ID: ENSP00000391393
MPDSNFAERSEEQVSGAKVIAQALKTQDVEYIFGIVGIPVTEIAIAAQQLGIKYIGMRNEQAACYAASAIGYLTSRPLLVIGGSSERNQETMGAFQEFPQVEACRLYTKFSARPSSIEAIPFVIEKAVRSSIYGRPGACYVDIPADFVNLQVNVNSIKYMERCMSPPISMAETSAVCTAASVIRNAKQPLLIIGKGAAYAHAEESIKKLVEQYKLPFLPTPMGKGVVPDNHPYCVGAARSRCVA

SEQ ID NO: 157 - protein, 137 aa, Homo sapiens
  Payload ID: 20;
  Gene Symbol: HACL1;
  Gene Name: 2-hydroxyacyl-CoA lyase 1;
  ENSP ID: ENSP00000392796
MPDSNFAERSEEQVSGAKVIAQALKTQDVEYIFGIVGIPVTEIAIAAQQLGIKYIGMRNEQAACYAASAIGYLTSRPGVCLVVSGPGLIHALGGMANANMNCWPLLVIGGSSERNQETMGAFQEFPQVHGTLHVTSY

SEQ ID NO: 158 - protein, 337 aa, Homo sapiens
  Payload ID: 20;
  Gene Symbol: HACL1;
  Gene Name: 2-hydroxyacyl-CoA lyase 1;
  ENSP ID: ENSP00000395278
MPDSNFAERSEEQVSGAKVIAQALKTQDVEYIFGIVGIPVTEIAIAAQQLGIKYIGMRNEQAVDICAEELGNNVKPAVTLLGNIHAVTKQLLEELDKTPWQYPPESKWWKTLREKMKSNEAASKELASKKSLPMNYYTVFYHVQEQLPRDCFVVSEGANTMDIGRTVLQNYLPRHRLDAGTFGTMGVGLGFAIAAAVVAKDRSPGQWIICVEGDSAFGFSGMEVETICRYNLPIILLVVNNNGIYQGFDTDTWKEMLKFQDATAVVPPMCLLPNSHYEQVMTAFGGKGYFVQTPEELQKSLRQSLADTTKPSLINIMIEPQATRKAQDFHWLTRSNM

SEQ ID NO: 159 - protein, 157 aa, Homo sapiens
  Payload ID: 20;
  Gene Symbol: HACL1;
  Gene Name: 2-hydroxyacyl-CoA lyase 1;
  ENSP ID: ENSP00000395352
MPDSNFAERSEEQVSGAKVIAQALKTQDVEYIFGIVGIPVTEIAIAAQQLGIKYIGMRNEQAVEACRLYTKFSARPSSIEAIPFVIEKAVRSSIYGRPGACYVDIPADFVNLQVNVNSIKYMERCMSPPISMAETSAVCTAASVIRNAKQPLLIIGK

SEQ ID NO: 160 - protein, 496 aa, Homo sapiens
  Payload ID: 20;
  Gene Symbol: HACL1;
  Gene Name: 2-hydroxyacyl-CoA lyase 1;
  Uniprot ID:  Q9UJ83;
  ENSP ID: ENSP00000403656
MPDSNFAERSEEQVSGAKVIAQALKTQDVEYIFGIVGIPVTEIAIAAQQLGIKYIGMRNEQAACYAASAIGYLTSRPGVCLVVSGPGLIHALGGMANANMNCWYMERCMSPPISMAETSAVCTAASVIRNAKQPLLIIGKGAAYAHAEESIKKLVEQYKLPFLPTPMGKGVVPDNHPYCVGAARSRALQFADVIVLFGARLNWILHFGLPPRYQPDVKFIQVDICAEELGNNVKPAVTLLGNIHAVTKQLLEELDKTPWQYPPESKWWKTLREKMKSNEAASKELASKKSLPMNYYTVFYHVQEQLPRDCFVVSEGANTMDIGRTVLQNYLPRHRLDAGTFGTMGVGLGFAIAAAVVAKDRSPGQWIICVEGDSAFGFSGMEVETICRYNLPIILLVVNNNGIYQGFDTDTWKEMLKFQDATAVVPPMCLLPNSHYEQVMTAFGGKGYFVQTPEELQKSLRQSLADTTKPSLINIMIEPQATRKAQDFHWLTRSNM

SEQ ID NO: 161 - protein, 518 aa, Homo sapiens
  Payload ID: 20;
  Gene Symbol: HACL1;
  Gene Name: 2-hydroxyacyl-CoA lyase 1;
  Uniprot ID:  Q9UJ83;
  ENSP ID: ENSP00000404883
MPDSNFAERSEEQVSGAKVIAQALKTQDVEYIFGIVGIPVTEIAIAAQQLGIKYIGMRNEQAACYAASAIGYLTSRPGVCLVVSGPGLIHALGGMANANMNCWPLLVIGGSSERNQETMGAFQEFPQAVRSSIYGRPGACYVDIPADFVNLQVNVNSIKYMERCMSPPISMAETSAVCTAASVIRNAKQPLLIIGKGAAYAHAEESIKKLVEQYKLPFLPTPMGKGVVPDNHPYCVGAARSRALQFADVIVLFGARLNWILHFGLPPRYQPDVKFIQVDICAEELGNNVKPAVTLLGNIHAVTKQELASKKSLPMNYYTVFYHVQEQLPRDCFVVSEGANTMDIGRTVLQNYLPRHRLDAGTFGTMGVGLGFAIAAAVVAKDRSPGQWIICVEGDSAFGFSGMEVETICRYNLPIILLVVNNNGIYQGFDTDTWKEMLKFQDATAVVPPMCLLPNSHYEQVMTAFGGKGYFVQTPEELQKSLRQSLADTTKPSLINIMIEPQATRKAQDFHWLTRSNM

SEQ ID NO: 162 - protein, 119 aa, Homo sapiens; identical to SEQ ID NO: 154
  Payload ID: 20;
  Gene Symbol: HACL1;
  Gene Name: 2-hydroxyacyl-CoA lyase 1;
  ENSP ID: ENSP00000486684

SEQ ID NO: 163 - protein, 39 aa, Homo sapiens
  Payload ID: 21;
  Gene Symbol: OGFOD1;
  Gene Name: 2-oxoglutarate and iron-dependent oxygenase domain containing 1;
  ENSP ID: ENSP00000337196
MDMDPFLHCVIPNFIQSQDFLEGLQKELMNLDFHENLMI

SEQ ID NO: 164 - protein, 46 aa, Homo sapiens
  Payload ID: 21;
  Gene Symbol: OGFOD1;
  Gene Name: 2-oxoglutarate and iron-dependent oxygenase domain containing 1;
  ENSP ID: ENSP00000455149
MDMDPFLHCVIPNFIQSQDFLEGLQKELMNLDFHEKYNDLYKFQQS

SEQ ID NO: 165 - protein, 109 aa, Homo sapiens
  Payload ID: 21;
  Gene Symbol: OGFOD1;
  Gene Name: 2-oxoglutarate and iron-dependent oxygenase domain containing 1;
  ENSP ID: ENSP00000456016
MNGKRPAEPGPARVGKKGKKEVMAEFSDAVTEETLKKQVAEAWSRRTPFSHEVIVMDMDPFLHCVIPNFIQSQDFLEGLQKELMNLDFHEKYNDLYKFQQEIPFFSLFS

SEQ ID NO: 166 - protein, 164 aa, Homo sapiens
  Payload ID: 21;
  Gene Symbol: OGFOD1;
  Gene Name: 2-oxoglutarate and iron-dependent oxygenase domain containing 1;
  ENSP ID: ENSP00000456111
MNGKRPAEPGPARVGKKGKKEVMAEFSDAVTEETLKKQVAEAWSRRTPFKVIVMDMDPFLHCVIPNFIQSQDFLEGLQKELMNLDFHEKYNDLYKFQQSDDLKKRREPHISTLRKILFEDFRSWLSDISKIDLESTIDMSCAKYEFTDALLCHDDELEGRRIAF

SEQ ID NO: 167 - protein, 542 aa, Homo sapiens
  Payload ID: 21;
  Gene Symbol: OGFOD1;
  Gene Name: 2-oxoglutarate and iron-dependent oxygenase domain containing 1;
  Uniprot ID:  Q8N543;
  ENSP ID: ENSP00000457258
MNGKRPAEPGPARVGKKGKKEVMAEFSDAVTEETLKKQVAEAWSRRTPFSHEVIVMDMDPFLHCVIPNFIQSQDFLEGLQKELMNLDFHEKYNDLYKFQQSDDLKKRREPHISTLRKILFEDFRSWLSDISKIDLESTIDMSCAKYEFTDALLCHDDELEGRRIAFILYLVPPWDRSMGGTLDLYSIDEHFQPKQIVKSLIPSWNKLVFFEVSPVSFHQVSEVLSEEKSRLSISGWFHGPSLTRPPNYFEPPIPRSPHIPQDHEILYDWINPTYLDMDYQVQIQEEFEESSEILLKEFLKPEKFTKVCEALEHGHVEWSSRGPPNKRFYEKAEESKLPEILKECMKLFRSEALFLLLSNFTGLKLHFLAPSEEDEMNDKKEAETTDITEEGTSHSPPEPENNQMAISNNSQQSNEQTDPEPEENETKKESSVPMCQGELRHWKTGHYTLIHDHSKAEFALDLILYCGCEGWEPEYGGFTSYIAKGEDEELLTVNPESNSLALVYRDRETLKFVKHINHRSLEQKKTFPNRTGFWDFSFIYYE

SEQ ID NO: 168 - protein, 175 aa, Homo sapiens
  Payload ID: 21;
  Gene Symbol: OGFOD1;
  Gene Name: 2-oxoglutarate and iron-dependent oxygenase domain containing 1;
  ENSP ID: ENSP00000457553
MDMDPFLHCVIPNFIQSQDFLEGLQKELMNLDFHEKYNDLYKFQQSDDLKKRREPHISTLRKILFEDFRSWLSDISKIDLESTIDMSCAKYEFTDALLCHDDELEGRRIAFILYLVPPWDRSMGGTLDLYSIDEHFQPKQIVKSLIPSWNKLVFFEVSPVSFHQVSEVLSEEKSR

SEQ ID NO: 169 - protein, 499 aa, Homo sapiens
  Payload ID: 21;
  Gene Symbol: OGFOD1;
  Gene Name: 2-oxoglutarate and iron-dependent oxygenase domain containing 1;
  ENSP ID: ENSP00000457746
MNGKRPAEPGPARVGKKGKKEVMAEFSDAVTEETLKKQVAEAWSRRTPFSHEVIVMDMDPFLHCVIPNFIQSQDFLEGLQKELMNLDFHEKYNDLYKFQQSDDLKKRREPHISTLRKILFEDFRSWLSDISKIDLESTIDMSCAKYEFTDALLCHDDELEGRRIAFILYLVPPWDRSMGGTLDLYSIDEHFQPKQIVKSLIPSWNKLVFFEVSPVSFHQHEILYDWINPTYLDMDYQVQIQEEFEESSEILLKEFLKPEKFTKVCEALEHGHVEWSSRGPPNKRFYEKAEESKLPEILKECMKLFRSEALFLLLSNFTGLKLHFLAPSEEDEMNDKKEAETTDITEEGTSHSPPEPENNQMAISNNSQQSNEQTDPEPEENETKKESSVPMCQGELRHWKTGHYTLIHDHSKAEFALDLILYCGCEGWEPEYGGFTSYIAKGEDEELLTVNPESNSLALVYRDRETLKFVKHINHRSLEQKKTFPNRTGFWDFSFIYYE

SEQ ID NO: 170 - protein, 350 aa, Homo sapiens
  Payload ID: 22;
  Gene Symbol: OGFOD2;
  Gene Name: 2-oxoglutarate and iron-dependent oxygenase domain containing 2;
  Uniprot ID:  Q6N063;
  ENSP ID: ENSP00000228922
MATVGAPRHFCRCACFCTDNLYVARYGLHVRFRGEQQLRRDYGPILRSRGCVSAKDFQQLLAELEQEVERRQRLGQESAARKALIASSYHPARPEVYDSLQDAALAPEFLAVTEYSVSPDADLKGLLQRLETVSEEKRIYRVPVFTAPFCQALLEELEHFEQSDMPKGRPNTMNNYGVLLHELGLDEPLMTPLRERFLQPLMALLYPDCGGGRLDSHRAFVVKYAPGQDLELGCHYDNAELTLNVALGKVFTGGALYFGGLFQAPTALTEPLEVEHVVGQGVLHRGGQLHGARPLGTGERWNLVVWLRASAVRNSLCPMCCREPDLVDDEGFGDGFTREEPATVDVCALT

SEQ ID NO: 171 - protein, 290 aa, Homo sapiens
  Payload ID: 22;
  Gene Symbol: OGFOD2;
  Gene Name: 2-oxoglutarate and iron-dependent oxygenase domain containing 2;
  Uniprot ID:  Q6N063;
  ENSP ID: ENSP00000380544
MVELEQEVERRQRLGQESAARKALIASSYHPARPEVYDSLQDAALAPEFLAVTEYSVSPDADLKGLLQRLETVSEEKRIYRVPVFTAPFCQALLEELEHFEQSDMPKGRPNTMNNYGVLLHELGLDEPLMTPLRERFLQPLMALLYPDCGGGRLDSHRAFVVKYAPGQDLELGCHYDNAELTLNVALGKVFTGGALYFGGLFQAPTALTEPLEVEHVVGQGVLHRGGQLHGARPLGTGERWNLVVWLRASAVRNSLCPMCCREPDLVDDEGFGDGFTREEPATVDVCALT

SEQ ID NO: 172 - protein, 186 aa, Homo sapiens
  Payload ID: 22;
  Gene Symbol: OGFOD2;
  Gene Name: 2-oxoglutarate and iron-dependent oxygenase domain containing 2;
  Uniprot ID:  Q6N063;
  ENSP ID: ENSP00000394175
MPKGRPNTMNNYGVLLHELGLDEPLMTPLRERFLQPLMALLYPDCGGGRLDSHRAFVVKYAPGQDLELGCHYDNAELTLNVALGKVFTGGALYFGGLFQAPTALTEPLEVEHVVGQGVLHRGGQLHGARPLGTGERWNLVVWLRASAVRNSLCPMCCREPDLVDDEGFGDGFTREEPATVDVCALT

SEQ ID NO: 173 - protein, 160 aa, Homo sapiens
  Payload ID: 22;
  Gene Symbol: OGFOD2;
  Gene Name: 2-oxoglutarate and iron-dependent oxygenase domain containing 2;
  ENSP ID: ENSP00000438003
MPKGRPNTMNNYGVLLHELGLDEPLMTPLRERFLQPLMALLYPDCGGGRLDSHRAFVVKYAPGQDLELGCHYDNAELTLNVALGKVFTGGALYFGGLFQAPTALTEPLEVEHVVGQGVLHRGGQLHGARPLGTGERWNLVVWLRASAVRNSLCPMCCREP

SEQ ID NO: 174 - protein, 186 aa, Homo sapiens; identical to SEQ ID NO: 172
  Payload ID: 22;
  Gene Symbol: OGFOD2;
  Gene Name: 2-oxoglutarate and iron-dependent oxygenase domain containing 2;
  Uniprot ID:  Q6N063;
  ENSP ID: ENSP00000438192

SEQ ID NO: 175 - protein, 186 aa, Homo sapiens; identical to SEQ ID NO: 172
  Payload ID: 22;
  Gene Symbol: OGFOD2;
  Gene Name: 2-oxoglutarate and iron-dependent oxygenase domain containing 2;
  Uniprot ID:  Q6N063;
  ENSP ID: ENSP00000438327

SEQ ID NO: 176 - protein, 129 aa, Homo sapiens
  Payload ID: 22;
  Gene Symbol: OGFOD2;
  Gene Name: 2-oxoglutarate and iron-dependent oxygenase domain containing 2;
  Uniprot ID:  Q6N063;
  ENSP ID: ENSP00000439667
MATVGAPRHFCRCACFCTDNLYVARYGLHVRFRGEQQLRRDYGPILRSRGCVSAKDFQQLLAEWPQEDGRPHLVTTLCHPSLSRRWSGGSGWGRSQQLGKPSSRVPTTRHGLRSTTHCRMQLWPPSSWP

SEQ ID NO: 177 - protein, 207 aa, Homo sapiens
  Payload ID: 22;
  Gene Symbol: OGFOD2;
  Gene Name: 2-oxoglutarate and iron-dependent oxygenase domain containing 2;
  ENSP ID: ENSP00000442083
MATVGAPRHFCRCACFCTDNLYVARYGLHVRFRGEQQLRRDYGPILRSRGCVSAKDFQQLLAEAAARAAAPLPPPPSPGVSGGKLPRRVLSNLWNTGLGHDCLLSLCGPRWLSFFICTVASGGWEAPPGNNPVPPQLEQEVERRQRLGQESAARKALIASSYHPARPEVYDSLQDAALAPEFLAVTEYSVSPDADLKGLLQRLETVS

SEQ ID NO: 178 - protein, 160 aa, Homo sapiens; identical to SEQ ID NO: 173
  Payload ID: 22;
  Gene Symbol: OGFOD2;
  Gene Name: 2-oxoglutarate and iron-dependent oxygenase domain containing 2;
  ENSP ID: ENSP00000442476

SEQ ID NO: 179 - protein, 186 aa, Homo sapiens; identical to SEQ ID NO: 172
  Payload ID: 22;
  Gene Symbol: OGFOD2;
  Gene Name: 2-oxoglutarate and iron-dependent oxygenase domain containing 2;
  Uniprot ID:  Q6N063;
  ENSP ID: ENSP00000442817

SEQ ID NO: 180 - protein, 186 aa, Homo sapiens; identical to SEQ ID NO: 172
  Payload ID: 22;
  Gene Symbol: OGFOD2;
  Gene Name: 2-oxoglutarate and iron-dependent oxygenase domain containing 2;
  Uniprot ID:  Q6N063;
  ENSP ID: ENSP00000444436

SEQ ID NO: 181 - protein, 186 aa, Homo sapiens; identical to SEQ ID NO: 172
  Payload ID: 22;
  Gene Symbol: OGFOD2;
  Gene Name: 2-oxoglutarate and iron-dependent oxygenase domain containing 2;
  Uniprot ID:  Q6N063;
  ENSP ID: ENSP00000444608

SEQ ID NO: 182 - protein, 319 aa, Homo sapiens
  Payload ID: 23;
  Gene Symbol: OGFOD3;
  Gene Name: 2-oxoglutarate and iron-dependent oxygenase domain containing 3;
  Uniprot ID:  Q6PK18;
  ENSP ID: ENSP00000320116
MAPQRRAATKAPEGNGAAERRNRSSTKKDRAPREVQRLWQRPWLRTAGLGAGFVLTALLLWSSLGADDGVAEVLARRGEVVAGRFIEVPCSEDYDSHRRFEGCTPRKCGRGVTDVVITREEAERIRSVAEKGLSLGGSDGGASILDLHSGALSVGKHFVNLYRYFGDKIQNIFSEEDFRLYREVRQKVQLTIAEAFGISASSLHLTKPTFFSRINSTEARTAHDEYWHAHVDKVTYGSFDYTSLLYLSNYLEDFGGGRFMFMEEGANKTVEPRAGRVSFFTSGSENLHRVEKVHWGTRYAITIAFSCNPDHGIEDPAFP

SEQ ID NO: 183 - protein, 331 aa, Homo sapiens
  Payload ID: 23;
  Gene Symbol: OGFOD3;
  Gene Name: 2-oxoglutarate and iron-dependent oxygenase domain containing 3;
  Uniprot ID:  Q6PK18;
  ENSP ID: ENSP00000330075
MAPQRRAATKAPEGNGAAERRNRSSTKKDRAPREVQRLWQRPWLRTAGLGAGFVLTALLLWSSLGADDGVAEVLARRGEVVAGRFIEVPCSEDYDSHRRFEGCTPRKCGRGVTDVVITREEAERIRSVAEKGLSLGGSDGGASILDLHSGALSVGKHFVNLYRYFGDKIQNIFSEEDFRLYREVRQKVQLTIAEAFGISASSLHLTKPTFFSRINSTEARTAHDEYWHAHVDKVTYGSFDYTSLLYLSNYLEDFGGGRFMFMEEGANKTVEPRAGCFCFRMMSCGFQEVNGPRASEAAGAKAGVRCPPGTHHPPERGETHAILEAESIAYC

SEQ ID NO: 184 - protein, 126 aa, Homo sapiens
  Payload ID: 23;
  Gene Symbol: OGFOD3;
  Gene Name: 2-oxoglutarate and iron-dependent oxygenase domain containing 3;
  ENSP ID: ENSP00000463566
MAPQRRAATKAPEGNGAAERRNRSSTKKDRAPREVQRLWQRPWLRTAGLGAGFVLTALLLWSSLGADDGVAEVLARRGEVVAGRFIEVPCSEDYDSHRRLHSPKVRQRCHRCRHHQGGSGADSQRS

SEQ ID NO: 185 - protein, 241 aa, Homo sapiens
  Payload ID: 23;
  Gene Symbol: OGFOD3;
  Gene Name: 2-oxoglutarate and iron-dependent oxygenase domain containing 3;
  ENSP ID: ENSP00000464195
  MOD_RES (1)..(1): Any amino acid
XSLGADDGVAEVLARRGEVVAGRFIEVPCSEDYDSHRRLHSPKVRQRCHRCRHHQGGSGADSQASILDLHSGALSVGKHFVNLYRYFGDKIQNIFSEEDFRLYREVRQKVQLTIAEAFGISASSLHLTKPTFFSRINSTEARTAHDEYWHAHVDKVTYGSFDYTSLLYLSNYLEDFGGGRFMFMEEGANKTVEPRAGRVSFFTSGSENLHRVEKVHWGTRYAITIAFSCNPDHGIEDPAFP

SEQ ID NO: 186 - protein, 95 aa, Homo sapiens
  Payload ID: 23;
  Gene Symbol: OGFOD3;
  Gene Name: 2-oxoglutarate and iron-dependent oxygenase domain containing 3;
  ENSP ID: ENSP00000466117
  MOD_RES (1)..(1): Any amino acid
XDEYWHAHVDKVTYGSFDYTSLLYLSNYLEDFGGGRFMFMEEGANKTVEPRAGEGFGRPASASRSPACLPSPQKSQSQQFCGKMKNSQSTRQAFS

SEQ ID NO: 187 - protein, 15 aa, Homo sapiens
  Payload ID: 23;
  Gene Symbol: OGFOD3;
  Gene Name: 2-oxoglutarate and iron-dependent oxygenase domain containing 3;
  ENSP ID: ENSP00000466184
MFMEEGANKTVEPRA

SEQ ID NO: 188 - protein, 219 aa, Homo sapiens
  Payload ID: 23;
  Gene Symbol: OGFOD3;
  Gene Name: 2-oxoglutarate and iron-dependent oxygenase domain containing 3;
  ENSP ID: ENSP00000467074
  MOD_RES (1)..(1): Any amino acid
XVNLYRYFGDKIQNIFSEEDFRLYREVRQKVQLTIAEAFGISASSLHLTKPTFFSRINSTEARTAHDEYWHAHVDKVTYGSFDYTSLLYLSNYLEDFGGGRFMFMEEGANKTVEPRAVVLSHLCIRGRVWTSSLCKQEPSLSALTPEVPVTAVLWENEKLTEHKTGVFLRSQAAEASWDSKLHNFLAYFDLSHFKHDKYLSQTFCITIFFQIIKTTCLL

SEQ ID NO: 189 - protein, 480 aa, Homo sapiens
  Payload ID: 24;
  Gene Symbol: PXYLP1;
  Gene Name: 2-phosphoxylose phosphatase 1;
  Uniprot ID:  Q8TE99;
  ENSP ID: ENSP00000286353
MLFRNRFLLLLALAALLAFVSLSLQFFHLIPVSTPKNGMSSKSRKRIMPDPVTEPPVTDPVYEALLYCNIPSVAERSMEGHAPHHFKLVSVHVFIRHGDRYPLYVIPKTKRPEIDCTLVANRKPYHPKLEAFISHMSKGSGASFESPLNSLPLYPNHPLCEMGELTQTGVVQHLQNGQLLRDIYLKKHKLLPNDWSADQLYLETTGKSRTLQSGLALLYGFLPDFDWKKIYFRHQPSALFCSGSCYCPVRNQYLEKEQRRQYLLRLKNSQLEKTYGEMAKIVDVPTKQLRAANPIDSMLCHFCHNVSFPCTRNGCVDMEHFKVIKTHQIEDERERREKKLYFGYSLLGAHPILNQTIGRMQRATEGRKEELFALYSAHDVTLSPVLSALGLSEARFPRFAARLIFELWQDREKPSEHSVRILYNGVDVTFHTSFCQDHHKRSPKPMCPLENLVRFVKRDMFVALGGSGTNYYDACHREGF

SEQ ID NO: 190 - protein, 480 aa, Homo sapiens; identical to SEQ ID NO: 189
  Payload ID: 24;
  Gene Symbol: PXYLP1;
  Gene Name: 2-phosphoxylose phosphatase 1;
  Uniprot ID:  Q8TE99;
  ENSP ID: ENSP00000376733

SEQ ID NO: 191 - protein, 145 aa, Homo sapiens
  Payload ID: 24;
  Gene Symbol: PXYLP1;
  Gene Name: 2-phosphoxylose phosphatase 1;
  ENSP ID: ENSP00000421271
MLFRNRFLLLLALAALLAFVSLSLQFFHLIPVSTPKNGMSSKSRKRIMPDPVTEPPVTDPVYEALLYCNIPSVAERSMEGHAPHHFKLVSVHVFIRHGDRYPLYVIPKTKRPEIDCTLVANRKPYHPKLEAFISHMSKGSGASFE

SEQ ID NO: 192 - protein, 442 aa, Homo sapiens
  Payload ID: 24;
  Gene Symbol: PXYLP1;
  Gene Name: 2-phosphoxylose phosphatase 1;
  ENSP ID: ENSP00000422558
MSSKSRKRIMPDPVTEPPVTDPVYEALLYCNIPSVAERSMEGHAPHHFKLVSVHVFIRHGDRYPLYVIPKTKRPEIDCTLVANRKPYHPKLEAFISHMSKGSGASFESPLNSLPLYPNHPLCEMGELTQTGVVQHLQNGQLLRDIYLKKHKLLPNDWSADQLYLETTGKSRTLQSGLALLYGFLPDFDWKKIYFRHQPSALFCSGSCYCPVRNQYLEKEQRRQYLLRLKNSQLEKTYGEMAKIVDVPTKQLRAANPIDSMLCHFCHNVSFPCTRNGCVDMEHFKVIKTHQIEDERERREKKLYFGYSLLGAHPILNQTIGRMQRATEGRKEELFALYSAHDVTLSPVLSALGLSEARFPRFAARLIFELWQDREKPSEHSVRILYNGVDVTFHTSFCQDHHKRSPKPMCPLENLVRFVKRDMFVALGGSGTNYYDACHREGF

SEQ ID NO: 193 - protein, 471 aa, Homo sapiens
  Payload ID: 24;
  Gene Symbol: PXYLP1;
  Gene Name: 2-phosphoxylose phosphatase 1;
  ENSP ID: ENSP00000422901
MRYFIKSMEHSVCPSSAVHLIPVSTPKNGMSSKSRKRIMPDPVTEPPVTDPVYEALLYCNIPSVAERSMEGHAPHHFKLVSVHVFIRHGDRYPLYVIPKTKRPEIDCTLVANRKPYHPKLEAFISHMSKGSGASFESPLNSLPLYPNHPLCEMGELTQTGVVQHLQNGQLLRDIYLKKHKLLPNDWSADQLYLETTGKSRTLQSGLALLYGFLPDFDWKKIYFRHQPSALFCSGSCYCPVRNQYLEKEQRRQYLLRLKNSQLEKTYGEMAKIVDVPTKQLRAANPIDSMLCHFCHNVSFPCTRNGCVDMEHFKVIKTHQIEDERERREKKLYFGYSLLGAHPILNQTIGRMQRATEGRKEELFALYSAHDVTLSPVLSALGLSEARFPRFAARLIFELWQDREKPSEHSVRILYNGVDVTFHTSFCQDHHKRSPKPMCPLENLVRFVKRDMFVALGGSGTNYYDACHREGF

SEQ ID NO: 194 - protein, 130 aa, Homo sapiens
  Payload ID: 24;
  Gene Symbol: PXYLP1;
  Gene Name: 2-phosphoxylose phosphatase 1;
  ENSP ID: ENSP00000423702
MSSKSRKRIMPDPVTEPPVTDPVYEALLYCNIPSVAERSMEGHAPHHFKLVSVHVFIRHGDRYPLYVIPKTKRPEIDCTLVANRKPYHPKLEAFISHMSKGSGASFESPLNSLPLYPNHPLCEMGELTQT

SEQ ID NO: 195 - protein, 26 aa, Homo sapiens
  Payload ID: 24;
  Gene Symbol: PXYLP1;
  Gene Name: 2-phosphoxylose phosphatase 1;
  ENSP ID: ENSP00000425264
MLFRNRFLLLLALAALLAFVSLSLQF

SEQ ID NO: 196 - protein, 26 aa, Homo sapiens
  Payload ID: 24;
  Gene Symbol: PXYLP1;
  Gene Name: 2-phosphoxylose phosphatase 1;
  ENSP ID: ENSP00000426348
MLFRNRFLLLLALAALLAFVSLSLQF

SEQ ID NO: 197 - protein, 463 aa, Homo sapiens
  Payload ID: 24;
  Gene Symbol: PXYLP1;
  Gene Name: 2-phosphoxylose phosphatase 1;
  ENSP ID: ENSP00000426877
MDVLTALLLVHLIPVSTPKNGMSSKSRKRIMPDPVTEPPVTDPVYEALLYCNIPSVAERSMEGHAPHHFKLVSVHVFIRHGDRYPLYVIPKTKRPEIDCTLVANRKPYHPKLEAFISHMSKGSGASFESPLNSLPLYPNHPLCEMGELTQTGVVQHLQNGQLLRDIYLKKHKLLPNDWSADQLYLETTGKSRTLQSGLALLYGFLPDFDWKKIYFRHQPSALFCSGSCYCPVRNQYLEKEQRRQYLLRLKNSQLEKTYGEMAKIVDVPTKQLRAANPIDSMLCHFCHNVSFPCTRNGCVDMEHFKVIKTHQIEDERERREKKLYFGYSLLGAHPILNQTIGRMQRATEGRKEELFALYSAHDVTLSPVLSALGLSEARFPRFAARLIFELWQDREKPSEHSVRILYNGVDVTFHTSFCQDHHKRSPKPMCPLENLVRFVKRDMFVALGGSGTNYYDACHREGF

SEQ ID NO: 198 - protein, 95 aa, Homo sapiens
  Payload ID: 24;
  Gene Symbol: PXYLP1;
  Gene Name: 2-phosphoxylose phosphatase 1;
  ENSP ID: ENSP00000426956
MLFRNRFLLLLALAALLAFVSLSLQFFHLIPVSTPKNGMSSKSRKRIMPDPVTEPPVTDPVYEALLYCNIPSVAERSMEGHAPHHFKLVSVHVFI

SEQ ID NO: 199 - protein, 308 aa, Homo sapiens
  Payload ID: 25;
  Gene Symbol: BPNT1;
  Gene Name: 3'(2'), 5'-bisphosphate nucleotidase 1;
  Uniprot ID:  O95861;
  ENSP ID: ENSP00000318852
MASSNTVLMRLVASAYSIAQKAGMIVRRVIAEGDLGIVEKTCATDLQTKADRLAQMSICSSLARKFPKLTIIGEEDLPSEEVDQELIEDSQWEEILKQPCPSQYSAIKEEDLVVWVDPLDGTKEYTEGLLDNVTVLIGIAYEGKAIAGVINQPYYNYEAGPDAVLGRTIWGVLGLGAFGFQLKEVPAGKHIITTTRSHSNKLVTDCVAAMNPDAVLRVGGAGNKIIQLIEGKASAYVFASPGCKKWDTCAPEVILHAVGGKLTDIHGNVLQYHKDVKHMNSAGVLATLRNYDYYASRVPESIKNALVP

SEQ ID NO: 200 - protein, 291 aa, Homo sapiens
  Payload ID: 25;
  Gene Symbol: BPNT1;
  Gene Name: 3'(2'), 5'-bisphosphate nucleotidase 1;
  ENSP ID: ENSP00000346862
MASSNTVLMRLVASAYSIAQKAGMIVRRVIAEGDLGIVEKTCATDLQTKADRLAQMSICSSLARKFPKLTIIGEEDLPSEEVDQELIEDSQWEEILKQPCPSQYSAIKEEDLVVWVDPLDGTKEYTEGLLDNVTVLIGIAYEGKAIAGVINQPYYNYENNEKQQLREHRNEAKAGPDAVLGRTIWGVLGLGAFGFQLKEVPAGKHIITTTRSHSNKLVTDCVAAMNPDAVLRVGGAGNKIIQLIEGKASAYVFASPGCKKWDTCAPEVILHAVGGKLTDIHGNVLQYHKDV

SEQ ID NO: 201 - protein, 272 aa, Homo sapiens
  Payload ID: 25;
  Gene Symbol: BPNT1;
  Gene Name: 3'(2'), 5'-bisphosphate nucleotidase 1;
  Uniprot ID:  O95861;
  ENSP ID: ENSP00000410348
MASSNTVLMRLVASAYSIAQKAGMIVRRVIAEGDLGIVEKTCATDLQTKADRLAQMSICSSLARKFPKLTIIGEELVVWVDPLDGTKEYTEGLLDNVTVLIGIAYEGKAIAGVINQPYYNYEAGPDAVLGRTIWGVLGLGAFGFQLKEVPAGKHIITTTRSHSNKLVTDCVAAMNPDAVLRVGGAGNKIIQLIEGKASAYVFASPGCKKWDTCAPEVILHAVGGKLTDIHGNVLQYHKDVKHMNSAGVLATLRNYDYYASRVPESIKNALVP

SEQ ID NO: 202 - protein, 253 aa, Homo sapiens
  Payload ID: 25;
  Gene Symbol: BPNT1;
  Gene Name: 3'(2'), 5'-bisphosphate nucleotidase 1;
  Uniprot ID:  O95861;
  ENSP ID: ENSP00000444398
MSICSSLARKFPKLTIIGEEDLPSEEVDQELIEDSQWEEILKQPCPSQYSAIKEEDLVVWVDPLDGTKEYTEGLLDNVTVLIGIAYEGKAIAGVINQPYYNYEAGPDAVLGRTIWGVLGLGAFGFQLKEVPAGKHIITTTRSHSNKLVTDCVAAMNPDAVLRVGGAGNKIIQLIEGKASAYVFASPGCKKWDTCAPEVILHAVGGKLTDIHGNVLQYHKDVKHMNSAGVLATLRNYDYYASRVPESIKNALVP

SEQ ID NO: 203 - protein, 308 aa, Homo sapiens; identical to SEQ ID NO: 199
  Payload ID: 25;
  Gene Symbol: BPNT1;
  Gene Name: 3'(2'), 5'-bisphosphate nucleotidase 1;
  Uniprot ID:  O95861;
  ENSP ID: ENSP00000446828

SEQ ID NO: 204 - protein, 136 aa, Homo sapiens
  Payload ID: 25;
  Gene Symbol: BPNT1;
  Gene Name: 3'(2'), 5'-bisphosphate nucleotidase 1;
  ENSP ID: ENSP00000446850
MASSNTVLMRLVASAYSIAQKAGMIVRRVIAEGDLGIVEKTCATDLQTKADRLAQMSICSSLARKFPKLTIIGEELVVWVDPLDGTKEYTEGLLDNVTVLIGIAYEGKAIAGVINQPYYNYEAGPDAVLGRTIWGV

SEQ ID NO: 205 - protein, 170 aa, Homo sapiens
  Payload ID: 25;
  Gene Symbol: BPNT1;
  Gene Name: 3'(2'), 5'-bisphosphate nucleotidase 1;
  ENSP ID: ENSP00000446953
MASSNTVLMRLVASAYSIAQKAGMIVRRVIAEGDLGIVEKTCATDLQTKADRLAQMSICSSLARKFPKLTIIGEELVVWVDPLDGTKEYTEGLLDNVTVLIGIAYEGKAIAGVINQPYYNYEAGPDAVLGRTIWGVLGLGAFGFQLKEVPAGKHIITTTRSHSNKLVTDC

SEQ ID NO: 206 - protein, 116 aa, Homo sapiens
  Payload ID: 25;
  Gene Symbol: BPNT1;
  Gene Name: 3'(2'), 5'-bisphosphate nucleotidase 1;
  ENSP ID: ENSP00000448740
MSICSSLARKFPKLTIIGEEDLPSEEVDQELIEDSQWEEILKQPCPSQYSAIKEEDLVVWVDPLDGTKEYTEGLLDNVTVLIGIAYEGKAIAGVINQPYYNYEAGPDAVLGRTIWG

SEQ ID NO: 207 - protein, 130 aa, Homo sapiens
  Payload ID: 25;
  Gene Symbol: BPNT1;
  Gene Name: 3'(2'), 5'-bisphosphate nucleotidase 1;
  ENSP ID: ENSP00000449883
MASSNTVLMRLVASAYSIAQKAGMIVRRVIAEGDLGIVEKTCATDLQTKADRLAQMSICSSLARKFPKLTIIGEEDLPSEEVDQELIEDSQWEEILKQPCPSQYSAIKEEDLVVWVDPLDGTKEYTEGLL

SEQ ID NO: 208 - protein, 888 aa, Homo sapiens [sequence omitted]

SEQ ID NO: 209 - protein, 835 aa, Homo sapiens
  Payload ID: 26;
  Gene Symbol: HMGCR;
  Gene Name: 3-hydroxy-3-methylglutaryl-CoA reductase;
  Uniprot ID:  P04035;
  ENSP ID: ENSP00000340816
MLSRLFRMHGLFVASHPWEVIVGTVTLTICMMSMNMFTGNNKICGWNYECPKFEEDVLSSDIIILTITRCIAILYIYFQFQNLRQLGSKYILGIAGLFTIFSSFVFSTVVIHFLDKELTGLNEALPFFLLLIDLSRASTLAKFALSSNSQDEVRENIARGMAILGPTFTLDALVECLVIGVGTMSGVRQLEIMCCFGCMSVLANYFVFMTFFPACVSLVLELSRESREGRPIWQLSHFARVLEEEENKPNPVTQRVKMIMSLGLVLVHAHSRWIADPSPQNSTADTSKVSLGLDENVSKRIEPSVSLWQFYLSKMISMDIEQVITLSLALLLAVKYIFFEQTETESTLSLKNPITSPVVTQKKVPDNCCRREPMLVRNNQKCDSVEEETGINRERKVEVIKPLVAETDTPNRATFVVGNSSLLDTSSVLVTQEPEIELPREPRPNEECLQILGNAEKGAKFLSDAEIIQLVNAKHIPAYKLETLMETHERGVSIRRQLLSKKLSEPSSLQYLPYRDYNYSLLGGGASSRVLADGMTRGPVVRLPRACDSAEVKAWLETSEGFAVIKEAFDSTSRFARLQKLHTSIAGRNLYIRFQSRSGDAMGMNMISKGTEKALSKLHEYFPEMQILAVSGNYCTDKKPAAINWIEGRGKSVVCEAVIPAKVVREVLKTTTEAMIEVNINKNLVGSAMAGSIGGYNAHAANIVTAIYIACGQDAAQNVGSSNCITLMEASGPTNEDLYISCTMPSIEIGTVGGGTNLLPQQACLQMLGVQGACKDNPGENARQLARIVCGTVMAGELSLMAALAAGHLVKSHMIHNRSKINLQDLQGACTKKTA

SEQ ID NO: 210 - protein, 18 aa, Homo sapiens
  Payload ID: 26;
  Gene Symbol: HMGCR;
  Gene Name: 3-hydroxy-3-methylglutaryl-CoA reductase;
  ENSP ID: ENSP00000409100
MLSRLFRMHGLFVASHPW

SEQ ID NO: 211 - protein, 115 aa, Homo sapiens
  Payload ID: 26;
  Gene Symbol: HMGCR;
  Gene Name: 3-hydroxy-3-methylglutaryl-CoA reductase;
  ENSP ID: ENSP00000420871
YFPEMQILAVSGNYCTDKKPAAINWIEGRGKSVVCEAVIPAKVVREMLGVQGACKDNPGENARQLARIVCGTVMAGELSLMAALAAGHLVKSHMIHNRSKINLQDLQGACTKKTA

SEQ ID NO: 212 - protein, 165 aa, Homo sapiens
  Payload ID: 26;
  Gene Symbol: HMGCR;
  Gene Name: 3-hydroxy-3-methylglutaryl-CoA reductase;
  ENSP ID: ENSP00000421378
  MOD_RES (1)..(1): Any amino acid
XHEYFPEMQILAVSGNYCTDKKPAAINWIEGRGKSVVCEAVIPAKVVREVLKTTTEAMIEVNINKNLVGSAMAGSIGGYNAHAANIVTAIYIACGQMLGVQGACKDNPGENARQLARIVCGTVMAGELSLMAALAAGHLVKSHMIHNRSKINLQDLQGACTKKTA

SEQ ID NO: 213 - protein, 888 aa, Homo sapiens [sequence omitted]

SEQ ID NO: 214 - protein, 111 aa, Homo sapiens
  Payload ID: 26;
  Gene Symbol: HMGCR;
  Gene Name: 3-hydroxy-3-methylglutaryl-CoA reductase;
  ENSP ID: ENSP00000427340
MLSRLFRMHGLFVASHPWEVIVGTVTLTICMMSMNMFTGNNKICGWNYECPKFEEDVLSSDIIILTITRCIAILYIYFQFQNLRQLGSKYILGIAGLFTIFSSFVFSTVVI

SEQ ID NO: 215 - protein, 520 aa, Homo sapiens
  Payload ID: 27;
  Gene Symbol: HMGCS1;
  Gene Name: 3-hydroxy-3-methylglutaryl-CoA synthase 1 (soluble);
  Uniprot ID:  Q01581;
  ENSP ID: ENSP00000322706
MPGSLPLNAEACWPKDVGIVALEIYFPSQYVDQAELEKYDGVDAGKYTIGLGQAKMGFCTDREDINSLCMTVVQNLMERNNLSYDCIGRLEVGTETIIDKSKSVKTNLMQLFEESGNTDIEGIDTTNACYGGTAAVFNAVNWIESSSWDGRYALVVAGDIAVYATGNARPTGGVGAVALLIGPNAPLIFERGLRGTHMQHAYDFYKPDMLSEYPIVDGKLSIQCYLSALDRCYSVYCKKIHAQWQKEGNDKDFTLNDFGFMIFHSPYCKLVQKSLARMLLNDFLNDQNRDKNSIYSGLEAFGDVKLEDTYFDRDVEKAFMKASSELFSQKTKASLLVSNQNGNMYTSSVYGSLASVLAQYSPQQLAGKRIGVFSYGSGLAATLYSLKVTQDATPGSALDKITASLCDLKSRLDSRTGVAPDVFAENMKLREDTHHLVNYIPQGSIDSLFEGTWYLVRVDEKHRRTYARRPTPNDDTLDEGVGLVHSNIATEHIPSPAKKVPRLPATAAEPEAAVISNGEH

SEQ ID NO: 216 - protein, 520 aa, Homo sapiens; identical to SEQ ID NO: 215
  Payload ID: 27;
  Gene Symbol: HMGCS1;
  Gene Name: 3-hydroxy-3-methylglutaryl-CoA synthase 1 (soluble);
  Uniprot ID:  Q01581;
  ENSP ID: ENSP00000399402

SEQ ID NO: 217 - protein, 95 aa, Homo sapiens
  Payload ID: 27;
  Gene Symbol: HMGCS1;
  Gene Name: 3-hydroxy-3-methylglutaryl-CoA synthase 1 (soluble);
  ENSP ID: ENSP00000427339
MPGSLPLNAEACWPKDVGIVALEIYFPSQYVDQAELEKYDGVDAGKYTIGLGQAKMGFCTDREDINSLCMTVVQNLMERNNLSYDCIGRLEVGTE

SEQ ID NO: 218 - protein, 508 aa, Homo sapiens
  Payload ID: 28;
  Gene Symbol: HMGCS2;
  Gene Name: 3-hydroxy-3-methylglutaryl-CoA synthase 2 (mitochondrial) beta-mannosyltransferase-like;
  Uniprot ID:  P54868;
  ENSP ID: ENSP00000358414
MQRLLTPVKRILQLTRAVQETSLTPARLLPVAHQRFSTASAVPLAKTDTWPKDVGILALEVYFPAQYVDQTDLEKYNNVEAGKYTVGLGQTRMGFCSVQEDINSLCLTVVQRLMERIQLPWDSVGRLEVGTETIIDKSKAVKTVLMELFQDSGNTDIEGIDTTNACYGGTASLFNAANWMESSSWDGRYAMVVCGDIAVYPSGNARPTGGAGAVAMLIGPKAPLALERGLRGTHMENVYDFYKPNLASEYPIVDGKLSIQCYLRALDRCYTSYRKKIQNQWKQAGSDRPFTLDDLQYMIFHTPFCKMVQKSLARLMFNDFLSASSDTQTSLYKGLEAFGGLKLEDTYTNKDLDKALLKASQDMFDKKTKASLYLSTHNGNMYTSSLYGCLASLLSHHSAQELAGSRIGAFSYGSGLAASFFSFRVSQDAAPGSPLDKLVSSTSDLPKRLASRKCVSPEEFTEIMNQREQFYHKVNFSPPGDTNSLFPGTWYLERVDEQHRRKYARRPV

SEQ ID NO: 219 - protein, 466 aa, Homo sapiens
  Payload ID: 28;
  Gene Symbol: HMGCS2;
  Gene Name: 3-hydroxy-3-methylglutaryl-CoA synthase 2 (mitochondrial);
  Uniprot ID:  P54868;
  ENSP ID: ENSP00000439495
MQRLLTPVKRILQLTRAVQETSLTPARLLPVAHQRFSTASAVPLAKTDTWPKDVGILALEVYFPAQYVDQTDLEKYNNVEAGKYTVGLGQTRMGFCSVQEDINSLCLTVVQRLMERIQLPWDSVGRLEVGTETIIDKSKAVKTVLMELFQDSGNTDIEGIDTTNACYGGTASLFNAANWMESSSWDGLRGTHMENVYDFYKPNLASEYPIVDGKLSIQCYLRALDRCYTSYRKKIQNQWKQAGSDRPFTLDDLQYMIFHTPFCKMVQKSLARLMFNDFLSASSDTQTSLYKGLEAFGGLKLEDTYTNKDLDKALLKASQDMFDKKTKASLYLSTHNGNMYTSSLYGCLASLLSHHSAQELAGSRIGAFSYGSGLAASFFSFRVSQDAAPGSPLDKLVSSTSDLPKRLASRKCVSPEEFTEIMNQREQFYHKVNFSPPGDTNSLFPGTWYLERVDEQHRRKYARRPV

SEQ ID NO: 220 - protein, 158 aa, Homo sapiens
  Payload ID: 29;
  Gene Symbol: HACD1;
  Gene Name: 3-hydroxyacyl-CoA dehydratase 1;
  ENSP ID: ENSP00000322923
MGRLTEAAAAGSGSRAAGWAGSPPTLLPLSPTSPRCAATMASSDEDGTNGGASEAGEDREAPGERRRLGVLATAWLTFYDIAMTAGRRLILSPRLECIGAISAHCQPQPPEFKRFSCLGLRSSWDYKRGPPRPINFCIFGRDRVSPCWPGWSRTPDLK

SEQ ID NO: 221 - protein, 288 aa, Homo sapiens
  Payload ID: 29;
  Gene Symbol: HACD1;
  Gene Name: 3-hydroxyacyl-CoA dehydratase 1;
  Uniprot ID:  B0YJ81;
  ENSP ID: ENSP00000355308
MGRLTEAAAAGSGSRAAGWAGSPPTLLPLSPTSPRCAATMASSDEDGTNGGASEAGEDREAPGERRRLGVLATAWLTFYDIAMTAGWLVLAIAMVRFYMEKGTHRGLYKSIQKTLKFFQTFALLEIVHCLIGIVPTSVIVTGVQVSSRIFMVWLITHSIKPIQNEESVVLFLVAWTVTEITRYSFYTFSLLDHLPYFIKWARYNFFIILYPVGVAGELLTIYAALPHVKKTGMFSIRLPNKYNVSFDYYYFLLITMASYIPLFPQLYFHMLRQRRKVLHGEVIVEKDD

SEQ ID NO: 222 - protein, 174 aa, Homo sapiens
  Payload ID: 29;
  Gene Symbol: HACD1;
  Gene Name: 3-hydroxyacyl-CoA dehydratase 1;
  ENSP ID: ENSP00000462336
  MOD_RES (1)..(1): Any amino acid
XCAATMASSDEDGTNGGASEAGEDREAPGERRRLGVLATAWLTFYDIAMTAGWLVLAIAMVRFYMEKGTHRGLYKSIQKTLKFFQTFALLEIVHCLIGIVPTSVIVTGVQVSSRIFMVWLITHSIKPIQNEESVVLFLVAWTVTEITRYSFYTFSLLDHLPYFIKWARWRYLAV

SEQ ID NO: 223 - protein, 37 aa, Homo sapiens
  Payload ID: 29;
  Gene Symbol: HACD1;
  Gene Name: 3-hydroxyacyl-CoA dehydratase 1;
  ENSP ID: ENSP00000462868
IVHCLIGIVPTSVIVTGVQVSSRIFMVWLITHSIKPI

SEQ ID NO: 224 - protein, 254 aa, Homo sapiens
  Payload ID: 30;
  Gene Symbol: HACD2;
  Gene Name: 3-hydroxyacyl-CoA dehydratase 2;
  Uniprot ID:  Q6Y1H2;
  ENSP ID: ENSP00000373153
MAAVAATAAAKGNGGGGGRAGAGDASGTRKKKGPGPLATAYLVIYNVVMTAGWLVIAVGLVRAYLAKGSYHSLYYSIEKPLKFFQTGALLEILHCAIGIVPSSVVLTSFQVMSRVFLIWAVTHSVKEVQSEDSVLLFVIAWTITEIIRYSFYTFSLLNHLPYLIKWARYTLFIVLYPMGVSGELLTIYAALPFVRQAGLYSISLPNKYNFSFDYYAFLILIMISYIPIFPQLYFHMIHQRRKILSHTEEHKKFE

SEQ ID NO: 225 - protein, 61 aa, Homo sapiens
  Payload ID: 30;
  Gene Symbol: HACD2;
  Gene Name: 3-hydroxyacyl-CoA dehydratase 2;
  ENSP ID: ENSP00000417567
  MOD_RES (1)..(1): Any amino acid
XYTLFIVLYPMGVSGELLTIYAALPFVRQAGLYSISLPNKYNFSFDYYAFLILIMISYIPS

SEQ ID NO: 226 - protein, 98 aa, Homo sapiens
  Payload ID: 30;
  Gene Symbol: HACD2;
  Gene Name: 3-hydroxyacyl-CoA dehydratase 2;
  ENSP ID: ENSP00000419237
MSRVFLIWAVTHSVKEVQSEDSVLLFVIAWTITEIIRYSFYTFSLLNHLPYLIKWARYTLFIVLYPMGVSGELLTIYAALPFVRQAGLYSISLPNKYN

SEQ ID NO: 227 - protein, 362 aa, Homo sapiens
  Payload ID: 31;
  Gene Symbol: HACD3;
  Gene Name: 3-hydroxyacyl-CoA dehydratase 3;
  Uniprot ID:  Q9P035;
  ENSP ID: ENSP00000261875
MENQVLTPHVYWAQRHRELYLRVELSDVQNPAISITENVLHFKAQGHGAKGDNVYEFHLEFLDLVKPEPVYKLTQRQVNITVQKKVSQWWERLTKQEKRPLFLAPDFDRWLDESDAEMELRAKEEERLNKLRLESEGSPETLTNLRKGYLFMYNLVQFLGFSWIFVNLTVRFCILGKESFYDTFHTVADMMYFCQMLAVVETINAAIGVTTSPVLPSLIQLLGRNFILFIIFGTMEEMQNKAVVFFVFYLWSAIEIFRYSFYMLTCIDMDWKVLTWLRYTLWIPLYPLGCLAEAVSVIQSIPIFNETGRFSFTLPYPVKIKVRFSFFLQIYLIMIFLGLYINFRHLYKQRRRRYGQKKKKIH

SEQ ID NO: 228 - protein, 307 aa, Homo sapiens
  Payload ID: 31;
  Gene Symbol: HACD3;
  Gene Name: 3-hydroxyacyl-CoA dehydratase 3;
  Uniprot ID:  Q9P035;
  ENSP ID: ENSP00000392491
MENQVLTPHVYWAQRHRELYLRVELSDVQNPAISITENVLHFKAQGHGAKGDNVYEFHLEFLDLVKPEEEERLNKLRLESEGSPETLTNLRKGYLFMYNLVQFLGFSWIFVNLTVRFCILGKESFYDTFHTVADMMYFCQMLAVVETINAAIGVTTSPVLPSLIQLLGRNFILFIIFGTMEEMQNKAVVFFVFYLWSAIEIFRYSFYMLTCIDMDWKVLTWLRYTLWIPLYPLGCLAEAVSVIQSIPIFNETGRFSFTLPYPVKIKVRFSFFLQIYLIMIFLGLYINFRHLYKQRRRRYGQKKKKIH

SEQ ID NO: 229 - protein, 139 aa, Homo sapiens
  Payload ID: 31;
  Gene Symbol: HACD3;
  Gene Name: 3-hydroxyacyl-CoA dehydratase 3;
  ENSP ID: ENSP00000454610
MELRAKEEERLNKLRLESEGSPETLTNLRKGYLFMYNLVQFLGFSWIFVNLTVRFCILGKESFYDTFHTVADMMYFCQMLAVVETINAAIGVTTSPVLPSLIQLLGRNFILFIIFGTMEEMQNKAVVFFVFYLWSAIEI

SEQ ID NO: 230 - protein, 245 aa, Homo sapiens
  Payload ID: 31;
  Gene Symbol: HACD3;
  Gene Name: 3-hydroxyacyl-CoA dehydratase 3;
  ENSP ID: ENSP00000454873
MELRAKEEERLNKLRLESEGSPETLTNLRKGYLFMYNLVQFLGFSWIFVNLTVRFCILGKESFYDTFHTVADMMYFCQMLAVVETINAAIGVTTSPVLPSLIQLLGRNFILFIIFGTMEEMQNKAVVFFVFYLWSAIEIFRYSFYMLTCIDMDWKVLTWLRYTLWIPLYPLGCLAEAVSVIQSIPIFNETGRFSFTLPYPVKIKVRFSFFLQIYLIMIFLGLYINFRHLYKQRRRRYGQKKKKIH

SEQ ID NO: 231 - protein, 337 aa, Homo sapiens
  Payload ID: 31;
  Gene Symbol: HACD3;
  Gene Name: 3-hydroxyacyl-CoA dehydratase 3;
  ENSP ID: ENSP00000455530
MENQNPAISITENVLHFKAQGHGAKGDNVYEFHLEFLDLVKPEPVYKLTQRQVNITVQKKVSQWWERLTKQEKRPLFLAPDFDRWLDESDAEMELRAKEEERLNKLRLESEGSPETLTNLRKGYLFMYNLVQFLGFSWIFVNLTVRFCILGKESFYDTFHTVADMMYFCQMLAVVETINAAIGVTTSPVLPSLIQLLGRNFILFIIFGTMEEMQNKAVVFFVFYLWSAIEIFRYSFYMLTCIDMDWKVLTWLRYTLWIPLYPLGCLAEAVSVIQSIPIFNETGRFSFTLPYPVKIKVRFSFFLQIYLIMIFLGLYINFRHLYKQRRRRYGQKKKKIH

SEQ ID NO: 232 - protein, 245 aa, Homo sapiens; identical to SEQ ID NO: 230
  Payload ID: 31;
  Gene Symbol: HACD3;
  Gene Name: 3-hydroxyacyl-CoA dehydratase 3;
  ENSP ID: ENSP00000455587

SEQ ID NO: 233 - protein, 245 aa, Homo sapiens; identical to SEQ ID NO: 230
  Payload ID: 31;
  Gene Symbol: HACD3;
  Gene Name: 3-hydroxyacyl-CoA dehydratase 3;
  ENSP ID: ENSP00000455686

SEQ ID NO: 234 - protein, 245 aa, Homo sapiens; identical to SEQ ID NO: 230
  Payload ID: 31;
  Gene Symbol: HACD3;
  Gene Name: 3-hydroxyacyl-CoA dehydratase 3;
  ENSP ID: ENSP00000456300

SEQ ID NO: 235 - protein, 400 aa, Homo sapiens
  Payload ID: 31;
  Gene Symbol: HACD3;
  Gene Name: 3-hydroxyacyl-CoA dehydratase 3;
  ENSP ID: ENSP00000456568
MENQVLTPHVYWAQRHRELYLRVELSDVQGLTLLPRLECSSVIIAHRSLELLGLSSPPGSAYQVGLQNPAISITENVLHFKAQGHGAKGDNVYEFHLEFLDLVKPEPVYKLTQRQVNITVQKKVSQWWERLTKQEKRPLFLAPDFDRWLDESDAEMELRAKEEERLNKLRLESEGSPETLTNLRKGYLFMYNLVQFLGFSWIFVNLTVRFCILGKESFYDTFHTVADMMYFCQMLAVVETINAAIGVTTSPVLPSLIQLLGRNFILFIIFGTMEEMQNKAVVFFVFYLWSAIEIFRYSFYMLTCIDMDWKVLTWLRYTLWIPLYPLGCLAEAVSVIQSIPIFNETGRFSFTLPYPVKIKVRFSFFLQIYLIMIFLGLYINFRHLYKQRRRRYGQKKKKIH

SEQ ID NO: 236 - protein, 232 aa, Homo sapiens
  Payload ID: 32;
  Gene Symbol: HACD4;
  Gene Name: 3-hydroxyacyl-CoA dehydratase 4;
  Uniprot ID:  Q5VWC8;
  ENSP ID: ENSP00000419503
MGPLALPAWLQPRYRKNAYLFIYYLIQFCGHSWIFTNMTVRFFSFGKDSMVDTFYAIGLVMRLCQSVSLLELLHIYVGIESNHLLPRFLQLTERIIILFVVITSQEEVQEKYVVCVLFVFWNLLDMVRYTYSMLSVIGISYAVLTWLSQTLWMPIYPLCVLAEAFAIYQSLPYFESFGTYSTKLPFDLSIYFPYVLKIYLMMLFIGMYFTYSHLYSERRDILGIFPIKKKKM

SEQ ID NO: 237 - protein, 286 aa, Homo sapiens
  Payload ID: 33;
  Gene Symbol: HAAO;
  Gene Name: 3-hydroxyanthranilate 3,4-dioxygenase;
  Uniprot ID:  P46952;
  ENSP ID: ENSP00000294973
MERRLGVRAWVKENRGSFQPPVCNKLMHQEQLKVMFIGGPNTRKDYHIEEGEEVFYQLEGDMVLRVLEQGKHRDVVIRQGEIFLLPARVPHSPQRFANTVGLVVERRRLETELDGLRYYVGDTMDVLFEKWFYCKDLGTQLAPIIQEFFSSEQYRTGKPIPDQLLKEPPFPLSTRSIMEPMSLDAWLDSHHRELQAGTPLSLFGDTYETQVIAYGQGSSEGLRQNVDVWLWQLEGSSVVTMGGRRLSLAPDDSLLVLAGTSYAWERTQGSVALSVTQDPACKKPLG

SEQ ID NO: 238 - protein, 176 aa, Homo sapiens
  Payload ID: 33;
  Gene Symbol: HAAO;
  Gene Name: 3-hydroxyanthranilate 3,4-dioxygenase;
  ENSP ID: ENSP00000412601
MFIGGPNTRKDYHIEEGEEVFYQLEGDMVLRVLEQGKHRDVVIRQGEIFLLPARVPHSPQRFANTVGLVVERRRLETELDGLRYYVGDTMDVLFEKWFYCKDLGTQLAPIIQEFFSSEQYRTGKPIPDQLLKEPPFPLSTRSIMEPMSLDAWLDSHHRELQAGTPLSLFGDTYETQ

SEQ ID NO: 239 - protein, 343 aa, Homo sapiens
  Payload ID: 34;
  Gene Symbol: BDH1;
  Gene Name: 3-hydroxybutyrate dehydrogenase, type 1;
  Uniprot ID:  Q02338;
  ENSP ID: ENSP00000350914
MLATRLSRPLSRLPGKTLSACDRENGARRPLLLGSTSFIPIGRRTYASAAEPVGSKAVLVTGCDSGFGFSLAKHLHSKGFLVFAGCLMKDKGHDGVKELDSLNSDRLRTVQLNVCSSEEVEKVVEIVRSSLKDPEKGMWGLVNNAGISTFGEVEFTSLETYKQVAEVNLWGTVRMTKSFLPLIRRAKGRVVNISSMLGRMANPARSPYCITKFGVEAFSDCLRYEMYPLGVKVSVVEPGNFIAATSLYSPESIQAIAKKMWEELPEVVRKDYGKKYFDEKIAKMETYCSSGSTDTSPVIDAVTHALTATTPYTRYHPMDYYWWLRMQIMTHLPGAISDMIYIR

SEQ ID NO: 240 - protein, 343 aa, Homo sapiens; identical to SEQ ID NO: 239
  Payload ID: 34;
  Gene Symbol: BDH1;
  Gene Name: 3-hydroxybutyrate dehydrogenase, type 1;
  Uniprot ID:  Q02338;
  ENSP ID: ENSP00000376183

SEQ ID NO: 241 - protein, 343 aa, Homo sapiens; identical to SEQ ID NO: 239
  Payload ID: 34;
  Gene Symbol: BDH1;
  Gene Name: 3-hydroxybutyrate dehydrogenase, type 1;
  Uniprot ID:  Q02338;
  ENSP ID: ENSP00000376184

SEQ ID NO: 242 - protein, 166 aa, Homo sapiens
  Payload ID: 34;
  Gene Symbol: BDH1;
  Gene Name: 3-hydroxybutyrate dehydrogenase, type 1;
  ENSP ID: ENSP00000387648
MKDKGHDGVKELDSLNSDRLRTVQLNVCSSEEVEKVVEIVRSSLKDPEKGMWGLVNNAGISTFGEVEFTSLETYKQVAEVNLWGTVRMTKSFLPLIRRAKGRVVNISSMLGRMANPARSPYCITKFGVEAFSDCLRYEMYPLGVKVSVVEPGNFIAATSLYSPESI

SEQ ID NO: 243 - protein, 89 aa, Homo sapiens
  Payload ID: 34;
  Gene Symbol: BDH1;
  Gene Name: 3-hydroxybutyrate dehydrogenase, type 1;
  ENSP ID: ENSP00000396149
MLATRLSRPLSRLPGKTLSACDRENGARRPLLLGSTSFIPIGRRTYASAAEPVGSKAVLVTGCDSGFGFSLAKHLHSKGFLVFAGCLMK

SEQ ID NO: 244 - protein, 50 aa, Homo sapiens
  Payload ID: 34;
  Gene Symbol: BDH1;
  Gene Name: 3-hydroxybutyrate dehydrogenase, type 1;
  ENSP ID: ENSP00000405462
MLATRLSRPLSRLPGKTLSACDRENGARRPLLLGSTSFIPIGRRTYASAA

SEQ ID NO: 245 - protein, 129 aa, Homo sapiens
  Payload ID: 34;
  Gene Symbol: BDH1;
  Gene Name: 3-hydroxybutyrate dehydrogenase, type 1;
  ENSP ID: ENSP00000408016
  MOD_RES (1)..(1): Any amino acid
XAGISTFGEVEFTSLETYKQVAEVNLWGTVRMTKSFLPLIRRAKGEWERELPPAPEPAPRVHLCSEWKYLSQQLQCPQLSRGRVVNISSMLGRMANPARSPYCITKFGVEAFSDCLRYEMYPLGVKVSV

SEQ ID NO: 246 - protein, 168 aa, Homo sapiens
  Payload ID: 34;
  Gene Symbol: BDH1;
  Gene Name: 3-hydroxybutyrate dehydrogenase, type 1;
  ENSP ID: ENSP00000408685
MASNGIQKRRPLLLGSTSFIPIGRRTYASAAEPVGSKAVLVTGCDSGFGFSLAKHLHSKGFLVFAGCLMKDKGHDGVKELDSLNSDRLRTVQLNVCSSEEVEKVVEIVRSSLKDPEKGMWGLVNNAGISTFGEVEFTSLETYKQVAEVNLWGTVRMTKSFLPLIRRAK

SEQ ID NO: 247 - protein, 186 aa, Homo sapiens
  Payload ID: 34;
  Gene Symbol: BDH1;
  Gene Name: 3-hydroxybutyrate dehydrogenase, type 1;
  ENSP ID: ENSP00000409849
MLATRLSRPLSRLPGKTLSACDRENGARRPLLLGSTSFIPIGRRTYASAAEPVGSKAVLVTGCDSGFGFSLAKHLHSKGFLVFAGCLMKDKGHDGVKELDSLNSDRLRTVQLNVCSSEEVEKVVEIVRSSLKDPEKGMWGLVNNAGISTFGEVEFTSLETYKQVAEVNLWGTVRMTKSFLPLIRRA

SEQ ID NO: 248 - protein, 256 aa, Homo sapiens
  Payload ID: 34;
  Gene Symbol: BDH1;
  Gene Name: 3-hydroxybutyrate dehydrogenase, type 1;
  ENSP ID: ENSP00000411014
MKDKGHDGVKELDSLNSDRLRTVQLNVCSSEEVEKVVEIVRSSLKDPEKGMWGLVNNAGISTFGEVEFTSLETYKQVAEVNLWGTVRMTKSFLPLIRRAKGRVVNISSMLGRMANPARSPYCITKFGVEAFSDCLRYEMYPLGVKVSVVEPGNFIAATSLYSPESIQAIAKKMWEELPEVVRKDYGKKYFDEKIAKMETYCSSGSTDTSPVIDAVTHALTATTPYTRYHPMDYYWWLRMQIMTHLPGAISDMIYIR

SEQ ID NO: 249 - protein, 343 aa, Homo sapiens; identical to SEQ ID NO: 239
  Payload ID: 34;
  Gene Symbol: BDH1;
  Gene Name: 3-hydroxybutyrate dehydrogenase, type 1;
  Uniprot ID:  Q02338;
  ENSP ID: ENSP00000482744

SEQ ID NO: 250 - protein, 343 aa, Homo sapiens; identical to SEQ ID NO: 239
  Payload ID: 34;
  Gene Symbol: BDH1;
  Gene Name: 3-hydroxybutyrate dehydrogenase, type 1;
  Uniprot ID:  Q02338;
  ENSP ID: ENSP00000484421

SEQ ID NO: 251 - protein, 166 aa, Homo sapiens; identical to SEQ ID NO: 242
  Payload ID: 34;
  Gene Symbol: BDH1;
  Gene Name: 3-hydroxybutyrate dehydrogenase, type 1;
  ENSP ID: ENSP00000485973

SEQ ID NO: 252 - protein, 256 aa, Homo sapiens; identical to SEQ ID NO: 248
  Payload ID: 34;
  Gene Symbol: BDH1;
  Gene Name: 3-hydroxybutyrate dehydrogenase, type 1;
  ENSP ID: ENSP00000486316

SEQ ID NO: 253 - protein, 186 aa, Homo sapiens; identical to SEQ ID NO: 247
  Payload ID: 34;
  Gene Symbol: BDH1;
  Gene Name: 3-hydroxybutyrate dehydrogenase, type 1;
  ENSP ID: ENSP00000486552

SEQ ID NO: 254 - protein, 168 aa, Homo sapiens; identical to SEQ ID NO: 246
  Payload ID: 34;
  Gene Symbol: BDH1;
  Gene Name: 3-hydroxybutyrate dehydrogenase, type 1;
  ENSP ID: ENSP00000486776

SEQ ID NO: 255 - protein, 187 aa, Homo sapiens
  Payload ID: 34;
  Gene Symbol: BDH1;
  Gene Name: 3-hydroxybutyrate dehydrogenase, type 1;
  ENSP ID: ENSP00000487163
MLATRLSRPLSRLPGKTLSACDRENGARRPLLLGSTSFIPIGRRTYASAAEPVGSKAVLVTGCDSGFGFSLAKHLHSKGFLVFAGCLMKDKGHDGVKELDSLNSDRLRTVQLNVCSSEEVEKVVEIVRSSLKDPEKGMWGLVNNAGISTFGEVEFTSLETYKQVAEVNLWGTVRMTKSFLPLIRRAK

SEQ ID NO: 256 - protein, 89 aa, Homo sapiens; identical to SEQ ID NO: 243
  Payload ID: 34;
  Gene Symbol: BDH1;
  Gene Name: 3-hydroxybutyrate dehydrogenase, type 1;
  ENSP ID: ENSP00000487308

SEQ ID NO: 257 - protein, 245 aa, Homo sapiens
  Payload ID: 35;
  Gene Symbol: BDH2;
  Gene Name: 3-hydroxybutyrate dehydrogenase, type 2;
  Uniprot ID:  Q9BUT1;
  ENSP ID: ENSP00000296424
MGRLDGKVIILTAAAQGIGQAAALAFAREGAKVIATDINESKLQELEKYPGIQTRVLDVTKKKQIDQFANEVERLDVLFNVAGFVHHGTVLDCEEKDWDFSMNLNVRSMYLMIKAFLPKMLAQKSGNIINMSSVASSVKGVVNRCVYSTTKAAVIGLTKSVAADFIQQGIRCNCVCPGTVDTPSLQERIQARGNPEEARNDFLKRQKTGRFATAEEIAMLCVYLASDESAYVTGNPVIIDGGWSL

SEQ ID NO: 258 - protein, 90 aa, Homo sapiens
  Payload ID: 35;
  Gene Symbol: BDH2;
  Gene Name: 3-hydroxybutyrate dehydrogenase, type 2;
  ENSP ID: ENSP00000421516
MGRLDGKVIILTAAAQGIGQAAALAFAREGAKVIATDINESKLQELEKYPGIQTRVLDVTKKKQIDQFANEVERLDVLFNVAGVCLGSPG

SEQ ID NO: 259 - protein, 116 aa, Homo sapiens
  Payload ID: 35;
  Gene Symbol: BDH2;
  Gene Name: 3-hydroxybutyrate dehydrogenase, type 2;
  ENSP ID: ENSP00000422891
MGRLDGKVIILTAAAQGIGQAAALAFAREGAKVIATDINESKLQELEKYPGIQTRVLDVTKKKQIDQFANEVERLDVLFNVAGFVHHGTVLDCEEKDWDFSMNLNVRSMYLMIKAF

SEQ ID NO: 260 - protein, 64 aa, Homo sapiens
  Payload ID: 35;
  Gene Symbol: BDH2;
  Gene Name: 3-hydroxybutyrate dehydrogenase, type 2;
  ENSP ID: ENSP00000424173
MGRLDGKVIILTAAAQGIGQAAALAFAREGAKVIATDINESKLQELEKYPVPLVLFFRYSNSCP

SEQ ID NO: 261 - protein, 130 aa, Homo sapiens
  Payload ID: 35;
  Gene Symbol: BDH2;
  Gene Name: 3-hydroxybutyrate dehydrogenase, type 2;
  ENSP ID: ENSP00000427442
MGRLDGKVIILTAAAQGIGQAAALAFAREGAKVIATDINESKLQELEKYPGIQTRVLDVTKKKQIDQFANEVERLDVLFNVAGFVHHGTVLDCEEKDWDFSMNLNVRSMYLMIKAFLPKMLAQKSGNIIN

SEQ ID NO: 262 - protein, 336 aa, Homo sapiens
  Payload ID: 36;
  Gene Symbol: HIBADH;
  Gene Name: 3-hydroxyisobutyrate dehydrogenase;
  Uniprot ID:  P31937;
  ENSP ID: ENSP00000265395
MAASLRLLGAASGLRYWSRRLRPAAGSFAAVCSRSVASKTPVGFIGLGNMGNPMAKNLMKHGYPLIIYDVFPDACKEFQDAGEQVVSSPADVAEKADRIITMLPTSINAIEAYSGANGILKKVKKGSLLIDSSTIDPAVSKELAKEVEKMGAVFMDAPVSGGVGAARSGNLTFMVGGVEDEFAAAQELLGCMGSNVVYCGAVGTGQAAKICNNMLLAISMIGTAEAMNLGIRLGLDPKLLAKILNMSSGRCWSSDTYNPVPGVMDGVPSANNYQGGFGTTLMAKDLGLAQDSATSTKSPILLGSLAHQIYRMMCAKGYSKKDFSSVFQFLREEETF

SEQ ID NO: 263 - protein, 206 aa, Homo sapiens
  Payload ID: 36;
  Gene Symbol: HIBADH;
  Gene Name: 3-hydroxyisobutyrate dehydrogenase;
  ENSP ID: ENSP00000390205
  MOD_RES (1)..(1): Any amino acid
XELPHTLKLPGLPLFPNKFLISLVLLILVSSPADVAEKADRIITMLPTSINAIEAYSGANGILKKVKKGSLLIDSSTIDPAVSKELAKEVEKMGAVFMDAPVSGGVGAARSGNLTFMVGGVEDEFAAAQELLGCMGSNVVYCGAVGTGQAAKICNNMLLAISMIGTAEAMNLGIRLGLDPKLLAKILNMSSGRCWSSDTYNPVPGV

SEQ ID NO: 264 - protein, 39 aa, Homo sapiens
  Payload ID: 36;
  Gene Symbol: HIBADH;
  Gene Name: 3-hydroxyisobutyrate dehydrogenase;
  ENSP ID: ENSP00000393365
MAASLRLLGAASGLRYWSRRLRPAAGSFAAGSIFPSRCC

SEQ ID NO: 265 - protein, 386 aa, Homo sapiens
  Payload ID: 37;
  Gene Symbol: HIBCH;
  Gene Name: 3-hydroxyisobutyryl-CoA hydrolase;
  Uniprot ID:  Q6NVY1;
  ENSP ID: ENSP00000352706
MGQREMWRLMSRFNAFKRTNTILHHLRMSKHTDAAEEVLLEKKGCTGVITLNRPKFLNALTLNMIRQIYPQLKKWEQDPETFLIIIKGAGGKAFCAGGDIRVISEAEKAKQKIAPVFFREEYMLNNAVGSCQKPYVALIHGITMGGGVGLSVHGQFRVATEKCLFAMPETAIGLFPDVGGGYFLPRLQGKLGYFLALTGFRLKGRDVYRAGIATHFVDSEKLAMLEEDLLALKSPSKENIASVLENYHTESKIDRDKSFILEEHMDKINSCFSANTVEEIIENLQQDGSSFALEQLKVINKMSPTSLKITLRQLMEGSSKTLQEVLTMEYRLSQACMRGHDFHEGVRAVLIDKDQSPKWKPADLKEVTEEDLNNHFKSLGSSDLKF

SEQ ID NO: 266 - protein, 338 aa, Homo sapiens
  Payload ID: 37;
  Gene Symbol: HIBCH;
  Gene Name: 3-hydroxyisobutyryl-CoA hydrolase;
  Uniprot ID:  Q6NVY1;
  ENSP ID: ENSP00000376144
MGQREMWRLMSRFNAFKRTNTILHHLRMSKHTDAAEEVLLEKKGCTGVITLNRPKFLNALTLNMIRQIYPQLKKWEQDPETFLIIIKGAGGKAFCAGGDIRVISEAEKAKQKIAPVFFREEYMLNNAVGSCQKPYVALIHGITMGGGVGLSVHGQFRVATEKCLFAMPETAIGLFPDVGGGYFLPRLQGKLGYFLALTGFRLKGRDVYRAGIATHFVDSEKLAMLEEDLLALKSPSKENIASVLENYHTESKIDRDKSFILEEHMDKINSCFSANTVEEIIENLQQDGSSFALEQLKVINKMSPTSLKITLRQLMEGSSKTLQEVLTMEYRLSQACMF

SEQ ID NO: 267 - protein, 69 aa, Homo sapiens
  Payload ID: 37;
  Gene Symbol: HIBCH;
  Gene Name: 3-hydroxyisobutyryl-CoA hydrolase;
  ENSP ID: ENSP00000376145
  MOD_RES (1)..(1): Any amino acid
XISEAEKAKQKIAPVFFREEYMLNNAVGSCQKPYVALIHGITMGGDCSLMWVEVISCHDSKENLVTSLH

SEQ ID NO: 268 - protein, 163 aa, Homo sapiens
  Payload ID: 37;
  Gene Symbol: HIBCH;
  Gene Name: 3-hydroxyisobutyryl-CoA hydrolase;
  ENSP ID: ENSP00000386274
MLEEDLLALKSPSKENIASVLENYHTESKIDRDKSFILEEHMDKINSCFSANTVEEIIENLQQDGSSFALEQLKVINKMSPTSLKITLRQLMEGSSKTLQEVLTMEYRLSQACMRGHDFHEGVRAVLIDKDQSPKWKPADLKEVTEEDLNNHFKSLGSSDLKF

SEQ ID NO: 269 - protein, 128 aa, Homo sapiens
  Payload ID: 37;
  Gene Symbol: HIBCH;
  Gene Name: 3-hydroxyisobutyryl-CoA hydrolase;
  ENSP ID: ENSP00000387098
MLAMLEEDLLALKSPSKENIASVLENYHTESKIDRDKSFILEEHMDKINSCFSANTVEEIIENLQQDGSSFALEQLKVINKMSPTSLKITLRQLMEGSSKTLQEVLTMEYRLSQACMRGHDFHEGVRA

SEQ ID NO: 270 - protein, 273 aa, Homo sapiens
  Payload ID: 37;
  Gene Symbol: HIBCH;
  Gene Name: 3-hydroxyisobutyryl-CoA hydrolase;
  ENSP ID: ENSP00000387247
MPGMPGRARPGAASLPGQGPRRPARRGEEPSRRHRLTYPRRGDGARRSPARAPDPRRRGSGAGTLWFNAFKRTNTILHHLRMSKHTDAAEEVLLEKKGCTGVITLNRPKFLNALTLNMIRQIYPQLKKWEQDPETFLIIIKGAGGKAFCAGGDIRVISEAEKAKQKIAPVFFREEYMLNNAVGSCQKPYVALIHGITMGGGVGLSVHGQFRVATEKCLFAMPETAIGLFPDVGGGYFLPRLQGKLGYFLALTGFRLKGRDVYRAGIATHFVDS

SEQ ID NO: 271 - protein, 38 aa, Homo sapiens
  Payload ID: 37;
  Gene Symbol: HIBCH;
  Gene Name: 3-hydroxyisobutyryl-CoA hydrolase;
  ENSP ID: ENSP00000398060
  MOD_RES (1)..(1): Any amino acid
XLIDKDQSPKWKPADLKEVTEEDLNNHFKSLGSSDLKF

SEQ ID NO: 272 - protein, 119 aa, Homo sapiens
  Payload ID: 37;
  Gene Symbol: HIBCH;
  Gene Name: 3-hydroxyisobutyryl-CoA hydrolase;
  ENSP ID: ENSP00000399263
QSKIDRDKSFILEEHMDKINSCFSANTVEEIIENLQQDGSSFALEQLKVINKMSPTSLKITLRQLMEGSSKTLQEVLTMEYRLSQACMRGHDFHEGVRAGKWQMGTYHFGEMGFVSICC

SEQ ID NO: 273 - protein, 52 aa, Homo sapiens
  Payload ID: 37;
  Gene Symbol: HIBCH;
  Gene Name: 3-hydroxyisobutyryl-CoA hydrolase;
  ENSP ID: ENSP00000414820
DVGGGYFLPRLQGKLGYFLALTGFRLKGRDVYRAGIATHFVDSEKNGDDTIT

SEQ ID NO: 274 - protein, 380 aa, Homo sapiens
  Payload ID: 37;
  Gene Symbol: HIBCH;
  Gene Name: 3-hydroxyisobutyryl-CoA hydrolase;
  ENSP ID: ENSP00000481055
MWRLMSRFNAFKRTNTILHHLRMSKHTDAAEEVLLEKKGCTGVITLNRPKFLNALTLNMIRQIYPQLKKWEQDPETFLIIIKGAGGKAFCAGGDIRVISEAEKAKQKIAPVFFREEYMLNNAVGSCQKPYVALIHGITMGGGVGLSVHGQFRVATEKCLFAMPETAIGLFPDVGGGYFLTTPRKTWLLPCINGFRLKGRDVYRAGIATHFVDSEKLAMLEEDLLALKSPSKENIASVLENYHTESKIDRDKSFILEEHMDKINSCFSANTVEEIIENLQQDGSSFALEQLKVINKMSPTSLKITLRQLMEGSSKTLQEVLTMEYRLSQACMRGHDFHEGVRAVLIDKDQSPKWKPADLKEVTEEDLNNHFKSLGSSDLKF

SEQ ID NO: 275 - protein, 182 aa, Homo sapiens
  Payload ID: 38;
  Gene Symbol: HMGCL;
  Gene Name: 3-hydroxymethyl-3-methylglutaryl-CoA lyase;
  ENSP ID: ENSP00000235958
  MOD_RES (1)..(1): Any amino acid
XKALPRRLVGLASLRAVSTSSMGTLPKRVKIVEVGPRDGLQNEKVTKKFYSMGCYEISLGDTIGVGTPGIMKDMLSAVMQEVPLAALAVHCHDTYGQALANTLMALQMGVSVVDSSVAGLGGCPYAQGASGNLATEDLVYMLEGLGIHTGVNLQKLLEAGNFICQALNRKTSSKVAQATCKL

SEQ ID NO: 276 - protein, 77 aa, Homo sapiens
  Payload ID: 38;
  Gene Symbol: HMGCL;
  Gene Name: 3-hydroxymethyl-3-methylglutaryl-CoA lyase;
  ENSP ID: ENSP00000363611
MLEARREWSRKVFPWSGATQQPGTPFHSPSQTLRRSAGQRPAGVPVPADVLLWTSSRLCVPPLMCSSPCPATCVSAC

SEQ ID NO: 277 - protein, 325 aa, Homo sapiens
  Payload ID: 38;
  Gene Symbol: HMGCL;
  Gene Name: 3-hydroxymethyl-3-methylglutaryl-CoA lyase;
  Uniprot ID:  P35914;
  ENSP ID: ENSP00000363614
MAAMRKALPRRLVGLASLRAVSTSSMGTLPKRVKIVEVGPRDGLQNEKNIVSTPVKIKLIDMLSEAGLSVIETTSFVSPKWVPQMGDHTEVLKGIQKFPGINYPVLTPNLKGFEAAVAAGAKEVVIFGAASELFTKKNINCSIEESFQRFDAILKAAQSANISVRGYVSCALGCPYEGKISPAKVAEVTKKFYSMGCYEISLGDTIGVGTPGIMKDMLSAVMQEVPLAALAVHCHDTYGQALANTLMALQMGVSVVDSSVAGLGGCPYAQGASGNLATEDLVYMLEGLGIHTGVNLQKLLEAGNFICQALNRKTSSKVAQATCKL

SEQ ID NO: 278 - protein, 254 aa, Homo sapiens
  Payload ID: 38;
  Gene Symbol: HMGCL;
  Gene Name: 3-hydroxymethyl-3-methylglutaryl-CoA lyase;
  Uniprot ID:  P35914;
  ENSP ID: ENSP00000389281
MAAMRKALPRRLVGLASLRAVSTSSMGTLPKRVKIVEVGPRDGLQNEKNIVSTPVKIKLIDMLSEAGLSVIETTSFVSPKWVPQMGDHTEVLKGIQKFPGINYPVLTPNLKGFEAAVTKKFYSMGCYEISLGDTIGVGTPGIMKDMLSAVMQEVPLAALAVHCHDTYGQALANTLMALQMGVSVVDSSVAGLGGCPYAQGASGNLATEDLVYMLEGLGIHTGVNLQKLLEAGNFICQALNRKTSSKVAQATCKL

SEQ ID NO: 279 - protein, 340 aa, Homo sapiens
  Payload ID: 39;
  Gene Symbol: HMGCLL1;
  Gene Name: 3-hydroxymethyl-3-methylglutaryl-CoA lyase-like 1;
  Uniprot ID:  Q8TB92;
  ENSP ID: ENSP00000274901
MGNVPSAVKHCLSYQQLLREHLWIGDSVAGALDPAQETSQLSGLPEFVKIVEVGPRDGLQNEKVIVPTDIKIEFINRLSQTGLSVIEVTSFVSSRWVPQMADHTEVMKGIHQYPGVRYPVLTPNLQGFHHAVAAGATEISVFGAASESFSKKNINCSIEESMGKFEEVVKSARHMNIPARGYVSCALGCPYEGSITPQKVTEVSKRLYGMGCYEISLGDTIGVGTPGSMKRMLESVMKEIPPGALAVHCHDTYGQALANILTALQMGINVVDSAVSGLGGCPYAKGASGNVATEDLIYMLNGLGLNTGVNLYKVMEAGDFICKAVNKTTNSKVAQASFNA

SEQ ID NO: 280 - protein, 308 aa, Homo sapiens
  Payload ID: 39;
  Gene Symbol: HMGCLL1;
  Gene Name: 3-hydroxymethyl-3-methylglutaryl-CoA lyase-like 1;
  Uniprot ID:  Q8TB92;
  ENSP ID: ENSP00000309737
MGNVPSAVKHCLSYQQLLREHLWIGDSVAGALDPAQETSQLSGLPEFVKIVEVGPRDGLQNEKVIVPTDIKIEFINRLSQTGLSVIEVTSFVSSRWVPQVAAGATEISVFGAASESFSKKNINCSIEESMGKFEEVVKSARHMNIPARGYVSCALGCPYEGSITPQKVTEVSKRLYGMGCYEISLGDTIGVGTPGSMKRMLESVMKEIPPGALAVHCHDTYGQALANILTALQMGINVVDSAVSGLGGCPYAKGASGNVATEDLIYMLNGLGLNTGVNLYKVMEAGDFICKAVNKTTNSKVAQASFNA

SEQ ID NO: 281 - protein, 237 aa, Homo sapiens
  Payload ID: 39;
  Gene Symbol: HMGCLL1;
  Gene Name: 3-hydroxymethyl-3-methylglutaryl-CoA lyase-like 1;
  ENSP ID: ENSP00000359887
MGNVPSAVKHCLSYQQLLREHLWIGDSVAGALDPAQETSQLSGLPEFVKIVEVGPRDGLQNEKVIVPTDIKIEFINRLSQTGLSVIEVTSFVSSRWVPQVSKRLYGMGCYEISLGDTIGVGTPGSMKRMLESVMKEIPPGALAVHCHDTYGQALANILTALQMGINVVDSAVSGLGGCPYAKGASGNVATEDLIYMLNGLGLNTGVNLYKVMEAGDFICKAVNKTTNSKVAQASFNA

SEQ ID NO: 282 - protein, 53 aa, Homo sapiens
  Payload ID: 39;
  Gene Symbol: HMGCLL1;
  Gene Name: 3-hydroxymethyl-3-methylglutaryl-CoA lyase-like 1;
  Uniprot ID:  Q8TB92;
  ENSP ID: ENSP00000359889
MGNVPSAVKHCLSYQQLLREHLWIGDSVAGALDPAQELQSVMLMLHHGPLRKP

SEQ ID NO: 283 - protein, 370 aa, Homo sapiens
  Payload ID: 39;
  Gene Symbol: HMGCLL1;
  Gene Name: 3-hydroxymethyl-3-methylglutaryl-CoA lyase-like 1;
  Uniprot ID:  Q8TB92;
  ENSP ID: ENSP00000381654
MGNVPSAVKHCLSYQQLLREHLWIGDSVAGALDPAQTSLLTNLHCFQPDVSGFSVSLAGTVACIHWETSQLSGLPEFVKIVEVGPRDGLQNEKVIVPTDIKIEFINRLSQTGLSVIEVTSFVSSRWVPQMADHTEVMKGIHQYPGVRYPVLTPNLQGFHHAVAAGATEISVFGAASESFSKKNINCSIEESMGKFEEVVKSARHMNIPARGYVSCALGCPYEGSITPQKVTEVSKRLYGMGCYEISLGDTIGVGTPGSMKRMLESVMKEIPPGALAVHCHDTYGQALANILTALQMGINVVDSAVSGLGGCPYAKGASGNVATEDLIYMLNGLGLNTGVNLYKVMEAGDFICKAVNKTTNSKVAQASFNA

SEQ ID NO: 284 - protein, 151 aa, Homo sapiens
  Payload ID: 39;
  Gene Symbol: HMGCLL1;
  Gene Name: 3-hydroxymethyl-3-methylglutaryl-CoA lyase-like 1;
  ENSP ID: ENSP00000412924
MGNVPSAVKHCLSYQQLLREHLWIGDSVAGALDPAQETSQLSGLPEFVKIVEVGPRDGLQNEKVIVPTDIKIEFINRLSQTGLSVIEVTSFVSSRWVPQVAAGATEISVFGAASESFSKKNINCSIEESMGKFEEVVKSARHMNIPARGYL

SEQ ID NO: 285 - protein, 174 aa, Homo sapiens
  Payload ID: 39;
  Gene Symbol: HMGCLL1;
  Gene Name: 3-hydroxymethyl-3-methylglutaryl-CoA lyase-like 1;
  ENSP ID: ENSP00000424309
MGNVPSAVKHCLSYQQLLREHLWIGDSVAGALDPAQETSQLSGLPEFVKIVEVGPRDGLQNEKVIVPTDIKIEFINRLSQTGLSVIEVTSFVSSRWVPQMGINVVDSAVSGLGGCPYAKGASGNVATEDLIYMLNGLGLNTGVNLYKVMEAGDFICKAVNKTTNSKVAQASFNA

SEQ ID NO: 286 - protein, 39 aa, Homo sapiens
  Payload ID: 39;
  Gene Symbol: HMGCLL1;
  Gene Name: 3-hydroxymethyl-3-methylglutaryl-CoA lyase-like 1;
  ENSP ID: ENSP00000426054
MGNVPSAVKHCLSYQQLLREHLWIGDSVAGALDPAQEKE

SEQ ID NO: 287 - protein, 268 aa, Homo sapiens
  Payload ID: 40;
  Gene Symbol: KDSR;
  Gene Name: 3-ketodihydrosphingosine reductase;
  Uniprot ID:  Q06136;
  ENSP ID: ENSP00000312939
MLLLAAAFLVAFVLLLYMVSPLISPKPLALPGAHVVVTGGSSGIGKCIAIECYKQGAFITLVARNEDKLLQAKKEIEMHSINDKQVVLCISVDVSQDYNQVENVIKQAQEKLGPVDMLVNCAGMAVSGKFEDLEVSTFEVKPYNVYITVAYPPDTDTPGFAEENRTKPLETRLISETTSVCKPEQVAKQIVKDAIQGNFNSSLGSDGYMLSALTCGMAPVTSITEGLQQVVTMGLFRTIALFYLGSFDSIVRRCMMQREKSENADKTA

SEQ ID NO: 288 - protein, 332 aa, Homo sapiens
  Payload ID: 40;
  Gene Symbol: KDSR;
  Gene Name: 3-ketodihydrosphingosine reductase;
  Uniprot ID:  Q06136;
  ENSP ID: ENSP00000385083
MLLLAAAFLVAFVLLLYMVSPLISPKPLALPGAHVVVTGGSSGIGKCIAIECYKQGAFITLVARNEDKLLQAKKEIEMHSINDKQVVLCISVDVSQDYNQVENVIKQAQEKLGPVDMLVNCAGMAVSGKFEDLEVSTFERLMSINYLGSVYPSRAVITTMKERRVGRIVFVSSQAGQLGLFGFTAYSASKFAIRGLAEALQMEVKPYNVYITVAYPPDTDTPGFAEENRTKPLETRLISETTSVCKPEQVAKQIVKDAIQGNFNSSLGSDGYMLSALTCGMAPVTSITEGLQQVVTMGLFRTIALFYLGSFDSIVRRCMMQREKSENADKTA

SEQ ID NO: 289 - protein, 155 aa, Homo sapiens
  Payload ID: 40;
  Gene Symbol: KDSR;
  Gene Name: 3-ketodihydrosphingosine reductase;
  ENSP ID: ENSP00000467962
MLLLAAAFLVAFVLLLYMVSPLISPKPLALPGAHVVVTGGSSGIGKCIAIECYKQGAFITLVARNEDKLLQAKKEIEMHSINDKQVVLCISVDVSQDYNQVENVIKQAQEKLGPVDMLVNCAGMAVSGKFEDLERLMSINYLGSVYPSRAVITTM

SEQ ID NO: 290 - protein, 203 aa, Homo sapiens
  Payload ID: 40;
  Gene Symbol: KDSR;
  Gene Name: 3-ketodihydrosphingosine reductase;
  ENSP ID: ENSP00000468203
QDYNQVENVIKQAQEKLGPVDMLVNCAGMAVSGKFEDLEVSTFERLMSINYLGSVYPSRAVITTMKERRVGRIVFVSSQAGQLGLFGFTAYSASKFAIRGLAEALQMEVKPYNVYITVAYPPDTDTPGFAEENRTKPLETRLISETTSVCKPEQVAKQIVKDAIVVTMGLFRTIALFYLGSFDSIVRRCMMQREKSENADKTA

SEQ ID NO: 291 - protein, 520 aa, Homo sapiens
  Payload ID: 41;
  Gene Symbol: OXCT1;
  Gene Name: 3-oxoacid CoA transferase 1;
  Uniprot ID:  P55809;
  ENSP ID: ENSP00000196371
MAALKLLSSGLRLCASARGSGATWYKGCVCSFSTSAHRHTKFYTDPVEAVKDIPDGATVLVGGFGLCGIPENLIDALLKTGVKGLTAVSNNAGVDNFGLGLLLRSKQIKRMVSSYVGENAEFERQYLSGELEVELTPQGTLAERIRAGGAGVPAFYTPTGYGTLVQEGGSPIKYNKDGSVAIASKPREVREFNGQHFILEEAITGDFALVKAWKADRAGNVIFRKSARNFNLPMCKAAETTVVEVEEIVDIGAFAPEDIHIPQIYVHRLIKGEKYEKRIERLSIRKEGDGEAKSAKPGDDVRERIIKRAALEFEDGMYANLGIGIPLLASNFISPNITVHLQSENGVLGLGPYPRQHEADADLINAGKETVTILPGASFFSSDESFAMIRGGHVDLTMLGAMQVSKYGDLANWMIPGKMVKGMGGAMDLVSSAKTKVVVTMEHSAKGNAHKIMEKCTLPLTGKQCVNRIITEKAVFDVDKKKGLTLIELWEGLTVDDVQKSTGCDFAVSPKLMPMQQIAN

SEQ ID NO: 292 - protein, 123 aa, Homo sapiens
  Payload ID: 41;
  Gene Symbol: OXCT1;
  Gene Name: 3-oxoacid CoA transferase 1;
  Uniprot ID:  P55809;
  ENSP ID: ENSP00000421143
MLGAMQVSKYGDLANWMIPGKMVKGMGGAMDLVSSAKTKVVVTMEHSAKGNAHKIMEKCTLPLTGKQCVNRIITEKAVFDVDKKKGLTLIELWEGLTVDDVQKSTGCDFAVSPKLMPMQQIAN

SEQ ID NO: 293 - protein, 123 aa, Homo sapiens; identical to SEQ ID NO: 292
  Payload ID: 41;
  Gene Symbol: OXCT1;
  Gene Name: 3-oxoacid CoA transferase 1;
  Uniprot ID:  P55809;
  ENSP ID: ENSP00000423144

SEQ ID NO: 294 - protein, 334 aa, Homo sapiens
  Payload ID: 41;
  Gene Symbol: OXCT1;
  Gene Name: 3-oxoacid CoA transferase 1;
  ENSP ID: ENSP00000425348
MMVREFNGQHFILEEAITGDFALVKAWKADRAGNVIFRKSARNFNLPMCKAAETTVVEVEEIVDIGAFAPEDIHIPQIYVHRLIKGEKYEKRIERLSIRKEGDGEAKSAKPGDDVRERIIKRAALEFEDGMYANLGIGIPLLASNFISPNITVHLQSENGVLGLGPYPRQHEADADLINAGKETVTILPGASFFSSDESFAMIRGGHVDLTMLGAMQVSKYGDLANWMIPGKMVKGMGGAMDLVSSAKTKVVVTMEHSAKGNAHKIMEKCTLPLTGKQCVNRIITEKAVFDVDKKKGLTLIELWEGLTVDDVQKSTGCDFAVSPKLMPMQQIAN

SEQ ID NO: 295 - protein, 517 aa, Homo sapiens
  Payload ID: 42;
  Gene Symbol: OXCT2;
  Gene Name: 3-oxoacid CoA transferase 2;
  Uniprot ID:  Q9BYC2;
  ENSP ID: ENSP00000361914
MAALRLLASVLGRGVPAGGSGLALSQGCARCFATSPRLRAKFYADPVEMVKDISDGATVMIGGFGLCGIPENLIAALLRTRVKDLQVVSSNVGVEDFGLGLLLAARQVRRIVCSYVGENTLCESQYLAGELELELTPQGTLAERIRAGGAGVPAFYTPTGYGTLVQEGGAPIRYTPDGHLALMSQPREVREFNGDHFLLERAIRADFALVKGWKADRAGNVVFRRSARNFNVPMCKAADVTAVEVEEIVEVGAFPPEDIHVPNIYVDRVIKGQKYEKRIERLTILKEEDGDAGKEEDARTRIIRRAALEFEDGMYANLGIGIPLLASNFISPSMTVHLHSENGILGLGPFPTEDEVDADLINAGKQTVTVLPGGCFFASDDSFAMIRGGHIQLTMLGAMQVSKYGDLANWMIPGKKVKGMGGAMDLVSSQKTRVVVTMQHCTKDNTPKIMEKCTMPLTGKRCVDRIITEKAVFDVHRKKELTLRELWEGLTVDDIKKSTGCAFAVSPNLRPMQQVAP

SEQ ID NO: 296 - protein, 459 aa, Homo sapiens
  Payload ID: 43;
  Gene Symbol: OXSM;
  Gene Name: 3-oxoacyl-ACP synthase, mitochondrial;
  Uniprot ID:  Q9NWU1;
  ENSP ID: ENSP00000280701
MSNCLQNFLKITSTRLLCSRLCQQLRSKRKFFGTVPISRLHRRVVITGIGLVTPLGVGTHLVWDRLIGGESGIVSLVGEEYKSIPCSVAAYVPRGSDEGQFNEQNFVSKSDIKSMSSPTIMAIGAAELAMKDSGWHPQSEADQVATGVAIGMGMIPLEVVSETALNFQTKGYNKVSPFFVPKILVNMAAGQVSIRYKLKGPNHAVSTACTTGAHAVGDSFRFIAHGDADVMVAGGTDSCISPLSLAGFSRARALSTNSDPKLACRPFHPKRDGFVMGEGAAVLVLEEYEHAVQRRARIYAEVLGYGLSGDAGHITAPDPEGEGALRCMAAALKDAGVQPEEISYINAHATSTPLGDAAENKAIKHLFKDHAYALAVSSTKGATGHLLGAAGAVEAAFTTLACYYQKLPPTLNLDCSEPEFDLNYVPLKAQEWKTEKRFIGLTNSFGFGGTNATLCIAGL

SEQ ID NO: 297 - protein, 220 aa, Homo sapiens
  Payload ID: 43;
  Gene Symbol: OXSM;
  Gene Name: 3-oxoacyl-ACP synthase, mitochondrial;
  ENSP ID: ENSP00000392334
MSNCLQNFLKITSTRLLCSRLCQQLRSKRKFFGTVPISRLHRRVVITGIGLVTPLGVGTHLVWDRLIGGESGIVSLVGEEYKSIPCSVAAYVPRGSDEGQFNEQNFVSKSDIKSMSSPTIMAIGAAELAMKDSGWHPQSEADQVATGVAIGMGMIPLEVVSETALNFQTKGYNKVSPFFVPKILVNMAAGQVSIRYKLKGPNHAVSTACTTGAHAVGDSF

SEQ ID NO: 298 - protein, 102 aa, Homo sapiens
  Payload ID: 43;
  Gene Symbol: OXSM;
  Gene Name: 3-oxoacyl-ACP synthase, mitochondrial;
  ENSP ID: ENSP00000404115
MSNCLQNFLKITSTRLLCSRLCQQLRSKRKFFGTVPISRLHRRVVITGIGLVTPLGVGTHLVWDRLIGGESGIVSLVGEEYKSIPCSVAAYVPRGSDEEPGL

SEQ ID NO: 299 - protein, 231 aa, Homo sapiens
  Payload ID: 43;
  Gene Symbol: OXSM;
  Gene Name: 3-oxoacyl-ACP synthase, mitochondrial;
  ENSP ID: ENSP00000409817
MSNCLQNFLKITSTRLLCSRLCQQLRSKRKFFGTVPISRLHRRVVITGIGLVTPLGVGTHLVWDRLIGGESGIVSLVGEEYKSIPCSVAAYVPRGSDEGQFNEQNFVSKSDIKSMSSPTIMAIGAAELAMKDSGWHPQSEADQVATGVAIGMGMIPLEVVSETALNFQTKGYNKVSPFFVPKILVNMAAGQVSIRYKLKGPNHAVSTACTTGAHAVGDSFRFIAHGDADVM

SEQ ID NO: 300 - protein, 376 aa, Homo sapiens
  Payload ID: 43;
  Gene Symbol: OXSM;
  Gene Name: 3-oxoacyl-ACP synthase, mitochondrial;
  Uniprot ID:  Q9NWU1;
  ENSP ID: ENSP00000411303
MSNCLQNFLKITSTRLLCSRLCQQLRSKRKFFGTVPISRLHRRVVITGIGLVTPLGVGTHLVWDRLIGGESGIVSLVGEEYKSIPCSVAAYVPRGSDEGQFNEQNFVSKSDIKSMSSPTIMAIGAAELAMKDSGWHPQSEADQVATGVAIGMGMIPLEVVSETALNFQTKGYNKVSPFFVPKILVNMAAGQVSIRYKLKGPNHAVSTACTTGAHAVGDSFRFIAHGDAGHITAPDPEGEGALRCMAAALKDAGVQPEEISYINAHATSTPLGDAAENKAIKHLFKDHAYALAVSSTKGATGHLLGAAGAVEAAFTTLACYYQKLPPTLNLDCSEPEFDLNYVPLKAQEWKTEKRFIGLTNSFGFGGTNATLCIAGL

SEQ ID NO: 301 - protein, 102 aa, Homo sapiens; identical to SEQ ID NO: 298
  Payload ID: 43;
  Gene Symbol: OXSM;
  Gene Name: 3-oxoacyl-ACP synthase, mitochondrial;
  ENSP ID: ENSP00000487031

SEQ ID NO: 302 - protein, 624 aa, Homo sapiens
  Payload ID: 44;
  Gene Symbol: PAPSS1;
  Gene Name: 3'-phosphoadenosine 5'-phosphosulfate synthase 1;
  Uniprot ID:  O43252;
  ENSP ID: ENSP00000265174
MEIPGSLCKKVKLSNNAQNWGMQRATNVTYQAHHVSRNKRGQVVGTRGGFRGCTVWLTGLSGAGKTTVSMALEEYLVCHGIPCYTLDGDNIRQGLNKNLGFSPEDREENVRRIAEVAKLFADAGLVCITSFISPYTQDRNNARQIHEGASLPFFEVFVDAPLHVCEQRDVKGLYKKARAGEIKGFTGIDSEYEKPEAPELVLKTDSCDVNDCVQQVVELLQERDIVPVDASYEVKELYVPENKLHLAKTDAETLPALKINKVDMQWVQVLAEGWATPLNGFMREREYLQCLHFDCLLDGGVINLSVPIVLTATHEDKERLDGCTAFALMYEGRRVAILRNPEFFEHRKEERCARQWGTTCKNHPYIKMVMEQGDWLIGGDLQVLDRVYWNDGLDQYRLTPTELKQKFKDMNADAVFAFQLRNPVHNGHALLMQDTHKQLLERGYRRPVLLLHPLGGWTKDDDVPLMWRMKQHAAVLEEGVLNPETTVVAIFPSPMMYAGPTEVQWHCRARMVAGANFYIVGRDPAGMPHPETGKDLYEPSHGAKVLTMAPGLITLEIVPFRVAAYNKKKKRMDYYDSEHHEDFEFISGTRMRKLAREGQKPPEGFMAPKAWTVLTEYYKSLEKA

SEQ ID NO: 303 - protein, 614 aa, Homo sapiens
  Payload ID: 45;
  Gene Symbol: PAPSS2;
  Gene Name: 3'-phosphoadenosine 5'-phosphosulfate synthase 2;
  Uniprot ID:  O95340;
  ENSP ID: ENSP00000354436
MSGIKKQKTENQQKSTNVVYQAHHVSRNKRGQVVGTRGGFRGCTVWLTGLSGAGKTTISFALEEYLVSHAIPCYSLDGDNVRHGLNRNLGFSPGDREENIRRIAEVAKLFADAGLVCITSFISPFAKDRENARKIHESAGLPFFEIFVDAPLNICESRDVKGLYKRARAGEIKGFTGIDSDYEKPETPERVLKTNLSTVSDCVHQVVELLQEQNIVPYTIIKDIHELFVPENKLDHVRAEAETLPSLSITKLDLQWVQVLSEGWATPLKGFMREKEYLQVMHFDTLLDDGVINMSIPIVLPVSAEDKTRLEGCSKFVLAHGGRRVAILRDAEFYEHRKEERCSRVWGTTCTKHPHIKMVMESGDWLVGGDLQVLEKIRWNDGLDQYRLTPLELKQKCKEMNADAVFAFQLRNPVHNGHALLMQDTRRRLLERGYKHPVLLLHPLGGWTKDDDVPLDWRMKQHAAVLEEGVLDPKSTIVAIFPSPMLYAGPTEVQWHCRSRMIAGANFYIVGRDPAGMPHPETKKDLYEPTHGGKVLSMAPGLTSVEIIPFRVAAYNKAKKAMDFYDPARHNEFDFISGTRMRKLAREGENPPDGFMAPKAWKVLTDYYRSLEKN

SEQ ID NO: 304 - protein, 619 aa, Homo sapiens
  Payload ID: 45;
  Gene Symbol: PAPSS2;
  Gene Name: 3'-phosphoadenosine 5'-phosphosulfate synthase 2;
  Uniprot ID:  O95340;
  ENSP ID: ENSP00000406157
MSGIKKQKTENQQKSTNVVYQAHHVSRNKRGQVVGTRGGFRGCTVWLTGLSGAGKTTISFALEEYLVSHAIPCYSLDGDNVRHGLNRNLGFSPGDREENIRRIAEVAKLFADAGLVCITSFISPFAKDRENARKIHESAGLPFFEIFVDAPLNICESRDVKGLYKRARAGEIKGFTGIDSDYEKPETPERVLKTNLSTVSDCVHQVVELLQEQNIVPYTIIKDIHELFVPENKLDHVRAEAETLPSLSITKLDLQWVQVLSEGWATPLKGFMREKEYLQVMHFDTLLDGMALPDGVINMSIPIVLPVSAEDKTRLEGCSKFVLAHGGRRVAILRDAEFYEHRKEERCSRVWGTTCTKHPHIKMVMESGDWLVGGDLQVLEKIRWNDGLDQYRLTPLELKQKCKEMNADAVFAFQLRNPVHNGHALLMQDTRRRLLERGYKHPVLLLHPLGGWTKDDDVPLDWRMKQHAAVLEEGVLDPKSTIVAIFPSPMLYAGPTEVQWHCRSRMIAGANFYIVGRDPAGMPHPETKKDLYEPTHGGKVLSMAPGLTSVEIIPFRVAAYNKAKKAMDFYDPARHNEFDFISGTRMRKLAREGENPPDGFMAPKAWKVLTDYYRSLEKN

SEQ ID NO: 305 - protein, 429 aa, Homo sapiens
  Payload ID: 46;
  Gene Symbol: PDPK1;
  Gene Name: 3-phosphoinositide dependent prt kinase 1;
  Uniprot ID:  O15530;
  ENSP ID: ENSP00000268673
MARTTSQLYDAVPIQSSVVLCSCPSPSMVRTQTESSTPPGIPGGSRQGPAMDGTAAEPRPGAGSLQHAQPPPQPRKKRPEDFKFGKILGEGSFSTVVLARELATSREYATRANSFVGTAQYVSPELLTEKSACKSSDLWALGCIIYQLVAGLPPFRAGNEYLIFQKIIKLEYDFPEKFFPKARDLVEKLLVLDATKRLGCEEMEGYGPLKAHPFFESVTWENLHQQTPPKLTAYLPAMSEDDEDCYGNYDNLLSQFGCMQVSSSSSSHSLSASDTGLPQRSGSNIEQYIHDLDSNSFELDLQFSEDEKRLLLEKQAGGNPWHQFVENNLILKMGPVDKRKGLFARRRQLLLTEGPHLYYVDPVNKVLKGEIPWSQELRPEAKNFKTFFVHTPNRTYYLMDPSGNAHKWCRKIQEVWRQRYQSHPDAAVQ

SEQ ID NO: 306 - protein, 556 aa, Homo sapiens
  Payload ID: 46;
  Gene Symbol: PDPK1;
  Gene Name: 3-phosphoinositide dependent prt kinase 1;
  Uniprot ID:  O15530;
  ENSP ID: ENSP00000344220
MARTTSQLYDAVPIQSSVVLCSCPSPSMVRTQTESSTPPGIPGGSRQGPAMDGTAAEPRPGAGSLQHAQPPPQPRKKRPEDFKFGKILGEGSFSTVVLARELATSREYAIKILEKRHIIKENKVPYVTRERDVMSRLDHPFFVKLYFTFQDDEKLYFGLSYAKNGELLKYIRKIGSFDETCTRFYTAEIVSALEYLHGKGIIHRDLKPENILLNEDMHIQITDFGTAKVLSPESKQARANSFVGTAQYVSPELLTEKSACKSSDLWALGCIIYQLVAGLPPFRAGNEYLIFQKIIKLEYDFPEKFFPKARDLVEKLLVLDATKRLGCEEMEGYGPLKAHPFFESVTWENLHQQTPPKLTAYLPAMSEDDEDCYGNYDNLLSQFGCMQVSSSSSSHSLSASDTGLPQRSGSNIEQYIHDLDSNSFELDLQFSEDEKRLLLEKQAGGNPWHQFVENNLILKMGPVDKRKGLFARRRQLLLTEGPHLYYVDPVNKVLKGEIPWSQELRPEAKNFKTFFVHTPNRTYYLMDPSGNAHKWCRKIQEVWRQRYQSHPDAAVQ

SEQ ID NO: 307 - protein, 529 aa, Homo sapiens
  Payload ID: 46;
  Gene Symbol: PDPK1;
  Gene Name: 3-phosphoinositide dependent prt kinase 1;
  ENSP ID: ENSP00000373876
MVRTQTESSTPPGIPGGSRQGPAMDGTAAEPRPGAGSLQHAQPPPQPRKKRPEDFKFGKILGEGSFSTVVLARELATSREYAIKILEKRHIIKENKVPYVTRERDVMSRLDHPFFVKLYFTFQDDEKLYFGLSYAKNGELLKYIRKIGSFDETCTRFYTAEIVSALEYLHGKGIIHRDLKPENILLNEDMHIQITDFGTAKVLSPESKQARANSFVGTAQYVSPELLTEKSACKSSDLWALGCIIYQLVAGLPPFRAGNEYLIFQKIIKLEYDFPEKFFPKARDLVEKLLVLDATKRLGCEEMEGYGPLKAHPFFESVTWENLHQQTPPKLTAYLPAMSEDDEDCYGNYDNLLSQFGCMQVSSSSSSHSLSASDTGLPQRSGSNIEQYIHDLDSNSFELDLQFSEDEKRLLLEKQAGGNPWHQFVENNLILKMGPVDKRKGLFARRRQLLLTEGPHLYYVDPVNKVLKGEIPWSQELRPEAKNFKTFFVHTPNRTYYLMDPSGNAHKWCRKIQEVWRQRYQSHPDAAVQ

SEQ ID NO: 308 - protein, 454 aa, Homo sapiens
  Payload ID: 46;
  Gene Symbol: PDPK1;
  Gene Name: 3-phosphoinositide dependent prt kinase 1;
  Uniprot ID:  O15530;
  ENSP ID: ENSP00000395357
MARTTSQLYDAVPIQSSVVLCSCPSPSMVRTQTESSTPPGIPGGSRQGPAMDGTAAEPRPGAGSLQHAQPPPQPRKKRPEDFKFGKILGEGSFSTVVLARELATSREYAIKILEKRHIIKENKVPYVTRERDVMSRLDHPFFVKLYFTFQDDEKLYFGLSYAKNGELLKYIRKIGSFDETCTRFYTAEIVSALEYLHGKGIIHRDLKPENILLNEDMHIQITDFGTAKVLSPESKQARANSFVGTAQYVSPELLTEKSACKSSDLWALGCIIYQLVAGLPPFRAGNEYLIFQKIIKLEYDFPEKFFPKARDLVEKLLVLDATKRLGCEEMEGYGPLKAHPFFESVTWENLHQQTPPKLTAYLPAMSEDDEDCYGNYDNLLSQFGCMQVSSSSSSHSLSASDTGLPQRSGSNIEQYIHDLDSNSFELDLQFSEDEKRLLLEKQAGGNPCLTGRII

SEQ ID NO: 309 - protein, 35 aa, Homo sapiens
  Payload ID: 46;
  Gene Symbol: PDPK1;
  Gene Name: 3-phosphoinositide dependent prt kinase 1;
  ENSP ID: ENSP00000455025
MARTTSQLRNRPGLPPGTGSLAPPPAREAEGASSC

SEQ ID NO: 310 - protein, 40 aa, Homo sapiens
  Payload ID: 46;
  Gene Symbol: PDPK1;
  Gene Name: 3-phosphoinositide dependent prt kinase 1;
  ENSP ID: ENSP00000455438
  MOD_RES (1)..(1): Any amino acid
XHHSELETSILYFRRSLSWNMTFQKNSSLRQETSWRNFWF

SEQ ID NO: 311 - protein, 88 aa, Homo sapiens
  Payload ID: 46;
  Gene Symbol: PDPK1;
  Gene Name: 3-phosphoinositide dependent prt kinase 1;
  ENSP ID: ENSP00000455492
MKICTSRSQILEQQKSYPQRANKPGPTHSWEQRSTFLQSCSRRSPPVRDLWALGCIIYQLVAGLPPFRAGNEYLIFQKIIKLEYDFPE

SEQ ID NO: 312 - protein, 149 aa, Homo sapiens
  Payload ID: 46;
  Gene Symbol: PDPK1;
  Gene Name: 3-phosphoinositide dependent prt kinase 1;
  ENSP ID: ENSP00000455551
MVRTQTESSTPPGIPGGSRQGPAMDGTAAEPRPGAGSLQHAQPPPQPRKKRPEDFKFGKILGEGSFSTVVLARELATSREYAIKILEKRHIIKENKVPYVTRERDVMSRLDHPFFVKLYFTFQDDEKLYFGLSYAKNGELLKYIRKIGS

SEQ ID NO: 313 - protein, 55 aa, Homo sapiens
  Payload ID: 46;
  Gene Symbol: PDPK1;
  Gene Name: 3-phosphoinositide dependent prt kinase 1;
  ENSP ID: ENSP00000455684
MARTTSQLILDDSGRENSPFTARPRGIWVLLLPVAVLSVVGSPWEAECAGSPRGK

SEQ ID NO: 314 - protein, 500 aa, Homo sapiens
  Payload ID: 47;
  Gene Symbol: ABAT;
  Gene Name: 4-aminobutyrate aminotransferase;
  Uniprot ID:  P80404;
  ENSP ID: ENSP00000268251
MASMLLAQRLACSFQHSYRLLVPGSRHISQAAAKVDVEFDYDGPLMKTEVPGPRSQELMKQLNIIQNAEAVHFFCNYEESRGNYLVDVDGNRMLDLYSQISSVPIGYSHPALLKLIQQPQNASMFVNRPALGILPPENFVEKLRQSLLSVAPKGMSQLITMACGSCSNENALKTIFMWYRSKERGQRGFSQEELETCMINQAPGCPDYSILSFMGAFHGRTMGCLATTHSKAIHKIDIPSFDWPIAPFPRLKYPLEEFVKENQQEEARCLEEVEDLIVKYRKKKKTVAGIIVEPIQSEGGDNHASDDFFRKLRDIARKHGCAFLVDEVQTGGGCTGKFWAHEHWGLDDPADVMTFSKKMMTGGFFHKEEFRPNAPYRIFNTWLGDPSKNLLLAEVINIIKREDLLNNAAHAGKALLTGLLDLQARYPQFISRVRGRGTFCSFDTPDDSIRNKLILIARNKGVVLGGCGDKSIRFRPTLVFRDHHAHLFLNIFSDILADFK

SEQ ID NO: 315 - protein, 500 aa, Homo sapiens; identical to SEQ ID NO: 314
  Payload ID: 47;
  Gene Symbol: ABAT;
  Gene Name: 4-aminobutyrate aminotransferase;
  Uniprot ID:  P80404;
  ENSP ID: ENSP00000379845

SEQ ID NO: 316 - protein, 500 aa, Homo sapiens; identical to SEQ ID NO: 314
  Payload ID: 47;
  Gene Symbol: ABAT;
  Gene Name: 4-aminobutyrate aminotransferase;
  Uniprot ID:  P80404;
  ENSP ID: ENSP00000411916

SEQ ID NO: 317 - protein, 91 aa, Homo sapiens
  Payload ID: 47;
  Gene Symbol: ABAT;
  Gene Name: 4-aminobutyrate aminotransferase;
  ENSP ID: ENSP00000454415
MASMLLAQRLACSFQHSYRLLVPGSNPGSRHISQAAAKVDVEFDYDGPLMKTEVPGPRSQELMKQLNIIQNAEAVHFFCNYEESRGNYLVD

SEQ ID NO: 318 - protein, 515 aa, Homo sapiens
  Payload ID: 47;
  Gene Symbol: ABAT;
  Gene Name: 4-aminobutyrate aminotransferase;
  ENSP ID: ENSP00000454963
MASMLLAQRLACSFQHSYRLLVPGSRHISQAAAKVDVEFDYDGPLMKTEVPGPRSQELMKQLNIIQNAEAVHFFCNYEESRGNYLVDVDGNRMLDLYSQISSVPIGYSHPALLKLIQQPQNASMFVNRPALGILPPENFVEKLRQSLLSVAPKGMSQLITMACGSCSNENALKTIFMWYRSKERGQRGFSQEELETCMINQAPGCPDYSILSFMGAFHGRTMGCLATTHSKAIHKIDIPSFDWPIAPFPRLKYPLEEFVKENQQEEARCLEEVEDLIVKYRKKKKTVAGIIVEPIQSEGGDNHASDDFFRKLRDIARKHGCAFLVDEVQTGGGCTGKFWAHEHWGLDDPADVMTFSKKMMTGGFFHKEEFRPNAPYRIFNTWLGDPSKNLLLAEVINIIKREDLLNNAAHAGKALLTGLLDLQARYPQFISRVRGRGTFCSFDTPDDSIRNKLILIARNKALPACDFEKPRSSPTSCLFQVWCWVAVVTNPFVSVPRWSSGITTLTCSSIFSVTS

SEQ ID NO: 319 - protein, 31 aa, Homo sapiens
  Payload ID: 47;
  Gene Symbol: ABAT;
  Gene Name: 4-aminobutyrate aminotransferase;
  ENSP ID: ENSP00000455184
MASMLLAQRLACSFQHSYRLLVPGSRHISQA

SEQ ID NO: 320 - protein, 53 aa, Homo sapiens
  Payload ID: 47;
  Gene Symbol: ABAT;
  Gene Name: 4-aminobutyrate aminotransferase;
  ENSP ID: ENSP00000455198
MASMLLAQRLACSFQHSYRLLVPGVNETAEYNSECRGCAFFLQLRREPRQLPG

SEQ ID NO: 321 - protein, 117 aa, Homo sapiens
  Payload ID: 47;
  Gene Symbol: ABAT;
  Gene Name: 4-aminobutyrate aminotransferase;
  ENSP ID: ENSP00000455502
MASMLLAQRLACSFQHSYRLLVPGSRHISQAAAKVDVEFDYDGPLMKTEVPGPRSQELMKQLNIIQNAEAVHFFCNYEESRGNYLVDVDGNRMLDLYSQISSVPIESHCHPGWSAVA

SEQ ID NO: 322 - protein, 65 aa, Homo sapiens
  Payload ID: 47;
  Gene Symbol: ABAT;
  Gene Name: 4-aminobutyrate aminotransferase;
  ENSP ID: ENSP00000456267
MASMLLAQRLACSFQHSYRLLVPGSRHISQAAAKVDVEFDYDGPLMKTEVPGPRSQELMKQLNII

SEQ ID NO: 323 - protein, 515 aa, Homo sapiens
  Payload ID: 47;
  Gene Symbol: ABAT;
  Gene Name: 4-aminobutyrate aminotransferase;
  ENSP ID: ENSP00000456330
MWWQHAKGVPVPQGVMASMLLAQRLACSFQHSYRLLVPGSRHISQAAAKVDVEFDYDGPLMKTEVPGPRSQELMKQLNIIQNAEAVHFFCNYEESRGNYLVDVDGNRMLDLYSQISSVPIGYSHPALLKLIQQPQNASMFVNRPALGILPPENFVEKLRQSLLSVAPKGMSQLITMACGSCSNENALKTIFMWYRSKERGQRGFSQEELETCMINQAPGCPDYSILSFMGAFHGRTMGCLATTHSKAIHKIDIPSFDWPIAPFPRLKYPLEEFVKENQQEEARCLEEVEDLIVKYRKKKKTVAGIIVEPIQSEGGDNHASDDFFRKLRDIARKHGCAFLVDEVQTGGGCTGKFWAHEHWGLDDPADVMTFSKKMMTGGFFHKEEFRPNAPYRIFNTWLGDPSKNLLLAEVINIIKREDLLNNAAHAGKALLTGLLDLQARYPQFISRVRGRGTFCSFDTPDDSIRNKLILIARNKGVVLGGCGDKSIRFRPTLVFRDHHAHLFLNIFSDILADFK

SEQ ID NO: 324 - protein, 95 aa, Homo sapiens
  Payload ID: 47;
  Gene Symbol: ABAT;
  Gene Name: 4-aminobutyrate aminotransferase;
  ENSP ID: ENSP00000456392
MQLRGWQHAKGVPVPQGVMASMLLAQRLACSFQHSYRLLVPGSRHISQAAAKVDVEFDYDGPLMKTEVPGPRSQELMKQLNIIQNAEAVHFFCNY

SEQ ID NO: 325 - protein, 85 aa, Homo sapiens
  Payload ID: 48;
  Gene Symbol: HOGA1;
  Gene Name: 4-hydroxy-2-oxoglutarate aldolase 1;
  ENSP ID: ENSP00000359676
  MOD_RES (1)..(1): Any amino acid
XSGGDVTRIGLIVHKTRKQDFQVLAGSAGFLMASYALGAVGGVCALANVLGAQVCQLERLCCTGQWEDAQKLQHRLIEPNAAKIL

SEQ ID NO: 326 - protein, 327 aa, Homo sapiens [sequence omitted]

SEQ ID NO: 327 - protein, 164 aa, Homo sapiens
  Payload ID: 48;
  Gene Symbol: HOGA1;
  Gene Name: 4-hydroxy-2-oxoglutarate aldolase 1;
  Uniprot ID:  Q86XE5;
  ENSP ID: ENSP00000359681
MLGPQVWSSVRQGLSRSLSRNVGVWASGEGKKVDIAGIYPPVTTPFTATAEVDYGKLEENLHKLGTFPFRGAVGGVCALANVLGAQVCQLERLCCTGQWEDAQKLQHRLIEPNAAVTRRFGIPGLKKIMDWFGYYGGPCRAPLQELSPAEEEALRMDFTSNGWL

SEQ ID NO: 328 - protein, 393 aa, Homo sapiens
  Payload ID: 49;
  Gene Symbol: HPD;
  Gene Name: 4-hydroxyphenylpyruvate dioxygenase;
  ENSP ID: ENSP00000289004
MTTYSDKGAKPERGRFLHFHSVTFWVGNAKQATSFYCSKMGFEPLAYRGLETGSREVVSHVIKQGKIVFVLSSALNPWNKEMGDHLVKHGDGVKDIAFEVEDCDYIVQKARERGAKIMREPWVEQDKFGKVKFAVLQTYGDTTHTLVEKMNYIGQFLPGYEAPAFMDPLLPKLPKCSLEMIDHIVGNQPDQEMVSASEWYLKNLQFHRFWSVDDTQVHTEYSSLRSIVVANYEESIKMPINEPAPGKKKSQIQEYVDYNGGAGVQHIALKTEDIITAIRHLRERGLEFLSVPSTYYKQLREKLKTAKIKVKENIDALEELKILVDYDEKGYLLQIFTKPVQDRPTLFLEVIQRHNHQGFGAGNFNSLFKAFEEEQNLRGNLTNMETNGVVPGM

SEQ ID NO: 329 - protein, 354 aa, Homo sapiens
  Payload ID: 49;
  Gene Symbol: HPD;
  Gene Name: 4-hydroxyphenylpyruvate dioxygenase;
  Uniprot ID:  P32754;
  ENSP ID: ENSP00000441677
MGFEPLAYRGLETGSREVVSHVIKQGKIVFVLSSALNPWNKEMGDHLVKHGDGVKDIAFEVEDCDYIVQKARERGAKIMREPWVEQDKFGKVKFAVLQTYGDTTHTLVEKMNYIGQFLPGYEAPAFMDPLLPKLPKCSLEMIDHIVGNQPDQEMVSASEWYLKNLQFHRFWSVDDTQVHTEYSSLRSIVVANYEESIKMPINEPAPGKKKSQIQEYVDYNGGAGVQHIALKTEDIITAIRHLRERGLEFLSVPSTYYKQLREKLKTAKIKVKENIDALEELKILVDYDEKGYLLQIFTKPVQDRPTLFLEVIQRHNHQGFGAGNFNSLFKAFEEEQNLRGNLTNMETNGVVPGM

SEQ ID NO: 330 - protein, 371 aa, Homo sapiens
  Payload ID: 50;
  Gene Symbol: HPDL;
  Gene Name: 4-hydroxyphenylpyruvate dioxygenase-like;
  Uniprot ID:  Q96IR7;
  ENSP ID: ENSP00000335060
MAAPALRLCHIAFHVPAGQPLARNLQRLFGFQPLASREVDGWRQLALRSGDAVFLVNEGAGSGEPLYGLDPRHAVPSATNLCFDVADAGAATRELAALGCSVPVPPVRVRDAQGAATYAVVSSPAGILSLTLLERAGYRGPFLPGFRPVSSAPGPGWVSRVDHLTLACTPGSSPTLLRWFHDCLGFCHLPLSPGEDPELGLEMTAGFGLGGLRLTALQAQPGSIVPTLVLAESLPGATTRQDQVEQFLARHKGPGLQHVGLYTPNIVEATEGVATAGGQFLAPPGAYYQQPGKERQIRAAGHEPHLLARQGILLDGDKGKFLLQVFTKSLFTEDTFFLELIQRQGATGFGQGNIRALWQSVQEQSARSQEA

SEQ ID NO: 331 - protein, 201 aa, Homo sapiens
  Payload ID: 51;
  Gene Symbol: NT5C;
  Gene Name: 5', 3'-nucleotidase, cytosolic;
  Uniprot ID:  Q8TCD5;
  ENSP ID: ENSP00000245552
MARSVRVLVDMDGVLADFEAGLLRGFRRRFPEEPHVPLEQRRGFLAREQYRALRPDLADKVASVYEAPGFFLDLEPIPGALDAVREMNDLPDTQVFICTSPLLKYHHCVGEKYRWVEQHLGPQFVERIILTRDKTVVLGDLLIDDKDTVRGQEETPSWEHILFTCCHNRHLVLPPTRRRLLSWSDNWREILDSKRGAAQRE

SEQ ID NO: 332 - protein, 182 aa, Homo sapiens
  Payload ID: 51;
  Gene Symbol: NT5C;
  Gene Name: 5', 3'-nucleotidase, cytosolic;
  ENSP ID: ENSP00000461927
MARSVRVLVDMDGVLADFEAGLLRGFRRRFPEEPHVPLEQRRGFLAREQYRALRPDLADKVASVYEAPGFFLDLEPIPGALDAVREMNDLPDTQVFICTSPLLKYHHCVGEKYRWVEQHLGPQFVERIILTRDKTVVLGDLLIDDKDTVRGGDPKLGAHLVHLLPQSAPGPAPDKETAALLE

SEQ ID NO: 333 - protein, 117 aa, Homo sapiens
  Payload ID: 51;
  Gene Symbol: NT5C;
  Gene Name: 5', 3'-nucleotidase, cytosolic;
  Uniprot ID:  Q8TCD5;
  ENSP ID: ENSP00000462123
MARSVRVLVDMDGVLADFEAGLLRGFRRRFPEEPHVPLEQRRGFLAREQYRALRPDLADKVASVYEAPGFFLDLEPIPGALDAVREMNDLPDPLLKYHHCVGEKVWLPRPYSARGAA

SEQ ID NO: 334 - protein, 39 aa, Homo sapiens
  Payload ID: 51;
  Gene Symbol: NT5C;
  Gene Name: 5', 3'-nucleotidase, cytosolic;
  ENSP ID: ENSP00000462455
MNDLPDTQVFICTSPLLKYHHCVGEKVWLPRPYSARGAA

SEQ ID NO: 335 - protein, 153 aa, Homo sapiens
  Payload ID: 51;
  Gene Symbol: NT5C;
  Gene Name: 5', 3'-nucleotidase, cytosolic;
  ENSP ID: ENSP00000462697
VDMDGVLADFEAGLLRGFRRRFPEEPHVPLEQRRGFLAREQYRALRPDLADKVASVYEAPGFFLDLEPIPGALDAVREMNDLPDTQVFICTSPLLKYHHCVGEKEETPSWEHILFTCCHNRHLVLPPTRRRLLSWSDNWREILDSKRGAAQRE

SEQ ID NO: 336 - protein, 115 aa, Homo sapiens
  Payload ID: 51;
  Gene Symbol: NT5C;
  Gene Name: 5', 3'-nucleotidase, cytosolic;
  ENSP ID: ENSP00000462712
MNDLPDTQVFICTSPLLKYHHCVGEKYRWVEQHLGPQFVERIILTRDKTVVLGDLLIDDKDTVRGQEETPSWEHILFTCCHNRHLVLPPTRRRLLSWSDNWREILDSKRGAAQRE

SEQ ID NO: 337 - protein, 39 aa, Homo sapiens; identical to SEQ ID NO: 334
  Payload ID: 51;
  Gene Symbol: NT5C;
  Gene Name: 5', 3'-nucleotidase, cytosolic;
  ENSP ID: ENSP00000462981

SEQ ID NO: 338 - protein, 87 aa, Homo sapiens
  Payload ID: 51;
  Gene Symbol: NT5C;
  Gene Name: 5', 3'-nucleotidase, cytosolic;
  ENSP ID: ENSP00000463947
  MOD_RES (1)..(1): Any amino acid
XAPGFFLDLEPIPGALDAVREMNDLPDTQVFICTSPLLKYHHCVGEKARRRPQAGSTSCSPAATIGTWSCPRQGDGCSPGVTTGGRS

SEQ ID NO: 339 - protein, 203 aa, Homo sapiens
  Payload ID: 52;
  Gene Symbol: MTHFS;
  Gene Name: 5,10-m 356ethenyltetrahydrofolate synthetase (5-formyltetrahydrofolate cyclo-ligase);
  Uniprot ID:  P49914;
  ENSP ID: ENSP00000258874
MAAAAVSSAKRSLRGELKQRLRAMSAEERLRQSRVLSQKVIAHSEYQKSKRISIFLSMQDEIETEEIIKDIFQRGKICFIPRYRFQSNHMDMVRIESPEEISLLPKTSWNIPQPGEGDVREEALSTGGLDLIFMPGLGFDKHGNRLGRGKGYYDAYLKRCLQHQEVKPYTLALAFKEQICLQVPVNENDMKVDEVLYEDSSTA

SEQ ID NO: 340 - protein, 39 aa, Homo sapiens
  Payload ID: 52;
  Gene Symbol: MTHFS;
  Gene Name: 5,10-methenyltetrahydrofolate synthetase (5-formyltetrahydrofolate cyclo-ligase);
  ENSP ID: ENSP00000454318
  MOD_RES (1)..(1): Any amino acid
XVKPYTLALAFKEQICLQVPVNENDMKVDEVLYEDSSTA

SEQ ID NO: 341 - protein, 44 aa, Homo sapiens
  Payload ID: 52;
  Gene Symbol: MTHFS;
  Gene Name: 5,10-methenyltetrahydrofolate synthetase (5-formyltetrahydrofolate cyclo-ligase);
  ENSP ID: ENSP00000454626
MAAAAVSSAKRSLRGELKQRLRAMSAEERLRQSRVLSQKVRGRP

SEQ ID NO: 342 - protein, 232 aa, Homo sapiens
  Payload ID: 52;
  Gene Symbol: MTHFS;
  Gene Name: 5,10-methenyltetrahydrofolate synthetase (5-formyltetrahydrofolate cyclo-ligase);
  ENSP ID: ENSP00000489076
MPGTVGTAGHLYHPRQWRCRLRGPGEGPGSGRSGGRAATAPRHRSPNRGGRAGPRGPHEGWVPRARGEVIAHSEYQKSKRISIFLSMQDEIETEEIIKDIFQRGKICFIPRYRFQSNHMDMVRIESPEEISLLPKTSWNIPQPGEGDVREEALSTGGLDLIFMPGLGFDKHGNRLGRGKGYYDAYLKRCLQHQEVKPYTLALAFKEQICLQVPVNENDMKVDEVLYEDSSTA

SEQ ID NO: 343 - protein, 228 aa, Homo sapiens
  Payload ID: 53;
  Gene Symbol: NT5M;
  Gene Name: 5',3'-nucleotidase, mitochondrial;
  Uniprot ID:  Q9NPB1;
  ENSP ID: ENSP00000373674
MIRLGGWCARRLCSAAVPAGRRGAAGGLGLAGGRALRVLVDMDGVLADFEGGFLRKFRARFPDQPFIALEDRRGFWVSEQYGRLRPGLSEKAISIWESKNFFFELEPLPGAVEAVKEMASLQNTDVFICTSPIKMFKYCPYEKYAWVEKYFGPDFLEQIVLTRDKTVVSADLLIDDRPDITGAEPTPSWEHVLFTACHNQHLQLQPPRRRLHSWADDWKAILDSKRPC

SEQ ID NO: 344 - protein, 93 aa, Homo sapiens
  Payload ID: 53;
  Gene Symbol: NT5M;
  Gene Name: 5',3'-nucleotidase, mitochondrial;
  ENSP ID: ENSP00000463674
MIRLGGWCARRLCSAAVPAGRRGAAGGLGLAGGRALRVLVDMDGVLADFEGGFLRKFRARFPDQPFIALEDRRGFWVSEQYGRLRPGLSSWPC

SEQ ID NO: 345 - protein, 113 aa, Homo sapiens
  Payload ID: 53;
  Gene Symbol: NT5M;
  Gene Name: 5',3'-nucleotidase, mitochondrial;
  ENSP ID: ENSP00000464303
MIRLGGWCARRLCSAAVPAGRRGAAGGLGLAGGRALRVLVDMDGVLADFEGGFLRKFRARFPDQPFIALEDRRGFWVSEQYGRLRPGLSVSVPAPPRAGPPSRPEPQTPPLRR

SEQ ID NO: 346 - protein, 51 aa, Homo sapiens
  Payload ID: 53;
  Gene Symbol: NT5M;
  Gene Name: 5',3'-nucleotidase, mitochondrial;
  ENSP ID: ENSP00000467567
  MOD_RES (1)..(1): Any amino acid
XGVLADFEGGFLRKFRARFPDQPFIALEDRRGFWVSEQYGRLRPGLSSWPC

SEQ ID NO: 347 - protein, 234 aa, Homo sapiens
  Payload ID: 53;
  Gene Symbol: NT5M;
  Gene Name: 5',3'-nucleotidase, mitochondrial;
  ENSP ID: ENSP00000481269
MIRLGGWCARRLCSAAVPAGRRGAAGGLGLAGGRALRVLVDMDGVLADFEGGFLRKFRARFPDQPFIALEDRRGFWVSEQYGRLRPGLSEKAISIWESKNFFFELEPLPGAVEAVKEMASLQNTDVFICTSPIKMFKYCPYEKYAWVEKYFGPDFLEQIVLTRDKTVVSADLLIDDRPDITGKWPATGAEPTPSWEHVLFTACHNQHLQLQPPRRRLHSWADDWKAILDSKRPC

SEQ ID NO: 348 - protein, 1706 aa, Homo sapiens
  Payload ID: 54;
  Gene Symbol: XRN1;
  Gene Name: 5'-3' exoribonuclease 1;
  Uniprot ID:  Q8IZH2;
  ENSP ID: ENSP00000264951
MGVPKFYRWISERYPCLSEVVKEHQIPEFDNLYLDMNGIIHQCSHPNDDDVHFRISDDKIFTDIFHYLEVLFRIIKPRKVFFMAVDGVAPRAKMNQQRGRRFRSAKEAEDKIKKAIEKGETLPTEARFDSNCITPGTEFMARLHEHLKYFVNMKISTDKSWQGVTIYFSGHETPGEGEHKIMEFIRSEKAKPDHDPNTRHCLYGLDADLIMLGLTSHEAHFSLLREEVRFGGKKTQRVCAPEETTFHLLHLSLMREYIDYEFSVLKEKITFKYDIERIIDDWILMGFLVGNDFIPHLPHLHINHDALPLLYGTYVTILPELGGYINESGHLNLPRFEKYLVKLSDFDREHFSEVFVDLKWFESKVGNKYLNEAAGVAAEEARNYKEKKKLKGQENSLCWTALDKNEGEMITSKDNLEDETEDDDLFETEFRQYKRTYYMTKMGVDVVSDDFLADQAACYVQAIQWILHYYYHGVQSWSWYYPYHYAPFLSDIHNISTLKIHFELGKPFKPFEQLLAVLPAASKNLLPACYQHLMTNEDSPIIEYYPPDFKTDLNGKQQEWEAVVLIPFIDEKRLLEAMETCNHSLKKEERKRNQHSECLMCWYDRDTEFIYPSPWPEKFPAIERCCTRYKIISLDAWRVDINKNKITRIDQKALYFCGFPTLKHIRHKFFLKKSGVQVFQQSSRGENMMLEILVDAESDELTVENVASSVLGKSVFVNWPHLEEARVVAVSDGETKFYLEEPPGTQKLYSGRTAPPSKVVHLGDKEQSNWAKEVQGISEHYLRRKGIIINETSAVVYAQLLTGRKYQINQNGEVRLEKQWSKQVVPFVYQTIVKDIRAFDSRFSNIKTLDDLFPLRSMVFMLGTPYYGCTGEVQDSGDVITEGRIRVIFSIPCEPNLDALIQNQHKYSIKYNPGYVLASRLGVSGYLVSRFTGSIFIGRGSRRNPHGDHKANVGLNLKFNKKNEEVPGYTKKVGSEWMYSSAAEQLLAEYLERAPELFSYIAKNSQEDVFYEDDIWPGENENGAEKVQEIITWLKGHPVSTLSRSSCDLQILDAAIVEKIEEEVEKCKQRKNNKKVRVTVKPHLLYRPLEQQHGVIPDRDAEFCLFDRVVNVRENFSVPVGLRGTIIGIKGANREADVLFEVLFDEEFPGGLTIRCSPGRGYRLPTSALVNLSHGSRSETGNQKLTAIVKPQPAVHQHSSSSSVSSGHLGALNHSPQSLFVPTQVPTKDDDEFCNIWQSLQGSGKMQYFQPTIQEKGAVLPQEISQVNQHHKSGFNDNSVKYQQRKHDPHRKFKEECKSPKAECWSQKMSNKQPNSGIENFLASLNISKENEVQSSHHGEPPSEEHLSPQSFAMGTRMLKEILKIDGSNTVDHKNEIKQIANEIPVSSNRRDEYGLPSQPKQNKKLASYMNKPHSANEYHNVQSMDNMCWPAPSQIPPVSTPVTELSRICSLVGMPQPDFSFLRMPQTMTVCQVKLSNGLLVHGPQCHSENEAKEKAALFALQQLGSLGMNFPLPSQVFANYPSAVPPGTIPPAFPPPTGWDHYGSNYALGAANIMPSSSHLFGSMPWGPSVPVPGKPFHHTLYSGTMPMAGGIPGGVHNQFIPLQVTKKRVANKKNFENKEAQSSQATPVQTSQPDSSNIVKVSPRESSSASLKSSPIAQPASSFQVETASQGHSISHHKSTPISSSRRKSRKLAVNFGVSKPSE

SEQ ID NO: 349 - protein, 1694 aa, Homo sapiens
  Payload ID: 54;
  Gene Symbol: XRN1;
  Gene Name: 5'-3' exoribonuclease 1;
  Uniprot ID:  Q8IZH2;
  ENSP ID: ENSP00000376707
MGVPKFYRWISERYPCLSEVVKEHQIPEFDNLYLDMNGIIHQCSHPNDDDVHFRISDDKIFTDIFHYLEVLFRIIKPRKVFFMAVDGVAPRAKMNQQRGRRFRSAKEAEDKIKKAIEKGETLPTEARFDSNCITPGTEFMARLHEHLKYFVNMKISTDKSWQGVTIYFSGHETPGEGEHKIMEFIRSEKAKPDHDPNTRHCLYGLDADLIMLGLTSHEAHFSLLREEVRFGGKKTQRVCAPEETTFHLLHLSLMREYIDYEFSVLKEKITFKYDIERIIDDWILMGFLVGNDFIPHLPHLHINHDALPLLYGTYVTILPELGGYINESGHLNLPRFEKYLVKLSDFDREHFSEVFVDLKWFESKVGNKYLNEAAGVAAEEARNYKEKKKLKGQENSLCWTALDKNEGEMITSKDNLEDETEDDDLFETEFRQYKRTYYMTKMGVDVVSDDFLADQAACYVQAIQWILHYYYHGVQSWSWYYPYHYAPFLSDIHNISTLKIHFELGKPFKPFEQLLAVLPAASKNLLPACYQHLMTNEDSPIIEYYPPDFKTDLNGKQQEWEAVVLIPFIDEKRLLEAMETCNHSLKKEERKRNQHSECLMCWYDRDTEFIYPSPWPEKFPAIERCCTRYKIISLDAWRVDINKNKITRIDQKALYFCGFPTLKHIRHKFFLKKSGVQVFQQSSRGENMMLEILVDAESDELTVENVASSVLGKSVFVNWPHLEEARVVAVSDGETKFYLEEPPGTQKLYSGRTAPPSKVVHLGDKEQSNWAKEVQGISEHYLRRKGIIINETSAVVYAQLLTGRKYQINQNGEVRLEKQWSKQVVPFVYQTIVKDIRAFDSRFSNIKTLDDLFPLRSMVFMLGTPYYGCTGEVQDSGDVITEGRIRVIFSIPCEPNLDALIQNQHKYSIKYNPGYVLASRLGVSGYLVSRFTGSIFIGRGSRRNPHGDHKANVGLNLKFNKKNEEVPGYTKKVGSEWMYSSAAEQLLAEYLERAPELFSYIAKNSQEDVFYEDDIWPGENENGAEKVQEIITWLKGHPVSTLSRSSCDLQILDAAIVEKIEEEVEKCKQRKNNKKVRVTVKPHLLYRPLEQQHGVIPDRDAEFCLFDRVVNVRENFSVPVGLRGTIIGIKGANREADVLFEVLFDEEFPGGLTIRCSPGRGYRLPTSALVNLSHGSRSETGNQKLTAIVKPQPAVHQHSSSSSVSSGHLGALNHSPQSLFVPTQVPTKDDDEFCNIWQSLQGSGKMQYFQPTIQEKGAVLPQEISQVNQHHKSGFNDNSVKYQQRKHDPHRKFKEECKSPKAECWSQKMSNKQPNSGIENFLASLNISKENEVQSSHHGEPPSEEHLSPQSFAMKGTRMLKEILKIDGSNTVDHKNEIKQIANEIPVSSNRRDEYGLPSQPKQNKKLASYMNKPHSANEYHNVQSMDNMCWPAPSQIPPVSTPVTELSRICSLVGMPQPDFSFLRMPQTMTVCQVKLSNGLLVHGPQCHSENEAKEKAALFALQQLGSLGMNFPLPSQVFANYPSAVPPGTIPPAFPPPTANIMPSSSHLFGSMPWGPSVPVPGKPFHHTLYSGTMPMAGGIPGGVHNQFIPLQVTKKRVANKKNFENKEAQSSQATPVQTSQPDSSNIVKVSPRESSSASLKSSPIAQPASSFQVETASQGHSISHHKSTPISSSRRKSRKLAVNFGVSKPSE

SEQ ID NO: 350 - protein, 459 aa, Homo sapiens
  Payload ID: 54;
  Gene Symbol: XRN1;
  Gene Name: 5'-3' exoribonuclease 1;
  Uniprot ID:  Q8IZH2;
  ENSP ID: ENSP00000418404
MGVPKFYRWISERYPCLSEVVKEHQIPEFDNLYLDMNGIIHQCSHPNDDDVHFRISDDKIFTDIFHYLEVLFRIIKPRKVFFMAVDGVAPRAKMNQQRGRRFRSAKEAEDKIKKAIEKGETLPTEARFDSNCITPGTEFMARLHEHLKYFVNMKISTDKSWQGVTIYFSGHETPGEGEHKIMEFIRSEKAKPDHDPNTRHCLYGLDADLIMLGLTSHEAHFSLLREEVRFGGKKTQRVCAPEETTFHLLHLSLMREYIDYEFSVLKEKITFKYDIERIIDDWILMGFLVGNDFIPHLPHLHINHDALPLLYGTYVTILPELGGYINESGHLNLPRFEKYLVKLSDFDREHFSEVFVDLKWFESKVGNKYLNEAAGVAAEEARNYKEKKKLKGQENSLCWTALDKNEGEMITSKDNLEDETEDDDLFETEFRQYKRTYYMTKMGVDVVSEYVFANAFILK

SEQ ID NO: 351 - protein, 63 aa, Homo sapiens
  Payload ID: 54;
  Gene Symbol: XRN1;
  Gene Name: 5'-3' exoribonuclease 1;
  ENSP ID: ENSP00000419219
  MOD_RES (1)..(1): Any amino acid
XEECKSPKAECWSQKMSNKQPNSGIENFLASLNISKENEVQSSHHGEPPSEEHLSPQSFAMKR

SEQ ID NO: 352 - protein, 1160 aa, Homo sapiens
  Payload ID: 54;
  Gene Symbol: XRN1;
  Gene Name: 5'-3' exoribonuclease 1;
  ENSP ID: ENSP00000419683
  MOD_RES (1)..(1): Any amino acid
XTNEDSPIIEYYPPDFKTDLNGKQQEWEAVVLIPFIDERLLEAMETCNHSLKKEERKRNQHSECLMCWYDRDTEFIYPSPWPEKFPAIERCCTRYKIISLDAWRVDINKNKITRIDQKALYFCGFPTLKHIRHKFFLKKSGVQVFQQSSRGENMMLEILVDAESDELTVENVASSVLGKSVFVNWPHLEEARVVAVSDGETKFYLEEPPGTQKLYSGRTAPPSKVVHLGDKEQSNWAKEVQGISEHYLRRKGIIINETSAVVYAQLLTGRKYQINQNGEVRLEKQWSKQVVPFVYQTIVKDIRAFDSRFSNIKTLDDLFPLRSMVFMLGTPYYGCTGEVQDSGDVITEGRIRVIFSIPCEPNLDALIQNQHKYSIKYNPGYVLASRLGVSGYLVSRFTGSIFIGRGSRRNPHGDHKANVGLNLKFNKKNEEVPGYTKKVGSEWMYSSAAEQLLAEYLERAPELFSYIAKNSQEDVFYEDDIWPGENENGAEKVQEIITWLKGHPVSTLSRSSCDLQILDAAIVEKIEEEVEKCKQRKNNKKVRVTVKPHLLYRPLEQQHGVIPDRDAEFCLFDRVVNVRENFSVPVGLRGTIIGIKGANREADVLFEVLFDEEFPGGLTIRCSPGRGYRLPTSALVNLSHGSRSETGNQKLTAIVKPQPAVHQHSSSSSVSSGHLGALNHSPQSLFVPTQVPTKDDDEFCNIWQSLQGSGKMQYFQPTIQEKGAVLPQEISQVNQHHKSGFNDNSVKYQQRKHDPHRKFKEECKSPKAECWSQKMSNKQPNSGIENFLASLNISKENEVQSSHHGEPPSEEHLSPQSFAMKGTRMLKEILKIDGSNTVDHKNEIKQIANEIPVSSNRRDEYGLPSQPKQNKKLASYMNKPHSANEYHNVQSMDNMCWPAPSQIPPVSTPVTELSRICSLVGMPQPDFSFLRMPQTMTVCQVKLSNGLLVHGPQCHSENEAKEKAALFALQQLGSLGMNFPLPSQVFANYPSAVPPGTIPPAFPPPTANIMPSSSHLFGSMPWGPSVPVPGKPFHHTLYSGTMPMAGGIPGGVHNQFIPLQVTKKRVANKKNFENKEAQSSQATPVQTSQPDSSNIVKVSPRESSSASLKSSPIAQPASSFQVETASQGHSISHHKSTPISSSRRKSRKLAVNFGVSKPSE

SEQ ID NO: 353 - protein, 165 aa, Homo sapiens
  Payload ID: 54;
  Gene Symbol: XRN1;
  Gene Name: 5'-3' exoribonuclease 1;
  ENSP ID: ENSP00000420634
MARLHEHLKYFVNMKISTDKSWQGVTIYFSGHETPGEGEHKIMEFIRSEKAKPDHDPNTRHCLYGLDADLIMLGLTSHEAHFSLLREEVRFGGKKTQRVCAPEETTFHLLHLSLMREYIDYEFSVLKEKITFKYDIERIIDDWILMGFLVGNDFIPHLPHLHINH

SEQ ID NO: 354 - protein, 107 aa, Homo sapiens
  Payload ID: 54;
  Gene Symbol: XRN1;
  Gene Name: 5'-3' exoribonuclease 1;
  ENSP ID: ENSP00000420786
MGVPKFYRWISERYPCLSEVVKEHQIPEFDNLYLDMNGIIHQCSHPNDDDVHFRISDDKIFTDIFHYLEVLFRIIKPRKVFFMAVDGVAPRAKMNQQRGRRFRLCLD

SEQ ID NO: 355 - protein, 950 aa, Homo sapiens
  Payload ID: 55;
  Gene Symbol: XRN2;
  Gene Name: 5'-3' exoribonuclease 2;
  Uniprot ID:  Q9H0D6;
  ENSP ID: ENSP00000366396
MGVPAFFRWLSRKYPSIIVNCVEEKPKECNGVKIPVDASKPNPNDVEFDNLYLDMNGIIHPCTHPEDKPAPKNEDEMMVAIFEYIDRLFSIVRPRRLLYMAIDGVAPRAKMNQQRSRRFRASKEGMEAAVEKQRVREEILAKGGFLPPEEIKERFDSNCITPGTEFMDNLAKCLRYYIADRLNNDPGWKNLTVILSDASAPGEGEHKIMDYIRRQRAQPNHDPNTHHCLCGADADLIMLGLATHEPNFTIIREEFKPNKPKPCGLCNQFGHEVKDCEGLPREKKGKHDELADSLPCAEGEFIFLRLNVLREYLERELTMASLPFTFDVERSIDDWVFMCFFVGNDFLPHLPSLEIRENAIDRLVNIYKNVVHKTGGYLTESGYVNLQRVQMIMLAVGEVEDSIFKKRKDDEDSFRRRQKEKRKRMKRDQPAFTPSGILTPHALGSRNSPGSQVASNPRQAAYEMRMQNNSSPSISPNTSFTSDGSPSPLGGIKRKAEDSDSEPEPEDNVRLWEAGWKQRYYKNKFDVDAADEKFRRKVVQSYVEGLCWVLRYYYQGCASWKWYYPFHYAPFASDFEGIADMPSDFEKGTKPFKPLEQLMGVFPAASGNFLPPSWRKLMSDPDSSIIDFYPEDFAIDLNGKKYAWQGVALLPFVDERRLRAALEEVYPDLTPEETRRNSLGGDVLFVGKHHPLHDFILELYQTGSTEPVEVPPELCHGIQGKFSLDEEAILPDQIVCSPVPMLRDLTQNTVVSINFKDPQFAEDYIFKAVMLPGARKPAAVLKPSDWEKSSNGRQWKPQLGFNRDRRPVHLDQAAFRTLGHVMPRGSGTGIYSNAAPPPVTYQGNLYRPLLRGQAQIPKLMSNMRPQDSWRGPPPLFQQQRFDRGVGAEPLLPWNRMLQTQNAAFQPNQYQMLAGPGGYPPRRDDRGGRQGYPREGRKYPLPPPSGRYNWN

SEQ ID NO: 356 - protein, 592 aa, Homo sapiens
  Payload ID: 56;
  Gene Symbol: ATIC;
  Gene Name: 5-aminoimidazole-4-carboxamide ribonucleotide formyltransferase/IMP cyclohydrolase;
  Uniprot ID:  P31939;
  ENSP ID: ENSP00000236959
MAPGQLALFSVSDKTGLVEFARNLTALGLNLVASGGTAKALRDAGLAVRDVSELTGFPEMLGGRVKTLHPAVHAGILARNIPEDNADMARLDFNLIRVVACNLYPFVKTVASPGVTVEEAVEQIDIGGVTLLRAAAKNHARVTVVCEPEDYVVVSTEMQSSESKDTSLETRRQLALKAFTHTAQYDEAISDYFRKQYSKGVSQMPLRYGMNPHQTPAQLYTLQPKLPITVLNGAPGFINLCDALNAWQLVKELKEALGIPAAASFKHVSPAGAAVGIPLSEDEAKVCMVYDLYKTLTPISAAYARARGADRMSSFGDFVALSDVCDVPTAKIISREVSDGIIAPGYEEEALTILSKKKNGNYCVLQMDQSYKPDENEVRTLFGLHLSQKRNNGVVDKSLFSNVVTKNKDLPESALRDLIVATIAVKYTQSNSVCYAKNGQVIGIGAGQQSRIHCTRLAGDKANYWWLRHHPQVLSMKFKTGVKRAEISNAIDQYVTGTIGEDEDLIKWKALFEEVPELLTEAEKKEWVEKLTEVSISSDAFFPFRDNVDRAKRSGVAYIAAPSGSAADKVVIEACDELGIILAHTNLRLFHH

SEQ ID NO: 357 - protein, 84 aa, Homo sapiens
  Payload ID: 56;
  Gene Symbol: ATIC;
  Gene Name: 5-aminoimidazole-4-carboxamide ribonucleotide formyltransferase/IMP cyclohydrolase;
  ENSP ID: ENSP00000388675
MAPGQLALFSVSDKTGLVEFARNLTALGLNLVASGGTAKALRDAGLAVRDVSELTGFPEMLGGRVKTLHPAVHAELLPAISIPL

SEQ ID NO: 358 - protein, 43 aa, Homo sapiens
  Payload ID: 56;
  Gene Symbol: ATIC;
  Gene Name: 5-aminoimidazole-4-carboxamide ribonucleotide formyltransferase/IMP cyclohydrolase;
  ENSP ID: ENSP00000394317
MAPGQLGEALAERRGLRPRLRPPTLPPWRRPAGPGTAGAALRD

SEQ ID NO: 359 - protein, 231 aa, Homo sapiens
  Payload ID: 56;
  Gene Symbol: ATIC;
  Gene Name: 5-aminoimidazole-4-carboxamide ribonucleotide formyltransferase/IMP cyclohydrolase;
  ENSP ID: ENSP00000401936
  MOD_RES (1)..(1): Any amino acid
XIFLQVSDGIIAPGYEEEALTILSKKKNGNYCVLQMDQSYKPDENEVRTLFGLHLSQKRNNGVVDKSLFSNVVTKNKDLPESALRDLIVATIAVKYTQSNSVCYAKNGQVIGIGAGQQSRIHCTRLAGDKANYWWLRHHPQVLSMKFKTGVKRAEISNAIDQYVTGTIGEDEDLIKWKALFEEVPELLTEAEKKEWVEKLTEVSISSDAFFPFRDNVDRAKRVSMELGAFA

SEQ ID NO: 360 - protein, 170 aa, Homo sapiens
  Payload ID: 56;
  Gene Symbol: ATIC;
  Gene Name: 5-aminoimidazole-4-carboxamide ribonucleotide formyltransferase/IMP cyclohydrolase;
  ENSP ID: ENSP00000402393
MLGGRVKTLHPAVHAGILARNIPEDNADMARLDFNLIRVVACNLYPFVKTVASPGVTVEEAVEQIDIGGVTLLRAAAKNHARVTVVCEPEDYVVVSTEMQSSESKDTSLETRRQLALKAFTHTAQYDEAISDYFRKQYSKGVSQMPLRYGMNPHQTPAQLYTLQPKLPIT

SEQ ID NO: 361 - protein, 43 aa, Homo sapiens; identical to SEQ ID NO: 358
  Payload ID: 56;
  Gene Symbol: ATIC;
  Gene Name: 5-aminoimidazole-4-carboxamide ribonucleotide formyltransferase/IMP cyclohydrolase;
  ENSP ID: ENSP00000406792

SEQ ID NO: 362 - protein, 591 aa, Homo sapiens
  Payload ID: 56;
  Gene Symbol: ATIC;
  Gene Name: 5-aminoimidazole-4-carboxamide ribonucleotide formyltransferase/IMP cyclohydrolase;
  Uniprot ID:  P31939;
  ENSP ID: ENSP00000415935
MSSLSALFSVSDKTGLVEFARNLTALGLNLVASGGTAKALRDAGLAVRDVSELTGFPEMLGGRVKTLHPAVHAGILARNIPEDNADMARLDFNLIRVVACNLYPFVKTVASPGVTVEEAVEQIDIGGVTLLRAAAKNHARVTVVCEPEDYVVVSTEMQSSESKDTSLETRRQLALKAFTHTAQYDEAISDYFRKQYSKGVSQMPLRYGMNPHQTPAQLYTLQPKLPITVLNGAPGFINLCDALNAWQLVKELKEALGIPAAASFKHVSPAGAAVGIPLSEDEAKVCMVYDLYKTLTPISAAYARARGADRMSSFGDFVALSDVCDVPTAKIISREVSDGIIAPGYEEEALTILSKKKNGNYCVLQMDQSYKPDENEVRTLFGLHLSQKRNNGVVDKSLFSNVVTKNKDLPESALRDLIVATIAVKYTQSNSVCYAKNGQVIGIGAGQQSRIHCTRLAGDKANYWWLRHHPQVLSMKFKTGVKRAEISNAIDQYVTGTIGEDEDLIKWKALFEEVPELLTEAEKKEWVEKLTEVSISSDAFFPFRDNVDRAKRSGVAYIAAPSGSAADKVVIEACDELGIILAHTNLRLFHH

SEQ ID NO: 363 - protein, 640 aa, Homo sapiens
  Payload ID: 57;
  Gene Symbol: ALAS1;
  Gene Name: 5'-aminolevulinate synthase 1;
  Uniprot ID:  P13196;
  ENSP ID: ENSP00000309259
MESVVRRCPFLSRVPQAFLQKAGKSLLFYAQNCPKMMEVGAKPAPRALSTAAVHYQQIKETPPASEKDKTAKAKVQQTPDGSQQSPDGTQLPSGHPLPATSQGTASKCPFLAAQMNQRGSSVFCKASLELQEDVQEMNAVRKEVAETSAGPSVVSVKTDGGDPSGLLKNFQDIMQKQRPERVSHLLQDNLPKSVSTFQYDRFFEKKIDEKKNDHTYRVFKTVNRRAHIFPMADDYSDSLITKKQVSVWCSNDYLGMSRHPRVCGAVMDTLKQHGAGAGGTRNISGTSKFHVDLERELADLHGKDAALLFSSCFVANDSTLFTLAKMMPGCEIYSDSGNHASMIQGIRNSRVPKYIFRHNDVSHLRELLQRSDPSVPKIVAFETVHSMDGAVCPLEELCDVAHEFGAITFVDEVHAVGLYGARGGGIGDRDGVMPKMDIISGTLGKAFGCVGGYIASTSSLIDTVRSYAAGFIFTTSLPPMLLAGALESVRILKSAEGRVLRRQHQRNVKLMRQMLMDAGLPVVHCPSHIIPVRVADAAKNTEVCDELMSRHNIYVQAINYPTVPRGEELLRIAPTPHHTPQMMNYFLENLLVTWKQVGLELKPHSSAECNFCRRPLHFEVMSEREKSYFSGLSKLVSAQA

SEQ ID NO: 364 - protein, 640 aa, Homo sapiens; identical to SEQ ID NO: 363
  Payload ID: 57;
  Gene Symbol: ALAS1;
  Gene Name: 5'-aminolevulinate synthase 1;
  Uniprot ID:  P13196;
  ENSP ID: ENSP00000378416

SEQ ID NO: 365 - protein, 237 aa, Homo sapiens
  Payload ID: 57;
  Gene Symbol: ALAS1;
  Gene Name: 5'-aminolevulinate synthase 1;
  ENSP ID: ENSP00000417352
  MOD_RES (1)..(1): Any amino acid
XRVPKYIFRHNDVSHLRELLQRSDPSVPKIVAFETVHSMDGKAFGCVGGYIASTSSLIDTVRSYAAGFIFTTSLPPMLLAGALESVRILKSAEGRVLRRQHQRNVKLMRQMLMDAGLPVVHCPSHIIPVRVADAAKNTEVCDELMSRHNIYVQAINYPTVPRGEELLRIAPTPHHTPQMMNYFLENLLVTWKQVGLELKPHSSAECNFCRRPLHFEVMSEREKSYFSGLSKLVSAQA

SEQ ID NO: 366 - protein, 640 aa, Homo sapiens; identical to SEQ ID NO: 363
  Payload ID: 57;
  Gene Symbol: ALAS1;
  Gene Name: 5'-aminolevulinate synthase 1;
  Uniprot ID:  P13196;
  ENSP ID: ENSP00000417719

SEQ ID NO: 367 - protein, 640 aa, Homo sapiens; identical to SEQ ID NO: 363
  Payload ID: 57;
  Gene Symbol: ALAS1;
  Gene Name: 5'-aminolevulinate synthase 1;
  Uniprot ID:  P13196;
  ENSP ID: ENSP00000418779

SEQ ID NO: 368 - protein, 117 aa, Homo sapiens
  Payload ID: 57;
  Gene Symbol: ALAS1;
  Gene Name: 5'-aminolevulinate synthase 1;
  ENSP ID: ENSP00000419423
  MOD_RES (1)..(1): Any amino acid
XRRQHQRNVKLMRQMLMDAGLPVVHCPSHIIPVRVADAAKNTEVCDELMSRHNIYVQAINYPTVPRGEELLRIAPTPHHTPQMMNYFLGEYLGSCWCLTEELHKAVFAVFIIEALQR

SEQ ID NO: 369 - protein, 587 aa, Homo sapiens
  Payload ID: 58;
  Gene Symbol: ALAS2;
  Gene Name: 5'-aminolevulinate synthase 2;
  Uniprot ID:  P22557;
  ENSP ID: ENSP00000332369
MVTAAMLLQCCPVLARGPTSLLGKVVKTHQFLFGIGRCPILATQGPNCSQIHLKATKAGGDSPSWAKGHCPFMLSELQDGKSKIVQKAAPEVQEDVKAFKTDLPSSLVSVSLRKPFSGPQEQEQISGKVTHLIQNNMPGNYVFSYDQFFRDKIMEKKQDHTYRVFKTVNRWADAYPFAQHFSEASVASKDVSVWCSNDYLGMSRHPQVLQATQETLQRHGAGAGGTRNISGTSKFHVELEQELAELHQKDSALLFSSCFVANDSTLFTLAKILPGCEIYSDAGNHASMIQGIRNSGAAKFVFRHNDPDHLKKLLEKSNPKIPKIVAFETVHSMDGAICPLEELCDVSHQYGALTFVDEVHAVGLYGSRGAGIGERDGIMHKIDIISGTLGKAFGCVGGYIASTRDLVDMVRSYAAGFIFTTSLPPMVLSGALESVRLLKGEEGQALRRAHQRNVKHMRQLLMDRGLPVIPCPSHIIPIRVGNAALNSKLCDLLLSKHGIYVQAINYPTVPRGEELLRLAPSPHHSPQMMEDFVEKLLLAWTAVGLPLQDVSVAACNFCRRPVHFELMSEWERSYFGNMGPQYVTTYA

SEQ ID NO: 370 - protein, 550 aa, Homo sapiens
  Payload ID: 58;
  Gene Symbol: ALAS2;
  Gene Name: 5'-aminolevulinate synthase 2;
  Uniprot ID:  P22557;
  ENSP ID: ENSP00000337131
MVTAAMLLQCCPVLARGPTSLLGKVVKTHQFLFGIGRCPILATQGPNCSQIHLKATKAGGDSPSWAKGHCPFMLSELQDGKSKIVQKAAPEVQEDVKAFKTGNYVFSYDQFFRDKIMEKKQDHTYRVFKTVNRWADAYPFAQHFSEASVASKDVSVWCSNDYLGMSRHPQVLQATQETLQRHGAGAGGTRNISGTSKFHVELEQELAELHQKDSALLFSSCFVANDSTLFTLAKILPGCEIYSDAGNHASMIQGIRNSGAAKFVFRHNDPDHLKKLLEKSNPKIPKIVAFETVHSMDGAICPLEELCDVSHQYGALTFVDEVHAVGLYGSRGAGIGERDGIMHKIDIISGTLGKAFGCVGGYIASTRDLVDMVRSYAAGFIFTTSLPPMVLSGALESVRLLKGEEGQALRRAHQRNVKHMRQLLMDRGLPVIPCPSHIIPIRVGNAALNSKLCDLLLSKHGIYVQAINYPTVPRGEELLRLAPSPHHSPQMMEDFVEKLLLAWTAVGLPLQDVSVAACNFCRRPVHFELMSEWERSYFGNMGPQYVTTYA

SEQ ID NO: 371 - protein, 574 aa, Homo sapiens
  Payload ID: 58;
  Gene Symbol: ALAS2;
  Gene Name: 5'-aminolevulinate synthase 2;
  Uniprot ID:  P22557;
  ENSP ID: ENSP00000379501
MRGGEVALGWNKKKRLFCEDFRFKMVTAAMLLQCCPVLARGPTSLLGKVVKTHQFLFGIGRCPILATQGPNCSQIHLKATKAGGDSPSWAKGHCPFMLSELQDGKSKIVQKAAPEVQEDVKAFKTGNYVFSYDQFFRDKIMEKKQDHTYRVFKTVNRWADAYPFAQHFSEASVASKDVSVWCSNDYLGMSRHPQVLQATQETLQRHGAGAGGTRNISGTSKFHVELEQELAELHQKDSALLFSSCFVANDSTLFTLAKILPGCEIYSDAGNHASMIQGIRNSGAAKFVFRHNDPDHLKKLLEKSNPKIPKIVAFETVHSMDGAICPLEELCDVSHQYGALTFVDEVHAVGLYGSRGAGIGERDGIMHKIDIISGTLGKAFGCVGGYIASTRDLVDMVRSYAAGFIFTTSLPPMVLSGALESVRLLKGEEGQALRRAHQRNVKHMRQLLMDRGLPVIPCPSHIIPIRVGNAALNSKLCDLLLSKHGIYVQAINYPTVPRGEELLRLAPSPHHSPQMMEDFVEKLLLAWTAVGLPLQDVSVAACNFCRRPVHFELMSEWERSYFGNMGPQYVTTYA

SEQ ID NO: 372 - protein, 221 aa, Homo sapiens
  Payload ID: 58;
  Gene Symbol: ALAS2;
  Gene Name: 5'-aminolevulinate synthase 2;
  ENSP ID: ENSP00000407204
  MOD_RES (1)..(1): Any amino acid
XLSFVRPQCRATDSPSWAKGHCPFMLSELQDGKSKIVQKAAPEVQEDVKAFKTDLPSSLVSVSLRKPFSGPQEQEQISGKVTHLIQNNMPGNYVFSYDQFFRDKIMEKKQDHTYRVFKTVNRWADAYPFAQHFSEASVASKDVSVWCSNDYLGMSRHPQVLQATQETLQRHGAGAGGTRNISGTSKFHVELEQELAELHQKDSALLFSSCFVANDSTLFTL

SEQ ID NO: 373 - protein, 232 aa, Homo sapiens
  Payload ID: 59;
  Gene Symbol: AZI2;
  Gene Name: 5-azacytidine induced 2;
  Uniprot ID:  Q9H6S1;
  ENSP ID: ENSP00000335609
MDALVEDDICILNHEKAHKRDTVTPVSIYSGDESVASHFALVTAYEDIKKRLKDSEKENSLLKKRIRFLEEKLIARFEEETSSVGREQVNKAYHAYREVCIDRDNLKSKLDKMNKDNSESLKVLNEQLQSKEVELLQLRTEVETQQVMRNLNPPSSNWEVEKLSCDLKIHGLEQELELMRKECSDLKIELQKAKQTDPYQEDNLKSRDLQKLSISRVSVAQPGVQWRNHGIA

SEQ ID NO: 374 - protein, 243 aa, Homo sapiens
  Payload ID: 59;
  Gene Symbol: AZI2;
  Gene Name: 5-azacytidine induced 2;
  Uniprot ID:  Q9H6S1;
  ENSP ID: ENSP00000389577
MDALVEDDICILNHEKAHKRDTVTPVSIYSGDESVASHFALVTAYEDIKKRLKDSEKENSLLKKRIRFLEEKLIARFEEETSSVGREQVNKAYHAYREVCIDRDNLKSKLDKMNKDNSESLKVLNEQLQSKEVELLQLRTEVETQQVMRNLNPPSSNWEVEKLSCDLKIHGLEQELELMRKECSDLKIELQKAKQTDPYQEDNLKSRDLQKLSISRQSICSTAWSAVAQSWDSMNFEDCSLFA

SEQ ID NO: 375 - protein, 243 aa, Homo sapiens; identical to SEQ ID NO: 374
  Payload ID: 59;
  Gene Symbol: AZI2;
  Gene Name: 5-azacytidine induced 2;
  Uniprot ID:  Q9H6S1;
  ENSP ID: ENSP00000391696

SEQ ID NO: 376 - protein, 76 aa, Homo sapiens
  Payload ID: 59;
  Gene Symbol: AZI2;
  Gene Name: 5-azacytidine induced 2;
  ENSP ID: ENSP00000403133
  MOD_RES (1)..(1): Any amino acid
XLKSRDLQKLSISSDNMQHAYWELKREMSNLHLVTQVQAELLRKLKTSTAIKKALSQNRAMRSTAPVLGTHGVKDK

SEQ ID NO: 377 - protein, 215 aa, Homo sapiens
  Payload ID: 59;
  Gene Symbol: AZI2;
  Gene Name: 5-azacytidine induced 2;
  ENSP ID: ENSP00000412820
MDALVEDDICILNHEKAHKRDTVTPVSIYSGDESVASHFALVTAYEDIKKRLKDSEKENSLLKKRIRFLEEKLIARFEEETSSVGREQVNKAYHAYREVCIDRDNLKSKLDKMNKDNSESLKVLNEQLQSKEVELLQLRTEVETQQVMRNLNPPSSNWEVEKLSCDLKIHGLEQELELMRKECSDLKIELQKAKQTDPYQEDNLKSRDLQKLSIS

SEQ ID NO: 378 - protein, 95 aa, Homo sapiens
  Payload ID: 59;
  Gene Symbol: AZI2;
  Gene Name: 5-azacytidine induced 2;
  ENSP ID: ENSP00000416380
MDALVEDDICILNHEKAHKRDTVTPVSIYSGDESVASHFALVTAYEDIKKRLKDSEKENSLLKKRIRFLEEKLIARFEEETSSVGREQVNKAYHA

SEQ ID NO: 379 - protein, 392 aa, Homo sapiens
  Payload ID: 59;
  Gene Symbol: AZI2;
  Gene Name: 5-azacytidine induced 2;
  Uniprot ID:  Q9H6S1;
  ENSP ID: ENSP00000419371
MDALVEDDICILNHEKAHKRDTVTPVSIYSGDESVASHFALVTAYEDIKKRLKDSEKENSLLKKRIRFLEEKLIARFEEETSSVGREQVNKAYHAYREVCIDRDNLKSKLDKMNKDNSESLKVLNEQLQSKEVELLQLRTEVETQQVMRNLNPPSSNWEVEKLSCDLKIHGLEQELELMRKECSDLKIELQKAKQTDPYQEDNLKSRDLQKLSISSDNMQHAYWELKREMSNLHLVTQVQAELLRKLKTSTAIKKACAPVGCSEDLGRDSTKLHLMNFTATYTRHPPLLPNGKALCHTTSSPLPGDVKVLSEKAILQSWTDNERSIPNDGTCFQEHSSYGRNSLEDNSWVFPSPPKSSETAFGETKTKTLPLPNLPPLHYLDQHNQNCLYKN

SEQ ID NO: 380 - protein, 354 aa, Homo sapiens
  Payload ID: 60;
  Gene Symbol: HMCES;
  Gene Name: 5-hydroxymethylcytosine (hmC) binding, ES cell-specific;
  Uniprot ID:  Q96FZ2;
  ENSP ID: ENSP00000372955
MCGRTSCHLPRDVLTRACAYQDRRGQQRLPEWRDPDKYCPSYNKSPQSNSPVLLSRLHFEKDADSSERIIAPMRWGLVPSWFKESDPSKLQFNTTNCRSDTVMEKRSFKVPLGKGRRCVVLADGFYEWQRCQGTNQRQPYFIYFPQIKTEKSGSIGAADSPENWEKVWDNWRLLTMAGIFDCWEPPEGGDVLYSYTIITVDSCKGLSDIHHRMPAILDGEEAVSKWLDFGEVSTQEALKLIHPTENITFHAVSSVVNNSRNNTPECLAPVDLVVKKELRASGSSQRMLQWLATKSPKKEDSKTPQKEESDVPQWSSQFLQKSPLPTKRGTAGLLEQWLKREKEEEPVAKRPYSQ

SEQ ID NO: 381 - protein, 354 aa, Homo sapiens; identical to SEQ ID NO: 380
  Payload ID: 60;
  Gene Symbol: HMCES;
  Gene Name: 5-hydroxymethylcytosine (hmC) binding, ES cell-specific;
  Uniprot ID:  Q96FZ2;
  ENSP ID: ENSP00000374385

SEQ ID NO: 382 - protein, 312 aa, Homo sapiens
  Payload ID: 60;
  Gene Symbol: HMCES;
  Gene Name: 5-hydroxymethylcytosine (hmC) binding, ES cell-specific;
  ENSP ID: ENSP00000392966
MCGRTSCHLPRDVLTRACAYQDRRGQQRLPEWRDPDKYCPSYNKSPQSNSPVLLSRLHFEKDADSSERIIAPMRWGLVPSWFKESDPSKLQFNTTNCRSDTVMEKRSFKSGSIGAADSPENWEKVWDNWRLLTMAGIFDCWEPPEGGDVLYSYTIITVDSCKGLSDIHHRMPAILDGEEAVSKWLDFGEVSTQEALKLIHPTENITFHAVSSVVNNSRNNTPECLAPVDLVVKKELRASGSSQRMLQWLATKSPKKEDSKTPQKEESDVPQWSSQFLQKSPLPTKRGTAGLLEQWLKREKEEEPVAKRPYSQ

SEQ ID NO: 383 - protein, 140 aa, Homo sapiens
  Payload ID: 60;
  Gene Symbol: HMCES;
  Gene Name: 5-hydroxymethylcytosine (hmC) binding, ES cell-specific;
  ENSP ID: ENSP00000421895
MCGRTSCHLPRDVLTRACAYQDRRGQQRLPEWRDPDKYCPSYNKSPQSNSPVLLSRLHFEKSGSIGAADSPENWEKVWDNWRLLTMAGIFDCWEPPEGGDVLYSYTIITVDSCKGLSDIHHRMPAILDGEEAVSKWLDFG

SEQ ID NO: 384 - protein, 282 aa, Homo sapiens
  Payload ID: 60;
  Gene Symbol: HMCES;
  Gene Name: 5-hydroxymethylcytosine (hmC) binding, ES cell-specific;
  ENSP ID: ENSP00000423132
MCGRTSCHLPRDVLTRACAYQDRRGQQRLPEWRDPDKYCPSYNKSPQSNSPVLLSRLHFEKVPLGKGRRCVVLADGFYEWQRCQGTNQRQPYFIYFPQIKTEKSGSIGAADSPENWEKVWDNWRLLTMAGIFDCWEPPEGGDVLYSYTIITVDSCKGLSDIHHRMPAILDGEEAVSKWLDFGEVSTQEALKLIHPTENITFHAVSSVVNNSRNNTPECLAPVDLVVKKELRASGSSQRMLQWLATKSPKKEDSKTPQKEESDVPQWSSQFLQKSPLPTKRGT

SEQ ID NO: 385 - protein, 233 aa, Homo sapiens
  Payload ID: 60;
  Gene Symbol: HMCES;
  Gene Name: 5-hydroxymethylcytosine (hmC) binding, ES cell-specific;
  ENSP ID: ENSP00000424594
MCGRTSCHLPRDVLTRACAYQDRRGQQRLPEWRDPDKYCPSYNKSPQSNSPVLLSRLHFEKDADSSERIIAPMRWGLVPSWFKESDPSKLQFNTTNCRSDTVMEKRSFKVPLGKGRRCVVLADGFYEWQRCQGTNQRQPYFIYFPQIKTEKSGSIGAADSPENWEKVWDNWRLLTMAGIFDCWEPPEGGDVLYSYTIITVDSCKGLSDIHHRMPAILDGEEAVSKWLDFGEVS

SEQ ID NO: 386 - protein, 354 aa, Homo sapiens; identical to SEQ ID NO: 380
  Payload ID: 60;
  Gene Symbol: HMCES;
  Gene Name: 5-hydroxymethylcytosine (hmC) binding, ES cell-specific;
  Uniprot ID:  Q96FZ2;
  ENSP ID: ENSP00000426215

SEQ ID NO: 387 - protein, 183 aa, Homo sapiens
  Payload ID: 60;
  Gene Symbol: HMCES;
  Gene Name: 5-hydroxymethylcytosine (hmC) binding, ES cell-specific;
  ENSP ID: ENSP00000426276
MCGRTSCHLPRDVLTRACAYQDRRGQQRLPEWRDPDKYCPSYNKSPQSNSPVLLSRLHFEKSGSIGAADSPENWEKVWDNWRLLTMAGIFDCWEPPEGGDVLYSYTIITVDSCKGLSDIHHRMPAILDGEEAVSKWLDFGEVSTQEALKLIHPTENITFHAVSSVVNNSRNNTPECLAPVDLV

SEQ ID NO: 388 - protein, 422 aa, Homo sapiens
  Payload ID: 61;
  Gene Symbol: HTR1A;
  Gene Name: 5-hydroxytryptamine (serotonin) receptor 1A, G prt-coupled;
  Uniprot ID:  P08908;
  ENSP ID: ENSP00000316244
MDVLSPGQGNNTTSPPAPFETGGNTTGISDVTVSYQVITSLLLGTLIFCAVLGNACVVAAIALERSLQNVANYLIGSLAVTDLMVSVLVLPMAALYQVLNKWTLGQVTCDLFIALDVLCCTSSILHLCAIALDRYWAITDPIDYVNKRTPRRAAALISLTWLIGFLISIPPMLGWRTPEDRSDPDACTISKDHGYTIYSTFGAFYIPLLLMLVLYGRIFRAARFRIRKTVKKVEKTGADTRHGASPAPQPKKSVNGESGSRNWRLGVESKAGGALCANGAVRQGDDGAALEVIEVHRVGNSKEHLPLPSEAGPTPCAPASFERKNERNAEAKRKMALARERKTVKTLGIIMGTFILCWLPFFIVALVLPFCESSCHMPTLLGAIINWLGYSNSLLNPVIYAYFNKDFQNAFKKIIKCKFCRQ

SEQ ID NO: 389 - protein, 41 aa, Homo sapiens
  Payload ID: 61;
  Gene Symbol: HTR1A;
  Gene Name: 5-hydroxytryptamine (serotonin) receptor 1A, G prt-coupled;
  ENSP ID: ENSP00000423433
MDVLSPGQGNNTTSPPAPFETGGNTTGISDVTVSYQVITSL

SEQ ID NO: 390 - protein, 390 aa, Homo sapiens
  Payload ID: 62;
  Gene Symbol: HTR1B;
  Gene Name: 5-hydroxytryptamine (serotonin) receptor 1B, G prt-coupled;
  Uniprot ID:  P28222;
  ENSP ID: ENSP00000358963
MEEPGAQCAPPPPAGSETWVPQANLSSAPSQNCSAKDYIYQDSISLPWKVLLVMLLALITLATTLSNAFVIATVYRTRKLHTPANYLIASLAVTDLLVSILVMPISTMYTVTGRWTLGQVVCDFWLSSDITCCTASILHLCVIALDRYWAITDAVEYSAKRTPKRAAVMIALVWVFSISISLPPFFWRQAKAEEEVSECVVNTDHILYTVYSTVGAFYFPTLLLIALYGRIYVEARSRILKQTPNRTGKRLTRAQLITDSPGSTSSVTSINSRVPDVPSESGSPVYVNQVKVRVSDALLEKKKLMAARERKATKTLGIILGAFIVCWLPFFIISLVMPICKDACWFHLAIFDFFTWLGYLNSLINPIIYTMSNEDFKQAFHKLIRFKCTS

SEQ ID NO: 391 - protein, 377 aa, Homo sapiens
  Payload ID: 63;
  Gene Symbol: HTR1D;
  Gene Name: 5-hydroxytryptamine (serotonin) receptor 1D, G prt-coupled;
  Uniprot ID:  P28221;
  ENSP ID: ENSP00000363748
MSPLNQSAEGLPQEASNRSLNATETSEAWDPRTLQALKISLAVVLSVITLATVLSNAFVLTTILLTRKLHTPANYLIGSLATTDLLVSILVMPISIAYTITHTWNFGQILCDIWLSSDITCCTASILHLCVIALDRYWAITDALEYSKRRTAGHAATMIAIVWAISICISIPPLFWRQAKAQEEMSDCLVNTSQISYTIYSTCGAFYIPSVLLIILYGRIYRAARNRILNPPSLYGKRFTTAHLITGSAGSSLCSLNSSLHEGHSHSAGSPLFFNHVKIKLADSALERKRISAARERKATKILGIILGAFIICWLPFFVVSLVLPICRDSCWIHPALFDFFTWLGYLNSLINPIIYTVFNEEFRQAFQKIVPFRKAS

SEQ ID NO: 392 - protein, 365 aa, Homo sapiens
  Payload ID: 64;
  Gene Symbol: HTR1E;
  Gene Name: 5-hydroxytryptamine (serotonin) receptor 1E, G prt-coupled;
  Uniprot ID:  P28566;
  ENSP ID: ENSP00000307766
MNITNCTTEASMAIRPKTITEKMLICMTLVVITTLTTLLNLAVIMAIGTTKKLHQPANYLICSLAVTDLLVAVLVMPLSIIYIVMDRWKLGYFLCEVWLSVDMTCCTCSILHLCVIALDRYWAITNAIEYARKRTAKRAALMILTVWTISIFISMPPLFWRSHRRLSPPPSQCTIQHDHVIYTIYSTLGAFYIPLTLILILYYRIYHAAKSLYQKRGSSRHLSNRSTDSQNSFASCKLTQTFCVSDFSTSDPTTEFEKFHASIRIPPFDNDLDHPGERQQISSTRERKAARILGLILGAFILSWLPFFIKELIVGLSIYTVSSEVADFLTWLGYVNSLINPLLYTSFNEDFKLAFKKLIRCREHT

SEQ ID NO: 393 - protein, 366 aa, Homo sapiens
  Payload ID: 65;
  Gene Symbol: HTR1F;
  Gene Name: 5-hydroxytryptamine (serotonin) receptor 1F, G prt-coupled;
  Uniprot ID:  P30939;
  ENSP ID: ENSP00000322924
MDFLNSSDQNLTSEELLNRMPSKILVSLTLSGLALMTTTINSLVIAAIIVTRKLHHPANYLICSLAVTDFLVAVLVMPFSIVYIVRESWIMGQVVCDIWLSVDITCCTCSILHLSAIALDRYRAITDAVEYARKRTPKHAGIMITIVWIISVFISMPPLFWRHQGTSRDDECIIKHDHIVSTIYSTFGAFYIPLALILILYYKIYRAAKTLYHKRQASRIAKEEVNGQVLLESGEKSTKSVSTSYVLEKSLSDPSTDFDKIHSTVRSLRSEFKHEKSWRRQKISGTRERKAATTLGLILGAFVICWLPFFVKELVVNVCDKCKISEEMSNFLAWLGYLNSLINPLIYTIFNEDFKKAFQKLVRCRC

SEQ ID NO: 394 - protein, 471 aa, Homo sapiens
  Payload ID: 66;
  Gene Symbol: HTR2A;
  Gene Name: 5-hydroxytryptamine (serotonin) receptor 2A, G prt-coupled;
  Uniprot ID:  P28223;
  ENSP ID: ENSP00000367959
MDILCEENTSLSSTTNSLMQLNDDTRLYSNDFNSGEANTSDAFNWTVDSENRTNLSCEGCLSPSCLSLLHLQEKNWSALLTAVVIILTIAGNILVIMAVSLEKKLQNATNYFLMSLAIADMLLGFLVMPVSMLTILYGYRWPLPSKLCAVWIYLDVLFSTASIMHLCAISLDRYVAIQNPIHHSRFNSRTKAFLKIIAVWTISVGISMPIPVFGLQDDSKVFKEGSCLLADDNFVLIGSFVSFFIPLTIMVITYFLTIKSLQKEATLCVSDLGTRAKLASFSFLPQSSLSSEKLFQRSIHREPGSYTGRRTMQSISNEQKACKVLGIVFFLFVVMWCPFFITNIMAVICKESCNEDVIGALLNVFVWIGYLSSAVNPLVYTLFNKTYRSAFSRYIQCQYKENKKPLQLILVNTIPALAYKSSQLQMGQKKNSKQDAKTTDNDCSMVALGKQHSEEASKDNSDGVNEKVSCV

SEQ ID NO: 395 - protein, 471 aa, Homo sapiens; identical to SEQ ID NO: 394
  Payload ID: 66;
  Gene Symbol: HTR2A;
  Gene Name: 5-hydroxytryptamine (serotonin) receptor 2A, G prt-coupled;
  Uniprot ID:  P28223;
  ENSP ID: ENSP00000437737

SEQ ID NO: 396 - protein, 387 aa, Homo sapiens
  Payload ID: 66;
  Gene Symbol: HTR2A;
  Gene Name: 5-hydroxytryptamine (serotonin) receptor 2A, G prt-coupled;
  Uniprot ID:  P28223;
  ENSP ID: ENSP00000441861
MQFLKSAKQKPNYYHIMLVEDQEEGTLHQFNYCERCSESQNNKCISCVDPEDKWYRWPLPSKLCAVWIYLDVLFSTASIMHLCAISLDRYVAIQNPIHHSRFNSRTKAFLKIIAVWTISVGISMPIPVFGLQDDSKVFKEGSCLLADDNFVLIGSFVSFFIPLTIMVITYFLTIKSLQKEATLCVSDLGTRAKLASFSFLPQSSLSSEKLFQRSIHREPGSYTGRRTMQSISNEQKACKVLGIVFFLFVVMWCPFFITNIMAVICKESCNEDVIGALLNVFVWIGYLSSAVNPLVYTLFNKTYRSAFSRYIQCQYKENKKPLQLILVNTIPALAYKSSQLQMGQKKNSKQDAKTTDNDCSMVALGKQHSEEASKDNSDGVNEKVSCV

SEQ ID NO: 397 - protein, 110 aa, Homo sapiens
  Payload ID: 66;
  Gene Symbol: HTR2A;
  Gene Name: 5-hydroxytryptamine (serotonin) receptor 2A, G prt-coupled;
  ENSP ID: ENSP00000482708
FNSGEANTSDAFNWTVDSENRTNLSCEGCLSPSCLSLLHLQEKNWSALLTAVVIILTIAGNILVIMAVSLEKKLQNATNYFLMSLAIADMLLGFLVMPVSMLTILYGEWH

SEQ ID NO: 398 - protein, 481 aa, Homo sapiens
  Payload ID: 67;
  Gene Symbol: HTR2B;
  Gene Name: 5-hydroxytryptamine (serotonin) receptor 2B, G prt-coupled;
  Uniprot ID:  P41595;
  ENSP ID: ENSP00000258400
MALSYRVSELQSTIPEHILQSTFVHVISSNWSGLQTESIPEEMKQIVEEQGNKLHWAALLILMVIIPTIGGNTLVILAVSLEKKLQYATNYFLMSLAVADLLVGLFVMPIALLTIMFEAMWPLPLVLCPAWLFLDVLFSTASIMHLCAISVDRYIAIKKPIQANQYNSRATAFIKITVVWLISIGIAIPVPIKGIETDVDNPNNITCVLTKERFGDFMLFGSLAAFFTPLAIMIVTYFLTIHALQKKAYLVKNKPPQRLTWLTVSTVFQRDETPCSSPEKVAMLDGSRKDKALPNSGDETLMRRTSTIGKKSVQTISNEQRASKVLGIVFFLFLLMWCPFFITNITLVLCDSCNQTTLQMLLEIFVWIGYVSSGVNPLVYTLFNKTFRDAFGRYITCNYRATKSVKTLRKRSSKIYFRNPMAENSKFFKKHGIRNGINPAMYQSPMRLRSSTIQSSSIILLDTLLLTENEGDKTEEQVSYV

SEQ ID NO: 399 - protein, 458 aa, Homo sapiens
  Payload ID: 68;
  Gene Symbol: HTR2C;
  Gene Name: 5-hydroxytryptamine (serotonin) receptor 2C, G prt-coupled;
  Uniprot ID:  P28335;
  ENSP ID: ENSP00000276198
MVNLRNAVHSFLVHLIGLLVWQSDISVSPVAAIVTDIFNTSDGGRFKFPDGVQNWPALSIVIIIIMTIGGNILVIMAVSMEKKLHNATNYFLMSLAIADMLVGLLVMPLSLLAILYDYVWPLPRYLCPVWISLDVLFSTASIMHLCAISLDRYVAIRNPIEHSRFNSRTKAIMKIAIVWAISIGVSVPIPVIGLRDEEKVFVNNTTCVLNDPNFVLIGSFVAFFIPLTIMVITYCLTIYVLRRQALMLLHGHTEEPPGLSLDFLKCCKRNTAEEENSANPNQDQNARRRKKKERRPRGTMQAINNERKASKVLGIVFFVFLIMWCPFFITNILSVLCEKSCNQKLMEKLLNVFVWIGYVCSGINPLVYTLFNKIYRRAFSNYLRCNYKVEKKPPVRQIPRVAATALSGRELNVNIYRHTNEPVIEKASDNEPGIEMQVENLELPVNPSSVVSERISSV

SEQ ID NO: 400 - protein, 248 aa, Homo sapiens
  Payload ID: 68;
  Gene Symbol: HTR2C;
  Gene Name: 5-hydroxytryptamine (serotonin) receptor 2C, G prt-coupled;
  Uniprot ID:  P28335;
  ENSP ID: ENSP00000361018
MVNLRNAVHSFLVHLIGLLVWQSDISVSPVAAIVTDIFNTSDGGRFKFPDGVQNWPALSIVIIIIMTIGGNILVIMAVSMEKKLHNATNYFLMSLAIADMLVGLLVMPLSLLAILYDYVWPLPRYLCPVWISLDVLFSTASIMHLCAISLDRCISSYPCDWTEGRRKGVREQHDVRAQRPKFRSYWVLRSFLHTADDYGDYVLPDHLRSAPTSFDVTARPHRGTAWTKSGFPEVLQEEYGRGRELCKP

SEQ ID NO: 401 - protein, 458 aa, Homo sapiens; identical to SEQ ID NO: 399
  Payload ID: 68;
  Gene Symbol: HTR2C;
  Gene Name: 5-hydroxytryptamine (serotonin) receptor 2C, G prt-coupled;
  Uniprot ID:  P28335;
  ENSP ID: ENSP00000361019

SEQ ID NO: 402 - protein, 463 aa, Homo sapiens
  Payload ID: 69;
  Gene Symbol: HTR3A;
  Gene Name: 5-hydroxytryptamine (serotonin) receptor 3A, ionotropic;
  Uniprot ID:  P46098;
  ENSP ID: ENSP00000299961
MHRSFLQARRSRNTTRPALLRLSDYLLTNYRKGVRPVRDWRKPTTVSIDVIVYAILNVDEKNQVLTTYIWYRQYWTDEFLQWNPEDFDNITKLSIPTDSIWVPDILINEFVDVGKSPNIPYVYIRHQGEVQNYKPLQVVTACSLDIYNFPFDVQNCSLTFTSWLHTIQDINISLWRLPEKVKSDRSVFMNQGEWELLGVLPYFREFSMESSNYYAEMKFYVVIRRRPLFYVVSLLLPSIFLMVMDIVGFYLPPNSGERVSFKITLLLGYSVFLIIVSDTLPATAIGTPLIGVYFVVCMALLVISLAETIFIVRLVHKQDLQQPVPAWLRHLVLERIAWLLCLREQSTSQRPPATSQATKTDDCSAMGNHCSHMGGPQDFEKSPRDRCSPPPPPREASLAVCGLLQELSSIRQFLEKRDEIREVARDWLRVGSVLDKLLFHIYLLAVLAYSITLVMLWSIWQYA

SEQ ID NO: 403 - protein, 516 aa, Homo sapiens
  Payload ID: 69;
  Gene Symbol: HTR3A;
  Gene Name: 5-hydroxytryptamine (serotonin) receptor 3A, ionotropic;
  Uniprot ID:  P46098;
  ENSP ID: ENSP00000347754
MLGKLAMLLWVQQALLALLLPTLLAQGEARRSRNTTRPALLRLSDYLLTNYRKGVRPVRDWRKPTTVSIDVIVYAILNVDEKNQVLTTYIWYRQYWTDEFLQWNPEDFDNITKLSIPTDSIWVPDILINEFVDVGKSPNIPYVYIRHQGEVQNYKPLQVVTACSLDIYNFPFDVQNCSLTFTSWLHTIQDINISLWRLPEKVKSDRSVFMNQGEWELLGVLPYFREFSMESSNYYAEMKFYVVIRRRPLFYVVSLLLPSIFLMVMDIVGFYLPPNSGERVSFKITLLLGYSVFLIIVSDTLPATAIGTPLIGKAPPGSRAQSGEKPAPSHLLHVSLASALGCTGVYFVVCMALLVISLAETIFIVRLVHKQDLQQPVPAWLRHLVLERIAWLLCLREQSTSQRPPATSQATKTDDCSAMGNHCSHMGGPQDFEKSPRDRCSPPPPPREASLAVCGLLQELSSIRQFLEKRDEIREVARDWLRVGSVLDKLLFHIYLLAVLAYSITLVMLWSIWQYA

SEQ ID NO: 404 - protein, 484 aa, Homo sapiens
  Payload ID: 69;
  Gene Symbol: HTR3A;
  Gene Name: 5-hydroxytryptamine (serotonin) receptor 3A, ionotropic;
  Uniprot ID:  P46098;
  ENSP ID: ENSP00000364648
MLGKLAMLLWVQQALLALLLPTLLAQGEARRSRNTTRPALLRLSDYLLTNYRKGVRPVRDWRKPTTVSIDVIVYAILNVDEKNQVLTTYIWYRQYWTDEFLQWNPEDFDNITKLSIPTDSIWVPDILINEFVDVGKSPNIPYVYIRHQGEVQNYKPLQVVTACSLDIYNFPFDVQNCSLTFTSWLHTIQDINISLWRLPEKVKSDRSVFMNQGEWELLGVLPYFREFSMESSNYYAEMKFYVVIRRRPLFYVVSLLLPSIFLMVMDIVGFYLPPNSGERVSFKITLLLGYSVFLIIVSDTLPATAIGTPLIGVYFVVCMALLVISLAETIFIVRLVHKQDLQQPVPAWLRHLVLERIAWLLCLREQSTSQRPPATSQATKTDDCSAMGNHCSHMGGPQDFEKSPRDRCSPPPPPREASLAVCGLLQELSSIRQFLEKRDEIREVARDWLRVGSVLDKLLFHIYLLAVLAYSITLVMLWSIWQYA

SEQ ID NO: 405 - protein, 238 aa, Homo sapiens
  Payload ID: 69;
  Gene Symbol: HTR3A;
  Gene Name: 5-hydroxytryptamine (serotonin) receptor 3A, ionotropic;
  ENSP ID: ENSP00000423653
MLLWVQQALLALLLPTLLAQGEARRSRNTTRPALLRLSDYLLTNYRKGVRPVRDWRKPTTVSIDVIVYAILNVDEKNQVLTTYIWYRQYWTDEFLQWNPEDFDNITKLSIPTDSIWVPDILINEFVDVGKSPNIPYVYIRHQGEVQNYKPLQVVTACSLDIYNFPFDVQNCSLTFTSWLHTSGHPPAAPLLCGQPATAQHLPHGHGHRGLLPAPQQWREGLFQDYTPPGLLGLPDHRF

SEQ ID NO: 406 - protein, 478 aa, Homo sapiens
  Payload ID: 69;
  Gene Symbol: HTR3A;
  Gene Name: 5-hydroxytryptamine (serotonin) receptor 3A, ionotropic;
  Uniprot ID:  P46098;
  ENSP ID: ENSP00000424189
MLLWVQQALLALLLPTLLAQGEARRSRNTTRPALLRLSDYLLTNYRKGVRPVRDWRKPTTVSIDVIVYAILNVDEKNQVLTTYIWYRQYWTDEFLQWNPEDFDNITKLSIPTDSIWVPDILINEFVDVGKSPNIPYVYIRHQGEVQNYKPLQVVTACSLDIYNFPFDVQNCSLTFTSWLHTIQDINISLWRLPEKVKSDRSVFMNQGEWELLGVLPYFREFSMESSNYYAEMKFYVVIRRRPLFYVVSLLLPSIFLMVMDIVGFYLPPNSGERVSFKITLLLGYSVFLIIVSDTLPATAIGTPLIGVYFVVCMALLVISLAETIFIVRLVHKQDLQQPVPAWLRHLVLERIAWLLCLREQSTSQRPPATSQATKTDDCSAMGNHCSHMGGPQDFEKSPRDRCSPPPPPREASLAVCGLLQELSSIRQFLEKRDEIREVARDWLRVGSVLDKLLFHIYLLAVLAYSITLVMLWSIWQYA

SEQ ID NO: 407 - protein, 510 aa, Homo sapiens
  Payload ID: 69;
  Gene Symbol: HTR3A;
  Gene Name: 5-hydroxytryptamine (serotonin) receptor 3A, ionotropic;
  Uniprot ID:  P46098;
  ENSP ID: ENSP00000424776
MLLWVQQALLALLLPTLLAQGEARRSRNTTRPALLRLSDYLLTNYRKGVRPVRDWRKPTTVSIDVIVYAILNVDEKNQVLTTYIWYRQYWTDEFLQWNPEDFDNITKLSIPTDSIWVPDILINEFVDVGKSPNIPYVYIRHQGEVQNYKPLQVVTACSLDIYNFPFDVQNCSLTFTSWLHTIQDINISLWRLPEKVKSDRSVFMNQGEWELLGVLPYFREFSMESSNYYAEMKFYVVIRRRPLFYVVSLLLPSIFLMVMDIVGFYLPPNSGERVSFKITLLLGYSVFLIIVSDTLPATAIGTPLIGKAPPGSRAQSGEKPAPSHLLHVSLASALGCTGVYFVVCMALLVISLAETIFIVRLVHKQDLQQPVPAWLRHLVLERIAWLLCLREQSTSQRPPATSQATKTDDCSAMGNHCSHMGGPQDFEKSPRDRCSPPPPPREASLAVCGLLQELSSIRQFLEKRDEIREVARDWLRVGSVLDKLLFHIYLLAVLAYSITLVMLWSIWQYA

SEQ ID NO: 408 - protein, 441 aa, Homo sapiens
  Payload ID: 70;
  Gene Symbol: HTR3B;
  Gene Name: 5-hydroxytryptamine (serotonin) receptor 3B, ionotropic;
  Uniprot ID:  O95264;
  ENSP ID: ENSP00000260191
MLSSVMAPLWACILVAAGILATDTHHPQDSALYHLSKQLLQKYHKEVRPVYNWTKATTVYLDLFVHAILDVDAENQILKTSVWYQEVWNDEFLSWNSSMFDEIREISLPLSAIWAPDIIINEFVDIERYPDLPYVYVNSSGTIENYKPIQVVSACSLETYAFPFDVQNCSLTFKSILHTVEDVDLAFLRSPEDIQHDKKAFLNDSEWELLSVSSTYSILQSSAGGFAQIQFNVVMRRHPLVYVVSLLIPSIFLMLVDLGSFYLPPNCRARIVFKTSVLVGYTVFRVNMSNQVPRSVGSTPLIGHFFTICMAFLVLSLAKSIVLVKFLHDEQRGGQEQPFLCLRGDTDADRPRVEPRAQRAVVTESSLYGEHLAQPGTLKEVWSQLQSISNYLQTQDQTDQQEAEWLVLLSRFDRLLFQSYLFMLGIYTITLCSLWALWGGV

SEQ ID NO: 409 - protein, 175 aa, Homo sapiens
  Payload ID: 70;
  Gene Symbol: HTR3B;
  Gene Name: 5-hydroxytryptamine (serotonin) receptor 3B, ionotropic;
  ENSP ID: ENSP00000440894
  MOD_RES (1)..(1): Any amino acid
XAENQILKTSVWYQEVWNDEFLSWNSSMFDEIREISLPLSAIWAPDIIINEFVDIERYPDLPYVYVNSSGTIENYKPIQVVSACSLETYAFPFDVQNCSLTFKSILHTVEDVDLAFLRSPEDIQHDKKAFLNDSEWELLSVSSTYSILQSSAGGFAQIQFNGTSSPSAWPSWFSA

SEQ ID NO: 410 - protein, 430 aa, Homo sapiens
  Payload ID: 70;
  Gene Symbol: HTR3B;
  Gene Name: 5-hydroxytryptamine (serotonin) receptor 3B, ionotropic;
  Uniprot ID:  O95264;
  ENSP ID: ENSP00000443118
MIVYFPGILATDTHHPQDSALYHLSKQLLQKYHKEVRPVYNWTKATTVYLDLFVHAILDVDAENQILKTSVWYQEVWNDEFLSWNSSMFDEIREISLPLSAIWAPDIIINEFVDIERYPDLPYVYVNSSGTIENYKPIQVVSACSLETYAFPFDVQNCSLTFKSILHTVEDVDLAFLRSPEDIQHDKKAFLNDSEWELLSVSSTYSILQSSAGGFAQIQFNVVMRRHPLVYVVSLLIPSIFLMLVDLGSFYLPPNCRARIVFKTSVLVGYTVFRVNMSNQVPRSVGSTPLIGHFFTICMAFLVLSLAKSIVLVKFLHDEQRGGQEQPFLCLRGDTDADRPRVEPRAQRAVVTESSLYGEHLAQPGTLKEVWSQLQSISNYLQTQDQTDQQEAEWLVLLSRFDRLLFQSYLFMLGIYTITLCSLWALWGGV

SEQ ID NO: 411 - protein, 447 aa, Homo sapiens
  Payload ID: 71;
  Gene Symbol: HTR3C;
  Gene Name: 5-hydroxytryptamine (serotonin) receptor 3C, ionotropic;
  Uniprot ID:  Q8WXA8;
  ENSP ID: ENSP00000322617
MEGGWPARQSALLCLTVSLLLQGRGDAFTINCSGFDQHGVDPAVFQAVFDRKAFRPFTNYSIPTRVNISFTLSAILGVDAQLQLLTSFLWMDLVWDNPFINWNPKECVGINKLTVLAENLWLPDIFIVESMDVDQTPSGLTAYISSEGRIKYDKPMRVTSICNLDIFYFPFDQQNCTFTFSSFLYTVDSMLLGMDKEVWEITDTSRKVIQTQGEWELLGINKATPKMSMGNNLYDQIMFYVAIRRRPSLYIINLLVPSSFLVAIDALSFYLPAESENRAPFKITLLLGYNVFLLMMNDLLPASGTPLISVYFALCLSLMVVSLLETVFITYLLHVATTQPPPMPRWLHSLLLHCTSPGRCCPTAPQKGNKGLGLTLTHLPGPKEPGELAGKKLGPRETEPDGGSGWTKTQLMELWVQFSHAMDTLLFRLYLLFMASSILTVIVLWNT

SEQ ID NO: 412 - protein, 279 aa, Homo sapiens
  Payload ID: 72;
  Gene Symbol: HTR3D;
  Gene Name: 5-hydroxytryptamine (serotonin) receptor 3D, ionotropic;
  ENSP ID: ENSP00000334315
MASMSIVKATSNTISQCGWSASANWTPSISPSMDRGERSPSALSPTQVAIRRRCRPSPYVVNFLVPSGILIAIDALSFYLPLESGNCAPFKMTVLLGYSVFLLMMNDLLPATSTSSHASLVRPHPSRDQKRGVYFALCLSLMVGSLLETIFITHLLHVATTQPLPLPRWLHSLLLHCTGQGRCCPTAPQKGNKGPGLTPTHLPGVKEPEVSAGQMPGPGEAELTGGSEWTRAQREHEAQKQHSVELWVQFSHAMDALLFRLYLLFMASSIITVICLWNT

SEQ ID NO: 413 - protein, 454 aa, Homo sapiens
  Payload ID: 72;
  Gene Symbol: HTR3D;
  Gene Name: 5-hydroxytryptamine (serotonin) receptor 3D, ionotropic;
  Uniprot ID:  Q70Z44;
  ENSP ID: ENSP00000371929
MQKHSPGPPALALLSQSLLTTGNGDTLIINCPGFGQHRVDPAAFQAVFDRKAIGPVTNYSVATHVNISFTLSAIWNCYSRIHTFNCHHARPWHNQFVQWNPDECGGIKKSGMATENLWLSDVFIEESVDQTPAGLMASMSIVKATSNTISQCGWSASANWTPSISPSMDRARAWRRMSRSFQIHHRTSFRTRREWVLLGIQKRTIKVTVATNQYEQAIFHVAIRRRCRPSPYVVNFLVPSGILIAIDALSFYLPLESGNCAPFKMTVLLGYSVFLLMMNDLLPATSTSSHASLVAPLALMQTPLPAGVYFALCLSLMVGSLLETIFITHLLHVATTQPLPLPRWLHSLLLHCTGQGRCCPTAPQKGNKGPGLTPTHLPGVKEPEVSAGQMPGPGEAELTGGSEWTRAQREHEAQKQHSVELWVQFSHAMDALLFRLYLLFMASSIITVICLWNT

SEQ ID NO: 414 - protein, 233 aa, Homo sapiens
  Payload ID: 72;
  Gene Symbol: HTR3D;
  Gene Name: 5-hydroxytryptamine (serotonin) receptor 3D, ionotropic;
  Uniprot ID:  Q70Z44;
  ENSP ID: ENSP00000389268
MVAIRRRCRPSPYVVNFLVPSGILIAIDALSFYLPLESGNCAPFKMTVLLGYSVFLLMMNDLLPATSTSSHASLVRPHPSRDQKRGVYFALCLSLMVGSLLETIFITHLLHVATTQPLPLPRWLHSLLLHCTGQGRCCPTAPQKGNKGPGLTPTHLPGVKEPEVSAGQMPGPGEAELTGGSEWTRAQREHEAQKQHSVELWVQFSHAMDALLFRLYLLFMASSIITVICLWNT

SEQ ID NO: 415 - protein, 404 aa, Homo sapiens
  Payload ID: 72;
  Gene Symbol: HTR3D;
  Gene Name: 5-hydroxytryptamine (serotonin) receptor 3D, ionotropic;
  Uniprot ID:  Q70Z44;
  ENSP ID: ENSP00000405409
MERGWFHGKGFLLGFILHLLLQDSHLQLVTSFLWLNMWNPDECGGIKKSGMATENLWLSDVFIEESVDQTPAGLMASMSIVKATSNTISQCGWSASANWTPSISPSMDRGERSPSALSPTQVTRAWRRMSRSFQIHHRTSFRTRREWVLLGIQKRTIKVTVATNQYEQAIFHVAIRRRCRPSPYVVNFLVPSGILIAIDALSFYLPLESGNCAPFKMTVLLGYSVFLLMMNDLLPATSTSSHASLVRPHPSRDQKRGVYFALCLSLMVGSLLETIFITHLLHVATTQPLPLPRWLHSLLLHCTGQGRCCPTAPQKGNKGPGLTPTHLPGVKEPEVSAGQMPGPGEAELTGGSEWTRAQREHEAQKQHSVELWVQFSHAMDALLFRLYLLFMASSIITVICLWNT

SEQ ID NO: 416 - protein, 471 aa, Homo sapiens
  Payload ID: 73;
  Gene Symbol: HTR3E;
  Gene Name: 5-hydroxytryptamine (serotonin) receptor 3E, ionotropic;
  Uniprot ID:  A5X5Y0;
  ENSP ID: ENSP00000335511
MLAFILSRATPRPALGPLSYREHRVALLHLTHSMSTTGRGVTFTINCSGFGQHGADPTALNSVFNRKPFRPVTNISVPTQVNISFAMSAILDVNEQLHLLSSFLWLEMVWDNPFISWNPEECEGITKMSMAAKNLWLPDIFIIELMDVDKTPKGLTAYVSNEGRIRYKKPMKVDSICNLDIFYFPFDQQNCTLTFSSFLYTVDSMLLDMEKEVWEITDASRNILQTHGEWELLGLSKATAKLSRGGNLYDQIVFYVAIRRRPSLYVINLLVPSGFLVAIDALSFYLPVKSGNRVPFKITLLLGYNVFLLMMSDLLPTSGTPLIGVYFALCLSLMVGSLLETIFITHLLHVATTQPPPLPRWLHSLLLHCNSPGRCCPTAPQKENKGPGLTPTHLPGVKEPEVSAGQMPGPAEAELTGGSEWTRAQREHEAQKQHSVELWLQFSHAMDAMLFRLYLLFMASSIITVICLWNT

SEQ ID NO: 417 - protein, 158 aa, Homo sapiens
  Payload ID: 73;
  Gene Symbol: HTR3E;
  Gene Name: 5-hydroxytryptamine (serotonin) receptor 3E, ionotropic;
  ENSP ID: ENSP00000391254
MSAILDVNEQLHLLSSFLWLEMVWDNPFISWNPEECEGITKMSMAAKNLWLPDIFIIELMDVDKTPKGLTAYVSNEGRIRYKKPMKVDSICNLDIFYFPFDQQNCTLTFSSFLYTVDSMLLDMEKEVWEITDASRNILQTHGEWELLGLSKATAKLSR

SEQ ID NO: 418 - protein, 456 aa, Homo sapiens
  Payload ID: 73;
  Gene Symbol: HTR3E;
  Gene Name: 5-hydroxytryptamine (serotonin) receptor 3E, ionotropic;
  Uniprot ID:  A5X5Y0;
  ENSP ID: ENSP00000395833
MLAFILSRATPRPALGPLSYREHRVALLHLTHSMSTTGRGVTFTINCSGFGQHGADPTALNSVFNRKPFRPVTNISVPTQVNISFAMSAILDVVWDNPFISWNPEECEGITKMSMAAKNLWLPDIFIIELMDVDKTPKGLTAYVSNEGRIRYKKPMKVDSICNLDIFYFPFDQQNCTLTFSSFLYTVDSMLLDMEKEVWEITDASRNILQTHGEWELLGLSKATAKLSRGGNLYDQIVFYVAIRRRPSLYVINLLVPSGFLVAIDALSFYLPVKSGNRVPFKITLLLGYNVFLLMMSDLLPTSGTPLIGVYFALCLSLMVGSLLETIFITHLLHVATTQPPPLPRWLHSLLLHCNSPGRCCPTAPQKENKGPGLTPTHLPGVKEPEVSAGQMPGPAEAELTGGSEWTRAQREHEAQKQHSVELWLQFSHAMDAMLFRLYLLFMASSIITVICLWNT

SEQ ID NO: 419 - protein, 456 aa, Homo sapiens
  Payload ID: 73;
  Gene Symbol: HTR3E;
  Gene Name: 5-hydroxytryptamine (serotonin) receptor 3E, ionotropic;
  Uniprot ID:  A5X5Y0;
  ENSP ID: ENSP00000401444
MEGSWFHRKRFSFYLLLGFLLQGRGVTFTINCSGFGQHGADPTALNSVFNRKPFRPVTNISVPTQVNISFAMSAILDVNEQLHLLSSFLWLEMVWDNPFISWNPEECEGITKMSMAAKNLWLPDIFIIELMDVDKTPKGLTAYVSNEGRIRYKKPMKVDSICNLDIFYFPFDQQNCTLTFSSFLYTVDSMLLDMEKEVWEITDASRNILQTHGEWELLGLSKATAKLSRGGNLYDQIVFYVAIRRRPSLYVINLLVPSGFLVAIDALSFYLPVKSGNRVPFKITLLLGYNVFLLMMSDLLPTSGTPLIGVYFALCLSLMVGSLLETIFITHLLHVATTQPPPLPRWLHSLLLHCNSPGRCCPTAPQKENKGPGLTPTHLPGVKEPEVSAGQMPGPAEAELTGGSEWTRAQREHEAQKQHSVELWLQFSHAMDAMLFRLYLLFMASSIITVICLWNT

SEQ ID NO: 420 - protein, 441 aa, Homo sapiens
  Payload ID: 73;
  Gene Symbol: HTR3E;
  Gene Name: 5-hydroxytryptamine (serotonin) receptor 3E, ionotropic;
  Uniprot ID:  A5X5Y0;
  ENSP ID: ENSP00000401900
MEGSWFHRKRFSFYLLLGFLLQGRGVTFTINCSGFGQHGADPTALNSVFNRKPFRPVTNISVPTQVNISFAMSAILDVVWDNPFISWNPEECEGITKMSMAAKNLWLPDIFIIELMDVDKTPKGLTAYVSNEGRIRYKKPMKVDSICNLDIFYFPFDQQNCTLTFSSFLYTVDSMLLDMEKEVWEITDASRNILQTHGEWELLGLSKATAKLSRGGNLYDQIVFYVAIRRRPSLYVINLLVPSGFLVAIDALSFYLPVKSGNRVPFKITLLLGYNVFLLMMSDLLPTSGTPLIGVYFALCLSLMVGSLLETIFITHLLHVATTQPPPLPRWLHSLLLHCNSPGRCCPTAPQKENKGPGLTPTHLPGVKEPEVSAGQMPGPAEAELTGGSEWTRAQREHEAQKQHSVELWLQFSHAMDAMLFRLYLLFMASSIITVICLWNT

SEQ ID NO: 421 - protein, 482 aa, Homo sapiens
  Payload ID: 73;
  Gene Symbol: HTR3E;
  Gene Name: 5-hydroxytryptamine (serotonin) receptor 3E, ionotropic;
  Uniprot ID:  A5X5Y0;
  ENSP ID: ENSP00000406050
MLAFILSRATPRPALGPLSYREHRVALLHLTHSMSTTGRGVTFTINCSGFGQHGADPTALNSVFNRKPFRPVTNISVPTQVNISFAMSAILDVVWDNPFISWNPEECEGITKMSMAAKNLWLPDIFIIELCVSRAGQREVPSPGSHRDHSLPLGPLMDVDKTPKGLTAYVSNEGRIRYKKPMKVDSICNLDIFYFPFDQQNCTLTFSSFLYTVDSMLLDMEKEVWEITDASRNILQTHGEWELLGLSKATAKLSRGGNLYDQIVFYVAIRRRPSLYVINLLVPSGFLVAIDALSFYLPVKSGNRVPFKITLLLGYNVFLLMMSDLLPTSGTPLIGVYFALCLSLMVGSLLETIFITHLLHVATTQPPPLPRWLHSLLLHCNSPGRCCPTAPQKENKGPGLTPTHLPGVKEPEVSAGQMPGPAEAELTGGSEWTRAQREHEAQKQHSVELWLQFSHAMDAMLFRLYLLFMASSIITVICLWNT

SEQ ID NO: 422 - protein, 428 aa, Homo sapiens
  Payload ID: 74;
  Gene Symbol: HTR4;
  Gene Name: 5-hydroxytryptamine (serotonin) receptor 4, G prt-coupled;
  Uniprot ID:  Q13639;
  ENSP ID: ENSP00000353915
MDKLDANVSSEEGFGSVEKVVLLTFLSTVILMAILGNLLVMVAVCWDRQLRKIKTNYFIVSLAFADLLVSVLVMPFGAIELVQDIWIYGEVFCLVRTSLDVLLTTASIFHLCCISLDRYYAICCQPLVYRNKMTPLRIALMLGGCWVIPTFISFLPIMQGWNNIGIIDLIEKRKFNQNSNSTYCVFMVNKPYAITCSVVAFYIPFLLMVLAYYRIYVTAKEHAHQIQMLQRAGASSESRPQSADQHSTHRMRTETKAAKTLCIIMGCFCLCWAPFFVTNIVDPFIDYTVPGQVWTAFLWLGYINSGLNPFLYAFLNKSFRRAFLIILCCDDERYRRPSILGQTVPCSTTTINGSTHVLRTDFLFDRDILARYWTKPARAGPFSGTLSIRCLTARKPVLGDAVECGGQWESQCHPPATSPLVAAQPSDT

SEQ ID NO: 423 - protein, 428 aa, Homo sapiens; identical to SEQ ID NO: 422
  Payload ID: 74;
  Gene Symbol: HTR4;
  Gene Name: 5-hydroxytryptamine (serotonin) receptor 4, G prt-coupled;
  Uniprot ID:  Q13639;
  ENSP ID: ENSP00000355037

SEQ ID NO: 424 - protein, 388 aa, Homo sapiens
  Payload ID: 74;
  Gene Symbol: HTR4;
  Gene Name: 5-hydroxytryptamine (serotonin) receptor 4, G prt-coupled;
  Uniprot ID:  Q13639;
  ENSP ID: ENSP00000367120
MDKLDANVSSEEGFGSVEKVVLLTFLSTVILMAILGNLLVMVAVCWDRQLRKIKTNYFIVSLAFADLLVSVLVMPFGAIELVQDIWIYGEVFCLVRTSLDVLLTTASIFHLCCISLDRYYAICCQPLVYRNKMTPLRIALMLGGCWVIPTFISFLPIMQGWNNIGIIDLIEKRKFNQNSNSTYCVFMVNKPYAITCSVVAFYIPFLLMVLAYYRIYVTAKEHAHQIQMLQRAGASSESRPQSADQHSTHRMRTETKAAKTLCIIMGCFCLCWAPFFVTNIVDPFIDYTVPGQVWTAFLWLGYINSGLNPFLYAFLNKSFRRAFLIILCCDDERYRRPSILGQTVPCSTTTINGSTHVLRDAVECGGQWESQCHPPATSPLVAAQPSDT

SEQ ID NO: 425 - protein, 411 aa, Homo sapiens
  Payload ID: 74;
  Gene Symbol: HTR4;
  Gene Name: 5-hydroxytryptamine (serotonin) receptor 4, G prt-coupled;
  Uniprot ID:  Q13639;
  ENSP ID: ENSP00000427913
MDKLDANVSSEEGFGSVEKVVLLTFLSTVILMAILGNLLVMVAVCWDRQLRKIKTNYFIVSLAFADLLVSVLVMPFGAIELVQDIWIYGEVFCLVRTSLDVLLTTASIFHLCCISLDRYYAICCQPLVYRNKMTPLRIALMLGGCWVIPTFISFLPIMQGWNNIGIIDLIEKRKFNQNSNSTYCVFMVNKPYAITCSVVAFYIPFLLMVLAYYRIYVTAKEHAHQIQMLQRAGASSESRPQSADQHSTHRMRTETKAAKTLCIIMGCFCLCWAPFFVTNIVDPFIDYTVPGQVWTAFLWLGYINSGLNPFLYAFLNKSFRRAFLIILCCDDERYRRPSILGQTVPCSTTTINGSTHVLSSGTETDRKKLWNKEEKIDQTIQMPKRKRKKKASLSYEDLILLGRKSCFREGK

SEQ ID NO: 426 - protein, 387 aa, Homo sapiens
  Payload ID: 74;
  Gene Symbol: HTR4;
  Gene Name: 5-hydroxytryptamine (serotonin) receptor 4, G prt-coupled;
  Uniprot ID:  Q13639;
  ENSP ID: ENSP00000428320
MDKLDANVSSEEGFGSVEKVVLLTFLSTVILMAILGNLLVMVAVCWDRQLRKIKTNYFIVSLAFADLLVSVLVMPFGAIELVQDIWIYGEVFCLVRTSLDVLLTTASIFHLCCISLDRYYAICCQPLVYRNKMTPLRIALMLGGCWVIPTFISFLPIMQGWNNIGIIDLIEKRKFNQNSNSTYCVFMVNKPYAITCSVVAFYIPFLLMVLAYYRIYVTAKEHAHQIQMLQRAGASSESRPQSADQHSTHRMRTETKAAKTLCIIMGCFCLCWAPFFVTNIVDPFIDYTVPGQVWTAFLWLGYINSGLNPFLYAFLNKSFRRAFLIILCCDDERYRRPSILGQTVPCSTTTINGSTHVLRYTVLHRGHHQELEKLPIHNDPESLESCF

SEQ ID NO: 427 - protein, 87 aa, Homo sapiens
  Payload ID: 74;
  Gene Symbol: HTR4;
  Gene Name: 5-hydroxytryptamine (serotonin) receptor 4, G prt-coupled;
  ENSP ID: ENSP00000429634
MCHLVRLSHASPFSLLHFPGFIPRRRMEETRAKLVCLQSSCRAWRDLSSMIIQGELDQVLLRPAAWMLYIQKDPVGIEIQLTHAYFL

SEQ ID NO: 428 - protein, 371 aa, Homo sapiens
  Payload ID: 74;
  Gene Symbol: HTR4;
  Gene Name: 5-hydroxytryptamine (serotonin) receptor 4, G prt-coupled;
  ENSP ID: ENSP00000430451
MDKLDANVSSEEGFGSVEKVVLLTFLSTVILMAILGNLLVMVAVCWDRQLRKIKTNYFIVSLAFADLLVSVLVMPFGAIELVQDIWIYGEVFCLVRTSLDVLLTTASIFHLCCISLDRYYAICCQPLVYRNKMTPLRIALMLGGCWVIPTFISFLPIMQGWNNIGIIDLIEKRKFNQNSNSTYCVFMVNKPYAITCSVVAFYIPFLLMVLAYYRIYVTAKEHAHQIQMLQRAGASSESRPQSADQHSTHRMRTETKAAKTLCIIMGCFCLCWAPFFVTNIVDPFIDYTVPGQVWTAFLWLGYINSGLNPFLYAFLNKSFRRAFLIILCCDDERYRRPSILGQTVPCSTTTINGSTHVLRAVRGNRNSTSSA

SEQ ID NO: 429 - protein, 378 aa, Homo sapiens
  Payload ID: 74;
  Gene Symbol: HTR4;
  Gene Name: 5-hydroxytryptamine (serotonin) receptor 4, G prt-coupled;
  Uniprot ID:  Q13639;
  ENSP ID: ENSP00000430874
MDKLDANVSSEEGFGSVEKVVLLTFLSTVILMAILGNLLVMVAVCWDRQLRKIKTNYFIVSLAFADLLVSVLVMPFGAIELVQDIWIYGEVFCLVRTSLDVLLTTASIFHLCCISLDRYYAICCQPLVYRNKMTPLRIALMLGGCWVIPTFISFLPIMQGWNNIGIIDLIEKRKFNQNSNSTYCVFMVNKPYAITCSVVAFYIPFLLMVLAYYRIYVTAKEHAHQIQMLQRAGASSESRPQSADQHSTHRMRTETKAAKTLCIIMGCFCLCWAPFFVTNIVDPFIDYTVPGQVWTAFLWLGYINSGLNPFLYAFLNKSFRRAFLIILCCDDERYRRPSILGQTVPCSTTTINGSTHVLSGCSPVSSFLLLFCNRPVPV

SEQ ID NO: 430 - protein, 378 aa, Homo sapiens; identical to SEQ ID NO: 429
  Payload ID: 74;
  Gene Symbol: HTR4;
  Gene Name: 5-hydroxytryptamine (serotonin) receptor 4, G prt-coupled;
  Uniprot ID:  Q13639;
  ENSP ID: ENSP00000430979

SEQ ID NO: 431 - protein, 360 aa, Homo sapiens
  Payload ID: 74;
  Gene Symbol: HTR4;
  Gene Name: 5-hydroxytryptamine (serotonin) receptor 4, G prt-coupled;
  Uniprot ID:  Q13639;
  ENSP ID: ENSP00000435904
MDKLDANVSSEEGFGSVEKVVLLTFLSTVILMAILGNLLVMVAVCWDRQLRKIKTNYFIVSLAFADLLVSVLVMPFGAIELVQDIWIYGEVFCLVRTSLDVLLTTASIFHLCCISLDRYYAICCQPLVYRNKMTPLRIALMLGGCWVIPTFISFLPIMQGWNNIGIIDLIEKRKFNQNSNSTYCVFMVNKPYAITCSVVAFYIPFLLMVLAYYRIYVTAKEHAHQIQMLQRAGASSESRPQSADQHSTHRMRTETKAAKTLCIIMGCFCLCWAPFFVTNIVDPFIDYTVPGQVWTAFLWLGYINSGLNPFLYAFLNKSFRRAFLIILCCDDERYRRPSILGQTVPCSTTTINGSTHVLRF

SEQ ID NO: 432 - protein, 388 aa, Homo sapiens; identical to SEQ ID NO: 424
  Payload ID: 74;
  Gene Symbol: HTR4;
  Gene Name: 5-hydroxytryptamine (serotonin) receptor 4, G prt-coupled;
  Uniprot ID:  Q13639;
  ENSP ID: ENSP00000485747

SEQ ID NO: 433 - protein, 357 aa, Homo sapiens
  Payload ID: 75;
  Gene Symbol: HTR5A;
  Gene Name: 5-hydroxytryptamine (serotonin) receptor 5A, G prt-coupled;
  Uniprot ID:  P47898;
  ENSP ID: ENSP00000287907
MDLPVNLTSFSLSTPSPLETNHSLGKDDLRPSSPLLSVFGVLILTLLGFLVAATFAWNLLVLATILRVRTFHRVPHNLVASMAVSDVLVAALVMPLSLVHELSGRRWQLGRRLCQLWIACDVLCCTASIWNVTAIALDRYWSITRHMEYTLRTRKCVSNVMIALTWALSAVISLAPLLFGWGETYSEGSEECQVSREPSYAVFSTVGAFYLPLCVVLFVYWKIYKAAKFRVGSRKTNSVSPISEAVEVKDSAKQPQMVFTVRHATVTFQPEGDTWREQKEQRAALMVGILIGVFVLCWIPFFLTELISPLCSCDIPAIWKSIFLWLGYSNSFFNPLIYTAFNKNYNSAFKNFFSRQH

SEQ ID NO: 434 - protein, 440 aa, Homo sapiens
  Payload ID: 76;
  Gene Symbol: HTR6;
  Gene Name: 5-hydroxytryptamine (serotonin) receptor 6, G prt-coupled;
  Uniprot ID:  P50406;
  ENSP ID: ENSP00000289753
MVPEPGPTANSTPAWGAGPPSAPGGSGWVAAALCVVIALTAAANSLLIALICTQPALRNTSNFFLVSLFTSDLMVGLVVMPPAMLNALYGRWVLARGLCLLWTAFDVMCCSASILNLCLISLDRYLLILSPLRYKLRMTPLRALALVLGAWSLAALASFLPLLLGWHELGHARPPVPGQCRLLASLPFVLVASGLTFFLPSGAICFTYCRILLAARKQAVQVASLTTGMASQASETLQVPRTPRPGVESADSRRLATKHSRKALKASLTLGILLGMFFVTWLPFFVANIVQAVCDCISPGLFDVLTWLGYCNSTMNPIIYPLFMRDFKRALGRFLPCPRCPRERQASLASPSLRTSHSGPRPGLSLQQVLPLPLPPDSDSDSDAGSGGSSGLRLTAQLLLPGEATQDPPLPTRAAAAVNFFNIDPAEPELRPHPLGIPTN

SEQ ID NO: 435 - protein, 445 aa, Homo sapiens
  Payload ID: 77;
  Gene Symbol: HTR7;
  Gene Name: 5-hydroxytryptamine (serotonin) receptor 7, adenylate cyclase-coupled;
  Uniprot ID:  P34969;
  ENSP ID: ENSP00000277874
MMDVNSSGRPDLYGHLRSFLLPEVGRGLPDLSPDGGADPVAGSWAPHLLSEVTASPAPTWDAPPDNASGCGEQINYGRVEKVVIGSILTLITLLTIAGNCLVVISVCFVKKLRQPSNYLIVSLALADLSVAVAVMPFVSVTDLIGGKWIFGHFFCNVFIAMDVMCCTASIMTLCVISIDRYLGITRPLTYPVRQNGKCMAKMILSVWLLSASITLPPLFGWAQNVNDDKVCLISQDFGYTIYSTAVAFYIPMSVMLFMYYQIYKAARKSAAKHKFPGFPRVEPDSVIALNGIVKLQKEVEECANLSRLLKHERKNISIFKREQKAATTLGIIVGAFTVCWLPFFLLSTARPFICGTSCSCIPLWVERTFLWLGYANSLINPFIYAFFNRDLRTTYRSLLQCQYRNINRKLSAAGMHEALKLAERPERPEFVLQNADYCRKKGHDS

SEQ ID NO: 436 - protein, 479 aa, Homo sapiens
  Payload ID: 77;
  Gene Symbol: HTR7;
  Gene Name: 5-hydroxytryptamine (serotonin) receptor 7, adenylate cyclase-coupled;
  Uniprot ID:  P34969;
  ENSP ID: ENSP00000337949
MMDVNSSGRPDLYGHLRSFLLPEVGRGLPDLSPDGGADPVAGSWAPHLLSEVTASPAPTWDAPPDNASGCGEQINYGRVEKVVIGSILTLITLLTIAGNCLVVISVCFVKKLRQPSNYLIVSLALADLSVAVAVMPFVSVTDLIGGKWIFGHFFCNVFIAMDVMCCTASIMTLCVISIDRYLGITRPLTYPVRQNGKCMAKMILSVWLLSASITLPPLFGWAQNVNDDKVCLISQDFGYTIYSTAVAFYIPMSVMLFMYYQIYKAARKSAAKHKFPGFPRVEPDSVIALNGIVKLQKEVEECANLSRLLKHERKNISIFKREQKAATTLGIIVGAFTVCWLPFFLLSTARPFICGTSCSCIPLWVERTFLWLGYANSLINPFIYAFFNRDLRTTYRSLLQCQYRNINRKLSAAGMHEALKLAERPERPEFVLRACTRRVLLRPEKRPPVSVWVLQSPDHHNWLADKMLTTVEKKVMIHD

SEQ ID NO: 437 - protein, 432 aa, Homo sapiens
  Payload ID: 77;
  Gene Symbol: HTR7;
  Gene Name: 5-hydroxytryptamine (serotonin) receptor 7, adenylate cyclase-coupled;
  Uniprot ID:  P34969;
  ENSP ID: ENSP00000360784
MMDVNSSGRPDLYGHLRSFLLPEVGRGLPDLSPDGGADPVAGSWAPHLLSEVTASPAPTWDAPPDNASGCGEQINYGRVEKVVIGSILTLITLLTIAGNCLVVISVCFVKKLRQPSNYLIVSLALADLSVAVAVMPFVSVTDLIGGKWIFGHFFCNVFIAMDVMCCTASIMTLCVISIDRYLGITRPLTYPVRQNGKCMAKMILSVWLLSASITLPPLFGWAQNVNDDKVCLISQDFGYTIYSTAVAFYIPMSVMLFMYYQIYKAARKSAAKHKFPGFPRVEPDSVIALNGIVKLQKEVEECANLSRLLKHERKNISIFKREQKAATTLGIIVGAFTVCWLPFFLLSTARPFICGTSCSCIPLWVERTFLWLGYANSLINPFIYAFFNRDLRTTYRSLLQCQYRNINRKLSAAGMHEALKLAERPERPEFVL

SEQ ID NO: 438 - protein, 819 aa, Homo sapiens
  Payload ID: 78;
  Gene Symbol: MTR;
  Gene Name: 5-methyltetrahydrofolate-homocysteine methyltransferase;
  ENSP ID: ENSP00000355535
GMLDGPSAMTRFCNLIASEPDIAKVPLCIDSSNFAVIEAGLKCCQGKCIVNSISLKEGEATETDTKIRVCTRAYHLLVKKLGFNPNDIIFDPNILTIGTGMEEHNLYAINFIHATKVIKETLPGARISGGLSNLSFSFRGMEAIREAMHGVFLYHAIKSGMDMGIVNAGNLPVYDDIHKELLQLCEDLIWNKDPEATEKLLRYAQTQGTGGKKVIQTDEWRNGPVEERLEYALVKGIEKHIIEDTEEARLNQKKYPRPLNIIEGPLMNGMKIVGDLFGAGKMFLPQVIKSARVMKKAVGHLIPFMEKEREETRVLNGTVEEEDPYQGTIVLATVKGDVHDIGKNIVGVVLGCNNFRVIDLGVMTPCDKILKAALDHKADIIGLSGLITPSLDEMIFVAKEMERLAIRIPLLIGGATTSKTHTAVKIAPRYSAPVIHVLDASKSVVVCSQLLDENLKDEYFEEIMEEYEDIRQDHYESLKERRYLPLSQARKSGFQMDWLSEPHPVKPTFIGTQVFEDYDLQKLVDYIDWKPFFDVWQLRGKYPNRGFPKIFNDKTVGGEARKVYDDAHNMLNTLISQKKLRARGVVGFWPAQSIQDDIHLYAEAAVPQAAEPIATFYGLRQQAEKDSASTEPYYCLSDFIAPLHSGIRDYLGLFAVACFGVEELSKAYEDDGDDYSSIMVKALGDRLAEAFAEELHERVRRELWAYCGSEQLDVADLRRLRYKGIRPAPGYPSQPDHTEKLTMWRLADIEQSTGIRLTESLAMAPASAVSGLYFSNLKSKYFAVGKISKDQVEDYALRKNISVAEVEKWLGPILGYDTD

SEQ ID NO: 439 - protein, 1265 aa, Homo sapiens
  Payload ID: 78;
  Gene Symbol: MTR;
  Gene Name: 5-methyltetrahydrofolate-homocysteine methyltransferase;
  Uniprot ID:  Q99707;
  ENSP ID: ENSP00000355536
MSPALQDLSQPEGLKKTLRDEINAILQKRIMVLDGGMGTMIQREKLNEEHFRGQEFKDHARPLKGNNDILSITQPDVIYQIHKEYLLAGADIIETNTFSSTSIAQADYGLEHLAYRMNMCSAGVARKAAEEVTLQTGIKRFVAGALGPTNKTLSVSPSVERPDYRNITFDELVEAYQEQAKGLLDGGVDILLIETIFDTANAKAALFALQNLFEEKYAPRPIFISGTIVDKSGRTLSGQTGEGFVISVSHGEPLCIGLNCALGAAEMRPFIEIIGKCTTAYVLCYPNAGLPNTFGDYDETPSMMAKHLKDFAMDGLVNIVGGCCGSTPDHIREIAEAVKNCKPRVPPATAFEGHMLLSGLEPFRIGPYTNFVNIGERCNVAGSRKFAKLIMAGNYEEALCVAKVQVEMGAQVLDVNMDDGMLDGPSAMTRFCNLIASEPDIAKVPLCIDSSNFAVIEAGLKCCQGKCIVNSISLKEGEDDFLEKARKIKKYGAAMVVMAFDEEGQATETDTKIRVCTRAYHLLVKKLGFNPNDIIFDPNILTIGTGMEEHNLYAINFIHATKVIKETLPGARISGGLSNLSFSFRGMEAIREAMHGVFLYHAIKSGMDMGIVNAGNLPVYDDIHKELLQLCEDLIWNKDPEATEKLLRYAQTQGTGGKKVIQTDEWRNGPVEERLEYALVKGIEKHIIEDTEEARLNQKKYPRPLNIIEGPLMNGMKIVGDLFGAGKMFLPQVIKSARVMKKAVGHLIPFMEKEREETRVLNGTVEEEDPYQGTIVLATVKGDVHDIGKNIVGVVLGCNNFRVIDLGVMTPCDKILKAALDHKADIIGLSGLITPSLDEMIFVAKEMERLAIRIPLLIGGATTSKTHTAVKIAPRYSAPVIHVLDASKSVVVCSQLLDENLKDEYFEEIMEEYEDIRQDHYESLKERRYLPLSQARKSGFQMDWLSEPHPVKPTFIGTQVFEDYDLQKLVDYIDWKPFFDVWQLRGKYPNRGFPKIFNDKTVGGEARKVYDDAHNMLNTLISQKKLRARGVVGFWPAQSIQDDIHLYAEAAVPQAAEPIATFYGLRQQAEKDSASTEPYYCLSDFIAPLHSGIRDYLGLFAVACFGVEELSKAYEDDGDDYSSIMVKALGDRLAEAFAEELHERVRRELWAYCGSEQLDVADLRRLRYKGIRPAPGYPSQPDHTEKLTMWRLADIEQSTGIRLTESLAMAPASAVSGLYFSNLKSKYFAVGKISKDQVEDYALRKNISVAEVEKWLGPILGYDTD

SEQ ID NO: 440 - protein, 1214 aa, Homo sapiens
  Payload ID: 78;
  Gene Symbol: MTR;
  Gene Name: 5-methyltetrahydrofolate-homocysteine methyltransferase;
  Uniprot ID:  Q99707;
  ENSP ID: ENSP00000441845
MSPALQDLSQPEGLKKTLRDEINAILQKRIMVLDGGMGTMIQREKLNEEHFRGQEFKDHARPLKGNNDILSITQPDVIYQIHKEYLLAGADIIETNTFSSTSIAQADYGLEHLAYRMNMCSAGVARKAAEEVTLQTGIKRFVAGALGPTNKTLSVSPSVERPDYRNITFDELVEAYQEQAKGLLDGGVDILLIETIFDTANAKAALFALQNLFEEKYAPRPIFISGTIVDKSGRTLSGQTGEGFVISVSHGEPLCIGLNCALGAAEMRPFIEIIGKCTTAYVLCYPNAGLPNTFGDYDETPSMMAKHLKDFAMDGLVNIVGGCCGSTPDHIREIAEAVKNCKPRVPPATAFEGHMLLSGLEPFRIGPYTNFVNIGERCNVAGSRKFAKLIMAGNYEEALCVAKVQVEMGAQVLDVNMDDGMLDGPSAMTRFCNLIASEPDIAKVPLCIDSSNFAVIEAGLKCCQGKCIVNSISLKEGEDDFLEKARKIKKYGAAMVVMAFDEEGQATETDTKIRVCTRAYHLLVKKLGFNPNDIIFDPNILTIGTGMEEHNLYAINFIHATKVIKETLPGARISGGLSNLSFSFRGMEAIREAMHGVFLYHAIKSGMDMGIVNAGNLPVYDDIHKELLQLCEDLIWNKDPEATEKLLRYAQTQGTGGKKVIQTDEWRNGPVEERLEYALVKVIKSARVMKKAVGHLIPFMEKEREETRVLNGTVEEEDPYQGTIVLATVKGDVHDIGKNIVGVVLGCNNFRVIDLGVMTPCDKILKAALDHKADIIGLSGLITPSLDEMIFVAKEMERLAIRIPLLIGGATTSKTHTAVKIAPRYSAPVIHVLDASKSVVVCSQLLDENLKDEYFEEIMEEYEDIRQDHYESLKERRYLPLSQARKSGFQMDWLSEPHPVKPTFIGTQVFEDYDLQKLVDYIDWKPFFDVWQLRGKYPNRGFPKIFNDKTVGGEARKVYDDAHNMLNTLISQKKLRARGVVGFWPAQSIQDDIHLYAEAAVPQAAEPIATFYGLRQQAEKDSASTEPYYCLSDFIAPLHSGIRDYLGLFAVACFGVEELSKAYEDDGDDYSSIMVKALGDRLAEAFAEELHERVRRELWAYCGSEQLDVADLRRLRYKGIRPAPGYPSQPDHTEKLTMWRLADIEQSTGIRLTESLAMAPASAVSGLYFSNLKSKYFAVGKISKDQVEDYALRKNISVAEVEKWLGPILGYDTD

SEQ ID NO: 441 - protein, 725 aa, Homo sapiens
  Payload ID: 79;
  Gene Symbol: MTRR;
  Gene Name: 5-methyltetrahydrofolate-homocysteine methyltransferase reductase;
  Uniprot ID:  Q9UBK8;
  ENSP ID: ENSP00000264668
MGAASVRAGARLVEVALCSFTVTCLEVMRRFLLLYATQQGQAKAIAEEICEQAVVHGFSADLHCISESDKYDLKTETAPLVVVVSTTGTGDPPDTARKFVKEIQNQTLPVDFFAHLRYGLLGLGDSEYTYFCNGGKIIDKRLQELGARHFYDTGHADDCVGLELVVEPWIAGLWPALRKHFRSSRGQEEISGALPVASPASSRTDLVKSELLHIESQVELLRFDDSGRKDSEVLKQNAVNSNQSNVVIEDFESSLTRSVPPLSQASLNIPGLPPEYLQVHLQESLGQEESQVSVTSADPVFQVPISKAVQLTTNDAIKTTLLVELDISNTDFSYQPGDAFSVICPNSDSEVQSLLQRLQLEDKREHCVLLKIKADTKKKGATLPQHIPAGCSLQFIFTWCLEIRAIPKKAFLRALVDYTSDSAEKRRLQELCSKQGAADYSRFVRDACACLLDLLLAFPSCQPPLSLLLEHLPKLQPRPYSCASSSLFHPGKLHFVFNIVEFLSTATTEVLRKGVCTGWLALLVASVLQPNIHASHEDSGKALAPKISISPRTTNSFHLPDDPSIPIIMVGPGTGIAPFIGFLQHREKLQEQHPDGNFGAMWLFFGCRHKDRDYLFRKELRHFLKHGILTHLKVSFSRDAPVGEEEAPAKYVQDNIQLHGQQVARILLQENGHIYVCGDAKNMAKDVHDALVQIISKEVGVEKLEAMKTLATLKEEKRYLQDIWS

SEQ ID NO: 442 - protein, 698 aa, Homo sapiens
  Payload ID: 79;
  Gene Symbol: MTRR;
  Gene Name: 5-methyltetrahydrofolate-homocysteine methyltransferase reductase;
  Uniprot ID:  Q9UBK8;
  ENSP ID: ENSP00000402510
MRRFLLLYATQQGQAKAIAEEICEQAVVHGFSADLHCISESDKYDLKTETAPLVVVVSTTGTGDPPDTARKFVKEIQNQTLPVDFFAHLRYGLLGLGDSEYTYFCNGGKIIDKRLQELGARHFYDTGHADDCVGLELVVEPWIAGLWPALRKHFRSSRGQEEISGALPVASPASSRTDLVKSELLHIESQVELLRFDDSGRKDSEVLKQNAVNSNQSNVVIEDFESSLTRSVPPLSQASLNIPGLPPEYLQVHLQESLGQEESQVSVTSADPVFQVPISKAVQLTTNDAIKTTLLVELDISNTDFSYQPGDAFSVICPNSDSEVQSLLQRLQLEDKREHCVLLKIKADTKKKGATLPQHIPAGCSLQFIFTWCLEIRAIPKKAFLRALVDYTSDSAEKRRLQELCSKQGAADYSRFVRDACACLLDLLLAFPSCQPPLSLLLEHLPKLQPRPYSCASSSLFHPGKLHFVFNIVEFLSTATTEVLRKGVCTGWLALLVASVLQPNIHASHEDSGKALAPKISISPRTTNSFHLPDDPSIPIIMVGPGTGIAPFIGFLQHREKLQEQHPDGNFGAMWLFFGCRHKDRDYLFRKELRHFLKHGILTHLKVSFSRDAPVGEEEAPAKYVQDNIQLHGQQVARILLQENGHIYVCGDAKNMAKDVHDALVQIISKEVGVEKLEAMKTLATLKEEKRYLQDIWS

SEQ ID NO: 443 - protein, 112 aa, Homo sapiens
  Payload ID: 79;
  Gene Symbol: MTRR;
  Gene Name: 5-methyltetrahydrofolate-homocysteine methyltransferase reductase;
  ENSP ID: ENSP00000421318
MRRFLLLYATQQGQAKAIAEEICEQAVVHGFSADLHCISESDKYDLKTETAPLVVVVSTTGTGDPPDTARKFVKEIQNQTLPVDFFAHLRYGLLGLGDSEYTYFCNGGKIID

SEQ ID NO: 444 - protein, 372 aa, Homo sapiens
  Payload ID: 79;
  Gene Symbol: MTRR;
  Gene Name: 5-methyltetrahydrofolate-homocysteine methyltransferase reductase;
  ENSP ID: ENSP00000421991
  MOD_RES (1)..(1): Any amino acid
XFTVTCLEVMRRFLLLYATQQGQAKAIAEEICEQAVVHGFSADLHCISESDKYDLKTETAPLVVVVSTTGTGDPPDTARKFVKEIQNQTLPVDFFAHLRYGLLGLGDSEYTYFCNGGKIIDKRLQELGARHFYDTGHADDCVGLELVVEPWIAGLWPALRKHFRSSRGQEEISGALPVASPASSRTDLVKSELLHIESQVELLRFDDSGRKDSEVLKQNAVNSNQSNVVIEDFESSLTRSVPPLSQASLNIPGLPPEYLQVHLQESLGQEESQVSVTSADPVFQVPISKAVQLTTNDAIKTTLLVELDISNTDFSYQPGDAFSVICPNSDSEVQSLLQRLQLEDKREHCVLLKIKADTKKKGIFASPCGLYQ

SEQ ID NO: 445 - protein, 115 aa, Homo sapiens
  Payload ID: 79;
  Gene Symbol: MTRR;
  Gene Name: 5-methyltetrahydrofolate-homocysteine methyltransferase reductase;
  ENSP ID: ENSP00000423139
  MOD_RES (1)..(1): Any amino acid
XVRAGARLVEVALCSFTVTCLEVMRRFLLLYATQQGQAKAIAEEICEQAVVHGFSADLHCISESDKYDLKTETAPLVVVVSTTGTGDPPDTARKFVKEIQNQTLPVDFFAHLRSR

SEQ ID NO: 446 - protein, 160 aa, Homo sapiens
  Payload ID: 79;
  Gene Symbol: MTRR;
  Gene Name: 5-methyltetrahydrofolate-homocysteine methyltransferase reductase;
  ENSP ID: ENSP00000423863
  MOD_RES (1)..(1): Any amino acid
XVRAGARLVEVALCRFVPGWRGVGLGDSEYTYFCNGGKIIDKRLQELGARHFYDTGHADDCVGLELVVEPWIAGLWPALRKHFRSSRGQEEISGALPVASPASSRTDLVKSELLHIESQVELLRFDDSGRKDSEVLKQNAVNSNQSNVVIEDFESSLTRS

SEQ ID NO: 447 - protein, 156 aa, Homo sapiens
  Payload ID: 79;
  Gene Symbol: MTRR;
  Gene Name: 5-methyltetrahydrofolate-homocysteine methyltransferase reductase;
  ENSP ID: ENSP00000424599
MRRFLLLYATQQGQAKAIAEEICEQAVVHGFSADLHCISESDKYDLKTETAPLVVVVSTTGTGDPPDTARKFVKEIQNQTLPVDFFAHLRYGLLGLGDSEYTYFCNGGKIIDKRLQELGARHFYDTGHADDCVGLELVVEPWIAGLWPALRKHFRS

SEQ ID NO: 448 - protein, 46 aa, Homo sapiens
  Payload ID: 79;
  Gene Symbol: MTRR;
  Gene Name: 5-methyltetrahydrofolate-homocysteine methyltransferase reductase;
  ENSP ID: ENSP00000424644
MRRFLLLYATQQGQAKAIAEEICEQAVVHGFSADLHCISESDKCEK

SEQ ID NO: 449 - protein, 81 aa, Homo sapiens
  Payload ID: 79;
  Gene Symbol: MTRR;
  Gene Name: 5-methyltetrahydrofolate-homocysteine methyltransferase reductase;
  ENSP ID: ENSP00000424719
  MOD_RES (1)..(1): Any amino acid
XVRAGARLVEVALCSFTVTCLEVMRRFLLLYATQQGQAKAIAEEICEQAVVHGFSADLHCISESDKVSVIQNTPTFAMGGR

SEQ ID NO: 450 - protein, 58 aa, Homo sapiens
  Payload ID: 79;
  Gene Symbol: MTRR;
  Gene Name: 5-methyltetrahydrofolate-homocysteine methyltransferase reductase;
  Uniprot ID:  Q9UBK8;
  ENSP ID: ENSP00000426132
MRRFLLLYATQQGQAKAIAEEICEQAVVHGFSADLHCISESDKVSVIQNTPTFAMGGR

SEQ ID NO: 451 - protein, 92 aa, Homo sapiens
  Payload ID: 79;
  Gene Symbol: MTRR;
  Gene Name: 5-methyltetrahydrofolate-homocysteine methyltransferase reductase;
  ENSP ID: ENSP00000426710
MRRFLLLYATQQGQAKAIAEEICEQAVVHGFSADLHCISESDKYDLKTETAPLVVVVSTTGTGDPPDTARKFVKEIQNQTLPVDFFAHLRSR

SEQ ID NO: 452 - protein, 58 aa, Homo sapiens; identical to SEQ ID NO: 450
  Payload ID: 79;
  Gene Symbol: MTRR;
  Gene Name: 5-methyltetrahydrofolate-homocysteine methyltransferase reductase;
  Uniprot ID:  Q9UBK8;
  ENSP ID: ENSP00000427200

SEQ ID NO: 453 - protein, 41 aa, Homo sapiens
  Payload ID: 79;
  Gene Symbol: MTRR;
  Gene Name: 5-methyltetrahydrofolate-homocysteine methyltransferase reductase;
  ENSP ID: ENSP00000427416
MRRFLLLYATQQGQAKAIAEEICEQAVVHGFSADLHCISES

SEQ ID NO: 454 - protein, 455 aa, Homo sapiens
  Payload ID: 80;
  Gene Symbol: NT5DC1;
  Gene Name: 5'-nucleotidase domain containing 1;
  Uniprot ID:  Q5TFE4;
  ENSP ID: ENSP00000326858
MAQHFSLAACDVVGFDLDHTLCRYNLPESAPLIYNSFAQFLVKEKGYDKELLNVTPEDWDFCCKGLALDLEDGNFLKLANNGTVLRASHGTKMMTPEVLAEAYGKKEWKHFLSDTGMACRSGKYYFYDNYFDLPGALLCARVVDYLTKLNNGQKTFDFWKDIVAAIQHNYKMSAFKENCGIYFPEIKRDPGRYLHSCPESVKKWLRQLKNAGKILLLITSSHSDYCRLLCEYILGNDFTDLFDIVITNALKPGFFSHLPSQRPFRTLENDEEQEALPSLDKPGWYSQGNAVHLYELLKKMTGKPEPKVVYFGDSMHSDIFPARHYSNWETVLILEELRGDEGTRSQRPEESEPLEKKGKYEGPKAKPLNTSSKKWGSFFIDSVLGLENTEDSLVYTWSCKRISTYSTIAIPSIEAIAELPLDYKFTRFSSSNSKTAGYYPNPPLVLSSDETLISK

SEQ ID NO: 455 - protein, 195 aa, Homo sapiens
  Payload ID: 80;
  Gene Symbol: NT5DC1;
  Gene Name: 5'-nucleotidase domain containing 1;
  ENSP ID: ENSP00000393578
MAQHFSLAACDVVGFDLDHTLCRYNLPESAPLIYNSFAQFLVKEKGYDKELLNVTPEDWDFCCKGLALDLEDGNFLKLANNGTVLRASHGTKMMTPEVLAEAYGKKEWKHFLSDTGMACRSGKYYFYDNYFDLPGALLCARVVDYLTKLNNGQKTFDFWKDIVAAIQHNYKMSAFKVRRLATSLLQDISTSFILI

SEQ ID NO: 456 - protein, 141 aa, Homo sapiens
  Payload ID: 80;
  Gene Symbol: NT5DC1;
  Gene Name: 5'-nucleotidase domain containing 1;
  ENSP ID: ENSP00000433238
  MOD_RES (1)..(1): Any amino acid
XNYKMSAFKEIKRDPGRYLHSCPESVKKWLRQLKNAGKILLLITSSHSDYCRLLCEYILGNDFTDLFDIVITNALKPGFFSHLPSQRPFRTLENDEEQEALPSLDKPGWYSQGNAVHLYELLKKMTGKPEPKKIFTRISVS

SEQ ID NO: 457 - protein, 520 aa, Homo sapiens
  Payload ID: 81;
  Gene Symbol: NT5DC2;
  Gene Name: 5'-nucleotidase domain containing 2;
  Uniprot ID:  Q9H857;
  ENSP ID: ENSP00000302468
MRVESGSAQERGILLESLSTLLEKTTASHEGRAPGNRELTDLLPPEVCSLLNPAAIYANNEISLRDVEVYGFDYDYTLAQYADALHPEIFSTARDILIEHYKYPEGIRKYDYNPSFAIRGLHYDIQKSLLMKIDAFHYVQLGTAYRGLQPVPDEEVIELYGGTQHIPLYQMSGFYGKGPSIKQFMDIFSLPEMALLSCVVDYFLGHSLEFDQAHLYKDVTDAIRDVHVKGLMYQWIEQDMEKYILRGDETFAVLSRLVAHGKQLFLITNSPFSFVDKGMRHMVGPDWRQLFDVVIVQADKPSFFTDRRKPFRKLDEKGSLQWDRITRLEKGKIYRQGNLFDFLRLTEWRGPRVLYFGDHLYSDLADLMLRHGWRTGAIIPELEREIRIINTEQYMHSLTWQQALTGLLERMQTYQDAESRQVLAAWMKERQELRCITKALFNAQFGSIFRTFHNPTYFSRRLVRFSDLYMASLSCLLNYRVDFTFYPRRTPLQHEAPLWMDQLCTGCMKTPFLGDMAHIR

SEQ ID NO: 458 - protein, 557 aa, Homo sapiens
  Payload ID: 81;
  Gene Symbol: NT5DC2;
  Gene Name: 5'-nucleotidase domain containing 2;
  Uniprot ID:  Q9H857;
  ENSP ID: ENSP00000406933
MAGAGLRAAARRWLLCGGHGGPRAASSSPSCPGCGPPGPGAHCPGVPRSAPAQAPTSGADLSAHLWARYQDMRRLVHDLLPPEVCSLLNPAAIYANNEISLRDVEVYGFDYDYTLAQYADALHPEIFSTARDILIEHYKYPEGIRKYDYNPSFAIRGLHYDIQKSLLMKIDAFHYVQLGTAYRGLQPVPDEEVIELYGGTQHIPLYQMSGFYGKGPSIKQFMDIFSLPEMALLSCVVDYFLGHSLEFDQAHLYKDVTDAIRDVHVKGLMYQWIEQDMEKYILRGDETFAVLSRLVAHGKQLFLITNSPFSFVDKGMRHMVGPDWRQLFDVVIVQADKPSFFTDRRKPFRKLDEKGSLQWDRITRLEKGKIYRQGNLFDFLRLTEWRGPRVLYFGDHLYSDLADLMLRHGWRTGAIIPELEREIRIINTEQYMHSLTWQQALTGLLERMQTYQDAESRQVLAAWMKERQELRCITKALFNAQFGSIFRTFHNPTYFSRRLVRFSDLYMASLSCLLNYRVDFTFYPRRTPLQHEAPLWMDQLCTGCMKTPFLGDMAHIR

SEQ ID NO: 459 - protein, 258 aa, Homo sapiens
  Payload ID: 81;
  Gene Symbol: NT5DC2;
  Gene Name: 5'-nucleotidase domain containing 2;
  ENSP ID: ENSP00000417269
  MOD_RES (1)..(1): Any amino acid
XQDMRRLVHDLLPPEVCSLLNPAAIYANNEISLRDVEVYGFDYDYTLAQYADALHPEIFSTARDILIEHYKSLLMKIDAFHYVQLGTAYRGLQPVPDEEGPSIKQFMDIFSLPEMALLSCVVDYFLGHSLEFDQAHLYKDVTDAIRDVHVKGLMYQWIEQDMEKYILRGDETFAVLSRLVAHGKQLFLITNSPFSFVDKGMRHMVGPDWRQLFDVVIVQADKPSFFTDRRKPFRKLDEKGSLQWDRITRLEKGKIYRQ

SEQ ID NO: 460 - protein, 85 aa, Homo sapiens
  Payload ID: 81;
  Gene Symbol: NT5DC2;
  Gene Name: 5'-nucleotidase domain containing 2;
  ENSP ID: ENSP00000418583
MKIDAFHYVQLGTAYRGLQPVPDEEGPSIKQFMDIFSLPEMALLSCVVDYFLGHSLEFDQAHLYKDVTDAIRDVHVKGLMYQWIE

SEQ ID NO: 461 - protein, 194 aa, Homo sapiens
  Payload ID: 81;
  Gene Symbol: NT5DC2;
  Gene Name: 5'-nucleotidase domain containing 2;
  ENSP ID: ENSP00000418780
WRQLFDVVIVQADKPSFFTDRRKPFRKLDEKGSLQWDRITRLEKGKIYRQGNLFDFLRLTEWRGPRVLYFGDHLYSDLADLMLRHGWRTGAIIPELEREIRIINTEQYMHSLTWQQALTGLLERMQTYQDAESRQVLAAWMKERQELSCLLNYRVDFTFYPRRTPLQHEAPLWMDQLCTGCMKTPFLGDMAHIR

SEQ ID NO: 462 - protein, 532 aa, Homo sapiens
  Payload ID: 81;
  Gene Symbol: NT5DC2;
  Gene Name: 5'-nucleotidase domain containing 2;
  Uniprot ID:  Q9H857;
  ENSP ID: ENSP00000419547
MAGAGLRAAARRWLLCGGHGGPRAASSSPSCPGCGPPGPGAHCPGVPRSAPAQAPTSGADLSAHLWARYQDMRRLVHDLLPPEVCSLLNPAAIYANNEISLRDVEVYGFDYDYTLAQYADALHPEIFSTARDILIEHYKSLLMKIDAFHYVQLGTAYRGLQPVPDEEVIELYGGTQHIPLYQMSGFYGKGPSIKQFMDIFSLPEMALLSCVVDYFLGHSLEFDQAHLYKDVTDAIRDVHVKGLMYQWIEQDMEKYILRGDETFAVLSRLVAHGKQLFLITNSPFSFVDKGMRHMVGPDWRQLFDVVIVQADKPSFFTDRRKPFRKLDEKGSLQWDRITRLEKGKIYRQGNLFDFLRLTEWRGPRVLYFGDHLYSDLADLMLRHGWRTGAIIPELEREIRIINTEQYMHSLTWQQALTGLLERMQTYQDAESRQVLAAWMKERQELRCITKALFNAQFGSIFRTFHNPTYFSRRLVRFSDLYMASLSCLLNYRVDFTFYPRRTPLQHEAPLWMDQLCTGCMKTPFLGDMAHIR

SEQ ID NO: 463 - protein, 111 aa, Homo sapiens
  Payload ID: 81;
  Gene Symbol: NT5DC2;
  Gene Name: 5'-nucleotidase domain containing 2;
  ENSP ID: ENSP00000419774
MRVESGSAQERGILLESLSTLLEKTTASHEGRAPGNRELTGQCGQLPRSEPSGRSDRGPQPCSARPSHLVSGRRLPCRPLGLPQRGPGTGKRGKGSLFVRPTSCPPRSAVS

SEQ ID NO: 464 - protein, 548 aa, Homo sapiens
  Payload ID: 82;
  Gene Symbol: NT5DC3;
  Gene Name: 5'-nucleotidase domain containing 3;
  Uniprot ID:  Q86UY8;
  ENSP ID: ENSP00000376615
MTMAAAAVVARGAGARAATAAALRGGCGTAARGRPCAGPARPLCTAPGTAPDMKRYLWERYREAKRSTEELVPSIMSNLLNPDAIFSNNEMSLSDIEIYGFDYDYTLVFYSKHLHTLIFNAARDLLINEHRYPAEIRKYEYDPNFAIRGLHYDVQRAVLMKIDAFHYIQLGTVYRGLSVVPDEEVIEMYEGSHVPLEQMSDFYGKSSHGNTMKQFMDIFSLPEMTLLSCVNEYFLKNNIDYEPVHLYKDVKDSIRDVHIKGIMYRAIEADIEKYICYAEQTRAVLAKLADHGKKMFLITNSPSSFVDKGMSYIVGKDWRDLFDVVIVQAEKPNFFNDKRRPFRKMNEKGVLLWDKIHKLQKGQIYKQGNLYEFLKLTGWRGSRVLYFGDHIYSDLADLTLKHGWRTGAIIPELRSELKIMNTEQYIQTMTWLQTLTGLLEQMQVHRDAESQLVLQEWKKERKEMREMTKSFFNAQFGSLFRTDQNPTYFLRRLSRFADIYMASLSCLLNYDVSHTFYPRRTPLQHELPAWSERPPTFGTPLLQEAQAK

SEQ ID NO: 465 - protein, 135 aa, Homo sapiens
  Payload ID: 82;
  Gene Symbol: NT5DC3;
  Gene Name: 5'-nucleotidase domain containing 3;
  ENSP ID: ENSP00000399171
  MOD_RES (1)..(1): Any amino acid
XAKLADHGKKMFLITNSPSSFVDKGMSYIVGKDWRDLFDVVIVQAEKPNFFNDKRRPFRKMNEKGVLLWDKIHKLQKGQIYKQGNLYEFLKLTGWRGSRVLYFGDHIYSDLATMVNDSRPSVSAGVVTHGNYFQN

SEQ ID NO: 466 - protein, 122 aa, Homo sapiens
  Payload ID: 82;
  Gene Symbol: NT5DC3;
  Gene Name: 5'-nucleotidase domain containing 3;
  ENSP ID: ENSP00000413657
  MOD_RES (1)..(1): Any amino acid
XTMTWLQTLTGLLEQMQVHRDAESQLVLQEWKKERKEMREMTKSFFNAQFGSLFRTDQNPTYFLRRLSRFADIYMASLSCLLNYDVSHTFYPRRTPLQHELPAWSERPPTFGTPLLQEAQAK

SEQ ID NO: 467 - protein, 428 aa, Homo sapiens
  Payload ID: 83;
  Gene Symbol: NT5DC4;
  Gene Name: 5'-nucleotidase domain containing 4;
  Uniprot ID:  Q86YG4;
  ENSP ID: ENSP00000330247
MPAWIFVNRSLALGKIRCFGFDMDYTLAAYKSPAYEALTFELLLERLVCIGYPHEILRYTYDPTFPTRRLVFDELYGNLLKVDAHGNVLLGAYGFTFLSEAEIWSFYPSKFIQRDDLQCFYILNMLFNLPETYLYACLVDFFSGCSRYTNCDTGYQHGNLFMSFRSLFQDVTDAMNNIHQSGCLKKTLEDLEKYVKKDPRLPILLGKMKEVGKVFLATNSSYNYTNAIMTYLFSISEAEASGRPWRSYFDLIVVDTQKPHFFAEGLVLRQVNTDSGKLHVGTYTGPHQHCAVYSGGSSDMVCELLGVRGMDILYIGDHIFGDILKSKKRQGWRTCLVVPELSWELDIWAQEKERLEELKRLDTHLADIYQHMDGSSCELQVINFTKREIQMPHESVVEQEQANLDPASCLLSCNQRSLPAKSCLSSAI

SEQ ID NO: 468 - protein, 368 aa, Homo sapiens
  Payload ID: 84;
  Gene Symbol: NT5C1A;
  Gene Name: 5'-nucleotidase, cytosolic IA;
  Uniprot ID:  Q9BXI3;
  ENSP ID: ENSP00000235628
MEPGQPREPQEPREPGPGAETAAAPVWEEAKIFYDNLAPKKKPKSPKPQNAVTIAVSSRALFRMDEEQQIYTEQGVEEYVRYQLEHENEPFSPGPAFPFVKALEAVNRRLRELYPDSEDVFDIVLMTNNHAQVGVRLINSINHYDLFIERFCMTGGNSPICYLKAYHTNLYLSADAEKVREAIDEGIAAATIFSPSRDVVVSQSQLRVAFDGDAVLFSDESERIVKAHGLDRFFEHEKAHENKPLAQGPLKGFLEALGRLQKKFYSKGLRLECPIRTYLVTARSAASSGARALKTLRSWGLETDEALFLAGAPKGPLLEKIRPHIFFDDQMFHVAGAQEMGTVAAHVPYGVAQTPRRTAPAKQAPSAQ

SEQ ID NO: 469 - protein, 550 aa, Homo sapiens
  Payload ID: 85;
  Gene Symbol: NT5C1B;
  Gene Name: 5'-nucleotidase, cytosolic IB;
  Uniprot ID:  Q96P26;
  ENSP ID: ENSP00000305979
MSQTSLKQKKNEPGMRSSKESLEAEKRKESDKTGVRLSNQGSQESSLRKTDSRGYLVRSQWSRISRSPSTKAPSIDEPRSRNTSAKLPSSSTSSRTPSTSPSLHDSSPPPLSGQPSLQPPASPQLPRSLDSRPPTPPEPDPGSRRSTKMQENPEAWAQGIVREIRQTRDSQPLEYSRTSPTEWKSSSQRRGIYPASTQLDRNSLSEQQQQQREDEDDYEAAYWASMRSFYEKNPSCSRPWPPKPKNAITIALSSCALFNMVDGRKIYEQEGLEKYMEYQLTNENVILTPGPAFRFVKALQYVNARLRDLYPDEQDLFDIVLMTNNHAQVGVRLINSVNHYGLLIDRFCLTGGKDPIGYLKAYLTNLYIAADSEKVQEAIQEGIASATMFDGAKDMAYCDTQLRVAFDGDAVLFSDESEHFTKEHGLDKFFQYDTLCESKPLAQGPLKGFLEDLGRLQKKFYAKNERLLCPIRTYLVTARSAASSGARVLKTLRRWGLEIDEALFLAGAPKSPILVKIRPHIFFDDHMFHIEGAQRLGSIAAYGFNKKFSS

SEQ ID NO: 470 - protein, 610 aa, Homo sapiens
  Payload ID: 85;
  Gene Symbol: NT5C1B;
  Gene Name: 5'-nucleotidase, cytosolic IB;
  Uniprot ID:  Q96P26;
  ENSP ID: ENSP00000352904
MSQTSLKQKKNEPGMRSSKESLEAEKRKESDKTGVRLSNQMRRAVNPNHSLRCCPFQGHSSCRRCLCAAEGTALGPCHTIRIYIHMCLLWEQGQQITMMRGSQESSLRKTDSRGYLVRSQWSRISRSPSTKAPSIDEPRSRNTSAKLPSSSTSSRTPSTSPSLHDSSPPPLSGQPSLQPPASPQLPRSLDSRPPTPPEPDPGSRRSTKMQENPEAWAQGIVREIRQTRDSQPLEYSRTSPTEWKSSSQRRGIYPASTQLDRNSLSEQQQQQREDEDDYEAAYWASMRSFYEKNPSCSRPWPPKPKNAITIALSSCALFNMVDGRKIYEQEGLEKYMEYQLTNENVILTPGPAFRFVKALQYVNARLRDLYPDEQDLFDIVLMTNNHAQVGVRLINSVNHYGLLIDRFCLTGGKDPIGYLKAYLTNLYIAADSEKVQEAIQEGIASATMFDGAKDMAYCDTQLRVAFDGDAVLFSDESEHFTKEHGLDKFFQYDTLCESKPLAQGPLKGFLEDLGRLQKKFYAKNERLLCPIRTYLVTARSAASSGARVLKTLRRWGLEIDEALFLAGAPKSPILVKIRPHIFFDDHMFHIEGAQRLGSIAAYGFNKKFSS

SEQ ID NO: 471 - protein, 203 aa, Homo sapiens
  Payload ID: 85;
  Gene Symbol: NT5C1B;
  Gene Name: 5'-nucleotidase, cytosolic IB;
  ENSP ID: ENSP00000383905
MSQTSLKQKKNEPGMRSSKESLEAEKRKESDKTGVRLSNQGSQESSLRKTDSRGYLVRSQWSRISRSPSTKAPSIDEPRSRNTSAKVELPSSPRSSHPRRPSCPGRWTRGLPRPQSPILAPGAAPKCKRIRRPGPKASCGKSARPGTRSRWNIRARPPPSGSPPASAGGSTPPPPSWTATLCPSSSSSSGRTRTTTRLPTGHP

SEQ ID NO: 472 - protein, 265 aa, Homo sapiens
  Payload ID: 85;
  Gene Symbol: NT5C1B;
  Gene Name: 5'-nucleotidase, cytosolic IB;
  ENSP ID: ENSP00000390811
  MOD_RES (1)..(1): Any amino acid
XRKGLQPTALDLALQYVNARLRDLYPDEQDLFDIVLMTNNHAQVGVRLINSVNHYGLLIDRFCLTGGKDPIGYLKAYLTNLYIAADSEKVQEAIQEGIASATMFDGAKDMAYCDTQLRVAFDGDAVLFSDESEHFTKEHGLDKFFQYDTLCESKPLAQGPLKGFLEDLGRLQKKFYAKNERLLCPIRTYLVTARSAASSGARVLKTLRRWGLEIDEALFLAGAPKSPILVKIRPHIFFDDHMFHIEGAQRLGSIAAYGFNKKFSS

SEQ ID NO: 473 - protein, 205 aa, Homo sapiens
  Payload ID: 85;
  Gene Symbol: NT5C1B;
  Gene Name: 5'-nucleotidase, cytosolic IB;
  ENSP ID: ENSP00000401656
MSQTSLKQKKNEPGMRSSKESLEAEKRKESDKTGVRLSNQMRRAVNPNHSLRCCPFQGHSSCRRCLCAAEGTALGPCHTIRIYIHMCLLWEQGQQITMMRVSRDHTTDSGGEPQTTWGSQESSLRKTDSRGYLVRSQWSRISRSPSTKAPSIDEPRSRNTSAKLPSSSTSSRTPSTSPSLHDSSPPPLSGQPSLQPPASPQLPRS

SEQ ID NO: 474 - protein, 561 aa, Homo sapiens
  Payload ID: 86;
  Gene Symbol: NT5C2;
  Gene Name: 5'-nucleotidase, cytosolic II;
  Uniprot ID:  P49902;
  ENSP ID: ENSP00000339479
MSTSWSDRLQNAADMPANMDKHALKKYRREAYHRVFVNRSLAMEKIKCFGFDMDYTLAVYKSPEYESLGFELTVERLVSIGYPQELLSFAYDSTFPTRGLVFDTLYGNLLKVDAYGNLLVCAHGFNFIRGPETREQYPNKFIQRDDTERFYILNTLFNLPETYLLACLVDFFTNCPRYTSCETGFKDGDLFMSYRSMFQDVRDAVDWVHYKGSLKEKTVENLEKYVVKDGKLPLLLSRMKEVGKVFLATNSDYKYTDKIMTYLFDFPHGPKPGSSHRPWQSYFDLILVDARKPLFFGEGTVLRQVDTKTGKLKIGTYTGPLQHGIVYSGGSSDTICDLLGAKGKDILYIGDHIFGDILKSKKRQGWRTFLVIPELAQELHVWTDKSSLFEELQSLDIFLAELYKHLDSSSNERPDISSIQRRIKKVTHDMDMCYGMMGSLFRSGSRQTLFASQVMRYADLYAASFINLLYYPFSYLFRAAHVLMPHESTVEHTHVDINEMESPLATRNRTSVDFKDTDYKRHQLTRSISEIKPPNLFPLAPQEITHCHDEDDDEEEEEEEE

SEQ ID NO: 475 - protein, 561 aa, Homo sapiens; identical to SEQ ID NO: 474
  Payload ID: 86;
  Gene Symbol: NT5C2;
  Gene Name: 5'-nucleotidase, cytosolic II;
  Uniprot ID:  P49902;
  ENSP ID: ENSP00000383960

SEQ ID NO: 476 - protein, 265 aa, Homo sapiens
  Payload ID: 86;
  Gene Symbol: NT5C2;
  Gene Name: 5'-nucleotidase, cytosolic II;
  ENSP ID: ENSP00000396468
MSTSWSDRLQNAADMPANMDKHALKKYRREAYHRVFVNRSLAMEKIKCFGFDMDYTLAVYKSPEYESLGFELTVERLVSIGYPQELLSFAYDSTFPTRGLVFDTLYGNLLKVDAYGNLLVCAHGFNFIRGSQVAVQKRPETREQYPNKFIQRDDTERFYILNTLFNLPETYLLACLVDFFTNCPRYTSCETGFKDGDLFMSYRSMFQDVRDAVDWVHYKGSLKEKTVENLEKYVVKDGKLPLLLSRMKEVGKVFLATNSDYKYTD

SEQ ID NO: 477 - protein, 146 aa, Homo sapiens
  Payload ID: 86;
  Gene Symbol: NT5C2;
  Gene Name: 5'-nucleotidase, cytosolic II;
  ENSP ID: ENSP00000408112
VLRQVDTKTGKLKIGTYTGPLQHGIVYSGGSSDTICDLLGAKGKDILYIGDHIFGDILKSKKRQGWRTFLVIPELAQELHVWTDKSSLFEELQSLDIFLAELYKHLDSSSNERPDISSIQRRIKMPHESTVEHTHVDINEMESPLA

SEQ ID NO: 478 - protein, 174 aa, Homo sapiens
  Payload ID: 86;
  Gene Symbol: NT5C2;
  Gene Name: 5'-nucleotidase, cytosolic II;
  ENSP ID: ENSP00000411330
VSIGYPQELLSFAYDSTFPTRGLVFDTLYGNLLKVDAYGNLLVCAHGFNFIRGSQVAVQKRPETREQYPNKFIQRDDTERFYILNTLFNLPETYLLACLVDFFTNCPRYTSCETGFKDGDLFMSYRSMFQDVRDAVDWVHYKGSLKEKTVENLEKYVVKDSKSSRIQYFLKVLW

SEQ ID NO: 479 - protein, 157 aa, Homo sapiens
  Payload ID: 86;
  Gene Symbol: NT5C2;
  Gene Name: 5'-nucleotidase, cytosolic II;
  ENSP ID: ENSP00000447664
  MOD_RES (1)..(1): Any amino acid
XSLGFELTVERLVSIGYPQELLSFAYDSTFPTRGLVFDTLYGNLLKVDAYGNLLVCAHGFNFIRGPETREQYPNKFIQRDDTERFYILNTLFNLPETYLLACLVDFFTNCPRYTSEFSASERCHIANLRDGTAPAAPCRLSPPTRPLSLPVCCSHHF

SEQ ID NO: 480 - protein, 62 aa, Homo sapiens
  Payload ID: 86;
  Gene Symbol: NT5C2;
  Gene Name: 5'-nucleotidase, cytosolic II;
  ENSP ID: ENSP00000474091
MSTSWSDRLQNAADMPANMDKHALKKYRREAYHRVFVNRSLAMEKIKCFGFDMDYTLAGEPV

SEQ ID NO: 481 - protein, 44 aa, Homo sapiens
  Payload ID: 86;
  Gene Symbol: NT5C2;
  Gene Name: 5'-nucleotidase, cytosolic II;
  ENSP ID: ENSP00000474247
MSTSWSDRLQNAADMPANMDKHALKKYRREAYHRRASVTPSRLE

SEQ ID NO: 482 - protein, 336 aa, Homo sapiens
  Payload ID: 87;
  Gene Symbol: NT5C3A;
  Gene Name: 5'-nucleotidase, cytosolic IIIA;
  Uniprot ID:  Q9H0P0;
  ENSP ID: ENSP00000242210
MRAPSMDRAAVARVGAVASASVCALVAGVVLAQYIFTLKRKTGRKTKIIEMMPEFQKSSVRIKNPTRVEEIICGLIKGGAAKLQIITDFDMTLSRFSYKGKRCPTCHNIIDNCKLVTDECRKKLLQLKEKYYAIEVDPVLTVEEKYPYMVEWYTKSHGLLVQQALPKAKLKEIVAESDVMLKEGYENFFDKLQQHSIPVFIFSAGIGDVLEEVIRQAGVYHPNVKVVSNFMDFDETGVLKGFKGELIHVFNKHDGALRNTEYFNQLKDNSNIILLGDSQGDLRMADGVANVEHILKIGYLNDRVDELLEKYMDSYDIVLVQDESLEVANSILQKIL

SEQ ID NO: 483 - protein, 285 aa, Homo sapiens
  Payload ID: 87;
  Gene Symbol: NT5C3A;
  Gene Name: 5'-nucleotidase, cytosolic IIIA;
  Uniprot ID:  Q9H0P0;
  ENSP ID: ENSP00000371039
MPEFQKSSVRIKNPTRVEEIICGLIKGGAAKLQIITDFDMTLSRFSYKGKRCPTCHNIIDNCKLVTDECRKKLLQLKEKYYAIEVDPVLTVEEKYPYMVEWYTKSHGLLVQQALPKAKLKEIVAESDVMLKEGYENFFDKLQQHSIPVFIFSAGIGDVLEEVIRQAGVYHPNVKVVSNFMDFDETGVLKGFKGELIHVFNKHDGALRNTEYFNQLKDNSNIILLGDSQGDLRMADGVANVEHILKIGYLNDRVDELLEKYMDSYDIVLVQDESLEVANSILQKIL

SEQ ID NO: 484 - protein, 297 aa, Homo sapiens
  Payload ID: 87;
  Gene Symbol: NT5C3A;
  Gene Name: 5'-nucleotidase, cytosolic IIIA;
  Uniprot ID:  Q9H0P0;
  ENSP ID: ENSP00000379456
MTNQESAVHVKMMPEFQKSSVRIKNPTRVEEIICGLIKGGAAKLQIITDFDMTLSRFSYKGKRCPTCHNIIDNCKLVTDECRKKLLQLKEKYYAIEVDPVLTVEEKYPYMVEWYTKSHGLLVQQALPKAKLKEIVAESDVMLKEGYENFFDKLQQHSIPVFIFSAGIGDVLEEVIRQAGVYHPNVKVVSNFMDFDETGVLKGFKGELIHVFNKHDGALRNTEYFNQLKDNSNIILLGDSQGDLRMADGVANVEHILKIGYLNDRVDELLEKYMDSYDIVLVQDESLEVANSILQKIL

SEQ ID NO: 485 - protein, 297 aa, Homo sapiens; identical to SEQ ID NO: 484
  Payload ID: 87;
  Gene Symbol: NT5C3A;
  Gene Name: 5'-nucleotidase, cytosolic IIIA;
  Uniprot ID:  Q9H0P0;
  ENSP ID: ENSP00000385261

SEQ ID NO: 486 - protein, 285 aa, Homo sapiens; identical to SEQ ID NO: 483
  Payload ID: 87;
  Gene Symbol: NT5C3A;
  Gene Name: 5'-nucleotidase, cytosolic IIIA;
  Uniprot ID:  Q9H0P0;
  ENSP ID: ENSP00000387166

SEQ ID NO: 487 - protein, 205 aa, Homo sapiens
  Payload ID: 87;
  Gene Symbol: NT5C3A;
  Gene Name: 5'-nucleotidase, cytosolic IIIA;
  ENSP ID: ENSP00000387205
MTNQESAVHVKMMPEFQKSSVRIKNPTRVEEIICGLIKGGAAKLQIITDFDMTLSRFSYKGKRCPTCHNIIDNCKLVTDECRKKLLQLKEKYYAIEVDPVLTVEEKYPYMVEWYTKSHGLLVQQALPKAKLKEIVAESDVMLKEGYENFFDKLQQHSIPVFIFSAGIGDVLEEVIRQAGVYHPNVKVVSNFMDFDETVRISNRSS

SEQ ID NO: 488 - protein, 54 aa, Homo sapiens
  Payload ID: 87;
  Gene Symbol: NT5C3A;
  Gene Name: 5'-nucleotidase, cytosolic IIIA;
  ENSP ID: ENSP00000389676
MRAPSMDRAAVARVGAVASASVCALVAGVVLAQYIFTLKRKTGRKTKIIEMKIG

SEQ ID NO: 489 - protein, 42 aa, Homo sapiens
  Payload ID: 87;
  Gene Symbol: NT5C3A;
  Gene Name: 5'-nucleotidase, cytosolic IIIA;
  ENSP ID: ENSP00000401161
MPEFQKSSVRIKNPTRVEEIICGLIKGGAAKLQIITDFDMTL

SEQ ID NO: 490 - protein, 331 aa, Homo sapiens
  Payload ID: 87;
  Gene Symbol: NT5C3A;
  Gene Name: 5'-nucleotidase, cytosolic IIIA;
  ENSP ID: ENSP00000476480
MDRAAVARVGAVASASVCALVAGVVLAQYIFTLKRKTGRKTKIIEMMPEFQKSSVRIKNPTRVEEIICGLIKGGAAKLQIITDFDMTLSRFSYKGKRCPTCHNIIDNCKLVTDECRKKLLQLKEKYYAIEVDPVLTVEEKYPYMVEWYTKSHGLLVQQALPKAKLKEIVAESDVMLKEGYENFFDKLQQHSIPVFIFSAGIGDVLEEVIRQAGVYHPNVKVVSNFMDFDETGVLKGFKGELIHVFNKHDGALRNTEYFNQLKDNSNIILLGDSQGDLRMADGVANVEHILKIGYLNDRVDELLEKYMDSYDIVLVQDESLEVANSILQKIL

SEQ ID NO: 491 - protein, 336 aa, Homo sapiens; identical to SEQ ID NO: 482
  Payload ID: 87;
  Gene Symbol: NT5C3A;
  Gene Name: 5'-nucleotidase, cytosolic IIIA;
  Uniprot ID:  Q9H0P0;
  ENSP ID: ENSP00000484415

SEQ ID NO: 492 - protein, 300 aa, Homo sapiens
  Payload ID: 88;
  Gene Symbol: NT5C3B;
  Gene Name: 5'-nucleotidase, cytosolic IIIB;
  Uniprot ID:  Q969T7;
  ENSP ID: ENSP00000389948
MAEEVSTLMKATVLMRQPGRVQEIVGALRKGGGDRLQVISDFDMTLSRFAYNGKRCPSSYNILDNSKIISEECRKELTALLHHYYPIEIDPHRTVKEKLPHMVEWWTKAHNLLCQQKIQKFQIAQVVRESNAMLREGYKTFFNTLYHNNIPLFIFSAGIGDILEEIIRQMKVFHPNIHIVSNYMDFNEDGFLQGFKGQLIHTYNKNSSACENSGYFQQLEGKTNVILLGDSIGDLTMADGVPGVQNILKIGFLNDKVEERRERYMDSYDIVLEKDETLDVVNGLLQHILCQGVQLEMQGP

SEQ ID NO: 493 - protein, 74 aa, Homo sapiens
  Payload ID: 88;
  Gene Symbol: NT5C3B;
  Gene Name: 5'-nucleotidase, cytosolic IIIB;
  ENSP ID: ENSP00000392092
MAEEVRREEASGVGRARTPTPGALRAPQLVTEAPPLHPGEHPDEGHGPDAAAWAGAGDRGRPPQGRRRPVTGDF

SEQ ID NO: 494 - protein, 227 aa, Homo sapiens
  Payload ID: 88;
  Gene Symbol: NT5C3B;
  Gene Name: 5'-nucleotidase, cytosolic IIIB;
  ENSP ID: ENSP00000397742
MAEEVSTLMKATVLMRQPGRVQEIVGALRKGGGDRLQVISDFDMTLSRFAYNGKRCPSSYNILDNSKIISEECRKELTALLHHYYPIEIDPHRTVKEKLPHMVEWEGYKTFFNTLYHNNIPLFIFSAGIGDILEEIIRQMKVFHPNIHIVSNYMDFNEDGFLQGFKGQLIHTYNKNSSACENSGYFQQLEGKTNVILLGDSIGDLTMADGVPGVQNILKIGFLNDKV

SEQ ID NO: 495 - protein, 200 aa, Homo sapiens
  Payload ID: 88;
  Gene Symbol: NT5C3B;
  Gene Name: 5'-nucleotidase, cytosolic IIIB;
  ENSP ID: ENSP00000429878
MAEEVISDFDMTLSRFAYNGKRCPSSYNILDNSKIISEECRKELTALLHHYYPIEIDPHRTVKEKLPHMVEWWTKAHNLLCQQKIQKFQIAQVVRESNAMLREGYKTFFNTLYHNNIPLFIFSAGIGDILEEIIRQMKVFHPNIHIVSNYMDFNEDVEERRERYMDSYDIVLEKDETLDVVNGLLQHILCQGVQLEMQGP

SEQ ID NO: 496 - protein, 57 aa, Homo sapiens
  Payload ID: 88;
  Gene Symbol: NT5C3B;
  Gene Name: 5'-nucleotidase, cytosolic IIIB;
  ENSP ID: ENSP00000431066
MAEEVSTLMKATVLMRQPGRVQEIVGALRKGGGDRLQISQYGHAASSNWTEGAHTST

SEQ ID NO: 497 - protein, 105 aa, Homo sapiens
  Payload ID: 88;
  Gene Symbol: NT5C3B;
  Gene Name: 5'-nucleotidase, cytosolic IIIB;
  ENSP ID: ENSP00000475710
AHNLLCQQKIQKFQIAQVVRESNAMLREGYKTFFNTLYHNNIPLFIFSAGIGDILEEIIRQMKVFHPNIHIVSNYMDFNEDVSQILFGLGKDEGWGPPARAVNSA

SEQ ID NO: 498 - protein, 574 aa, Homo sapiens
  Payload ID: 89;
  Gene Symbol: NT5E;
  Gene Name: 5'-nucleotidase, ecto (CD73);
  Uniprot ID:  P21589;
  ENSP ID: ENSP00000257770
MCPRAARAPATLLLALGAVLWPAAGAWELTILHTNDVHSRLEQTSEDSSKCVNASRCMGGVARLFTKVQQIRRAEPNVLLLDAGDQYQGTIWFTVYKGAEVAHFMNALRYDAMALGNHEFDNGVEGLIEPLLKEAKFPILSANIKAKGPLASQISGLYLPYKVLPVGDEVVGIVGYTSKETPFLSNPGTNLVFEDEITALQPEVDKLKTLNVNKIIALGHSGFEMDKLIAQKVRGVDVVVGGHSNTFLYTGNPPSKEVPAGKYPFIVTSDDGRKVPVVQAYAFGKYLGYLKIEFDERGNVISSHGNPILLNSSIPEDPSIKADINKWRIKLDNYSTQELGKTIVYLDGSSQSCRFRECNMGNLICDAMINNNLRHTDEMFWNHVSMCILNGGGIRSPIDERNNGTITWENLAAVLPFGGTFDLVQLKGSTLKKAFEHSVHRYGQSTGEFLQVGGIHVVYDLSRKPGDRVVKLDVLCTKCRVPSYDPLKMDEVYKVILPNFLANGGDGFQMIKDELLRHDSGDQDINVVSTYISKMKVIYPAVEGRIKFSTGSHCHGSFSLIFLSLWAVIFVLYQ

SEQ ID NO: 499 - protein, 264 aa, Homo sapiens
  Payload ID: 89;
  Gene Symbol: NT5E;
  Gene Name: 5'-nucleotidase, ecto (CD73);
  ENSP ID: ENSP00000358660
MCPRAARAPATLLLALGAVLWPAAGAWELTILHTNDVHSRLEQTSEDSSKCVNASRCMGGVARLFTKVQQIRRAEPNVLLLDAGDQYQGTIWFTVYKGAEVAHFMNALRYDAMALGNHEFDNGVEGLIEPLLKEAKFPILSANIKAKGPLASQISGLYLPYKVLPVGDEVVGIVGYTSKETPFLSNPGTNLVFEDEITALQPEVDKLKTLNVNKIIALGHSGFEMDKLIAQKVRGVDVVVGGHSNTFLYTGNCFKRIAWARMSR

SEQ ID NO: 500 - protein, 524 aa, Homo sapiens
  Payload ID: 89;
  Gene Symbol: NT5E;
  Gene Name: 5'-nucleotidase, ecto (CD73);
  Uniprot ID:  P21589;
  ENSP ID: ENSP00000358665
MCPRAARAPATLLLALGAVLWPAAGAWELTILHTNDVHSRLEQTSEDSSKCVNASRCMGGVARLFTKVQQIRRAEPNVLLLDAGDQYQGTIWFTVYKGAEVAHFMNALRYDAMALGNHEFDNGVEGLIEPLLKEAKFPILSANIKAKGPLASQISGLYLPYKVLPVGDEVVGIVGYTSKETPFLSNPGTNLVFEDEITALQPEVDKLKTLNVNKIIALGHSGFEMDKLIAQKVRGVDVVVGGHSNTFLYTGNPPSKEVPAGKYPFIVTSDDGRKVPVVQAYAFGKYLGYLKIEFDERGNVISSHGNPILLNSSIPEDPSIKADINKWRIKLDNYSTQELGKTIVYLDGSSQSCRFRECNMGNLICDAMINNNLRHTDEMFWNHVSMCILNGGGIRSPIDERNNGIHVVYDLSRKPGDRVVKLDVLCTKCRVPSYDPLKMDEVYKVILPNFLANGGDGFQMIKDELLRHDSGDQDINVVSTYISKMKVIYPAVEGRIKFSTGSHCHGSFSLIFLSLWAVIFVLYQ

SEQ ID NO: 501 - protein, 179 aa, Homo sapiens
  Payload ID: 89;
  Gene Symbol: NT5E;
  Gene Name: 5'-nucleotidase, ecto (CD73);
  ENSP ID: ENSP00000387630
  MOD_RES (1)..(1): Any amino acid
XNPILLNSSIPEDPSIKADINKWRIKLDNYSTQELGKTIVYLDGSSQSCRFRECNMGNLICDAMINNNLRHTDEMFWNHVSMCILNGGGIRSPIDERNNGTITWENLAAVLPFGGTFDLVQLKGSTLKKAFEHSVHRYGQSTGEFLQVGDLKECCPICINQDDSWKEQPTAQTYLNTWF

SEQ ID NO: 502 - protein, 230 aa, Homo sapiens
  Payload ID: 89;
  Gene Symbol: NT5E;
  Gene Name: 5'-nucleotidase, ecto (CD73);
  ENSP ID: ENSP00000414674
  MOD_RES (1)..(1): Any amino acid
XDVVVGGHSNTFLYTGNPPSKEVPAGKYPFIVTSDDGRKVPVVQAYAFGKYLGYLKIEFDERGNVISSHGNPILLNSSIPEDPSIKADINKWRIKLDNYSTQELGKTIVYLDGSSQSCRFRECNMGNLICDAMINNNLRHTDEMFWNHVSMCILNGGGIRSPIDERNNGIHVVYDLSRKPGDRVVKLDVLCTKCRVPSYDPLKMDEVYKVILPNFLANGGDGFQMIKDEL

SEQ ID NO: 503 - protein, 1288 aa, Homo sapiens
  Payload ID: 90;
  Gene Symbol: OPLAH;
  Gene Name: 5-oxoprolinase (ATP-hydrolysing);
  Uniprot ID:  O14841;
  ENSP ID: ENSP00000480476
MGSPEGRFHFAIDRGGTFTDVFAQCPGGHVRVLKLLSEDPANYADAPTEGIRRILEQEAGMLLPRDQPLDSSHIASIRMGTTVATNALLERKGERVALLVTRGFRDLLHIGTQARGDLFDLAVPMPEVLYEEVLEVDERVVLHRGEAGTGTPVKGRTGDLLEVQQPVDLGALRGKLEGLLSRGIRSLAVVLMHSYTWAQHEQQVGVLARELGFTHVSLSSEAMPMVRIVPRGHTACADAYLTPAIQRYVQGFCRGFQGQLKDVQVLFMRSDGGLAPMDTFSGSSAVLSGPAGGVVGYSATTYQQEGGQPVIGFDMGGTSTDVSRYAGEFEHVFEASTAGVTLQAPQLDINTVAAGGGSRLFFRSGLFVVGPESAGAHPGPACYRKGGPVTVTDANLVLGRLLPASFPCIFGPGENQPLSPEASRKALEAVATEVNSFLTNGPCPASPLSLEEVAMGFVRVANEAMCRPIRALTQARGHDPSAHVLACFGGAGGQHACAIARALGMDTVHIHRHSGLLSALGLALADVVHEAQEPCSLLYAPETFVQLDQRLSRLEEQCVDALQAQGFPRSQISTESFLHLRYQGTDCALMVSAHQHPATARSPRAGDFGAAFVERYMREFGFVIPERPVVVDDVRVRGTGRSGLRLEDAPKAQTGPPRVDKMTQCYFEGGYQETPVYLLAELGYGHKLHGPCLIIDSNSTILVEPGCQAEVTKTGDICISVGAEVPGTVGPQLDPIQLSIFSHRFMSIAEQMGRILQRTAISTNIKERLDFSCALFGPDGGLVSNAPHIPVHLGAMQETVQFQIQHLGADLHPGDVLLSNHPSAGGSHLPDLTVITPVFWPGQTRPVFYVASRGHHADIGGITPGSMPPHSTMLQQEGAVFLSFKLVQGGVFQEEAVTEALRAPGKVPNCSGTRNLHDNLSDLRAQVAANQKGIQLVGELIGQYGLDVVQAYMGHIQANAELAVRDMLRAFGTSRQARGLPLEVSSEDHMDDGSPIRLRVQISLSQGSAVFDFSGTGPEVFGNLNAPRAVTLSALIYCLRCLVGRDIPLNQGCLAPVRVVIPRGSILDPSPEAAVVGGNVLTSQRVVDVILGAFGACAASQGCMNNVTLGNAHMGYYETVAGGAGAGPSWHGRSGVHSHMTNTRITDPEILESRYPVILRRFELRRGSGGRGRFRGGDGVTRELLFREEALLSVLTERRAFRPYGLHGGEPGARGLNLLIRKNGRTVNLGGKTSVTVYPGDVFCLHTPGGGGYGDPEDPAPPPGSPPQALAFPEHGSVYEYRRAQEAV

SEQ ID NO: 504 - protein, 157 aa, Homo sapiens
  Payload ID: 90;
  Gene Symbol: OPLAH;
  Gene Name: 5-oxoprolinase (ATP-hydrolysing);
  ENSP ID: ENSP00000481640
MGSPEGRFHFAIDRGGTFTDVFAQCPGGHVRVLKLLSEDPANYADAPTEGIRRILEQEAGMLLPRDQPLDSSHIASIRMGTTVATNALLERKGERVALLVTRGFRDLLHIGTQARGDLFDLAVPMPEVLYEEVLEVDERVVLHRGEAGTGTPVKGRT

SEQ ID NO: 505 - protein, 450 aa, Homo sapiens
  Payload ID: 91;
  Gene Symbol: PHYKPL;
  Gene Name: 5-phosphohydroxy-L-lysine phospho-lyase;
  Uniprot ID:  Q8IUZ5;
  ENSP ID: ENSP00000310978
MAADQRPKADTLALRQRLISSSCRLFFPEDPVKIVRAQGQYMYDEQGAEYIDCISNVAHVGHCHPLVVQAAHEQNQVLNTNSRYLHDNIVDYAQRLSETLPEQLCVFYFLNSGSEANDLALRLARHYTGHQDVVVLDHAYHGHLSSLIDISPYKFRNLDGQKEWVHVAPLPDTYRGPYREDHPNPAMAYANEVKRVVSSAQEKGRKIAAFFAESLPSVGGQIIPPAGYFSQVAEHIRKAGGVFVADEIQVGFGRVGKHFWAFQLQGKDFVPDIVTMGKSIGNGHPVACVAATQPVARAFEATGVEYFNTFGGSPVSCAVGLAVLNVLEKEQLQDHATSVGSFLMQLLGQQKIKHPIVGDVRGVGLFIGVDLIKDEATRTPATEEAAYLVSRLKENYVLLSTDGPGRNILKFKPPMCFSLDNARQVVAKLDAILTDMEEKVRSCETLRLQP

SEQ ID NO: 506 - protein, 219 aa, Homo sapiens
  Payload ID: 91;
  Gene Symbol: PHYKPL;
  Gene Name: 5-phosphohydroxy-L-lysine phospho-lyase;
  ENSP ID: ENSP00000321290
MAADQRPKADTLALRQRLISHLFSGSGRLTRTHAEMSKEATEAENAFRNNPKFQRLVTPSASCFATTCGVERQVGHCHPLVVQAAHEQNQVLNTNSRYLHDNIVDYAQRLSETLPEQLCVFYFLNSGSEANDLALRLARHYTGHQDVVVLDHAYHGHLSSLIDISPYKFRNLDGQKEWVHVAPLPDTYRGPYREDHPNPAMAYANEVKRVVSSAQEKGR

SEQ ID NO: 507 - protein, 182 aa, Homo sapiens
  Payload ID: 91;
  Gene Symbol: PHYKPL;
  Gene Name: 5-phosphohydroxy-L-lysine phospho-lyase;
  ENSP ID: ENSP00000377128
  MOD_RES (1)..(1): Any amino acid
XVPDIVTMGKSIGNGHPVACVAATQPVARAFEATGVEYFNTFGGSPVSCAVGLAVLNVLEKEQLQDHATSVGSFLMQLLGQQKIKHPIVGDVRGVGLFIGVDLIKDEATRTPATEEAAYLVSRLKENYVLLSTDGPGRNILKFKPPMCFSLDNARQVVAKLDAILTDMEEKVRSCETLRLQP

SEQ ID NO: 508 - protein, 123 aa, Homo sapiens
  Payload ID: 91;
  Gene Symbol: PHYKPL;
  Gene Name: 5-phosphohydroxy-L-lysine phospho-lyase;
  ENSP ID: ENSP00000421810
MAADQRPKADTLALRQRLISSSCRLFFPEDPVKIVRAQGQYMYDEQGAEYIDCISNVAHVGHCHPLVVQAAHEQNQVLNTNSRYLHDNIVDYAQRLSETLPEQLCVFYFLNSGWGNSSSKKGT

SEQ ID NO: 509 - protein, 65 aa, Homo sapiens
  Payload ID: 91;
  Gene Symbol: PHYKPL;
  Gene Name: 5-phosphohydroxy-L-lysine phospho-lyase;
  ENSP ID: ENSP00000423806
MAADQRPKADTLALRQRLISSSCRLFFPEDPVKIVRAQGQYMYDEQGAEYIDCISNVAHVRITAT

SEQ ID NO: 510 - protein, 115 aa, Homo sapiens
  Payload ID: 91;
  Gene Symbol: PHYKPL;
  Gene Name: 5-phosphohydroxy-L-lysine phospho-lyase;
  ENSP ID: ENSP00000424608
QAAHEQNQVLNTNSRYLHDNIVDYAQRLSETLPEQLCVFYFLNSGSEANDLALRLARHYTGHQDVVVLDHAYHGHLSSLIDISPYKFRNLDGQKEWVHVVCTAQLNNSDMLSSLG

SEQ ID NO: 511 - protein, 55 aa, Homo sapiens
  Payload ID: 91;
  Gene Symbol: PHYKPL;
  Gene Name: 5-phosphohydroxy-L-lysine phospho-lyase;
  ENSP ID: ENSP00000425425
MAADQRPKADTLALRQRLIRHAALWSPHGTGQPPFLRIRETDADTCRNEQGGHRG

SEQ ID NO: 512 - protein, 28 aa, Homo sapiens
  Payload ID: 91;
  Gene Symbol: PHYKPL;
  Gene Name: 5-phosphohydroxy-L-lysine phospho-lyase;
  ENSP ID: ENSP00000427444
IAAFFAESLPSVGGQIIPPAGYFSQVAE

SEQ ID NO: 513 - protein, 191 aa, Homo sapiens
  Payload ID: 92;
  Gene Symbol:;
  Gene Name: 60S ribosomal prt L7a [Source:UniProtKB/Swiss-Prot;Acc:P62424];
  ENSP ID: ENSP00000486063
MLVRLNVRCSCRGVVLGGCRKLLASLVQPKGKKAKGKKVAPAPAVVKKQEAKKVVNPLFEKRPKNFGIGQDIQPKRDLTRFVKWPRYIRLQRQRAILYKRLKVPPAINQFTQALDRQTATQLLKLAHKYRPETKQEKKQRLLARAEKKAAGKGDVPTKRPPVLRAGVNTVTTLVENKKAQLVVIAHDVDPI

SEQ ID NO: 514 - protein, 151 aa, Homo sapiens
  Payload ID: 92;
  Gene Symbol:;
  Gene Name: 60S ribosomal prt L7a [Source:UniProtKB/Swiss-Prot;Acc:P62424];
  ENSP ID: ENSP00000486855
MAPLYQAAGKGDVPTKRPPVLRAGVNTVTTLVENKKAQLVVIAHDVDPIELVVFLPALCRKMGVPYCIIKGKARLGRLVHRKTCTTVAFTQVNSEDKGALAKLVEAIRTNYNDRYDEIRRHWGGNVLGPKSVARIAKLEKAKAKELATKLG

SEQ ID NO: 515 - protein, 266 aa, Homo sapiens [sequence omitted]

SEQ ID NO: 516 - protein, 271 aa, Homo sapiens
  Payload ID: 93;
  Gene Symbol: PFKFB1;
  Gene Name: 6-phosphofructo-2-kinase/fructose-2,6-biphosphatase 1;
  ENSP ID: ENSP00000364131
MSPEMGELTQTRLQKIWIPHSSGSSRLQRRRGSSIPQFTNSPTMVIMVGLPARGKTYISTKLTRYLNWIGTPTKDNMEALQIRKQCALAALKDVHNYLSHEEGHVAVFDATNTTRERRSLILQFAKEHGYKGVCEEMTYEEIQEHYPEEFALRDQDKYRYRYPKGESYEDLVQRLEPVIMELERQENVLVICHQAVMRCLLAYFLDKSSDELPYLKCPLHTVLKLTPVAYGCKVESIYLNVEAVNTHREKPENVDITREPEEALDTVPAHY

SEQ ID NO: 517 - protein, 471 aa, Homo sapiens
  Payload ID: 93;
  Gene Symbol: PFKFB1;
  Gene Name: 6-phosphofructo-2-kinase/fructose-2,6-biphosphatase 1;
  Uniprot ID:  P16118;
  ENSP ID: ENSP00000364145
MSPEMGELTQTRLQKIWIPHSSGSSRLQRRRGSSIPQFTNSPTMVIMVGLPARGKTYISTKLTRYLNWIGTPTKVFNLGQYRREAVSYKNYEFFLPDNMEALQIRKQCALAALKDVHNYLSHEEGHVAVFDATNTTRERRSLILQFAKEHGYKVFFIESICNDPGIIAENIRQVKLGSPDYIDCDREKVLEDFLKRIECYEVNYQPLDEELDSHLSYIKIFDVGTRYMVNRVQDHIQSRTVYYLMNIHVTPRSIYLCRHGESELNIRGRIGGDSGLSVRGKQYAYALANFIQSQGISSLKVWTSHMKRTIQTAEALGVPYEQWKALNEIDAGVCEEMTYEEIQEHYPEEFALRDQDKYRYRYPKGESYEDLVQRLEPVIMELERQENVLVICHQAVMRCLLAYFLDKSSDELPYLKCPLHTVLKLTPVAYGCKVESIYLNVEAVNTHREKPENVDITREPEEALDTVPAHY

SEQ ID NO: 518 - protein, 406 aa, Homo sapiens
  Payload ID: 93;
  Gene Symbol: PFKFB1;
  Gene Name: 6-phosphofructo-2-kinase/fructose-2,6-biphosphatase 1;
  Uniprot ID:  P16118;
  ENSP ID: ENSP00000444074
MEEKTSRIKVFNLGQYRREAVSYKNYEFFLPDNMEALQIRKQCALAALKDVHNYLSHEEGHVAVFDATNTTRERRSLILQFAKEHGYKVFFIESICNDPGIIAENIRQVKLGSPDYIDCDREKVLEDFLKRIECYEVNYQPLDEELDSHLSYIKIFDVGTRYMVNRVQDHIQSRTVYYLMNIHVTPRSIYLCRHGESELNIRGRIGGDSGLSVRGKQYAYALANFIQSQGISSLKVWTSHMKRTIQTAEALGVPYEQWKALNEIDAGVCEEMTYEEIQEHYPEEFALRDQDKYRYRYPKGESYEDLVQRLEPVIMELERQENVLVICHQAVMRCLLAYFLDKSSDELPYLKCPLHTVLKLTPVAYGCKVESIYLNVEAVNTHREKPENVDITREPEEALDTVPAHY

SEQ ID NO: 519 - protein, 244 aa, Homo sapiens
  Payload ID: 93;
  Gene Symbol: PFKFB1;
  Gene Name: 6-phosphofructo-2-kinase/fructose-2,6-biphosphatase 1;
  ENSP ID: ENSP00000480232
MVNRVQDHIQSRTVYYLMNIHVTPRSIYLCRHGESELNIRGRIGGDSGLSVRGKQYAYALANFIQSQGISSLKVWTSHMKRTIQTAEALGVPYEQWKALNEIDAGVCEEMTYEEIQEHYPEEFALRDQDKYRYRYPKGESYEDLVQRLEPVIMELERQENVLVICHQAVMRCLLAYFLDKSSDELPYLKCPLHTVLKLTPVAYGCKVESIYLNVEAVNTHREKPENVDITREPEEALDTVPAHY

SEQ ID NO: 520 - protein, 471 aa, Homo sapiens
  Payload ID: 94;
  Gene Symbol: PFKFB2;
  Gene Name: 6-phosphofructo-2-kinase/fructose-2,6-biphosphatase 2;
  Uniprot ID:  O60825;
  ENSP ID: ENSP00000356046
MSGASSSEQNNNSYETKTPNLRMSEKKCSWASYMTNSPTLIVMIGLPARGKTYVSKKLTRYLNWIGVPTKVFNLGVYRREAVKSYKSYDFFRHDNEEAMKIRKQCALVALEDVKAYLTEENGQIAVFDATNTTRERRDMILNFAEQNSFKVFFVESVCDDPDVIAANILEVKVSSPDYPERNRENVMEDFLKRIECYKVTYRPLDPDNYDKDLSFIKVINVGQRFLVNRVQDYIQSKIVYYLMNIHVQPRTIYLCRHGESEFNLLGKIGGDSGLSVRGKQFAQALRKFLEEQEITDLKVWTSQLKRTIQTAESLGVPYEQWKILNEIDAGVCEEMTYAEIEKRYPEEFALRDQEKYLYRYPGGESYQDLVQRLEPVIMELERQGNVLVISHQAVMRCLLAYFLDKGADELPYLRCPLHTIFKLTPVAYGCKVETIKLNVEAVNTHRDKPTAAETTLAVRRRPSAASLMLPC

SEQ ID NO: 521 - protein, 505 aa, Homo sapiens
  Payload ID: 94;
  Gene Symbol: PFKFB2;
  Gene Name: 6-phosphofructo-2-kinase/fructose-2,6-biphosphatase 2;
  Uniprot ID:  O60825;
  ENSP ID: ENSP00000356047
MSGASSSEQNNNSYETKTPNLRMSEKKCSWASYMTNSPTLIVMIGLPARGKTYVSKKLTRYLNWIGVPTKVFNLGVYRREAVKSYKSYDFFRHDNEEAMKIRKQCALVALEDVKAYLTEENGQIAVFDATNTTRERRDMILNFAEQNSFKVFFVESVCDDPDVIAANILEVKVSSPDYPERNRENVMEDFLKRIECYKVTYRPLDPDNYDKDLSFIKVINVGQRFLVNRVQDYIQSKIVYYLMNIHVQPRTIYLCRHGESEFNLLGKIGGDSGLSVRGKQFAQALRKFLEEQEITDLKVWTSQLKRTIQTAESLGVPYEQWKILNEIDAGVCEEMTYAEIEKRYPEEFALRDQEKYLYRYPGGESYQDLVQRLEPVIMELERQGNVLVISHQAVMRCLLAYFLDKGADELPYLRCPLHTIFKLTPVAYGCKVETIKLNVEAVNTHRDKPTNNFPKNQTPVRMRRNSFTPLSSSNTIRRPRNYSVGSRPLKPLSPLRAQDMQEGAD

SEQ ID NO: 522 - protein, 96 aa, Homo sapiens
  Payload ID: 94;
  Gene Symbol: PFKFB2;
  Gene Name: 6-phosphofructo-2-kinase/fructose-2,6-biphosphatase 2;
  ENSP ID: ENSP00000408717
MSGASSSEQNNNSYETKTPNLRMSEKKCSWASYMTNSPTLIVMIGLPARGKTYVSKKLTRYLNWIGVPTKGQETSPIWWGHHIILLLKDLGVFYSV

SEQ ID NO: 523 - protein, 125 aa, Homo sapiens
  Payload ID: 94;
  Gene Symbol: PFKFB2;
  Gene Name: 6-phosphofructo-2-kinase/fructose-2,6-biphosphatase 2;
  ENSP ID: ENSP00000439420
MSGASSSEQNNNSYETKTPNLRMSEKKCSWASYMTNSPTLIVMIGLPARGKTYVSKKLTRYLNWIGVPTKVFNLGVYRREAVKSYKSYDFFRHDNEEAMKIRKQCALVALEDVKAYLTEENGQIA

SEQ ID NO: 524 - protein, 44 aa, Homo sapiens
  Payload ID: 94;
  Gene Symbol: PFKFB2;
  Gene Name: 6-phosphofructo-2-kinase/fructose-2,6-biphosphatase 2;
  ENSP ID: ENSP00000484769
MSGASSSEQNNNSYETKTPNLRMSEKKCCWSAVTGSWLTATLNS

SEQ ID NO: 525 - protein, 49 aa, Homo sapiens
  Payload ID: 94;
  Gene Symbol: PFKFB2;
  Gene Name: 6-phosphofructo-2-kinase/fructose-2,6-biphosphatase 2;
  ENSP ID: ENSP00000484988
MSGASSSEQNNNSYETKTPNLRMSEKKCSWASYMTNSPTLIVMIGLPAR

SEQ ID NO: 526 - protein, 514 aa, Homo sapiens
  Payload ID: 95;
  Gene Symbol: PFKFB3;
  Gene Name: 6-phosphofructo-2-kinase/fructose-2,6-biphosphatase 3;
  Uniprot ID:  Q16875;
  ENSP ID: ENSP00000353712
MPLELTQSRVQKIWVPVDHRPSLPRSCGPKLTNSPTVIVMVGLPARGKTYISKKLTRYLNWIGVPTKVFNVGEYRREAVKQYSSYNFFRPDNEEAMKVRKQCALAALRDVKSYLAKEGGQIAVFDATNTTRERRHMILHFAKENDFKAFFIESVCDDPTVVASNIMEVKISSPDYKDCNSAEAMDDFMKRISCYEASYQPLDPDKCDRDLSLIKVIDVGRRFLVNRVQDHIQSRIVYYLMNIHVQPRTIYLCRHGENEHNLQGRIGGDSGLSSRGKKFASALSKFVEEQNLKDLRVWTSQLKSTIQTAEALRLPYEQWKALNEIDAGVCEELTYEEIRDTYPEEYALREQDKYYYRYPTGESYQDLVQRLEPVIMELERQENVLVICHQAVLRCLLAYFLDKSAEEMPYLKCPLHTVLKLTPVAYGCRVESIYLNVESVCTHRERSEDAKKGPNPLMRRNSVTPLASPEPTKKPRINSFEEHVASTSAALPSCLPPEVPTQLPGQPLLGQACLT

SEQ ID NO: 527 - protein, 520 aa, Homo sapiens
  Payload ID: 95;
  Gene Symbol: PFKFB3;
  Gene Name: 6-phosphofructo-2-kinase/fructose-2,6-biphosphatase 3;
  Uniprot ID:  Q16875;
  ENSP ID: ENSP00000369100
MPLELTQSRVQKIWVPVDHRPSLPRSCGPKLTNSPTVIVMVGLPARGKTYISKKLTRYLNWIGVPTKVFNVGEYRREAVKQYSSYNFFRPDNEEAMKVRKQCALAALRDVKSYLAKEGGQIAVFDATNTTRERRHMILHFAKENDFKAFFIESVCDDPTVVASNIMEVKISSPDYKDCNSAEAMDDFMKRISCYEASYQPLDPDKCDRDLSLIKVIDVGRRFLVNRVQDHIQSRIVYYLMNIHVQPRTIYLCRHGENEHNLQGRIGGDSGLSSRGKKFASALSKFVEEQNLKDLRVWTSQLKSTIQTAEALRLPYEQWKALNEIDAGVCEELTYEEIRDTYPEEYALREQDKYYYRYPTGESYQDLVQRLEPVIMELERQENVLVICHQAVLRCLLAYFLDKSAEEMPYLKCPLHTVLKLTPVAYGCRVESIYLNVESVCTHRERSEDAKKGPNPLMRRNSVTPLASPEPTKKPRINSFEEHVASTSAALPSCLPPEVPTQLPGQNMKGSRSSADSSRKH

SEQ ID NO: 528 - protein, 513 aa, Homo sapiens
  Payload ID: 95;
  Gene Symbol: PFKFB3;
  Gene Name: 6-phosphofructo-2-kinase/fructose-2,6-biphosphatase 3;
  ENSP ID: ENSP00000369105
MPLELTQSRVQKIWVPVDHRPSLPRSCGPKLTNSPTVIVMVGLPARGKTYISKKLTRYLNWIGVPTKVFNVGEYRREAVKQYSSYNFFRPDNEEAMKVRKQCALAALRDVKSYLAKEGGQIAVFDATNTTRERRHMILHFAKENDFKAFFIESVCDDPTVVASNIMEVKISSPDYKDCNSAEAMDDFMKRISCYEASYQPLDPDKCDRDLSLIKVIDVGRRFLVNRVQDHIQSRIVYYLMNIHVQPRTIYLCRHGENEHNLQGRIGGDSGLSSRGKKFASALSKFVEEQNLKDLRVWTSQLKSTIQTAEALRLPYEQWKALNEIDAGVCEELTYEEIRDTYPEEYALREQDKYYYRYPTGESYQDLVQRLEPVIMELERQENVLVICHQAVLRCLLAYFLDKSAEEMPYLKCPLHTVLKLTPVAYGCRVESIYLNVESVCTHRERSEDAKKGPNPLMRRNSVTPLASPEPTKKPRINSFEEHVASTSAALPSCLPPEVPTQLPGQPLLGQACL

SEQ ID NO: 529 - protein, 526 aa, Homo sapiens
  Payload ID: 95;
  Gene Symbol: PFKFB3;
  Gene Name: 6-phosphofructo-2-kinase/fructose-2,6-biphosphatase 3;
  ENSP ID: ENSP00000369111
MPLELTQSRVQKIWVPVDHRPSLPRSCGPKLTNSPTVIVMVGLPARGKTYISKKLTRYLNWIGVPTKVFNVGEYRREAVKQYSSYNFFRPDNEEAMKVRKQCALAALRDVKSYLAKEGGQIAVFDATNTTRERRHMILHFAKENDFKAFFIESVCDDPTVVASNIMEVKISSPDYKDCNSAEAMDDFMKRISCYEASYQPLDPDKCDRDLSLIKVIDVGRRFLVNRVQDHIQSRIVYYLMNIHVQPRTIYLCRHGENEHNLQGRIGGDSGLSSRGKKFASALSKFVEEQNLKDLRVWTSQLKSTIQTAEALRLPYEQWKALNEIDAGVCEELTYEEIRDTYPEEYALREQDKYYYRYPTGESYQDLVQRLEPVIMELERQENVLVICHQAVLRCLLAYFLDKSAEEMPYLKCPLHTVLKLTPVAYGCRVESIYLNVESVCTHRERSEDAKKGPNPLMRRNSVTPLASPEPTKKPRINSFEEHVASTSAALPSCLPPEVPTQLPGQPLLGQACLRTVCHIFSKFSPY

SEQ ID NO: 530 - protein, 500 aa, Homo sapiens
  Payload ID: 95;
  Gene Symbol: PFKFB3;
  Gene Name: 6-phosphofructo-2-kinase/fructose-2,6-biphosphatase 3;
  Uniprot ID:  Q16875;
  ENSP ID: ENSP00000369115
MPFRKACGPKLTNSPTVIVMVGLPARGKTYISKKLTRYLNWIGVPTKVFNVGEYRREAVKQYSSYNFFRPDNEEAMKVRKQCALAALRDVKSYLAKEGGQIAVFDATNTTRERRHMILHFAKENDFKAFFIESVCDDPTVVASNIMEVKISSPDYKDCNSAEAMDDFMKRISCYEASYQPLDPDKCDRDLSLIKVIDVGRRFLVNRVQDHIQSRIVYYLMNIHVQPRTIYLCRHGENEHNLQGRIGGDSGLSSRGKKFASALSKFVEEQNLKDLRVWTSQLKSTIQTAEALRLPYEQWKALNEIDAGVCEELTYEEIRDTYPEEYALREQDKYYYRYPTGESYQDLVQRLEPVIMELERQENVLVICHQAVLRCLLAYFLDKSAEEMPYLKCPLHTVLKLTPVAYGCRVESIYLNVESVCTHRERSEDAKKGPNPLMRRNSVTPLASPEPTKKPRINSFEEHVASTSAALPSCLPPEVPTQLPGQNMKGSRSSADSSRKH

SEQ ID NO: 531 - protein, 143 aa, Homo sapiens
  Payload ID: 95;
  Gene Symbol: PFKFB3;
  Gene Name: 6-phosphofructo-2-kinase/fructose-2,6-biphosphatase 3;
  ENSP ID: ENSP00000390285
  MOD_RES (1)..(1): Any amino acid
XVEEQNLKDLRVWTSQLKSTIQTAEALRLPYEQWKALNEIDASYQDLVQRLEPVIMELERQENVLVICHQAVLRCLLAYFLDKSAEEMPYLKCPLHTVLKLTPVAYGCRVESIYLNVESVCTHRERSENMKGSRSSADSSRKH

SEQ ID NO: 532 - protein, 31 aa, Homo sapiens
  Payload ID: 95;
  Gene Symbol: PFKFB3;
  Gene Name: 6-phosphofructo-2-kinase/fructose-2,6-biphosphatase 3;
  ENSP ID: ENSP00000404995
IYLNVESVCTHRERSENMKGSRSSADSSRKH

SEQ ID NO: 533 - protein, 92 aa, Homo sapiens
  Payload ID: 95;
  Gene Symbol: PFKFB3;
  Gene Name: 6-phosphofructo-2-kinase/fructose-2,6-biphosphatase 3;
  ENSP ID: ENSP00000416677
IYLNVESVCTHRERSEDAKKGPNPLMRRNSVTPLASPEPTKKPRINSFEEHVASTSAALPSCLPPEVPTQLPGQPLLGQACLNWKGVMRNAA

SEQ ID NO: 534 - protein, 455 aa, Homo sapiens
  Payload ID: 95;
  Gene Symbol: PFKFB3;
  Gene Name: 6-phosphofructo-2-kinase/fructose-2,6-biphosphatase 3;
  ENSP ID: ENSP00000432356
MPLELTQSRVQKIWVPVDHRPSLPRSCGPKLTNSPTVIVMVGLPARGKTYISKKLTRYLNWIGVPTKVFNVGEYRREAVKQYSSYNFFRPDNEEAMKVRKQCALAALRDVKSYLAKEGGQIAVFDATNTTRERRHMILHFAKENDFKAFFIESVCDDPTVVASNIMEVKISSPDYKDCNSAEAMDDFMKRISCYEASYQPLDPDKCDRDLSLIKVIDVGRRFLVNRVQDHIQSRIVYYLMNIHVQPRTIYLCRHGENEHNLQGRIGGDSGLSSRGKKFASALSKFVEEQNLKDLRVWTSQLKSTIQTAEALRLPYEQWKALNEIDAGVCEELTYEEIRDTYPEEYALREQDKYYYRYPTGESYQDLVQRLEPVIMELERQENVLVICHQAVLRCLLAYFLDKSAEEMPYLKCPLHTVLKLTPVAYGCRVESIYLNVESVCTHRERSEAAKSTTLC

SEQ ID NO: 535 - protein, 455 aa, Homo sapiens; identical to SEQ ID NO: 534
  Payload ID: 95;
  Gene Symbol: PFKFB3;
  Gene Name: 6-phosphofructo-2-kinase/fructose-2,6-biphosphatase 3;
  ENSP ID: ENSP00000433771

SEQ ID NO: 536 - protein, 61 aa, Homo sapiens
  Payload ID: 95;
  Gene Symbol: PFKFB3;
  Gene Name: 6-phosphofructo-2-kinase/fructose-2,6-biphosphatase 3;
  ENSP ID: ENSP00000434342
IYLNVESVCTHRERSEGLSLFPRLECGGAVTAHCSLNLLGSSDPPASASRVAETTGCKEGT

SEQ ID NO: 537 - protein, 455 aa, Homo sapiens; identical to SEQ ID NO: 534
  Payload ID: 95;
  Gene Symbol: PFKFB3;
  Gene Name: 6-phosphofructo-2-kinase/fructose-2,6-biphosphatase 3;
  ENSP ID: ENSP00000434628

SEQ ID NO: 538 - protein, 455 aa, Homo sapiens; identical to SEQ ID NO: 534
  Payload ID: 95;
  Gene Symbol: PFKFB3;
  Gene Name: 6-phosphofructo-2-kinase/fructose-2,6-biphosphatase 3;
  ENSP ID: ENSP00000436885

SEQ ID NO: 539 - protein, 534 aa, Homo sapiens
  Payload ID: 95;
  Gene Symbol: PFKFB3;
  Gene Name: 6-phosphofructo-2-kinase/fructose-2,6-biphosphatase 3;
  Uniprot ID:  Q16875;
  ENSP ID: ENSP00000443319
MGEGGQKEGDSQQAGALPLLCQLDTFSPKATVFGVSINPACGPKLTNSPTVIVMVGLPARGKTYISKKLTRYLNWIGVPTKVFNVGEYRREAVKQYSSYNFFRPDNEEAMKVRKQCALAALRDVKSYLAKEGGQIAVFDATNTTRERRHMILHFAKENDFKAFFIESVCDDPTVVASNIMEVKISSPDYKDCNSAEAMDDFMKRISCYEASYQPLDPDKCDRDLSLIKVIDVGRRFLVNRVQDHIQSRIVYYLMNIHVQPRTIYLCRHGENEHNLQGRIGGDSGLSSRGKKFASALSKFVEEQNLKDLRVWTSQLKSTIQTAEALRLPYEQWKALNEIDAGVCEELTYEEIRDTYPEEYALREQDKYYYRYPTGESYQDLVQRLEPVIMELERQENVLVICHQAVLRCLLAYFLDKSAEEMPYLKCPLHTVLKLTPVAYGCRVESIYLNVESVCTHRERSEDAKKGPNPLMRRNSVTPLASPEPTKKPRINSFEEHVASTSAALPSCLPPEVPTQLPGQNMKGSRSSADSSRKH

SEQ ID NO: 540 - protein, 455 aa, Homo sapiens; identical to SEQ ID NO: 534
  Payload ID: 95;
  Gene Symbol: PFKFB3;
  Gene Name: 6-phosphofructo-2-kinase/fructose-2,6-biphosphatase 3;
  ENSP ID: ENSP00000486311

SEQ ID NO: 541 - protein, 526 aa, Homo sapiens; identical to SEQ ID NO: 529
  Payload ID: 95;
  Gene Symbol: PFKFB3;
  Gene Name: 6-phosphofructo-2-kinase/fructose-2,6-biphosphatase 3;
  ENSP ID: ENSP00000487277

SEQ ID NO: 542 - protein, 469 aa, Homo sapiens
  Payload ID: 96;
  Gene Symbol: PFKFB4;
  Gene Name: 6-phosphofructo-2-kinase/fructose-2,6-biphosphatase 4;
  Uniprot ID:  Q16877;
  ENSP ID: ENSP00000232375
MASPRELTQNPLKKIWMPYSNGRPALHACQRGVCMTNCPTLIVMVGLPARGKTYISKKLTRYLNWIGVPTREFNVGQYRRDVVKTYKSFEFFLPDNEEGLKIRKQCALAALRDVRRFLSEEGGHVAVFDATNTTRERRATIFNFGEQNGYKTFFVESICVDPEVIAANIVQVKLGSPDYVNRDSDEATEDFMRRIECYENSYESLDEDLDRDLSYIKIMDVGQSYVVNRVADHIQSRIVYYLMNIHVTPRSIYLCRHGESELNLKGRIGGDPGLSPRGREFAKSLAQFISDQNIKDLKVWTSQMKRTIQTAEALGVPYEQWKVLNEIDAGVCEEMTYEEIQDNYPLEFALRDQDKYRYRYPKGESYEDLVQRLEPVIMELERQENVLVICHQAVMRCLLAYFLDKAAEQLPYLKCPLHTVLKLTPVAYGCKVESIFLNVAAVNTHRDRPQNVDISRPPEEALVTVPAHQ

SEQ ID NO: 543 - protein, 434 aa, Homo sapiens
  Payload ID: 96;
  Gene Symbol: PFKFB4;
  Gene Name: 6-phosphofructo-2-kinase/fructose-2,6-biphosphatase 4;
  Uniprot ID:  Q16877;
  ENSP ID: ENSP00000373240
MASPRELTQNPLKKIWMPYSNGRPALHACQRGVCMTNCPTLIVMVGLPARGKTYISKKLTRYLNWIGVPTREFNVGQYRRDVVKTYKSFEFFLPDNEEGLKIRKQCALAALRDVRRFLSEEGGHVAVFDATNTTRERRATIFNFGEQNGYKTFFVESICVDPEVIAANIVQVKLGSPDYVNRDSDEATEDFMRRIECYENSYESLDEDLDRDLSYIKIMDVGQSYVVNRVADHIQSRIVYYLMNIHVTPRSIYLCRHGESELNLKGRIGGDPGLSPRGREFAKSLAQFISDQNIKDLKVWTSQMKRTIQTAEALGVPYEQWKVLNEIDASYEDLVQRLEPVIMELERQENVLVICHQAVMRCLLAYFLDKAAEQLPYLKCPLHTVLKLTPVAYGCKVESIFLNVAAVNTHRDRPQNVDISRPPEEALVTVPAHQ

SEQ ID NO: 544 - protein, 462 aa, Homo sapiens
  Payload ID: 96;
  Gene Symbol: PFKFB4;
  Gene Name: 6-phosphofructo-2-kinase/fructose-2,6-biphosphatase 4;
  ENSP ID: ENSP00000388394
MASPRELTQNPLKKIWMPYSNGRPALHACQRGVCMTNCPTLIVMVGLPARGKTYISKKLTRYLNWIGVPTREFNVGQYRRDVVKTYKSFEFFLPDNEEGLKIRKQCALAALRDVRRFLSEEGGHVAVFDATNTTRERRATIFNFGEQNGYKTFFVESICVDPEVIAANIVQVKLGSPDYVNRDSDEATEDFMRRIECYENSYESLDEDLDRDLSYIKIMDVGQSYVVNRVADHIQSRIVYYLMNIHVTPRSIYLCRHGESELNLKGRIGGDPGLSPRGREFAKSLAQFISDQNIKDLKVWTSQMKRTIQTAEALGVPYEQWKGVCEEMTYEEIQDNYPLEFALRDQDKYRYRYPKGESYEDLVQRLEPVIMELERQENVLVICHQAVMRCLLAYFLDKAAEQLPYLKCPLHTVLKLTPVAYGCKVESIFLNVAAVNTHRDRPQNVDISRPPEEALVTVPAHQ

SEQ ID NO: 545 - protein, 38 aa, Homo sapiens
  Payload ID: 96;
  Gene Symbol: PFKFB4;
  Gene Name: 6-phosphofructo-2-kinase/fructose-2,6-biphosphatase 4;
  ENSP ID: ENSP00000389169
MASPRELTQNPLKKIWMPYSNGRPALHACQRGELSKVG

SEQ ID NO: 546 - protein, 175 aa, Homo sapiens
  Payload ID: 96;
  Gene Symbol: PFKFB4;
  Gene Name: 6-phosphofructo-2-kinase/fructose-2,6-biphosphatase 4;
  ENSP ID: ENSP00000393047
MTNCPTLIVMVGLPARGKTYISKKLTRYLNWIGVPTREFNVGQYRRDVVKTYKSFEFFLPDNEEGLKIRKQCALAALRDVRRFLSEEGGHVAVFDATNTTRERRATIFNFGEQNGYKTFFVESICVDPEVIAANIVQVKLGSPDYVNRDSDEATEDFMRRIECYENSYESLDEDL

SEQ ID NO: 547 - protein, 80 aa, Homo sapiens
  Payload ID: 96;
  Gene Symbol: PFKFB4;
  Gene Name: 6-phosphofructo-2-kinase/fructose-2,6-biphosphatase 4;
  ENSP ID: ENSP00000400772
MASPRELTQNPLKKIWMPYSNGRPALHACQRGGGLVFQQEEGCLLALKLSLGRNFSRDVLRIETEKYAVWACVCVPGHCA

SEQ ID NO: 548 - protein, 318 aa, Homo sapiens
  Payload ID: 96;
  Gene Symbol: PFKFB4;
  Gene Name: 6-phosphofructo-2-kinase/fructose-2,6-biphosphatase 4;
  ENSP ID: ENSP00000407657
MDRGSLGGSSLTDLGPGSSRRVCMTNCPTLIVMVGLPARGKTYISKKLTRYLNWIGVPTREFNVGQYRRDVVKTYKSFEFFLPDNEEGLKIRKQCALAALRDVRRFLSEEGGHVAVFDATNTTRERRATIFNFGEQNGYKTFFVESICVDPEVIAANIVQVKLGSPDYVNRDSDEATEDFMRRIECYENSYESLDEDLDRDLSYIKIMDVGQSYVVNRVADHIQSRIVYYLMNIHVTPRSIYLCRHGESELNLKGRIGGDPGLSPRGREFAKSLAQFISDQNIKDLKVWTSQMKRTIQTAEALGVPYEQWKVLNEIDA

SEQ ID NO: 549 - protein, 129 aa, Homo sapiens
  Payload ID: 96;
  Gene Symbol: PFKFB4;
  Gene Name: 6-phosphofructo-2-kinase/fructose-2,6-biphosphatase 4;
  ENSP ID: ENSP00000415764
MRARDSTGHPLMLREQTLGQHLHGEDTGEWEHTCEVCMTNCPTLIVMVGLPARGKTYISKKLTRYLNWIGVPTREFNVGQYRRDVVKTYKSFEFFLPDNEEGLKIRKQCALAALRDVRRFLSEEGGHVA

SEQ ID NO: 550 - protein, 258 aa, Homo sapiens
  Payload ID: 97;
  Gene Symbol: PGLS;
  Gene Name: 6-phosphogluconolactonase;
  Uniprot ID:  O95336;
  ENSP ID: ENSP00000252603
MAAPAPGLISVFSSSQELGAALAQLVAQRAACCLAGARARFALGLSGGSLVSMLARELPAAVAPAGPASLARWTLGFCDERLVPFDHAESTYGLYRTHLLSRLPIPESQVITINPELPVEEAAEDYAKKLRQAFQGDSIPVFDLLILGVGPDGHTCSLFPDHPLLQEREKIVAPISDSPKPPPQRVTLTLPVLNAARTVIFVATGEGKAAVLKRILEDQEENPLPAALVQPHTGKLCWFLDEAAARLLTVPFEKHSTL

SEQ ID NO: 551 - protein, 179 aa, Homo sapiens
  Payload ID: 97;
  Gene Symbol: PGLS;
  Gene Name: 6-phosphogluconolactonase;
  ENSP ID: ENSP00000471446
MAAPAPGLISVFSSSQELGAALAQLVAQRAACCLAGARARFALGLSGGSLVSMLARELPAAVAPAGPASLARWTLGFCDERLVPFDHAESTYGLYRTHLLSRLPIPESQVITINPELPVEEAAEDYAKKLRQELPQGSLADPFEESPLRGHSPALGSLKATRPLLPRHSKGTPSRFSTC

SEQ ID NO: 552 - protein, 147 aa, Homo sapiens
  Payload ID: 97;
  Gene Symbol: PGLS;
  Gene Name: 6-phosphogluconolactonase;
  ENSP ID: ENSP00000471951
AGPASLARWTLGFCDERLVPFDHAESTYGLYRTHLLSRLPIPESQVITINPELPVEEAAEDYAKKLRQAFQGDSIPVFDLLILGVGPDGHTCSLFPDHPLLQRILEDQEENPLPAALVQPHTGKLCWFLDEAAARLLTVPFEKHSTL

SEQ ID NO: 553 - protein, 216 aa, Homo sapiens
  Payload ID: 97;
  Gene Symbol: PGLS;
  Gene Name: 6-phosphogluconolactonase;
  ENSP ID: ENSP00000472345
MAAPAPGLISVFSSSQELGAALAQLVAQRAACCLAGARARFALGLSGGSLVSMLARELPAAVAPAGPASLARWTLGFCDERLVPFDHAESTYGLYRMEKLRPEETHLLSRLPIPESQVITINPELPVEEAAEDYAKKLRQAFQGDSIPVFDLLILGVGPDGHTCSLFPDHPLLQEREKIVAPISDSPKPPPQRVTLTLPVLNAARTVIFVATGEGK

SEQ ID NO: 554 - protein, 145 aa, Homo sapiens
  Payload ID: 98;
  Gene Symbol: PTS;
  Gene Name: 6-pyruvoyltetrahydropterin synthase;
  Uniprot ID:  Q03393;
  ENSP ID: ENSP00000280362
MSTEGGGRRCQAQVSRRISFSASHRLYSKFLSDEENLKLFGKCNNPNGHGHNYKVVVTVHGEIDPATGMVMNLADLKKYMEEAIMQPLDHKNLDMDVPYFADVVSTTENVAVYIWDNLQKVLPVGVLYKVKVYETDNNIVVYKGE

SEQ ID NO: 555 - protein, 61 aa, Homo sapiens
  Payload ID: 98;
  Gene Symbol: PTS;
  Gene Name: 6-pyruvoyltetrahydropterin synthase;
  ENSP ID: ENSP00000431750
MSTEGGGRRCQAQVSRRISFSASHRLYSKFLSDEENLKLFGKCNNPNGHGHNYKGGDYAAP

SEQ ID NO: 556 - protein, 55 aa, Homo sapiens
  Payload ID: 98;
  Gene Symbol: PTS;
  Gene Name: 6-pyruvoyltetrahydropterin synthase;
  ENSP ID: ENSP00000433469
MSTEGGGRRCQAQVSRRISFSASHRLYSKFLSDEENLKLFGKCNNPNGHGHNYKD

SEQ ID NO: 557 - protein, 77 aa, Homo sapiens
  Payload ID: 98;
  Gene Symbol: PTS;
  Gene Name: 6-pyruvoyltetrahydropterin synthase;
  ENSP ID: ENSP00000434688
MVMNLADLKKYMEEAIMQPLDHKNLDMDVPYFADVVSTTENVAVYIWDNLQKVLPVGVLYKVKVYETDNNIVVYKGE

SEQ ID NO: 558 - protein, 55 aa, Homo sapiens; identical to SEQ ID NO: 556
  Payload ID: 98;
  Gene Symbol: PTS;
  Gene Name: 6-pyruvoyltetrahydropterin synthase;
  ENSP ID: ENSP00000435895

SEQ ID NO: 559 - protein, 475 aa, Homo sapiens
  Payload ID: 99;
  Gene Symbol: DHCR7;
  Gene Name: 7-dehydrocholesterol reductase;
  Uniprot ID:  Q9UBM7;
  ENSP ID: ENSP00000347717
MAAKSQPNIPKAKSLDGVTNDRTASQGQWGRAWEVDWFSLASVIFLLLFAPFIVYYFIMACDQYSCALTGPVVDIVTGHARLSDIWAKTPPITRKAAQLYTLWVTFQVLLYTSLPDFCHKFLPGYVGGIQEGAVTPAGVVNKYQINGLQAWLLTHLLWFANAHLLSWFSPTIIFDNWIPLLWCANILGYAVSTFAMVKGYFFPTSARDCKFTGNFFYNYMMGIEFNPRIGKWFDFKLFFNGRPGIVAWTLINLSFAAKQRELHSHVTNAMVLVNVLQAIYVIDFFWNETWYLKTIDICHDHFGWYLGWGDCVWLPYLYTLQGLYLVYHPVQLSTPHAVGVLLLGLVGYYIFRVANHQKDLFRRTDGRCLIWGRKPKVIECSYTSADGQRHHSKLLVSGFWGVARHFNYVGDLMGSLAYCLACGGGHLLPYFYIIYMAILLTHRCLRDEHRCASKYGRDWERYTAAVPYRLLPGIF

SEQ ID NO: 560 - protein, 475 aa, Homo sapiens; identical to SEQ ID NO: 559
  Payload ID: 99;
  Gene Symbol: DHCR7;
  Gene Name: 7-dehydrocholesterol reductase;
  Uniprot ID:  Q9UBM7;
  ENSP ID: ENSP00000384739

SEQ ID NO: 561 - protein, 116 aa, Homo sapiens
  Payload ID: 99;
  Gene Symbol: DHCR7;
  Gene Name: 7-dehydrocholesterol reductase;
  ENSP ID: ENSP00000432256
  MOD_RES (1)..(1): Any amino acid
XFYNYMMGIEFNPRIGKWFDFKLFFNGRPGIVAWTLINLSFAAKQRELHSHVTNAMVLVNVLQAIYVIDFFWNETWYLKTIDICHDHFGWYLGWGDCVWLPYLYTLQMRNAAVEAE

SEQ ID NO: 562 - protein, 105 aa, Homo sapiens
  Payload ID: 99;
  Gene Symbol: DHCR7;
  Gene Name: 7-dehydrocholesterol reductase;
  ENSP ID: ENSP00000432589
MAAKSQPNIPKAKSLDGVTNDRTASQGQWGRAWEVDWFSLASVIFLLLFAPFIVYYFIMACDQYSCALTGPVVDIVTGHARLSDIWAKTPPITRKAAQLYTLWVT

SEQ ID NO: 563 - protein, 221 aa, Homo sapiens
  Payload ID: 99;
  Gene Symbol: DHCR7;
  Gene Name: 7-dehydrocholesterol reductase;
  ENSP ID: ENSP00000435011
INLSFAAKQRELHSHVTNAMVLVNVLQAIYVIDFFWNETWYLKTIDICHDHFGWYLGWGDCVWLPYLYTLQGLYLVYHPVQLSTPHAVGVLLLGLVGYYIFRVANHQKDLFRRTDGRCLIWGRKPKVIECSYTSADGQRHHSKLLVSGFWGVARHFNYVGDLMGSLAYCLACGGGHLLPYFYIIYMAILLTHRCLRDEHRCASKEFRVSSTAVLPAQTDFL

SEQ ID NO: 564 - protein, 258 aa, Homo sapiens
  Payload ID: 99;
  Gene Symbol: DHCR7;
  Gene Name: 7-dehydrocholesterol reductase;
  ENSP ID: ENSP00000435047
MAAKSQPNIPKAKSLDGVTNDRTASQGQWGRACCALTGPVVDIVTGHARLSDIWAKTPPITRKAAQLYTLWVTFQVLLYTSLPDFCHKFLPGYVGGIQEGAVTPAGVVNKYQINGLQAWLLTHLLWFANAHLLSWFSPTIIFDNWIPLLWCANILGYAVSTFAMVKGYFFPTSARDCKFTGNFFYNYMMGIEFNPRIGKWFDFKLFFNGRPGIVAWTLINLSFAAKQRELHSHVTNAMVLVNVLQAIYVIDFFWNETW

SEQ ID NO: 565 - protein, 73 aa, Homo sapiens
  Payload ID: 99;
  Gene Symbol: DHCR7;
  Gene Name: 7-dehydrocholesterol reductase;
  ENSP ID: ENSP00000435058
MGPSVTACIRPRREVDWFSLASVIFLLLFAPFIVYYFIMACDQYSCALTGPVVDIVTGHARLSDIWAKTPPIT

SEQ ID NO: 566 - protein, 164 aa, Homo sapiens
  Payload ID: 99;
  Gene Symbol: DHCR7;
  Gene Name: 7-dehydrocholesterol reductase;
  ENSP ID: ENSP00000435668
MAAKSQPNIPKAKSLDGVTNDRTASQGQWGRAWEVDWFSLASVIFLLLFAPFIVYYFIMACDQYSCALTGPVVDIVTGHARLSDIWAKTPPITRKAAQLYTLWVTFQVLLYTSLPDFCHKFLPGYVGGIQEGAVTPAGVVNKYQINGLQAWLLTHLLWFANAHL

SEQ ID NO: 567 - protein, 107 aa, Homo sapiens
  Payload ID: 99;
  Gene Symbol: DHCR7;
  Gene Name: 7-dehydrocholesterol reductase;
  ENSP ID: ENSP00000435707
MAAKSQPNIPKAKSLDGVTNDRTASQGQWGRAWEVDWFSLASVIFLLLFAPFIVYYFIMACDQYSCALTGPVVDIVTGHARLSDIWAKTPPITRKAAQLYTLWVTFQ

SEQ ID NO: 568 - protein, 245 aa, Homo sapiens
  Payload ID: 99;
  Gene Symbol: DHCR7;
  Gene Name: 7-dehydrocholesterol reductase;
  ENSP ID: ENSP00000435956
TGNFFYNYMMGIEFNPRIGKWFDFKLFFNGRPGIVAWTLINLSFAAKQRELHSHVTNAMVLVNVLQAIYVIDFFWNETWYLKTIDICHDHFGWYLGWGDCVWLPYLYTLQKRTRRQGVCQRQSWGLTPGRWAPEPTLLSSPWAKHRLTPSPSPPRVCTWCTTPCSCPPRTPWASCCWAWWATTSSGWPTTRRTCSAARMGAASSGAGSPRSSSAPTHPPMGRGTTASCWCRASGAWPATSTTSAT

SEQ ID NO: 569 - protein, 91 aa, Homo sapiens
  Payload ID: 99;
  Gene Symbol: DHCR7;
  Gene Name: 7-dehydrocholesterol reductase;
  ENSP ID: ENSP00000436007
MAAKSQPNIPKAKSLDGVTNDRTASQGQWGRAWEVDWFSLASVIFLLLFAPFIVYYFIMACDQYSCALTGPVVDIVTGHARLSDIWAKTPP

SEQ ID NO: 570 - protein, 357 aa, Homo sapiens
  Payload ID: 100;
  Gene Symbol: OGG1;
  Gene Name: 8-oxoguanine DNA glycosylase;
  Uniprot ID:  O15527;
  ENSP ID: ENSP00000303132
MPARALLPRRMGHRTLASTPALWASIPCPRSELRLDLVLPSGQSFRWREQSPAHWSGVLADQVWTLTQTEEQLHCTVYRGDKSQASRPTPDELEAVRKYFQLDVTLAQLYHHWGSVDSHFQEVAQKFQGVRLLRQDPIECLFSFICSSNNNIARITGMVERLCQAFGPRLIQLDDVTYHGFPSLQALAGPEVEAHLRKLGLGYRARYVSASARAILEEQGGLAWLQQLRESSYEEAHKALCILPGVGTKGLLGNAFDGHQLLRPLIFCQDHLREGPPIGRGDSQGEELEPQLPSSLSSIPYGFCDHCWTKDVDDPPLVTHPSPGSRDGHMTQAWPVKVVSPLATVIGHVMQASLLAL

SEQ ID NO: 571 - protein, 356 aa, Homo sapiens
  Payload ID: 100;
  Gene Symbol: OGG1;
  Gene Name: 8-oxoguanine DNA glycosylase;
  Uniprot ID:  O15527;
  ENSP ID: ENSP00000305527
MPARALLPRRMGHRTLASTPALWASIPCPRSELRLDLVLPSGQSFRWREQSPAHWSGVLADQVWTLTQTEEQLHCTVYRGDKSQASRPTPDELEAVRKYFQLDVTLAQLYHHWGSVDSHFQEVAQKFQGVRLLRQDPIECLFSFICSSNNNIARITGMVERLCQAFGPRLIQLDDVTYHGFPSLQALAGPEVEAHLRKLGLGYRARYVSASARAILEEQGGLAWLQQLRESSYEEAHKALCILPGVGTKVADCICLMALDKPQAVPVDVHMWHIAQRDYSWHPTTSQAKGPSPQTNKELGNFFRSLWGPYAGWAQALCQVITTFMTFLGPHRLDQMPPEELQTSSSRLGGPPWQCI

SEQ ID NO: 572 - protein, 410 aa, Homo sapiens
  Payload ID: 100;
  Gene Symbol: OGG1;
  Gene Name: 8-oxoguanine DNA glycosylase;
  Uniprot ID:  O15527;
  ENSP ID: ENSP00000305584
MPARALLPRRMGHRTLASTPALWASIPCPRSELRLDLVLPSGQSFRWREQSPAHWSGVLADQVWTLTQTEEQLHCTVYRGDKSQASRPTPDELEAVRKYFQLDVTLAQLYHHWGSVDSHFQEVAQKFQGVRLLRQDPIECLFSFICSSNNNIARITGMVERLCQAFGPRLIQLDDVTYHGFPSLQALAGPEVEAHLRKLGLGYRARYVSASARAILEEQGGLAWLQQLRESSYEEAHKALCILPGVGTKVADCICLMALDKPQAVPVDVHMWHIAQRDYSWHPTTSQAKGPSPQTNKELGNFFRSLWGPYAGWAQATPPSYRCCSVPTCANPAMLRSHQQSAERVPKGRKARWGTLDKEIPQAPSPPFPTSLSPSPPSLMLGRGLPVTTSKARHPQIKQSVCTTRWGGGY

SEQ ID NO: 573 - protein, 424 aa, Homo sapiens
  Payload ID: 100;
  Gene Symbol: OGG1;
  Gene Name: 8-oxoguanine DNA glycosylase;
  Uniprot ID:  O15527;
  ENSP ID: ENSP00000306561
MPARALLPRRMGHRTLASTPALWASIPCPRSELRLDLVLPSGQSFRWREQSPAHWSGVLADQVWTLTQTEEQLHCTVYRGDKSQASRPTPDELEAVRKYFQLDVTLAQLYHHWGSVDSHFQEVAQKFQGVRLLRQDPIECLFSFICSSNNNIARITGMVERLCQAFGPRLIQLDDVTYHGFPSLQALAGPEVEAHLRKLGLGYRARYVSASARAILEEQGGLAWLQQLRESSYEEAHKALCILPGVGTKVADCICLMALDKPQAVPVDVHMWHIAQRDYSWHPTTSQAKGPSPQTNKELGNFFRSLWGPYAGWAQAGLLGNAFDGHQLLRPLIFCQDHLREGPPIGRGDSQGEELEPQLPSSLSSIPYGFCDHCWTKDVDDPPLVTHPSPGSRDGHMTQAWPVKVVSPLATVIGHVMQASLLAL

SEQ ID NO: 574 - protein, 345 aa, Homo sapiens
  Payload ID: 100;
  Gene Symbol: OGG1;
  Gene Name: 8-oxoguanine DNA glycosylase;
  Uniprot ID:  O15527;
  ENSP ID: ENSP00000342851
MPARALLPRRMGHRTLASTPALWASIPCPRSELRLDLVLPSGQSFRWREQSPAHWSGVLADQVWTLTQTEEQLHCTVYRGDKSQASRPTPDELEAVRKYFQLDVTLAQLYHHWGSVDSHFQEVAQKFQGVRLLRQDPIECLFSFICSSNNNIARITGMVERLCQAFGPRLIQLDDVTYHGFPSLQALAGPEVEAHLRKLGLGYRARYVSASARAILEEQGGLAWLQQLRESSYEEAHKALCILPGVGTKVADCICLMALDKPQAVPVDVHMWHIAQRDYSWHPTTSQAKGPSPQTNKELGNFFRSLWGPYAGWAQAVLFSADLRQSRHAQEPPAKRRKGSKGPEG

SEQ ID NO: 575 - protein, 263 aa, Homo sapiens
  Payload ID: 100;
  Gene Symbol: OGG1;
  Gene Name: 8-oxoguanine DNA glycosylase;
  ENSP ID: ENSP00000344899
  MOD_RES (1)..(1): Any amino acid
XVRKYFQLDVTLAQLYHHWGSVDSHFQEVAQKFQGVRLLRQDPIECLFSFICSSNNNIARITGMVERLCQAFGPRLIQLDDVTYHGFPSLQALAGPEVEAHLRKLGLGYRARYVSASARAILEEQGGLAWLQQLRESSYEEAHKALCILPGVGTKGLLGNAFDGHQLLRPLIFCQDHLREGPPIGRGDSQGEELEPQLPSSLSSIPYGFCDHCWTKDVDDPPLVTHPSPGSRDGHMTQAWPVKVVSPLATVIGHVMQASLLAL

SEQ ID NO: 576 - protein, 324 aa, Homo sapiens
  Payload ID: 100;
  Gene Symbol: OGG1;
  Gene Name: 8-oxoguanine DNA glycosylase;
  Uniprot ID:  O15527;
  ENSP ID: ENSP00000345520
MPARALLPRRMGHRTLASTPALWASIPCPRSELRLDLVLPSGQSFRWREQSPAHWSGVLADQVWTLTQTEEQLHCTVYRGDKSQASRPTPDELEAVRKYFQLDVTLAQLYHHWGSVDSHFQEVAQKFQGVRLLRQDPIECLFSFICSSNNNIARITGMVERLCQAFGPRLIQLDDVTYHGFPSLQALAGPEVEAHLRKLGLGYRARYVSASARAILEEQGGLAWLQQLRESSYEEAHKALCILPGVGTKVADCICLMALDKPQAVPVDVHMWHIAQRDYSWHPTTSQAKGPSPQTNKELGNFFRSLWGPYAGWAQAVSVPRCPP

SEQ ID NO: 577 - protein, 195 aa, Homo sapiens
  Payload ID: 100;
  Gene Symbol: OGG1;
  Gene Name: 8-oxoguanine DNA glycosylase;
  Uniprot ID:  O15527;
  ENSP ID: ENSP00000373337
MPARALLPRRMGHRTLASTPALWASIPCPRSELRLDLVLPSGQSFRWREQSPAHWSGVLADQVWTLTQTEEQLHCTVYRGDKSQASRPTPDELEAVRKYFQLDVTLAQLYHHWGSVDSHFQEVAQKFQGVRLLRQDPIECLFSFICSSNNNIARITGMVERLCQAFGPRLIQLDDVTYHGFPSLQALAGPPWQCI

SEQ ID NO: 578 - protein, 222 aa, Homo sapiens
  Payload ID: 100;
  Gene Symbol: OGG1;
  Gene Name: 8-oxoguanine DNA glycosylase;
  ENSP ID: ENSP00000390337
  MOD_RES (1)..(1): Any amino acid
XPCGPPSRALALSCAWTWFCLLDNLSGVRLLRQDPIECLFSFICSSNNNIARITGMVERLCQAFGPRLIQLDDVTYHGFPSLQALAGPEVEAHLRKLGLGYRARYVSASARAILEEQGGLAWLQQLRESSYEEAHKALCILPGVGTKVADCICLMALDKPQAVPVDVHMWHIAQRDYSWHPTTSQAKGPSPQTNKELGNFFRSLWGPYAGWAQAVSVPRCPP

SEQ ID NO: 579 - protein, 168 aa, Homo sapiens
  Payload ID: 100;
  Gene Symbol: OGG1;
  Gene Name: 8-oxoguanine DNA glycosylase;
  ENSP ID: ENSP00000393726
  MOD_RES (1)..(1): Any amino acid
XASIPCPRSELRLDLVLPSGQSFRWREQSPAHWSGVLADQVWTLTQTEEQLHCTVYRGDKSQASRPTPDELEAVRKYFQLDVTLAQLYHHWGSVDSHFQEVAQKFQGVRLLRQDPIECLFSFICSSNNNIARITGMVERLCQAFGPRLIQLDDVTYHGFPSLQALAGG

SEQ ID NO: 580 - protein, 52 aa, Homo sapiens
  Payload ID: 100;
  Gene Symbol: OGG1;
  Gene Name: 8-oxoguanine DNA glycosylase;
  ENSP ID: ENSP00000396034
MPARALLPRRMGHRTLASTPALWASIPCPRSELRLDLVLPSGQSFRWLTASA

SEQ ID NO: 581 - protein, 128 aa, Homo sapiens
  Payload ID: 100;
  Gene Symbol: OGG1;
  Gene Name: 8-oxoguanine DNA glycosylase;
  ENSP ID: ENSP00000399810
  MOD_RES (1)..(1): Any amino acid
XELEAVRKYFQLDVTLAQLYHHWGSVDSHFQEVAQKFQGVRLLRQDPIECLFSFICSSNNNIARITGMVERLCQAFGPRLIQLDDVTYHGFPSLQALAGVPVPAEGLLTSASAFQSPLRSRQPEADRR

SEQ ID NO: 582 - protein, 132 aa, Homo sapiens
  Payload ID: 100;
  Gene Symbol: OGG1;
  Gene Name: 8-oxoguanine DNA glycosylase;
  ENSP ID: ENSP00000402713
  MOD_RES (1)..(1): Any amino acid
XMMSPTMASPACRPWLVADCICLMALDKPQAVPVDVHMWHIAQRDYSWHPTTSQAKGPSPQTNKELGNFFRSLWGPYAGWAQATPPSYRCCSVPTCANPAMLRSHQQSAERVPKGRKARWGTLDKEIPQAPS

SEQ ID NO: 583 - protein, 322 aa, Homo sapiens
  Payload ID: 100;
  Gene Symbol: OGG1;
  Gene Name: 8-oxoguanine DNA glycosylase;
  Uniprot ID:  O15527;
  ENSP ID: ENSP00000403598
MPARALLPRRMGHRTLASTPALWASIPCPRSELRLDLVLPSGQSFRWREQSPAHWSGVLADQVWTLTQTEEQLHCTVYRGDKSQASRPTPDELEAVRKYFQLDVTLAQLYHHWGSVDSHFQEVAQKFQGVRLLRQDPIECLFSFICSSNNNIARITGMVERLCQAFGPRLIQLDDVTYHGFPSLQALAGPEVEAHLRKLGLGYRARYVSASARAILEEQGGLAWLQQLRESSYEEAHKALCILPGVGTKVADCICLMALDKPQAVPVDVHMWHIAQRDYSWHPTTSQAKGPSPQTNKELGNFFRSLWGPYAGWAQAAGSDAS

SEQ ID NO: 584 - protein, 593 aa, Homo sapiens
  Payload ID: 101;
  Gene Symbol: AKAP1;
  Gene Name: A kinase (PRKA) anchor prt 1;
  Uniprot ID:  Q92667;
  ENSP ID: ENSP00000314075
MAIQFRSLFPLALPGMLALLGWWWFFSRKKGHVSSHDEQQVEAGAVQLRADPAIKEPLPVEDVCPKVVSTPPSVTEPPEKELSTVSKLPAEPPALLQTHPPCRRSESSGILPNTTDMRLRPGTRRDDSTKLELALTGGEAKSIPLECPLSSPKGVLFSSKSAEVCKQDSPFSRVPRKVQPGYPVVPAEKRSSGERARETGGAEGTGDAVLGEKVLEEALLSREHVLELENSKGPSLASLEGEEDKGKSSSSQVVGPVQEEEYVAEKLPSRFIESAHTELAKDDAAPAPPVADAKAQDRGVEGELGNEESLDRNEEGLDRNEEGLDRNEESLDRNEEGLDRNEEIKRAAFQIISQVISEATEQVLATTVGKVAGRVCQASQLQGQKEESCVPVHQKTVLGPDTAEPATAEAAVAPPDAGLPLPGLPAEGSPPPKTYVSCLKSLLSSPTKDSKPNISAHHISLASCLALTTPSEELPDRAGILVEDATCVTCMSDSSQSVPLVASPGHCSDSFSTSGLEDSCTETSSSPRDKAITPPLPESTVPFSNGVLKGELSDLGAEDGWTMDAEADHSGVAAPPPGKRGTLITRCPGFFEC

SEQ ID NO: 585 - protein, 903 aa, Homo sapiens
  Payload ID: 101;
  Gene Symbol: AKAP1;
  Gene Name: A kinase (PRKA) anchor prt 1;
  Uniprot ID:  Q92667;
  ENSP ID: ENSP00000337736
MAIQFRSLFPLALPGMLALLGWWWFFSRKKGHVSSHDEQQVEAGAVQLRADPAIKEPLPVEDVCPKVVSTPPSVTEPPEKELSTVSKLPAEPPALLQTHPPCRRSESSGILPNTTDMRLRPGTRRDDSTKLELALTGGEAKSIPLECPLSSPKGVLFSSKSAEVCKQDSPFSRVPRKVQPGYPVVPAEKRSSGERARETGGAEGTGDAVLGEKVLEEALLSREHVLELENSKGPSLASLEGEEDKGKSSSSQVVGPVQEEEYVAEKLPSRFIESAHTELAKDDAAPAPPVADAKAQDRGVEGELGNEESLDRNEEGLDRNEEGLDRNEESLDRNEEGLDRNEEIKRAAFQIISQVISEATEQVLATTVGKVAGRVCQASQLQGQKEESCVPVHQKTVLGPDTAEPATAEAAVAPPDAGLPLPGLPAEGSPPPKTYVSCLKSLLSSPTKDSKPNISAHHISLASCLALTTPSEELPDRAGILVEDATCVTCMSDSSQSVPLVASPGHCSDSFSTSGLEDSCTETSSSPRDKAITPPLPESTVPFSNGVLKGELSDLGAEDGWTMDAEADHSGGSDRNSMDSVDSCCSLKKTESFQNAQAGSNPKKVDLIIWEIEVPKHLVGRLIGKQGRYVSFLKQTSGAKIYISTLPYTQSVQICHIEGSQHHVDKALNLIGKKFKELNLTNIYAPPLPSLALPSLPMTSWLMLPDGITVEVIVVNQVNAGHLFVQQHTHPTFHALRSLDQQMYLCYSQPGIPTLPTPVEITVICAAPGADGAWWRAQVVASYEETNEVEIRYVDYGGYKRVKVDVLRQIRSDFVTLPFQGAEVLLDSVMPLSDDDQFSPEADAAMSEMTGNTALLAQVTSYSPTGLPLIQLWSVVGDEVVLINRSLVERGLAQWVDSYYTSL

SEQ ID NO: 586 - protein, 593 aa, Homo sapiens; identical to SEQ ID NO: 584
  Payload ID: 101;
  Gene Symbol: AKAP1;
  Gene Name: A kinase (PRKA) anchor prt 1;
  Uniprot ID:  Q92667;
  ENSP ID: ENSP00000433212

SEQ ID NO: 587 - protein, 903 aa, Homo sapiens; identical to SEQ ID NO: 585
  Payload ID: 101;
  Gene Symbol: AKAP1;
  Gene Name: A kinase (PRKA) anchor prt 1;
  Uniprot ID:  Q92667;
  ENSP ID: ENSP00000443139

SEQ ID NO: 588 - protein, 137 aa, Homo sapiens
  Payload ID: 101;
  Gene Symbol: AKAP1;
  Gene Name: A kinase (PRKA) anchor prt 1;
  ENSP ID: ENSP00000458164
MAIQFRSLFPLALPGMLALLGWWWFFSRKKGHVSSHDEQQVEAGAVQLRADPAIKEPLPVEDVCPKVVSTPPSVTEPPEKELSTVSKLPAEPPALLQTHPPCRRSESSGILPNTTDMRLRPGTRRDDSTKLELALTG

SEQ ID NO: 589 - protein, 139 aa, Homo sapiens
  Payload ID: 101;
  Gene Symbol: AKAP1;
  Gene Name: A kinase (PRKA) anchor prt 1;
  ENSP ID: ENSP00000458370
  MOD_RES (1)..(1): Any amino acid
XGADGAWWRAQVVASYEETNEVEIRYVDYGGYKRVKVDVLRQIRSDFVTLPFQGAEVLLDSVMPLSDDDQFSPEADAAMSEMTGNTALLAQVTSYSPTGLPLIQLWSVVGDEVVLINRSLVERGLAQLASALCSLKISK

SEQ ID NO: 590 - protein, 204 aa, Homo sapiens
  Payload ID: 101;
  Gene Symbol: AKAP1;
  Gene Name: A kinase (PRKA) anchor prt 1;
  ENSP ID: ENSP00000458378
AEKRSSGERARETGGAEGTGDAVLGEKVLEEALLSREHVLELENSKGPSLASLEGEEDKGKSSSSQVVGPVQEEEYVAEKLPSRFIESAHTELAKDDAAPAPPVADAKAQDRGVEGELGNEESLDRNEEDLGAEDGWTMDAEADHSGGSDRNSMDSVDSCCSLKKTESFQNAQAGSNPKKVDLIIWEIEVPKHLVGRLIGKQGR

SEQ ID NO: 591 - protein, 7 aa, Homo sapiens
  Payload ID: 101;
  Gene Symbol: AKAP1;
  Gene Name: A kinase (PRKA) anchor prt 1;
  ENSP ID: ENSP00000458982
MAIQFRS

SEQ ID NO: 592 - protein, 182 aa, Homo sapiens
  Payload ID: 101;
  Gene Symbol: AKAP1;
  Gene Name: A kinase (PRKA) anchor prt 1;
  ENSP ID: ENSP00000459521
MAIQFRSLFPLALPGMLALLGWWWFFSRKKGHVSSHDEQQVEAGAVQLRADPAIKEPLPVEDVCPKVVSTPPSVTEPPEKELSTVSKLPAEPPALLQTHPPCRRSESSGILPNTTDMRLRPGTRRDDSTKLELALTGGEAKSIPLECPLSSPKGVLFSSKSAEVCKQDSPFSRVPRKVQPGY

SEQ ID NO: 593 - protein, 186 aa, Homo sapiens
  Payload ID: 101;
  Gene Symbol: AKAP1;
  Gene Name: A kinase (PRKA) anchor prt 1;
  ENSP ID: ENSP00000459808
MAIQFRSLFPLALPGMLALLGWWWFFSRKKGHVSSHDEQQVEAGAVQLRADPAIKEPLPVEDVCPKVVSTPPSVTEPPEKELSTVSKLPAEPPALLQTHPPCRRSESSGILPNTTDMRLRPGTRRDDSTKLELALTGGEAKSIPLECPLSSPKGVLFSSKSAEVCKQDSPFSRVPRKVQPGYPVVP

SEQ ID NO: 594 - protein, 903 aa, Homo sapiens; identical to SEQ ID NO: 585
  Payload ID: 101;
  Gene Symbol: AKAP1;
  Gene Name: A kinase (PRKA) anchor prt 1;
  Uniprot ID:  Q92667;
  ENSP ID: ENSP00000459895

SEQ ID NO: 595 - protein, 903 aa, Homo sapiens; identical to SEQ ID NO: 585
  Payload ID: 101;
  Gene Symbol: AKAP1;
  Gene Name: A kinase (PRKA) anchor prt 1;
  Uniprot ID:  Q92667;
  ENSP ID: ENSP00000459968

SEQ ID NO: 596 - protein, 95 aa, Homo sapiens
  Payload ID: 101;
  Gene Symbol: AKAP1;
  Gene Name: A kinase (PRKA) anchor prt 1;
  ENSP ID: ENSP00000460209
MAIQFRSLFPLALPGMLALLGWWWFFSRKKGHVSSHDEQQVEAGAVQLRADPAIKEPLPVEDVCPKVVSTPPSVTEPPEKELSTVSKLPAEPPAL

SEQ ID NO: 597 - protein, 83 aa, Homo sapiens
  Payload ID: 101;
  Gene Symbol: AKAP1;
  Gene Name: A kinase (PRKA) anchor prt 1;
  ENSP ID: ENSP00000460514
MAIQFRSLFPLALPGMLALLGWWWFFSRKKGHVSSHDEQQVEAGAVQLRADPAIKEPLPVEDVCPKVVSTPPSVTEPPEKELS

SEQ ID NO: 598 - protein, 47 aa, Homo sapiens
  Payload ID: 101;
  Gene Symbol: AKAP1;
  Gene Name: A kinase (PRKA) anchor prt 1;
  ENSP ID: ENSP00000460557
MAIQFRSLFPLALPGMLALLGWWWFFSRKKGHVSSHDEQQVEAGAVQ

SEQ ID NO: 599 - protein, 179 aa, Homo sapiens
  Payload ID: 101;
  Gene Symbol: AKAP1;
  Gene Name: A kinase (PRKA) anchor prt 1;
  ENSP ID: ENSP00000460762
VIVVNQVNAGHLFVQQHTHPTFHALRSLDQQMYLCYSQPGIPTLPTPVEITVICAAPGADGAWWRAQVVASYEETNEVEIRYVDYGGYKRVKVDVLRQIRSDFVTLPFQGAEVLLDSVMPLSDDDQFSPEADAAMSEMTGNTALLAQVTSYSPTGLPLIQLWSVVGDETGFSIVQFKNK

SEQ ID NO: 600 - protein, 7 aa, Homo sapiens
  Payload ID: 101;
  Gene Symbol: AKAP1;
  Gene Name: A kinase (PRKA) anchor prt 1;
  ENSP ID: ENSP00000461418
MAIQFRS

SEQ ID NO: 601 - protein, 360 aa, Homo sapiens
  Payload ID: 101;
  Gene Symbol: AKAP1;
  Gene Name: A kinase (PRKA) anchor prt 1;
  ENSP ID: ENSP00000461854
LPLPGLPAEGSPPPKTYVSCLKSLLSSPTKDSKPNISAHHISLASCLALTTPSEELPDRAGILVEDATCVTCMSDSSQSVPLVASPGHCSDSFSTSGLEDSCTETSSSPRDKAITPPLPESTVPFSNGVLKGELSDLGAEDGWTMDAEADHSGGSDRNSMDSVDSCCSLKKTESFQNAQAGSNPKKVDLIIWEIEVPKHLVGRLIGKQGRYVSFLKQTSGAKIYISTLPYTQSVQICHIEGSQHHVDKALNLIGKKFKELNLTNIYAPPLPSLALPSLPMTSWLMLPDGITVEVIVVNQVNAGHLFVQQHTHPTFHALRSLDQQMYLCYSQPGIPTLPTPVESLTLSPCRFREQKSFWTV

SEQ ID NO: 602 - protein, 903 aa, Homo sapiens; identical to SEQ ID NO: 585
  Payload ID: 101;
  Gene Symbol: AKAP1;
  Gene Name: A kinase (PRKA) anchor prt 1;
  Uniprot ID:  Q92667;
  ENSP ID: ENSP00000478212

SEQ ID NO: 603 - protein, 662 aa, Homo sapiens
  Payload ID: 102;
  Gene Symbol: AKAP10;
  Gene Name: A kinase (PRKA) anchor prt 10;
  Uniprot ID:  O43572;
  ENSP ID: ENSP00000225737
MRGAGPSPRQSPRTLRPDPGPAMSFFRRKVKGKEQEKTSDVKSIKASISVHSPQKSTKNHALLEAAGPSHVAINAISANMDSFSSSRTATLKKQPSHMEAAHFGDLGRSCLDYQTQETKSSLSKTLEQVLHDTIVLPYFIQFMELRRMEHLVKFWLEAESFHSTTWSRIRAHSLNTVKQSSLAEPVSPSKKHETTASFLTDSLDKRLEDSGSAQLFMTHSEGIDLNNRTNSTQNHLLLSQECDSAHSLRLEMARAGTHQVSMETQESSSTLTVASRNSPASPLKELSGKLMKSIEQDAVNTFTKYISPDAAKPIPITEAMRNDIIARICGEDGQVDPNCFVLAQSIVFSAMEQEHFSEFLRSHHFCKYQIEVLTSGTVYLADILFCESALFYFSEYMEKEDAVNILQFWLAADNFQSQLAAKKGQYDGQEAQNDAMILYDKYFSLQATHPLGFDDVVRLEIESNICREGGPLPNCFTTPLRQAWTTMEKVFLPGFLSSNLYYKYLNDLIHSVRGDEFLGGNVSLTAPGSVGPPDESHPGSSDSSASQSSVKKASIKILKNFDEAIIVDAASLDPESLYQRTYAGKMTFGRVSDLGQFIRESEPEPDVRKSKGSMFSQAMKKWVQGNTDEAQEELAWKIAKMIVSDIMQQAQYDQPLEKSTKL

SEQ ID NO: 604 - protein, 604 aa, Homo sapiens
  Payload ID: 102;
  Gene Symbol: AKAP10;
  Gene Name: A kinase (PRKA) anchor prt 10;
  ENSP ID: ENSP00000378907
MRGAGPSPRQSPRTLRPDPGPAMSFFRRKVKGKEQEKTSDVKSIKASISVHSPQKSTKNHALLEAAGPSHVAINAISANMDSFSSSRTATLKKQPSHMEAAHFGDLGRSCLDYQTQETKSSLSKTLEQVLHDTIVLPYFIQFMELRRMEHLVKFWLEAESFHSTTWSRIRAHSLNTVKQSSLAEPVSPSKKHETTASFLTDSLDKRLEDSGSAQLFMTHSEGIDLNNRTNSTQNHLLLSQECDSAHSLRLEMARAGTHQVSMETQESSSTLTVASRNSPASPLKELSGKLMKSIEQDAVNTFTKYISPDAAKPIPITEAMRNDIIARICGEDGQVDPNCFVLAQSIVFSAMEQEHFSEFLRSHHFCKYQIEVLTSGTVYLADILFCESALFYFSEYMEKEDAVNILQFWLAADNFQSQLAAKKGQYDGQEAQNDAMILYDKYFSLQATHPLGFDDVVRLEIESNICREGGPLPNCFTTPLRQAWTTMEKSSVKKASIKILKNFDEAIIVDAASLDPESLYQRTYAGKMTFGRVSDLGQFIRESEPEPDVRKSKGSMFSQAMKKWVQGNTDEAQEELAWKIAKMIVSDIMQQAQYDQPLEKSTKL

SEQ ID NO: 605 - protein, 138 aa, Homo sapiens
  Payload ID: 102;
  Gene Symbol: AKAP10;
  Gene Name: A kinase (PRKA) anchor prt 10;
  ENSP ID: ENSP00000458637
MRGAGPSPRQSPRTLRPDPGPAMSFFRRKVKGKEQEKTSDVKSIKALKIMPCWRLQDQVMLQSMPFLPTWTPFQVAGQPHLRSSQATWRPLILVTWADLVWTTRLKRPNQAFLRPLNKSCTTLLSSLTSFNSWNFGEW

SEQ ID NO: 606 - protein, 66 aa, Homo sapiens
  Payload ID: 102;
  Gene Symbol: AKAP10;
  Gene Name: A kinase (PRKA) anchor prt 10;
  ENSP ID: ENSP00000461040
MRGAGPSPRQSPRTLRPDPGPAMSFFRRKVKGKEQEKTSDVKSIKGCRTKSCCNQCHFCQHGLLFK

SEQ ID NO: 607 - protein, 63 aa, Homo sapiens
  Payload ID: 102;
  Gene Symbol: AKAP10;
  Gene Name: A kinase (PRKA) anchor prt 10;
  ENSP ID: ENSP00000461793
MRGAGPSPRQSPRTLRPDPGPAMSFFRRKVKGKEQEKTSDVKSIKVETEFHHVSQYGLDLLTL

SEQ ID NO: 608 - protein, 78 aa, Homo sapiens
  Payload ID: 102;
  Gene Symbol: AKAP10;
  Gene Name: A kinase (PRKA) anchor prt 10;
  ENSP ID: ENSP00000463398
LALLALLMSLTQGVLTALRLRKMTFGRVSDLGQFIRESEPEPDVRKSKGSMFSQAMKKWVQGNTDEAQEELAWKIAKM

SEQ ID NO: 609 - protein, 150 aa, Homo sapiens
  Payload ID: 102;
  Gene Symbol: AKAP10;
  Gene Name: A kinase (PRKA) anchor prt 10;
  ENSP ID: ENSP00000464079
MRGAGPSPRQSPRTLRPDPGPAMSFFRRKVKGKEQEKTSDVKSIKASISVHSPQKSTKNHALLEAAGPSHVAINAISANMDSFSSSRTATLKKQPSHMEAAHFGDLDLVWTTRLKRPNQAFLRPLNKSCTTLLSSLTSFNSWNFGEWSIW

SEQ ID NO: 610 - protein, 59 aa, Homo sapiens
  Payload ID: 102;
  Gene Symbol: AKAP10;
  Gene Name: A kinase (PRKA) anchor prt 10;
  ENSP ID: ENSP00000464294
  MOD_RES (1)..(1): Any amino acid
XKYISPDAAKPIPITEAMRNDIIARICGEDGQVDPNCFVLAQSIVFSAMEQDTWKKRMQ

SEQ ID NO: 611 - protein, 31 aa, Homo sapiens
  Payload ID: 102;
  Gene Symbol: AKAP10;
  Gene Name: A kinase (PRKA) anchor prt 10;
  ENSP ID: ENSP00000466329
  MOD_RES (1)..(1): Any amino acid
XLTAPGSVGPPDESHPGSSDSSASQCEKSQY

SEQ ID NO: 612 - protein, 1901 aa, Homo sapiens
  Payload ID: 103;
  Gene Symbol: AKAP11;
  Gene Name: A kinase (PRKA) anchor prt 11;
  Uniprot ID:  Q9UKA4;
  ENSP ID: ENSP00000025301
MATFRNNHMKTKASVRKSFSEDVFQSVKSLLQSQKELCSVTAEDCLQQDEHANLTEVTFLGFNEETDAAHIQDLAAVSLELPDILNSLHFCSLNENEIICMKNINKPLDISSDPLNQSHPSGMLCVMRVSPTSPRLRIDFIFSLLSKYATGIRYTLDTFLHQKHQLETTDEDDDDTNQSVSSIEDDFVTAFEHLEEEETSKPYNDGMNITVLRSQCDAASQTVTGHHLETHDLKILISSGQQKSLAKPSTSSVNVLGHKELPSVKTSVTTSISEPWTQRSFYRSSNASDKDSDLQKTFFSSSPAYSSESECSSPSPVIFLDEEGYQKSLKAKLELPKIPVMKDDIEDSDSEVSEFFDSFDQFDELEQTLETCLFNKDPVIGKSSQRKGHKHGKSCMNPQKFKFDRPALPANVRKPTPRKPESPYGNLCDAPDSPRPVKASREDSGLFSPIRSSAFSPLGGCTPAECFCQTDIGGDRIHENHDSVYYTYEDYAKSISCEVLGSVLRTHHTNTLSNINSIKHGENKTVTFKHGNLDQKNKSKNKSLMIKDSIQKFAADLVEKSFGSAFKDLQKGVSSCTNALYHLAIKLTSSVLQMAFDELRRQRAFSLKERAISGLANFLVSEALSNALKDLQYVKKQIFTNTVARFAADLAEELVFEGIMEVCQFSYPQTPASPQCGSFDFEDKVVKLYAKDLSESVIQEAFIELSQVDVTFTTKAAVSVSTDNIKYVSAESVVPSTQAVTFSPSFHNQAIMVTKPVQEYKKEYTVQQALFCTSGIVTSIPVPLAGSALLPYHISSTACQAKAHLSSDDSNSNGDSAQVHIATKNREEKAACLRNICLPSEHNPGNQNDFKPTNDDIEMQSSSKLPNDPAIISNFSAAVVHTIVNETLESMTSLEVTKMVDERTDYLTKSLKEKTPPFSHCDQAVLQCSEASSNKDMFADRLSKSIIKHSIDKSKSVIPNIDKNAVYKESLPVSGEESQLTPEKSPKFPDSQNQLTHCSLSAAKDCVPECKVSMVHGSSLETLPSCPAVTGQKSDLKESAKDQPLKKHNLNSTSLEALSFGQENPFPHSHTFSSTALTCVDGLHVEDKQKVRDRNVIPDTPPSTPLVPSRASSEWDIKKLTKKLKGELAKEFAPATPPSTPHNSSVGSLSENEQNTIEKEEFMLKLMRSLSEEVESSESGELPEVDVKSEHSGKKVQFAEALATHILSLATEMAASHLDNKIIQEPKVKNPCLNVQSQRSVSPTFLNPSDENLKTLCNFAGDLAAEVITEAEKIAKVRNCMLFKQKKNSCYADGDEDYKVEEKLDIEAVVHPREVDPFILSLPPSSCMSGLMYKYPSCESVTDEYAGHLIQILKQEGGNSELIMDQYANRLAYRSVKSGLQEAAKTTKVQCNSRMFPVPSSQVKTNKELLMFSNKEHHQEADKKRQSKRNEGYFCKNQTCERTLDPYRNEVSQLYSFSTSLVHSITKDAKEELTASLVGLPKSLTDSCLFEKSGYEEDNECHVTPELPKSLQPSSQNHRFYHSTGSLNGYGCGDNVVQAVEQYAKKVVDDTLELTLGSTVFRVSETTKSADRVTYAEKLSPLTGQACRYCDLKELHNCTGNSSQHFFRQGSLASSKPASNPKFSSRYQKSRIFHLSVPQIHVNLDKKAVLAEKIVAEAIEKAERELSSTSLAADSGIGQEGASFAESLATETMTAAVTNVGHAVSSSKEIEDFQSTESVSSQQMNLSIGDDSTGSWSNLSFEDEHQDESSSFHHLSESNGNSSSWSSLGLEGDLYEDNLSFPTSDSDGPDDKDEEHEDEVEGLGQDGKTLLITNIDMEPCTVDPQLRIILQWLIASEAEVAELYFHDSANKEFMLLSKQLQEKGWKVGDLLQAVLQYYEVMEKASSEERCKSLFDWLLENA

SEQ ID NO: 613 - protein, 1782 aa, Homo sapiens
  Payload ID: 104;
  Gene Symbol: AKAP12;
  Gene Name: A kinase (PRKA) anchor prt 12;
  Uniprot ID:  Q02952;
  ENSP ID: ENSP00000253332
MGAGSSTEQRSPEQPPEGSSTPAEPEPSGGGPSAEAAPDTTADPAIAASDPATKLLQKNGQLSTINGVAEQDELSLQEGDLNGQKGALNGQGALNSQEEEEVIVTEVGQRDSEDVSKRDSDKEMATKSAVVHDITDDGQEETPEIIEQIPSSESNLEELTQPTESQANDIGFKKVFKFVGFKFTVKKDKTEKPDTVQLLTVKKDEGEGAAGAGDHKDPSLGAGEAASKESEPKQSTEKPEETLKREQSHAEISPPAESGQAVEECKEEGEEKQEKEPSKSAESPTSPVTSETGSTFKKFFTQGWAGWRKKTSFRKPKEDEVEASEKKKEQEPEKVDTEEDGKAEVASEKLTASEQAHPQEPAESAHEPRLSAEYEKVELPSEEQVSGSQGPSEEKPAPLATEVFDEKIEVHQEEVVAEVHVSTVEERTEEQKTEVEETAGSVPAEELVEMDAEPQEAEPAKELVKLKETCVSGEDPTQGADLSPDEKVLSKPPEGVVSEVEMLSSQERMKVQGSPLKKLFTSTGLKKLSGKKQKGKRGGGDEESGEHTQVPADSPDSQEEQKGESSASSPEEPEEITCLEKGLAEVQQDGEAEEGATSDGEKKREGVTPWASFKKMVTPKKRVRRPSESDKEDELDKVKSATLSSTESTASEMQEEMKGSVEEPKPEEPKRKVDTSVSWEALICVGSSKKRARRGSSSDEEGGPKAMGGDHQKADEAGKDKETGTDGILAGSQEHDPGQGSSSPEQAGSPTEGEGVSTWESFKRLVTPRKKSKSKLEEKSEDSIAGSGVEHSTPDTEPGKEESWVSIKKFIPGRRKKRPDGKQEQAPVEDAGPTGANEDDSDVPAVVPLSEYDAVEREKMEAQQAQKSAEQPEQKAATEVSKELSESQVHMMAAAVADGTRAATIIEERSPSWISASVTEPLEQVEAEAALLTEEVLEREVIAEEEPPTVTEPLPENREARGDTVVSEAELTPEAVTAAETAGPLGAEEGTEASAAEETTEMVSAVSQLTDSPDTTEEATPVQEVEGGVPDIEEQERRTQEVLQAVAEKVKEESQLPGTGGPEDVLQPVQRAEAERPEEQAEASGLKKETDVVLKVDAQEAKTEPFTQGKVVGQTTPESFEKAPQVTESIESSELVTTCQAETLAGVKSQEMVMEQAIPPDSVETPTDSETDGSTPVADFDAPGTTQKDEIVEIHEENEVASGTQSGGTEAEAVPAQKERPPAPSSFVFQEETKEQSKMEDTLEHTDKEVSVETVSILSKTEGTQEADQYADEKTKDVPFFEGLEGSIDTGITVSREKVTEVALKGEGTEEAECKKDDALELQSHAKSPPSPVEREMVVQVEREKTEAEPTHVNEEKLEHETAVTVSEEVSKQLLQTVNVPIIDGAKEVSSLEGSPPPCLGQEEAVCTKIQVQSSEASFTLTAAAEEEKVLGETANILETGETLEPAGAHLVLEEKSSEKNEDFAAHPGEDAVPTGPDCQAKSTPVIVSATTKKGLSSDLEGEKTTSLKWKSDEVDEQVACQEVKVSVAIEDLEPENGILELETKSSKLVQNIIQTAVDQFVRTEETATEMLTSELQTQAHVIKADSQDAGQETEKEGEEPQASAQDETPITSAKEESESTAVGQAHSDISKDMSEASEKTMTVEVEGSTVNDQQLEEVVLPSEEEGGGAGTKSVPEDDGHALLAERIEKSLVEPKEDEKGDDVDDPENQNSALADTDASGGLTKESPDTNGPKQKEKEDAQEVELQEGKVHSESDKAITPQAQEELQKQERESAKSELTES

SEQ ID NO: 614 - protein, 1684 aa, Homo sapiens
  Payload ID: 104;
  Gene Symbol: AKAP12;
  Gene Name: A kinase (PRKA) anchor prt 12;
  Uniprot ID:  Q02952;
  ENSP ID: ENSP00000346702
MLGTITITVGQRDSEDVSKRDSDKEMATKSAVVHDITDDGQEETPEIIEQIPSSESNLEELTQPTESQANDIGFKKVFKFVGFKFTVKKDKTEKPDTVQLLTVKKDEGEGAAGAGDHKDPSLGAGEAASKESEPKQSTEKPEETLKREQSHAEISPPAESGQAVEECKEEGEEKQEKEPSKSAESPTSPVTSETGSTFKKFFTQGWAGWRKKTSFRKPKEDEVEASEKKKEQEPEKVDTEEDGKAEVASEKLTASEQAHPQEPAESAHEPRLSAEYEKVELPSEEQVSGSQGPSEEKPAPLATEVFDEKIEVHQEEVVAEVHVSTVEERTEEQKTEVEETAGSVPAEELVEMDAEPQEAEPAKELVKLKETCVSGEDPTQGADLSPDEKVLSKPPEGVVSEVEMLSSQERMKVQGSPLKKLFTSTGLKKLSGKKQKGKRGGGDEESGEHTQVPADSPDSQEEQKGESSASSPEEPEEITCLEKGLAEVQQDGEAEEGATSDGEKKREGVTPWASFKKMVTPKKRVRRPSESDKEDELDKVKSATLSSTESTASEMQEEMKGSVEEPKPEEPKRKVDTSVSWEALICVGSSKKRARRGSSSDEEGGPKAMGGDHQKADEAGKDKETGTDGILAGSQEHDPGQGSSSPEQAGSPTEGEGVSTWESFKRLVTPRKKSKSKLEEKSEDSIAGSGVEHSTPDTEPGKEESWVSIKKFIPGRRKKRPDGKQEQAPVEDAGPTGANEDDSDVPAVVPLSEYDAVEREKMEAQQAQKSAEQPEQKAATEVSKELSESQVHMMAAAVADGTRAATIIEERSPSWISASVTEPLEQVEAEAALLTEEVLEREVIAEEEPPTVTEPLPENREARGDTVVSEAELTPEAVTAAETAGPLGAEEGTEASAAEETTEMVSAVSQLTDSPDTTEEATPVQEVEGGVPDIEEQERRTQEVLQAVAEKVKEESQLPGTGGPEDVLQPVQRAEAERPEEQAEASGLKKETDVVLKVDAQEAKTEPFTQGKVVGQTTPESFEKAPQVTESIESSELVTTCQAETLAGVKSQEMVMEQAIPPDSVETPTDSETDGSTPVADFDAPGTTQKDEIVEIHEENEVASGTQSGGTEAEAVPAQKERPPAPSSFVFQEETKEQSKMEDTLEHTDKEVSVETVSILSKTEGTQEADQYADEKTKDVPFFEGLEGSIDTGITVSREKVTEVALKGEGTEEAECKKDDALELQSHAKSPPSPVEREMVVQVEREKTEAEPTHVNEEKLEHETAVTVSEEVSKQLLQTVNVPIIDGAKEVSSLEGSPPPCLGQEEAVCTKIQVQSSEASFTLTAAAEEEKVLGETANILETGETLEPAGAHLVLEEKSSEKNEDFAAHPGEDAVPTGPDCQAKSTPVIVSATTKKGLSSDLEGEKTTSLKWKSDEVDEQVACQEVKVSVAIEDLEPENGILELETKSSKLVQNIIQTAVDQFVRTEETATEMLTSELQTQAHVIKADSQDAGQETEKEGEEPQASAQDETPITSAKEESESTAVGQAHSDISKDMSEASEKTMTVEVEGSTVNDQQLEEVVLPSEEEGGGAGTKSVPEDDGHALLAERIEKSLVEPKEDEKGDDVDDPENQNSALADTDASGGLTKESPDTNGPKQKEKEDAQEVELQEGKVHSESDKAITPQAQEELQKQERESAKSELTES

SEQ ID NO: 615 - protein, 1677 aa, Homo sapiens
  Payload ID: 104;
  Gene Symbol: AKAP12;
  Gene Name: A kinase (PRKA) anchor prt 12;
  Uniprot ID:  Q02952;
  ENSP ID: ENSP00000352794
MVGQRDSEDVSKRDSDKEMATKSAVVHDITDDGQEETPEIIEQIPSSESNLEELTQPTESQANDIGFKKVFKFVGFKFTVKKDKTEKPDTVQLLTVKKDEGEGAAGAGDHKDPSLGAGEAASKESEPKQSTEKPEETLKREQSHAEISPPAESGQAVEECKEEGEEKQEKEPSKSAESPTSPVTSETGSTFKKFFTQGWAGWRKKTSFRKPKEDEVEASEKKKEQEPEKVDTEEDGKAEVASEKLTASEQAHPQEPAESAHEPRLSAEYEKVELPSEEQVSGSQGPSEEKPAPLATEVFDEKIEVHQEEVVAEVHVSTVEERTEEQKTEVEETAGSVPAEELVEMDAEPQEAEPAKELVKLKETCVSGEDPTQGADLSPDEKVLSKPPEGVVSEVEMLSSQERMKVQGSPLKKLFTSTGLKKLSGKKQKGKRGGGDEESGEHTQVPADSPDSQEEQKGESSASSPEEPEEITCLEKGLAEVQQDGEAEEGATSDGEKKREGVTPWASFKKMVTPKKRVRRPSESDKEDELDKVKSATLSSTESTASEMQEEMKGSVEEPKPEEPKRKVDTSVSWEALICVGSSKKRARRGSSSDEEGGPKAMGGDHQKADEAGKDKETGTDGILAGSQEHDPGQGSSSPEQAGSPTEGEGVSTWESFKRLVTPRKKSKSKLEEKSEDSIAGSGVEHSTPDTEPGKEESWVSIKKFIPGRRKKRPDGKQEQAPVEDAGPTGANEDDSDVPAVVPLSEYDAVEREKMEAQQAQKSAEQPEQKAATEVSKELSESQVHMMAAAVADGTRAATIIEERSPSWISASVTEPLEQVEAEAALLTEEVLEREVIAEEEPPTVTEPLPENREARGDTVVSEAELTPEAVTAAETAGPLGAEEGTEASAAEETTEMVSAVSQLTDSPDTTEEATPVQEVEGGVPDIEEQERRTQEVLQAVAEKVKEESQLPGTGGPEDVLQPVQRAEAERPEEQAEASGLKKETDVVLKVDAQEAKTEPFTQGKVVGQTTPESFEKAPQVTESIESSELVTTCQAETLAGVKSQEMVMEQAIPPDSVETPTDSETDGSTPVADFDAPGTTQKDEIVEIHEENEVASGTQSGGTEAEAVPAQKERPPAPSSFVFQEETKEQSKMEDTLEHTDKEVSVETVSILSKTEGTQEADQYADEKTKDVPFFEGLEGSIDTGITVSREKVTEVALKGEGTEEAECKKDDALELQSHAKSPPSPVEREMVVQVEREKTEAEPTHVNEEKLEHETAVTVSEEVSKQLLQTVNVPIIDGAKEVSSLEGSPPPCLGQEEAVCTKIQVQSSEASFTLTAAAEEEKVLGETANILETGETLEPAGAHLVLEEKSSEKNEDFAAHPGEDAVPTGPDCQAKSTPVIVSATTKKGLSSDLEGEKTTSLKWKSDEVDEQVACQEVKVSVAIEDLEPENGILELETKSSKLVQNIIQTAVDQFVRTEETATEMLTSELQTQAHVIKADSQDAGQETEKEGEEPQASAQDETPITSAKEESESTAVGQAHSDISKDMSEASEKTMTVEVEGSTVNDQQLEEVVLPSEEEGGGAGTKSVPEDDGHALLAERIEKSLVEPKEDEKGDDVDDPENQNSALADTDASGGLTKESPDTNGPKQKEKEDAQEVELQEGKVHSESDKAITPQAQEELQKQERESAKSELTES

SEQ ID NO: 616 - protein, 1782 aa, Homo sapiens; identical to SEQ ID NO: 613
  Payload ID: 104;
  Gene Symbol: AKAP12;
  Gene Name: A kinase (PRKA) anchor prt 12;
  Uniprot ID:  Q02952;
  ENSP ID: ENSP00000384537

SEQ ID NO: 617 - protein, 2817 aa, Homo sapiens
  Payload ID: 105;
  Gene Symbol: AKAP13;
  Gene Name: A kinase (PRKA) anchor prt 13;
  Uniprot ID:  Q12802;
  ENSP ID: ENSP00000354718
MKLNPQQAPLYGDCVVTVLLAEEDKAEDDVVFYLVFLGSTLRHCTSTRKVSSDTLETIAPGHDCCETVKVQLCASKEGLPVFVVAEEDFHFVQDEAYDAAQFLATSAGNQQALNFTRFLDQSGPPSGDVNSLDKKLVLAFRHLKLPTEWNVLGTDQSLHDAGPRETLMHFAVRLGLLRLTWFLLQKPGGRGALSIHNQEGATPVSLALERGYHKLHQLLTEENAGEPDSWSSLSYEIPYGDCSVRHHRELDIYTLTSESDSHHEHPFPGDGCTGPIFKLMNIQQQLMKTNLKQMDSLMPLMMTAQDPSSAPETDGQFLPCAPEPTDPQRLSSSEETESTQCCPGSPVAQTESPCDLSSIVEEENTDRSCRKKNKGVERKGEEVEPAPIVDSGTVSDQDSCLQSLPDCGVKGTEGLSSCGNRNEETGTKSSGMPTDQESLSSGDAVLQRDLVMEPGTAQYSSGGELGGISTTNVSTPDTAGEMEHGLMNPDATVWKNVLQGGESTKERFENSNIGTAGASDVHVTSKPVDKISVPNCAPAASSLDGNKPAESSLAFSNEETSTEKTAETETSRSREESADAPVDQNSVVIPAAAKDKISDGLEPYTLLAAGIGEAMSPSDLALLGLEEDVMPHQNSETNSSHAQSQKGKSSPICSTTGDDKLCADSACQQNTVTSSGDLVAKLCDNIVSESESTTARQPSSQDPPDASHCEDPQAHTVTSDPVRDTQERADFCPFKVVDNKGQRKDVKLDKPLTNMLEVVSHPHPVVPKMEKELVPDQAVISDSTFSLANSPGSESVTKDDALSFVPSQKEKGTATPELHTATDYRDGPDGNSNEPDTRPLEDRAVGLSTSSTAAELQHGMGNTSLTGLGGEHEGPAPPAIPEALNIKGNTDSSLQSVGKATLALDSVLTEEGKLLVVSESSAAQEQDKDKAVTCSSIKENALSSGTLQEEQRTPPPGQDTQQFHEKSISADCAKDKALQLSNSPGASSAFLKAETEHNKEVAPQVSLLTQGGAAQSLVPPGASLATESRQEALGAEHNSSALLPCLLPDGSDGSDALNCSQPSPLDVGVKNTQSQGKTSACEVSGDVTVDVTGVNALQGMAEPRRENISHNTQDILIPNVLLSQEKNAVLGLPVALQDKAVTDPQGVGTPEMIPLDWEKGKLEGADHSCTMGDAEEAQIDDEAHPVLLQPVAKELPTDMELSAHDDGAPAGVREVMRAPPSGRERSTPSLPCMVSAQDAPLPKGADLIEEAASRIVDAVIEQVKAAGALLTEGEACHMSLSSPELGPLTKGLESAFTEKVSTFPPGESLPMGSTPEEATGSLAGCFAGREEPEKIILPVQGPEPAAEMPDVKAEDEVDFRASSISEEVAVGSIAATLKMKQGPMTQAINRENWCTIEPCPDAASLLASKQSPECENFLDVGLGRECTSKQGVLKRESGSDSDLFHSPSDDMDSIIFPKPEEEHLACDITGSSSSTDDTASLDRHSSHGSDVSLSQILKPNRSRDRQSLDGFYSHGMGAEGRESESEPADPGDVEEEEMDSITEVPANCSVLRSSMRSLSPFRRHSWGPGKNAASDAEMNHRSMSWCPSGVQYSAGLSADFNYRSFSLEGLTGGAGVGNKPSSSLEVSSANAEELRHPFSGEERVDSLVSLSEEDLESDQREHRMFDQQICHRSKQQGFNYCTSAISSPLTKSISLMTISHPGLDNSRPFHSTFHNTSANLTESITEENYNFLPHSPSKKDSEWKSGTKVSRTFSYIKNKMSSSKKSKEKEKEKDKIKEKEKDSKDKEKDKKTVNGHTFSSIPVVGPISCSQCMKPFTNKDAYTCANCSAFVHKGCRESLASCAKVKMKQPKGSLQAHDTSSLPTVIMRNKPSQPKERPRSAVLLVDETATTPIFANRRSQQSVSLSKSVSIQNITGVGNDENMSNTWKFLSHSTDSLNKISKVNESTESLTDEGVGTDMNEGQLLGDFEIESKQLEAESWSRIIDSKFLKQQKKDVVKRQEVIYELMQTEFHHVRTLKIMSGVYSQGMMADLLFEQQMVEKLFPCLDELISIHSQFFQRILERKKESLVDKSEKNFLIKRIGDVLVNQFSGENAERLKKTYGKFCGQHNQSVNYFKDLYAKDKRFQAFVKKKMSSSVVRRLGIPECILLVTQRITKYPVLFQRILQCTKDNEVEQEDLAQSLSLVKDVIGAVDSKVASYEKKVRLNEIYTKTDSKSIMRMKSGQMFAKEDLKRKKLVRDGSVFLKNAAGRLKEVQAVLLTDILVFLQEKDQKYIFASLDQKSTVISLKKLIVREVAHEEKGLFLISMGMTDPEMVEVHASSKEERNSWIQIIQDTINTLNRDEDEGIPSENEEEKKMLDTRARELKEQLHQKDQKILLLLEEKEMIFRDMAECSTPLPEDCSPTHSPRVLFRSNTEEALKGGPLMKSAINEVEILQGLVSGNLGGTLGPTVSSPIEQDVVGPVSLPRRAETFGGFDSHQMNASKGGEKEEGDDGQDLRRTESDSGLKKGGNANLVFMLKRNSEQVVQSVVHLYELLSALQGVVLQQDSYIEDQKLVLSERALTRSLSRPSSLIEQEKQRSLEKQRQDLANLQKQQAQYLEEKRRREREWEARERELREREALLAQREEEVQQGQQDLEKEREELQQKKGTYQYDLERLRAAQKQLEREQEQLRREAERLSQRQTERDLCQVSHPHTKLMRIPSFFPSPEEPPSPSAPSIAKSGSLDSELSVSPKRNSISRTHKDKGPFHILSSTSQTNKGPEGQSQAPASTSASTRLFGLTKPKEKKEKKKKNKTSRSQPGDGPASEVSAEGEEIFC

SEQ ID NO: 618 - protein, 1434 aa, Homo sapiens
  Payload ID: 105;
  Gene Symbol: AKAP13;
  Gene Name: A kinase (PRKA) anchor prt 13;
  ENSP ID: ENSP00000378018
MYERHKRRYSLCDISKVDRTVDVVLLKINRENWCTIEPCPDAASLLASKQSPECENFLDVGLGRECTSKQGVLKRESGSDSDLFHSPSDDMDSIIFPKPEEEHLACDITGSSSSTDDTASLDRHSSHGSDVSLSQILKPNRSRDRQSLDGFYSHGMGAEGRESESEPADPGDVEEEEMDSITEVPANCSVLRSSMRSLSPFRRHSWGPGKNAASDAEMNHRSFSLEGLTGGAGVGNKPSSSLEVSSANAEELRHPFSGEERVDSLVSLSEEDLESDQREHRMFDQQICHRSKQQGFNYCTSAISSPLTKSISLMTISHPGLDNSRPFHSTFHNTSANLTESITEENYNFLPHSPSKKDSEWKSGTKVSRTFSYIKNKMSSSKKSKEKEKEKDKIKEKEKDSKDKEKDKKTVNGHTFSSIPVVGPISCSQCMKPFTNKDAYTCANCSAFVHKGCRESLASCAKVKMKPKGSLQAHDTSSLPTVIMRNKPSQPKERPRSAVLLVDETATTPIFANRRSQQSVSLSKSVSIQNITGVGNDENMSNTWKFLSHSTDSLNKISKVNESTESLTDEGVGTDMNEGQLLGDFEIESKQLEAESWSRIIDSKFLKQQKKDVVKRQEVIYELMQTEFHHVRTLKIMSGVYSQGMMADLLFEQQMVEKLFPCLDELISIHSQFFQRILERKKESLVDKSEKNFLIKRIGDVLVNQFSGENAERLKKTYGKFCGQHNQSVNYFKDLYAKDKRFQAFVKKKMSSSVVRRLGIPECILLVTQRITKYPVLFQRILQCTKDNEVEQEDLAQSLSLVKDVIGAVDSKVASYEKKVRLNEIYTKTDSKSIMRMKSGQMFAKEDLKRKKLVRDGSVFLKNAAGRLKEVQAVLLTDILVFLQEKDQKYIFASLDQKSTVISLKKLIVREVAHEEKGLFLISMGMTDPEMVEVHASSKEERNSWIQIIQDTINTLNRDEDEGIPSENEEEKKMLDTRARELKEQLHQKDQKILLLLEEKEMIFRDMAECSTPLPEDCSPTHSPRVLFRSNTEEALKGGPLMKSAINEVEILQGLVSGNLGGTLGPTVSSPIEQDVVGPVSLPRRAETFGGFDSHQMNASKGGEKEEGDDGQDLRRTESDSGLKKGGNANLVFMLKRNSEQVVQSVVHLYELLSALQGVVLQQDSYIEDQKLVLSERALTRSLSRPSSLIEQEKQRSLEKQRQDLANLQKQQAQYLEEKRRREREWEARERELREREALLAQREEEVQQGQQDLEKEREELQQKKGTYQYDLERLRAAQKQLEREQEQLRREAERLSQRQTERDLCQVSHPHTKLMRIPSFFPSPEEPPSPSAPSIAKSGSLDSELSVSPKRNSISRTHKDKGPFHILSSTSQTNKGPEGQSQAPASTSASTRLFGLTKPKEKKEKKKKNKTSRSQPGDGPASEVSAEGEEIFC

SEQ ID NO: 619 - protein, 2813 aa, Homo sapiens
  Payload ID: 105;
  Gene Symbol: AKAP13;
  Gene Name: A kinase (PRKA) anchor prt 13;
  Uniprot ID:  Q12802;
  ENSP ID: ENSP00000378026
MKLNPQQAPLYGDCVVTVLLAEEDKAEDDVVFYLVFLGSTLRHCTSTRKVSSDTLETIAPGHDCCETVKVQLCASKEGLPVFVVAEEDFHFVQDEAYDAAQFLATSAGNQQALNFTRFLDQSGPPSGDVNSLDKKLVLAFRHLKLPTEWNVLGTDQSLHDAGPRETLMHFAVRLGLLRLTWFLLQKPGGRGALSIHNQEGATPVSLALERGYHKLHQLLTEENAGEPDSWSSLSYEIPYGDCSVRHHRELDIYTLTSESDSHHEHPFPGDGCTGPIFKLMNIQQQLMKTNLKQMDSLMPLMMTAQDPSSAPETDGQFLPCAPEPTDPQRLSSSEETESTQCCPGSPVAQTESPCDLSSIVEEENTDRSCRKKNKGVERKGEEVEPAPIVDSGTVSDQDSCLQSLPDCGVKGTEGLSSCGNRNEETGTKSSGMPTDQESLSSGDAVLQRDLVMEPGTAQYSSGGELGGISTTNVSTPDTAGEMEHGLMNPDATVWKNVLQGGESTKERFENSNIGTAGASDVHVTSKPVDKISVPNCAPAASSLDGNKPAESSLAFSNEETSTEKTAETETSRSREESADAPVDQNSVVIPAAAKDKISDGLEPYTLLAAGIGEAMSPSDLALLGLEEDVMPHQNSETNSSHAQSQKGKSSPICSTTGDDKLCADSACQQNTVTSSGDLVAKLCDNIVSESESTTARQPSSQDPPDASHCEDPQAHTVTSDPVRDTQERADFCPFKVVDNKGQRKDVKLDKPLTNMLEVVSHPHPVVPKMEKELVPDQAVISDSTFSLANSPGSESVTKDDALSFVPSQKEKGTATPELHTATDYRDGPDGNSNEPDTRPLEDRAVGLSTSSTAAELQHGMGNTSLTGLGGEHEGPAPPAIPEALNIKGNTDSSLQSVGKATLALDSVLTEEGKLLVVSESSAAQEQDKDKAVTCSSIKENALSSGTLQEEQRTPPPGQDTQQFHEKSISADCAKDKALQLSNSPGASSAFLKAETEHNKEVAPQVSLLTQGGAAQSLVPPGASLATESRQEALGAEHNSSALLPCLLPDGSDGSDALNCSQPSPLDVGVKNTQSQGKTSACEVSGDVTVDVTGVNALQGMAEPRRENISHNTQDILIPNVLLSQEKNAVLGLPVALQDKAVTDPQGVGTPEMIPLDWEKGKLEGADHSCTMGDAEEAQIDDEAHPVLLQPVAKELPTDMELSAHDDGAPAGVREVMRAPPSGRERSTPSLPCMVSAQDAPLPKGADLIEEAASRIVDAVIEQVKAAGALLTEGEACHMSLSSPELGPLTKGLESAFTEKVSTFPPGESLPMGSTPEEATGSLAGCFAGREEPEKIILPVQGPEPAAEMPDVKAEDEVDFRASSISEEVAVGSIAATLKMKQGPMTQAINRENWCTIEPCPDAASLLASKQSPECENFLDVGLGRECTSKQGVLKRESGSDSDLFHSPSDDMDSIIFPKPEEEHLACDITGSSSSTDDTASLDRHSSHGSDVSLSQILKPNRSRDRQSLDGFYSHGMGAEGRESESEPADPGDVEEEEMDSITEVPANCSVLRSSMRSLSPFRRHSWGPGKNAASDAEMNHRSSMRVLGDVVRRPPIHRRSFSLEGLTGGAGVGNKPSSSLEVSSANAEELRHPFSGEERVDSLVSLSEEDLESDQREHRMFDQQICHRSKQQGFNYCTSAISSPLTKSISLMTISHPGLDNSRPFHSTFHNTSANLTESITEENYNFLPHSPSKKDSEWKSGTKVSRTFSYIKNKMSSSKKSKEKEKEKDKIKEKEKDSKDKEKDKKTVNGHTFSSIPVVGPISCSQCMKPFTNKDAYTCANCSAFVHKGCRESLASCAKVKMKQPKGSLQAHDTSSLPTVIMRNKPSQPKERPRSAVLLVDETATTPIFANRRSQQSVSLSKSVSIQNITGVGNDENMSNTWKFLSHSTDSLNKISKVNESTESLTDEGVGTDMNEGQLLGDFEIESKQLEAESWSRIIDSKFLKQQKKDVVKRQEVIYELMQTEFHHVRTLKIMSGVYSQGMMADLLFEQQMVEKLFPCLDELISIHSQFFQRILERKKESLVDKSEKNFLIKRIGDVLVNQFSGENAERLKKTYGKFCGQHNQSVNYFKDLYAKDKRFQAFVKKKMSSSVVRRLGIPECILLVTQRITKYPVLFQRILQCTKDNEVEQEDLAQSLSLVKDVIGAVDSKVASYEKKVRLNEIYTKTDSKSIMRMKSGQMFAKEDLKRKKLVRDGSVFLKNAAGRLKEVQAVLLTDILVFLQEKDQKYIFASLDQKSTVISLKKLIVREVAHEEKGLFLISMGMTDPEMVEVHASSKEERNSWIQIIQDTINTLNRDEDEGIPSENEEEKKMLDTRARELKEQLHQKDQKILLLLEEKEMIFRDMAECSTPLPEDCSPTHSPRVLFRSNTEEALKGGPLMKSAINEVEILQGLVSGNLGGTLGPTVSSPIEQDVVGPVSLPRRAETFGGFDSHQMNASKGGEKEEGDDGQDLRRTESDSGLKKGGNANLVFMLKRNSEQVVQSVVHLYELLSALQGVVLQQDSYIEDQKLVLSERALTRSLSRPSSLIEQEKQRSLEKQRQDLANLQKQQAQYLEEKRRREREWEARERELREREALLAQREEEVQQGQQDLEKEREELQQKKGTYQYDLERLRAAQKQLEREQEQLRREAERLSQRQTERDLCQVSHPHTKLMRIPSFFPSPEEPPSPSAPSIAKSGSLDSELSVSPKRNSISRTHKDKGPFHILSSTSQTNKGPEGQSQAPASTSASTRLFGLTKPKEKKEKKKKNKTSRSQPGDGPASEVSAEGEEIFC

SEQ ID NO: 620 - protein, 93 aa, Homo sapiens
  Payload ID: 105;
  Gene Symbol: AKAP13;
  Gene Name: A kinase (PRKA) anchor prt 13;
  ENSP ID: ENSP00000452622
MNIQQQLMKTNLKQMDSLMPLMMTAQDPSSAPETDGQFLPCAPEPTDPQRLSSSEETESTQCCPGSPVAQTESPCDLSSIVEEENTDRSCRKK

SEQ ID NO: 621 - protein, 146 aa, Homo sapiens
  Payload ID: 105;
  Gene Symbol: AKAP13;
  Gene Name: A kinase (PRKA) anchor prt 13;
  ENSP ID: ENSP00000452698
MGLRYSGCLGSHVENAGEPDSWSSLSYEIPYGDCSVRHHRELDIYTLTSESDSHHEHPFPGDGCTGPIFKLMNIQQQLMKTNLKQMDSLMPLMMTAQDPSSAPETDGQFLPCAPEPTDPQRLSSSEETESTQCCPGSPVAQTESPC

SEQ ID NO: 622 - protein, 275 aa, Homo sapiens
  Payload ID: 105;
  Gene Symbol: AKAP13;
  Gene Name: A kinase (PRKA) anchor prt 13;
  ENSP ID: ENSP00000453205
PSDDMDSIIFPKPEEEHLACDITGSSSSTDDTASLDRHSSHGSDVSLSQILKPNRSRDRQSLDGFYSHGMGAEGRESESEPADPGDVEEEEMDSITEVPANCSVLRSSMRSLSPFRRHSWGPGKNAASDAEMNHRSSMRVLGDVVRRPPIHRRSMSWCPSGVQYSAGLSADFNYRSFSLEGLTGGAGVGNKPSSSLEVSSANAEELRHPFSGEERVDSLVSLSEEDLESDQREHRMFDQQICHRSKQQGFNYCTSAISSPLTKSISLMTISHPGL

SEQ ID NO: 623 - protein, 38 aa, Homo sapiens
  Payload ID: 105;
  Gene Symbol: AKAP13;
  Gene Name: A kinase (PRKA) anchor prt 13;
  ENSP ID: ENSP00000453620
MKLNPQQAPLYGDCVVTVLLAEEDKAEDDVVFYLVFLG

SEQ ID NO: 624 - protein, 179 aa, Homo sapiens
  Payload ID: 105;
  Gene Symbol: AKAP13;
  Gene Name: A kinase (PRKA) anchor prt 13;
  Uniprot ID:  Q12802;
  ENSP ID: ENSP00000453634
MKLNPQQAPLYGDCVVTVLLAEEDKAEDDVVFYLVFLGSTLRHCTSTRKVSSDTLETIAPGHDCCETVKVQLCASKEGLPVFVVAEEDFHFVQDEAYDAAQFLATSAGNQQALNFTRFLDQSGPPSGDVNSLDKKLVLAFRHLKLPTEWNVLGTDQSLHGENLYDLQTHFKFVIFLLFF

SEQ ID NO: 625 - protein, 1745 aa, Homo sapiens
  Payload ID: 105;
  Gene Symbol: AKAP13;
  Gene Name: A kinase (PRKA) anchor prt 13;
  ENSP ID: ENSP00000453768
MKLNPQQAPLYGDCVVTVLLAEEDKAEDDVVFYLVFLGSTLRHCTSTRKVSSDTLETIAPGHDCCETVKVQLCASKEGLPVFVVAEEDFHFVQDEAYDAAQFLATSAGNQQALNFTRFLDQSGPPSGDVNSLDKKLVLAFRHLKLPTEWNVLGTDQSLHDAGPRETLMHFAVRLGLLRLTWFLLQKPGGRGALSIHNQEGATPVSLALERGYHKLHQLLTEENAGEPDSWSSLSYEIPYGDCSVRHHRELDIYTLTSESDSHHEHPFPGDGCTGPIFKLMNIQQQLMKTNLKQMDSLMPLMMTAQDPSSAPETDGQFLPCAPEPTDPQRLSSSEETESTQCCPGSPVAQTESPCDLSSIVEEENTDRSCRKKNKGVERKGEEVEPAPIVDSGTVSDQDSCLQSLPDCGVKGTEGLSSCGNRNEETGTKSSGMPTDQESLSSGDAVLQRDLVMEPGTAQYSSGGELGGISTTNVSTPDTAGEMEHGLMNPDATVWKNVLQGGESTKERFENSNIGTAGASDVHVTSKPVDKISVPNCAPAASSLDGNKPAESSLAFSNEETSTEKTAETETSRSREESADAPVDQNSVVIPAAAKDKISDGLEPYTLLAAGIGEAMSPSDLALLGLEEDVMPHQNSETNSSHAQSQKGKSSPICSTTGDDKLCADSACQQNTVTSSGDLVAKLCDNIVSESESTTARQPSSQDPPDASHCEDPQAHTVTSDPVRDTQERADFCPFKVVDNKGQRKDVKLDKPLTNMLEVVSHPHPVVPKMEKELVPDQAVISDSTFSLANSPGSESVTKDDALSFVPSQKEKGTATPELHTATDYRDGPDGNSNEPDTRPLEDRAVGLSTSSTAAELQHGMGNTSLTGLGGEHEGPAPPAIPEALNIKGNTDSSLQSVGKATLALDSVLTEEGKLLVVSESSAAQEQDKDKAVTCSSIKENALSSGTLQEEQRTPPPGQDTQQFHEKSISADCAKDKALQLSNSPGASSAFLKAETEHNKEVAPQVSLLTQGGAAQSLVPPGASLATESRQEALGAEHNSSALLPCLLPDGSDGSDALNCSQPSPLDVGVKNTQSQGKTSACEVSGDVTVDVTGVNALQGMAEPRRENISHNTQDILIPNVLLSQEKNAVLGLPVALQDKAVTDPQGVGTPEMIPLDWEKGKLEGADHSCTMGDAEEAQIDDEAHPVLLQPVAKELPTDMELSAHDDGAPAGVREVMRAPPSGRERSTPSLPCMVSAQDAPLPKGADLIEEAASRIVDAVIEQVKAAGALLTEGEACHMSLSSPELGPLTKGLESAFTEKVSTFPPGESLPMGSTPEEATGSLAGCFAGREEPEKIILPVQGPEPAAEMPDVKAEDEVDFRASSISEEVAVGSIAATLKMKQGPMTQAINRENWCTIEPCPDAASLLASKQSPECENFLDVGLGRECTSKQGVLKRESGSDSDLFHSPSDDMDSIIFPKPEEEHLACDITGSSSSTDDTASLDRHSSHGSDVSLSQILKPNRSRDRQSLDGFYSHGMGAEGRESESEPADPGDVEEEEMDSITEVPANCSVLRSSMRSLSPFRRHSWGPGKNAASDAEMNHRSFSLEGLTGGAGVGNKPSSSLEVSSANAEELRHPFSGEERVDSLVSLSEEDLESDQREHRMFDQQICHRSKQQGFNYCTSAISSPLTKSISLMTISHPGLDNSRPFHSTFHNTSANLTESITEENYNFLPHSPSKKDSEWKSGTKVSRTFSYIKNKMSSSKKSK

SEQ ID NO: 626 - protein, 1429 aa, Homo sapiens
  Payload ID: 105;
  Gene Symbol: AKAP13;
  Gene Name: A kinase (PRKA) anchor prt 13;
  ENSP ID: ENSP00000477780
MLYINRENWCTIEPCPDAASLLASKQSPECENFLDVGLGRECTSKQGVLKRESGSDSDLFHSPSDDMDSIIFPKPEEEHLACDITGSSSSTDDTASLDRHSSHGSDVSLSQILKPNRSRDRQSLDGFYSHGMGAEGRESESEPADPGDVEEEEMDSITEVPANCSVLRSSMRSLSPFRRHSWGPGKNAASDAEMNHRSSMRVLGDVVRRPPIHRRSFSLEGLTGGAGVGNKPSSSLEVSSANAEELRHPFSGEERVDSLVSLSEEDLESDQREHRMFDQQICHRSKQQGFNYCTSAISSPLTKSISLMTISHPGLDNSRPFHSTFHNTSANLTESITEENYNFLPHSPSKKDSEWKSGTKVSRTFSYIKNKMSSSKKSKEKEKEKDKIKEKEKDSKDKEKDKKTVNGHTFSSIPVVGPISCSQCMKPFTNKDAYTCANCSAFVHKGCRESLASCAKVKMKQPKGSLQAHDTSSLPTVIMRNKPSQPKERPRSAVLLVDETATTPIFANRRSQQSVSLSKSVSIQNITGVGNDENMSNTWKFLSHSTDSLNKISKVNESTESLTDEGVGTDMNEGQLLGDFEIESKQLEAESWSRIIDSKFLKQQKKDVVKRQEVIYELMQTEFHHVRTLKIMSGVYSQGMMADLLFEQQMVEKLFPCLDELISIHSQFFQRILERKKESLVDKSEKNFLIKRIGDVLVNQFSGENAERLKKTYGKFCGQHNQSVNYFKDLYAKDKRFQAFVKKKMSSSVVRRLGIPECILLVTQRITKYPVLFQRILQCTKDNEVEQEDLAQSLSLVKDVIGAVDSKVASYEKKVRLNEIYTKTDSKSIMRMKSGQMFAKEDLKRKKLVRDGSVFLKNAAGRLKEVQAVLLTDILVFLQEKDQKYIFASLDQKSTVISLKKLIVREVAHEEKGLFLISMGMTDPEMVEVHASSKEERNSWIQIIQDTINTLNRDEDEGIPSENEEEKKMLDTRARELKEQLHQKDQKILLLLEEKEMIFRDMAECSTPLPEDCSPTHSPRVLFRSNTEEALKGGPLMKSAINEVEILQGLVSGNLGGTLGPTVSSPIEQDVVGPVSLPRRAETFGGFDSHQMNASKGGEKEEGDDGQDLRRTESDSGLKKGGNANLVFMLKRNSEQVVQSVVHLYELLSALQGVVLQQDSYIEDQKLVLSERALTRSLSRPSSLIEQEKQRSLEKQRQDLANLQKQQAQYLEEKRRREREWEARERELREREALLAQREEEVQQGQQDLEKEREELQQKKGTYQYDLERLRAAQKQLEREQEQLRREAERLSQRQTERDLCQVSHPHTKLMRIPSFFPSPEEPPSPSAPSIAKSGSLDSELSVSPKRNSISRTHKDKGPFHILSSTSQTNKGPEGQSQAPASTSASTRLFGLTKPKEKKEKKKKNKTSRSQPGDGPASEVSAEGEEIFC

SEQ ID NO: 627 - protein, 166 aa, Homo sapiens
  Payload ID: 105;
  Gene Symbol: AKAP13;
  Gene Name: A kinase (PRKA) anchor prt 13;
  ENSP ID: ENSP00000480789
MSIKWARFHEVPHITVRFIGPKHGEEKEKEKDKIKEKEKDSKDKEKDKKTVNGHTFSSIPVVGPISCSQCMKPFTNKDAYTCANCSAFVHKGCRESLASCAKVKMKQPKGSLQAHDTSSLPTVIMRNKPSQPKERPRSAVLLVDETATTPIFANRRSQQSVSLSKS

SEQ ID NO: 628 - protein, 967 aa, Homo sapiens
  Payload ID: 105;
  Gene Symbol: AKAP13;
  Gene Name: A kinase (PRKA) anchor prt 13;
  ENSP ID: ENSP00000481485
MYERHKRRYSLCDISKVDRTVDVVLLKINRENWCTIEPCPDAASLLASKQSPECENFLDVGLGRECTSKQGVLKRESGSDSDLFHSPSDDMDSIIFPKPEEEHLACDITGSSSSTDDTASLDRHSSHGSDVSLSQILKPNRSRDRQSLDGFYSHGMGAEGRESESEPADPGDVEEEEMDSITEVPANCSVLRSSMRSLSPFRRHSWGPGKNAASDAEMNHRSFSLEGLTGGAGVGNKPSSSLEVSSANAEELRHPFSGEERVDSLVSLSEEDLESDQREHRMFDQQICHRSKQQGFNYCTSAISSPLTKSISLMTISHPGLDNSRPFHSTFHNTSANLTESITEENYNFLPHSPSKKDSEWKSGTKVSRTFSYIKNKMSSSKKSKEKEKEKDKIKEKEKDSKDKEKDKKTVNGHTFSSIPVVGPISCSQCMKPFTNKDAYTCANCSAFVHKGCRESLASCAKVKMKPKGSLQAHDTSSLPTVIMRNKPSQPKERPRSAVLLVDETATTPIFANRRSQQSVSLSKSVSIQNITGVGNDENMSNTWKFLSHSTDSLNKISKVNESTESLTDEGVGTDMNEGQLLGDFEIESKQLEAESWSRIIDSKFLKQQKKDVVKRQEVIYELMQTEFHHVRTLKIMSGVYSQGMMADLLFEQQMVEKLFPCLDELISIHSQFFQRILERKKESLVDKSEKNFLIKRIGDVLVNQFSGENAERLKKTYGKFCGQHNQSVNYFKDLYAKDKRFQAFVKKKMSSSVVRRLGIPECILLVTQRITKYPVLFQRILQCTKDNEVEQEDLAQSLSLVKDVIGAVDSKVASYEKKVRLNEIYTKTDSKSIMRMKSGQMFAKEDLKRKKLVRDGSVFLKNAAGRLKEVQAVLLTDILVFLQEKDQKYIFASLDQKSTVISLKKLIVREVAHEEKGLFLISMGMTDPEMVEVHASSKEERNSWIQIIQDTINTLNRDEDEGIPSE

SEQ ID NO: 629 - protein, 66 aa, Homo sapiens
  Payload ID: 105;
  Gene Symbol: AKAP13;
  Gene Name: A kinase (PRKA) anchor prt 13;
  ENSP ID: ENSP00000482058
MSSSKKSKEKEKEKDKIKEKEKDSKDKEKDKKTVNGHTFSSIPVVGPISCSQCMKPFTNKDAYTCA

SEQ ID NO: 630 - protein, 98 aa, Homo sapiens
  Payload ID: 105;
  Gene Symbol: AKAP13;
  Gene Name: A kinase (PRKA) anchor prt 13;
  ENSP ID: ENSP00000483091
MPDVKAEDEVDFRASSISEEVAVGSIAATLKMKQGPMTQAINRENWCTIEPCPDAASLLASKQSPECENFLDVGLGRECTSKQGVLKRESGSDSDLFH

SEQ ID NO: 631 - protein, 137 aa, Homo sapiens
  Payload ID: 106;
  Gene Symbol: AKAP14;
  Gene Name: A kinase (PRKA) anchor prt 14;
  Uniprot ID:  Q86UN6;
  ENSP ID: ENSP00000334680
MSETQNSTSQKAMDEDNKAASQTMPNTQDKNYEDELTQVALALVEDVINYAVKIVEEERNPLKNIKWMTHGEFTVEKGLKQIDEYFSDAPIVVSYVGDHQALVHRPGMVRFRENWQKNLTDAKYSFMESFPFLFNRV

SEQ ID NO: 632 - protein, 89 aa, Homo sapiens
  Payload ID: 106;
  Gene Symbol: AKAP14;
  Gene Name: A kinase (PRKA) anchor prt 14;
  Uniprot ID:  Q86UN6;
  ENSP ID: ENSP00000360476
MSETQNSTSQKAMDEDNKAASQTMPNTQDKNYEDELTQVALALVEDVINYAVKIVEEERNPLKNIKWMTHGEFTVEKGLKQIDEYFSVS

SEQ ID NO: 633 - protein, 137 aa, Homo sapiens; identical to SEQ ID NO: 631
  Payload ID: 106;
  Gene Symbol: AKAP14;
  Gene Name: A kinase (PRKA) anchor prt 14;
  Uniprot ID:  Q86UN6;
  ENSP ID: ENSP00000360479

SEQ ID NO: 634 - protein, 197 aa, Homo sapiens
  Payload ID: 106;
  Gene Symbol: AKAP14;
  Gene Name: A kinase (PRKA) anchor prt 14;
  Uniprot ID:  Q86UN6;
  ENSP ID: ENSP00000360485
MSETQNSTSQKAMDEDNKAASQTMPNTQDKNYEDELTQVALALVEDVINYAVKIVEEERNPLKNIKWMTHGEFTVEKGLKQIDEYFSKCVSKKCWAHGVEFVERKDLIHSFLYIYYVHWSISTADLPVARISAGTYFTMKVSKTKPPDAPIVVSYVGDHQALVHRPGMVRFRENWQKNLTDAKYSFMESFPFLFNRV

SEQ ID NO: 635 - protein, 695 aa, Homo sapiens
  Payload ID: 107;
  Gene Symbol: AKAP17A;
  Gene Name: A kinase (PRKA) anchor prt 17A;
  Uniprot ID:  Q02040;
  ENSP ID: ENSP00000324827
MAAATIVHDTSEAVELCPAYGLYLKPITKMTISVALPQLKQPGKSISNWEVMERLKGMVQNHQFSTLRISKSTMDFIRFEGEVENKSLVKSFLACLDGKTIKLSGFSDILKVRAAEFKIDFPTRHDWDSFFRDAKDMNETLPGERPDTIHLEGLPCKWFALKESGSEKPSEDVLVKVFEKFGEIRNVDIPMLDPYREEMTGRNFHTFSFGGHLNFEAYVQYREYMGFIQAMSALRGMKLMYKGEDGKAVACNIKVSFDSTKHLSDASIKKRQLERQKLQELEQQREEQKRREKEAEERQRAEERKQKELEELERERKREEKLRKREQKQRDRELRRNQKKLEKLQAEEQKQLQEKIKLEERKLLLAQRNLQSIRLIAELLSRAKAVKLREQEQKEEKLRLQQQEERRRLQEAELRRVEEEKERALGLQRKERELRERLLSILLSKKPDDSHTHDELGVAHADLLQPVLDILQTVSSGCVSATTLHPLGGQPPAGAPKESPAHPEADGAPKSVNGSVAEEAPCKEVQSSCRVVPEDGSPEKRCPGGVLSCIPDNNQQPKGIPACEQNVSRKDTRSEQDKCNREPSKGRGRATGDGLADRHKRERSRARRASSREDGRPRKERRPHKKHAYKDDSPRRRSTSPDHTRSRRSHSKDRHRRERSRERRGSASRKHSRHRRRSERSRSRSPSRHRSTWNR

SEQ ID NO: 636 - protein, 446 aa, Homo sapiens
  Payload ID: 107;
  Gene Symbol: AKAP17A;
  Gene Name: A kinase (PRKA) anchor prt 17A;
  ENSP ID: ENSP00000370660
MAAATIVHDTSEAVELCPAYGLYLKPITKMTISVALPQLKQPGKSISNWEVMERLKGMVQNHQFSTLRISKSTMDFIRFEGEVENKSLVKSFLACLDGKTIKLSGFSDILKVRAAEFKIDFPTRHDWDSFFRDAKDMNETLPGERPDTIHLEGLPCKWFALKESGSEKPSEDVLVKVFEKFGEIRNVDIPMLDPYREEMTGRNFHTFSFGGHLNFEAYVQYREYMGFIQAMSALRGMKLMYKGEDGKAVACNIKVSFDSTKHLSDASIKKRQLERQKLQELEQQREEQKRREKEAEERQRAEERKQKELEELERERKREEKLRKREQKQRDRELRRNQKKLEKLQAEEQKQLQEKIKLEERKLLLAQRNLQSIRLIAELLSRAKVPGGSLCSRQPRPGCPQCPPLKCGRRHGAVSPPAAAVATKPALMPRMTAPSREGVALVCRSR

SEQ ID NO: 637 - protein, 385 aa, Homo sapiens
  Payload ID: 107;
  Gene Symbol: AKAP17A;
  Gene Name: A kinase (PRKA) anchor prt 17A;
  Uniprot ID:  Q02040;
  ENSP ID: ENSP00000435479
MAAATIVHDTSEAVELCPAYGLYLKPITKMTISVALPQLKQPGKSISNWEVMERLKGMVQNHQFSTLRISKSTMDFIRFEGEVENKSLVKSFLACLDGKTIKLSGFSDILKVRAAEFKIDFPTRHDWDSFFRDAKDMNETLPGERPDTIHLEGLPCKWFALKESGSEKPSEDVLVKVFEKFGEIRNVDIPMLDPYREEMTGRNFHTFSFGGHLNFEAYVQYREYMGFIQAMSALRGMKLMYKGEDGKAVACNIKVSFDSTKHLSDASIKKRQLERQKLQELEQQREEQKRREKEAEERQRAEERKQKELEELERERKREEKLRKREQKQRDRELRRNQKKLEKLQAEEQKQLQEKIKLEERKLLLAQRNLQSIRLIAELLSRAKL

SEQ ID NO: 638 - protein, 859 aa, Homo sapiens
  Payload ID: 108;
  Gene Symbol: AKAP2;
  Gene Name: A kinase (PRKA) anchor prt 2;
  Uniprot ID:  Q9Y2D5;
  ENSP ID: ENSP00000259318
MEIEVSVAECKSVPGITSTPHPMDHPSAFYSPPHNGLLTDHHESLDNDVAREIRYLDEVLEANCCDSAVDGTYNGTSSPEPGAVVLVGGLSPPVHEATQPEPTERTASRQAPPHIELSNSSPDPMAEAERTNGHSPSQPRDALGDSLQVPVSPSSTTSSRCSSRDGEFTLTTLKKEAKFELRAFHEDKKPSKLFEDDEHEKEQYCIRKVRPSEEMLELEKERRELIRSQAVKKNPGIAAKWWNPPQEKTIEEQLDEEHLESHKKYKERKERRAQQEQLLLQKQLQQQQQQPPSQLCTAPASSHERASMIDKAKEDIVTEQIDFSAARKQFQLMENSRQAVAKGQSTPRLFSIKPFYRPLGSVNSDKPLTNPRPPSVGGPPEDSGASAAKGQKSPGALETPSAAGSQGNTASQGKEGPYSEPSKRGPLSKLWAEDGEFTSARAVLTVVKDDDHGILDQFSRSVNVSLTQEELDSGLDELSVRSQDTTVLETLSNDFSMDNISDSGASNETTNALQENSLADFSLPQTPQTDNPSEGRGEGVSKSFSDHGFYSPSSTLGDSPLVDDPLEYQAGLLVQNAIQQAIAEQVDKAVSKTSRDGAEQQGPEATVEEAEAAAFGSEKPQSMFEPPQVSSPVQEKRDVLPKILPAEDRALRERGPPQPLPAVQPSGPINMEETRPEGSYFSKYSEAAELRSTASLLATQESDVMVGPFKLRSRKQRTLSMIEEEIRAAQEREEELKRQRQVLQSTQSPRTKNAPSLPSRTCYKTAPGKIEKVKPPPSPTTEGPSLQPDLAPEEAAGTQRPKNLMQTLMEDYETHKSKRRERMDDSSVLEATRVNRRKSALALRWEAGIYANQEEEDNE

SEQ ID NO: 639 - protein, 948 aa, Homo sapiens
  Payload ID: 108;
  Gene Symbol: AKAP2;
  Gene Name: A kinase (PRKA) anchor prt 2;
  Uniprot ID:  Q9Y2D5;
  ENSP ID: ENSP00000363649
MRWPQPGAAARLPPESPGPPESPGPPEREAAAARRWTGAEPQDCAPGSGRPEKPPQLSEDDIWLKSEGDNYSATLLEPAASSLSPDHKNMEIEVSVAECKSVPGITSTPHPMDHPSAFYSPPHNGLLTDHHESLDNDVAREIRYLDEVLEANCCDSAVDGTYNGTSSPEPGAVVLVGGLSPPVHEATQPEPTERTASRQAPPHIELSNSSPDPMAEAERTNGHSPSQPRDALGDSLQVPVSPSSTTSSRCSSRDGEFTLTTLKKEAKFELRAFHEDKKPSKLFEDDEHEKEQYCIRKVRPSEEMLELEKERRELIRSQAVKKNPGIAAKWWNPPQEKTIEEQLDEEHLESHKKYKERKERRAQQEQLLLQKQLQQQQQQPPSQLCTAPASSHERASMIDKAKEDIVTEQIDFSAARKQFQLMENSRQAVAKGQSTPRLFSIKPFYRPLGSVNSDKPLTNPRPPSVGGPPEDSGASAAKGQKSPGALETPSAAGSQGNTASQGKEGPYSEPSKRGPLSKLWAEDGEFTSARAVLTVVKDDDHGILDQFSRSVNVSLTQEELDSGLDELSVRSQDTTVLETLSNDFSMDNISDSGASNETTNALQENSLADFSLPQTPQTDNPSEGRGEGVSKSFSDHGFYSPSSTLGDSPLVDDPLEYQAGLLVQNAIQQAIAEQVDKAVSKTSRDGAEQQGPEATVEEAEAAAFGSEKPQSMFEPPQVSSPVQEKRDVLPKILPAEDRALRERGPPQPLPAVQPSGPINMEETRPEGSYFSKYSEAAELRSTASLLATQESDVMVGPFKLRSRKQRTLSMIEEEIRAAQEREEELKRQRQVLQSTQSPRTKNAPSLPSRTCYKTAPGKIEKVKPPPSPTTEGPSLQPDLAPEEAAGTQRPKNLMQTLMEDYETHKSKRRERMDDSSVLEATRVNRRKSALALRWEAGIYANQEEEDNE

SEQ ID NO: 640 - protein, 961 aa, Homo sapiens
  Payload ID: 108;
  Gene Symbol: AKAP2;
  Gene Name: A kinase (PRKA) anchor prt 2;
  Uniprot ID:  Q9Y2D5;
  ENSP ID: ENSP00000404782
MRWPQPGAAARLPPESPGPPESPGPPEREAAAARRWTGAEPQDCAPGSGRPEKPPQLSEDDIWLKSEGDNYSATLLEPAASSLSPDHKNMEIEVSVAECKSVPGITSTPHPMDHPSAFYSPPHNGLLTDHHESLDNDVAREIRYLDEVLEANCCDSAVDGTYNGTSSPEPGAVVLVGGLSPPVHEATQPEPTERTASRQAPPHIELSNSSPDPMAEAERTNGHSPSQPRDALGDSLQVPVSPSSTTSSRCSSRDGEFTLTTLKKEAKFELRAFHEDKKPSKLFEDDEHEKEQYCIRKVRPSEEMLELEKERRELIRSQAVKKNPGIAAKWWNPPQEKTIEEQLDEEHLESHKKYKERKERRAQQEQLLLQKQLQQQQQQPPSQLCTAPASSHERASMIDKAKEDIVTEQIDFSAARKQFQLMENSRQAVAKGQSTPRLFSIKPFYRPLGSVNSDKPLTNPRPPSVGGPPEDSGASAAKGQKSPGALETPSAAGSQGNTASQGKEGPYSEPSKRGPLSKLWAEDGEFTSARAVLTVVKDDDHGILDQFSRSVNVSLTQEELDSGLDELSVRSQDTTVLETLSNDFSMDNISDSGASNETTNALQENSLADFSLPQTPQTDNPSEGRGEGVSKSFSDHGFYSPSSTLGDSPLVDDPLEYQAGLLVQNAIQQAIAEQVDKAVSKTSRDGAEQQGPEATVEEAEAAAFGSEKPQSMFEPPQVSSPVQEKRDVLPKILPAEDRALRERGPPQPLPAVQPSGPINMEETRPEGSYFSKYSEAAELRSTASLLATQESDVMVGPFKLRSRKQRTLSMIEEEIRAAQEREEELKRQRQVLQSTQSPRTKNAPSLPSRTCYKTAPGKIEKVKPPPSPTTEGPSLQPDLAPEEAAGTQRPKNLMQTLMEDYETHKSKRRERMDDSSYTSKLLSCKVTSEVLEATRVNRRKSALALRWEAGIYANQEEEDNE

SEQ ID NO: 641 - protein, 778 aa, Homo sapiens
  Payload ID: 108;
  Gene Symbol: AKAP2;
  Gene Name: A kinase (PRKA) anchor prt 2;
  ENSP ID: ENSP00000419268
MIATWMLFSLFTKPPQLSEDDIWLKSEGDNYSATLLEPAASSLSPDHKNMEIEVSVAECKSVPGITSTPHPMDHPSAFYSPPHNGLLTDHHESLDNDVAREIRYLDEVLEANCCDSAVDGTYNGTSSPEPGAVVLVGGLSPPVHEATQPEPTERTASRQAPPHIELSNSSPDPMAEAERTNGHSPSQPRDALGDSLQVPVSPSSTTSSRCSSRDGEFTLTTLKKEAKFELRAFHEDKKPSKLFEDDEHEKEQYCIRKVRPSEEMLELEKERRELIRSQAVKKNPGIAAKWWNPPQEKTIEEQLDEEHLESHKKYKERKERRAQQEQLLLQKQLQQQQQQPPSQLCTAPASSHERASMIDKAKEDIVTEQIDFSAARKQFQLMENSRQAVAKGQSTPRLFSIKPFYRPLGSVNSDKPLTNPRPPSVGGPPEDSGASAAKGQKSPGALETPSAAGSQGNTASQGKEGPYSEPSKRGPLSKLWAEDGEFTSARAVLTVVKDDDHGILDQFSRSVNVSLTQEELDSGLDELSVRSQDTTVLETLSNDFSMDNISDSGASNETTNALQENSLADFSLPQTPQTDNPSEGRGEGVSKSFSDHGFYSPSSTLGDSPLVDDPLEYQAGLLVQNAIQQAIAEQVDKAVSKTSRDGAEQQGPEATVEEAEAAAFGSEKPQSMFEPPQVSSPVQEKRDVLPKILPAEDRALRERGPPQPLPAVQPSGPINMEETRPEGSYFSKYSEAAELRSTASLLATQESDVMVGPFKLRSRKQRTLSMIEEEIRAA

SEQ ID NO: 642 - protein, 54 aa, Homo sapiens
  Payload ID: 108;
  Gene Symbol: AKAP2;
  Gene Name: A kinase (PRKA) anchor prt 2;
  ENSP ID: ENSP00000419364
MRWPQPGAAARLPPESPGPPESPGPPEREAAAARRWTGAEPQDCAPGSGRPEGK

SEQ ID NO: 643 - protein, 853 aa, Homo sapiens
  Payload ID: 109;
  Gene Symbol: AKAP3;
  Gene Name: A kinase (PRKA) anchor prt 3;
  Uniprot ID:  O75969;
  ENSP ID: ENSP00000228850
MSEKVDWLQSQNGVCKVDVYSPGDNQAQDWKMDTSTDPVRVLSWLRRDLEKSTAEFQDVRFKPGESFGGETSNSGDPHKGFSVDYYNTTTKGTPERLHFEMTHKEIPCQGPRAQLGNGSSVDEVSFYANRLTNLVIAMARKEINEKIDGSENKCVYQSLYMGNEPTPTKSLSKIASELVNETVSACSRNAAPDKAPGSGDRVSGSSQSPPNLKYKSTLKIKESTKERQGPDDKPPSKKSFFYKEVFESRNGDYAREGGRFFPRERKRFRGQERPDDFTASVSEGIMTYANSVVSDMMVSIMKTLKIQVKDTTIATILLKKVLLKHAKEVVSDLIDSFLRNLHSVTGTLMTDTQFVSAVKRTVFSHGSQKATDIMDAMLRKLYNVMFAKKVPEHVRKAQDKAESYSLISMKGMGDPKNRNVNFAMKSETKLREKMYSEPKSEEETCAKTLGEHIIKEGLTLWHKTQQKECKSLGFQHAAFEAPNTQRKPASDISFEYPEDIGNLSLPPYPPEKPENFMYDSDSWAEDLIVSALLLIQYHLAQGGRRDARSFVEAAGTTNFPANEPPVAPDESCLKSAPIVGDQEQAEKKDLRSVFFNFIRNLLSETIFKRDQSPEPKVPEQPVKEDRKLCERPLASSPPRLYEDDETPGALSGLTKMAVSQIDGHMSGQMVEHLMNSVMKLCVIIAKSCDASLAELGDDKSGDASRLTSAFPDSLYECLPAKGTGSAEAVLQNAYQAIHNEMRGTSGQPPEGCAAPTVIVSNHNLTDTVQNKQLQAVLQWVAASELNVPILYFAGDDEGIQEKLLQLSAAAVDKGCSVGEVLQSVLRYEKERQLNEAVGNVTPLQLLDWLMVNL

SEQ ID NO: 644 - protein, 96 aa, Homo sapiens
  Payload ID: 109;
  Gene Symbol: AKAP3;
  Gene Name: A kinase (PRKA) anchor prt 3;
  ENSP ID: ENSP00000439382
MSEKVDWLQSQNGVCKVDVYSPGDNQAQDWKMDTSTDPVRVLSWLRRDLEKSTAEFQDVRFKPGESFGGETSNSGDPHKGFSVDYYNTTTKGTPER

SEQ ID NO: 645 - protein, 853 aa, Homo sapiens; identical to SEQ ID NO: 643
  Payload ID: 109;
  Gene Symbol: AKAP3;
  Gene Name: A kinase (PRKA) anchor prt 3;
  Uniprot ID:  O75969;
  ENSP ID: ENSP00000440994

SEQ ID NO: 646 - protein, 161 aa, Homo sapiens
  Payload ID: 109;
  Gene Symbol: AKAP3;
  Gene Name: A kinase (PRKA) anchor prt 3;
  ENSP ID: ENSP00000442376
MSEKVDWLQSQNGVCKVDVYSPGDNQAQDWKMDTSTDPVRVLSWLRRDLEKSTAEFQDVRFKPGESFGGETSNSGDPHKGFSVDYYNTTTKGTPERLHFEMTHKEIPCQGPRAQLGNGSSVDEVSFYANRLTNLVIAMARKEINEKIDGSENKCVYQSLYM

SEQ ID NO: 647 - protein, 854 aa, Homo sapiens
  Payload ID: 110;
  Gene Symbol: AKAP4;
  Gene Name: A kinase (PRKA) anchor prt 4;
  Uniprot ID:  Q5JQC9;
  ENSP ID: ENSP00000351327
MMAYSDTTMMSDDIDWLRSHRGVCKVDLYNPEGQQDQDRKVICFVDVSTLNVEDKDYKDAASSSSEGNLNLGSLEEKEIIVIKDTEKKDQSKTEGSVCLFKQAPSDPVSVLNWLLSDLQKYALGFQHALSPSTSTCKHKVGDTEGEYHRASSENCYSVYADQVNIDYLMNRPQNLRLEMTAAKNTNNNQSPSAPPAKPPSTQRAVISPDGECSIDDLSFYVNRLSSLVIQMAHKEIKEKLEGKSKCLHHSICPSPGNKERISPRTPASKIASEMAYEAVELTAAEMRGTGEESREGGQKSFLYSELSNKSKSGDKQMSQRESKEFADSISKGLMVYANQVASDMMVSLMKTLKVHSSGKPIPASVVLKRVLLRHTKEIVSDLIDSCMKNLHNITGVLMTDSDFVSAVKRNLFNQWKQNATDIMEAMLKRLVSALIGEEKETKSQSLSYASLKAGSHDPKCRNQSLEFSTMKAEMKERDKGKMKSDPCKSLTSAEKVGEHILKEGLTIWNQKQGNSCKVATKACSNKDEKGEKINASTDSLAKDLIVSALKLIQYHLTQQTKGKDTCEEDCPGSTMGYMAQSTQYEKCGGGQSAKALSVKQLESHRAPGPSTCQKENQHLDSQKMDMSNIVLMLIQKLLNENPFKCEDPCEGENKCSEPRASKAASMSNRSDKAEEQCQEHQELDCTSGMKQANGQFIDKLVESVMKLCLIMAKYSNDGAALAELEEQAASANKPNFRGTRCIHSGAMPQNYQDSLGHEVIVNNQCSTNSLQKQLQAVLQWIAASQFNVPMLYFMGDKDGQLEKLPQVSAKAAEKGYSVGGLLQEVMKFAKERQPDEAVGKVARKQLLDWLLANL

SEQ ID NO: 648 - protein, 845 aa, Homo sapiens
  Payload ID: 110;
  Gene Symbol: AKAP4;
  Gene Name: A kinase (PRKA) anchor prt 4;
  Uniprot ID:  Q5JQC9;
  ENSP ID: ENSP00000365232
MSDDIDWLRSHRGVCKVDLYNPEGQQDQDRKVICFVDVSTLNVEDKDYKDAASSSSEGNLNLGSLEEKEIIVIKDTEKKDQSKTEGSVCLFKQAPSDPVSVLNWLLSDLQKYALGFQHALSPSTSTCKHKVGDTEGEYHRASSENCYSVYADQVNIDYLMNRPQNLRLEMTAAKNTNNNQSPSAPPAKPPSTQRAVISPDGECSIDDLSFYVNRLSSLVIQMAHKEIKEKLEGKSKCLHHSICPSPGNKERISPRTPASKIASEMAYEAVELTAAEMRGTGEESREGGQKSFLYSELSNKSKSGDKQMSQRESKEFADSISKGLMVYANQVASDMMVSLMKTLKVHSSGKPIPASVVLKRVLLRHTKEIVSDLIDSCMKNLHNITGVLMTDSDFVSAVKRNLFNQWKQNATDIMEAMLKRLVSALIGEEKETKSQSLSYASLKAGSHDPKCRNQSLEFSTMKAEMKERDKGKMKSDPCKSLTSAEKVGEHILKEGLTIWNQKQGNSCKVATKACSNKDEKGEKINASTDSLAKDLIVSALKLIQYHLTQQTKGKDTCEEDCPGSTMGYMAQSTQYEKCGGGQSAKALSVKQLESHRAPGPSTCQKENQHLDSQKMDMSNIVLMLIQKLLNENPFKCEDPCEGENKCSEPRASKAASMSNRSDKAEEQCQEHQELDCTSGMKQANGQFIDKLVESVMKLCLIMAKYSNDGAALAELEEQAASANKPNFRGTRCIHSGAMPQNYQDSLGHEVIVNNQCSTNSLQKQLQAVLQWIAASQFNVPMLYFMGDKDGQLEKLPQVSAKAAEKGYSVGGLLQEVMKFAKERQPDEAVGKVARKQLLDWLLANL

SEQ ID NO: 649 - protein, 213 aa, Homo sapiens
  Payload ID: 110;
  Gene Symbol: AKAP4;
  Gene Name: A kinase (PRKA) anchor prt 4;
  ENSP ID: ENSP00000402403
MSDDIDWLRSHRGVCKVDLYNPEGQQDQDRKVICFVDVSTLNVEDKDYKDAASSSSEGNLNLGSLEEKEIIVIKDTEKKDQSKTEGSVCLFKQAPSDPVSVLNWLLSDLQKYALGFQHALSPSTSTCKHKVGDTEGEYHRASSENCYSVYADQVNIDYLMNRPQNLRLEMTAAKNTNNNQNTCEEDCPGSTMGYMAQSTQYEKCGGGQSAKAL

SEQ ID NO: 650 - protein, 254 aa, Homo sapiens
  Payload ID: 110;
  Gene Symbol: AKAP4;
  Gene Name: A kinase (PRKA) anchor prt 4;
  ENSP ID: ENSP00000412279
MSDDIDWLRSHRGVCKVDLYNPEGQQDQDRKVICFVDVSTLNVEDKDYKDAASSSSEGNLNLGSLEEKEIIVIKDTEKKDQSKTEGSVCLFKQAPSDPVSVLNWLLSDLQKYALGFQHALSPSTSTCKHKVGDTEGEYHRASSENCYSVYADQVNIDYLMNRPQNLRLEMTAAKNTNNNQSPSAPPAKPPSTQRAVISPDGECSIDDLSFYVNRLSSLVIQMAHKEIKEKLEGKSKCLHHSICPSPGNKERISP

SEQ ID NO: 651 - protein, 427 aa, Homo sapiens
  Payload ID: 111;
  Gene Symbol: AKAP5;
  Gene Name: A kinase (PRKA) anchor prt 5;
  Uniprot ID:  P24588;
  ENSP ID: ENSP00000315615
METTISEIHVENKDEKRSAEGSPGAERQKEKASMLCFKRRKKAAKALKPKAGSEAADVARKCPQEAGASDQPEPTRGAWASLKRLVTRRKRSESSKQQKPLEGEMQPAINAEDADLSKKKAKSRLKIPCIKFPRGPKRSNHSKIIEDSDCSIKVQEEAEILDIQTQTPLNDQATKAKSTQDLSEGISRKDGDEVCESNVSNSTTSGEKVISVELGLDNGHSAIQTGTLILEEIETIKEKQDVQPQQASPLETSETDHQQPVLSDVPPLPAIPDQQIVEEASNSTLESAPNGKDYESTEIVAEETKPKDTELSQESDFKENGITEEKSKSEESKRMEPIAIIITDTEISEFDVTKSKNVPKQFLISAENEQVGVFANDNGFEDRTSEQYETLLIETASSLVKNAIQLSIEQLVNEMASDDNKINNLLQ

SEQ ID NO: 652 - protein, 427 aa, Homo sapiens; identical to SEQ ID NO: 651
  Payload ID: 111;
  Gene Symbol: AKAP5;
  Gene Name: A kinase (PRKA) anchor prt 5;
  Uniprot ID:  P24588;
  ENSP ID: ENSP00000378207

SEQ ID NO: 653 - protein, 2319 aa, Homo sapiens
  Payload ID: 112;
  Gene Symbol: AKAP6;
  Gene Name: A kinase (PRKA) anchor prt 6;
  Uniprot ID:  Q13023;
  ENSP ID: ENSP00000280979
MLTMSVTLSPLRSQDLDPMATDASPMAINMTPTVEQGEGEEAMKDMDSDQQYEKPPPLHTGADWKIVLHLPEIETWLRMTSERVRDLTYSVQQDSDSKHVDVHLVQLKDICEDISDHVEQIHALLETEFSLKLLSYSVNVIVDIHAVQLLWHQLRVSVLVLRERILQGLQDANGNYTRQTDILQAFSEETKEGRLDSLTEVDDSGQLTIKCSQNYLSLDCGITAFELSDYSPSEDLLSGLGDMTSSQVKTKPFDSWSYSEMEKEFPELIRSVGLLTVAADSISTNGSEAVTEEVSQVSLSVDDKGGCEEDNASAVEEQPGLTLGVSSSSGEALTNAAQPSSETVQQESSSSSHHDAKNQQPVPCENATPKRTIRDCFNYNEDSPTQPTLPKRGLFLKEETFKNDLKGNGGKRQMVDLKPEMSRSTPSLVDPPDRSKLCLVLQSSYPNSPSAASQSYECLHKVGNGNLENTVKFHIKEISSSLGRLNDCYKEKSRLKKPHKTSEEVPPCRTPKRGTGSGKQAKNTKSSAVPNGELSYTSKAIEGPQTNSASTSSLEPCNQRSWNAKLQLQSETSSSPAFTQSSESSVGSDNIMSPVPLLSKHKSKKGQASSPSHVTRNGEVVEAWYGSDEYLALPSHLKQTEVLALKLENLTKLLPQKPRGETIQNIDDWELSEMNSDSEIYPTYHVKKKHTRLGRVSPSSSSDIASSLGESIESGPLSDILSDEESSMPLAGMKKYADEKSERASSSEKNESHSATKSALIQKLMQDIQHQDNYEAIWEKIEGFVNKLDEFIQWLNEAMETTENWTPPKAEMDDLKLYLETHLSFKLNVDSHCALKEAVEEEGHQLLELIASHKAGLKDMLRMIASQWKELQRQIKRQHSWILRALDTIKAEILATDVSVEDEEGTGSPKAEVQLCYLEAQRDAVEQMSLKLYSEQYTSSSKRKEEFADMSKVHSVGSNGLLDFDSEYQELWDWLIDMESLVMDSHDLMMSEEQQQHLYKRYSVEMSIRHLKKTELLSKVEALKKGGVLLPNDLLEKVDSINEKWELLGKTLGEKIQDTMAGHSGSSPRDLLSPESGSLVRQLEVRIKELKGWLRDTELFIFNSCLRQEKEGTMNTEKQLQYFKSLCREIKQRRRGVASILRLCQHLLDDRETCNLNADHQPMQLIIVNLERRWEAIVMQAVQWQTRLQKKMGKESETLNVIDPGLMDLNGMSEDALEWDEMDISNKLISLNEESNDLDQELQPVIPSLKLGETSNEDPGYDEEADNHGGSQYASNITAPSSPHIYQVYSLHNVELYEDNHMPFLKNNPKVTGMTQPNVLTKSLSKDSSFSSTKSLPDLLGGSNLVKPCACHGGDMSQNSGSESGIVSEGDTETTTNSEMCLLNAVDGSPSNLETEHLDPQMGDAVNVLKQKFTDEGESIKLPNSSQSSISPVGCVNGKVGDLNSITKHTPDCLGEELQGKHDVFTFYDYSYLQGSKLKLPMIMKQSQSEKAHVEDPLLRGFYFDKKSCKSKHQTTELQPDVPPHERILASASHEMDRISYKSGNIEKTFTGMQNAKQLSLLSHSSSIESLSPGGDLFGLGIFKNGSDSLQRSTSLESWLTSYKSNEDLFSCHSSGDISVSSGSVGELSKRTLDLLNRLENIQSPSEQKIKRSVSDITLQSSSQKMSFTGQMSLDIASSINEDSAASLTELSSSDELSLCSEDIVLHKNKIPESNASFRKRLTRSVADESDVNVSMIVNVSCTSACTDDEDDSDLLSSSTLTLTEEELCIKDEDDDSSIATDDEIYEDCTLMSGLDYIKNELQTWIRPKLSLTRDKKRCNVSDEMKGSKDISSSEMTNPSDTLNIETLLNGSVKRVSENNGNGKNSSHTHELGTKRENKKTIFKVNKDPYVADMENGNIEGIPERQKGKPNVTSKVSENLGSHGKEISESEHCKCKALMDSLDDSNTAGKEFVSQDVRHLPKKCPNHHHFENQSTASTPTEKSFSELALETRFNNRQDSDALKSSDDAPSMAGKSAGCCLALEQNGTEENASISNISCCNCEPDVFHQKDAEDCSVHNFVKEIIDMASTALKSKSQPENEVAAPTSLTQIKEKVLEHSHRPIQLRKGDFYSYLSLSSHDSDCGEVTNYIEEKSSTPLPLDTTDSGLDDKEDIECFFEACVEGDSDGEEPCFSSAPPNESAVPSEAAMPLQATACSSEFSDSSLSADDADTVALSSPSSQERAEVGKEVNGLPQTSSGCAENLEFTPSKLDSEKESSGKPGESGMPEEHNAASAKSKVQDLSLKANQPTDKAALHPSPKTLTCEENLLNLHEKRHRNMHR

SEQ ID NO: 654 - protein, 1075 aa, Homo sapiens
  Payload ID: 112;
  Gene Symbol: AKAP6;
  Gene Name: A kinase (PRKA) anchor prt 6;
  Uniprot ID:  Q13023;
  ENSP ID: ENSP00000450531
MLTMSVTLSPLRSQDLDPMATDASPMAINMTPTVEQGEGEEAMKDMDSDQQYEKPPPLHTGADWKIVLHLPEIETWLRMTSERVRDLTYSVQQDSDSKHVDVHLVQLKDICEDISDHVEQIHALLETEFSLKLLSYSVNVIVDIHAVQLLWHQLRVSVLVLRERILQGLQDANGNYTRQTDILQAFSEETKEGRLDSLTEVDDSGQLTIKCSQNYLSLDCGITAFELSDYSPSEDLLSGLGDMTSSQVKTKPFDSWSYSEMEKEFPELIRSVGLLTVAADSISTNGSEAVTEEVSQVSLSVDDKGGCEEDNASAVEEQPGLTLGVSSSSGEALTNAAQPSSETVQQESSSSSHHDAKNQQPVPCENATPKRTIRDCFNYNEDSPTQPTLPKRGLFLKEETFKNDLKGNGGKRQMVDLKPEMSRSTPSLVDPPDRSKLCLVLQSSYPNSPSAASQSYECLHKVGNGNLENTVKFHIKEISSSLGRLNDCYKEKSRLKKPHKTSEEVPPCRTPKRGTGSGKQAKNTKSSAVPNGELSYTSKAIEGPQTNSASTSSLEPCNQRSWNAKLQLQSETSSSPAFTQSSESSVGSDNIMSPVPLLSKHKSKKGQASSPSHVTRNGEVVEAWYGSDEYLALPSHLKQTEVLALKLENLTKLLPQKPRGETIQNIDDWELSEMNSDSEIYPTYHVKKKHTRLGRVSPSSSSDIASSLGESIESGPLSDILSDEESSMPLAGMKKYADEKSERASSSEKNESHSATKSALIQKLMQDIQHQDNYEAIWEKIEGFVNKLDEFIQWLNEAMETTENWTPPKAEMDDLKLYLETHLSFKLNVDSHCALKEAVEEEGHQLLELIASHKAGLKDMLRMIASQWKELQRQIKRQHSWILRALDTIKAEILATDVSVEDEEGTGSPKAEVQLCYLEAQRDAVEQMSLKLYSEQYTSSSKRKEEFADMSKVHSVGSNGLLDFDSEYQELWDWLIDMESLVMDSHDLMMSEEQQQHLYKRYSVEMSIRHLKKTELLSKVEALKKGGVLLPNDLLEKVDSINEKWELLGVFAFLLLFVGYVYIFCVVKYSVRFLI

SEQ ID NO: 655 - protein, 108 aa, Homo sapiens
  Payload ID: 112;
  Gene Symbol: AKAP6;
  Gene Name: A kinase (PRKA) anchor prt 6;
  ENSP ID: ENSP00000451146
MLTMSVTLSPLRSQDLDPMATDASPMAINMTPTVEQGEGEEAMKDMDSDQQYEKPPPLHTGADWKIVLHLPEIETWLRMTSERVRDLTYSVQQDSDSKHVDVHLVQLK

SEQ ID NO: 656 - protein, 356 aa, Homo sapiens
  Payload ID: 112;
  Gene Symbol: AKAP6;
  Gene Name: A kinase (PRKA) anchor prt 6;
  ENSP ID: ENSP00000451239
MTSSQVKTKPFDSWSYSEMEKEFPELIRSVGLLTVAADSISTNGSEAVTEEVSQVSLSVDDKGGCEEDNASAVEEQPGLTLGVSSSSGEALTNAAQPSSETVQQESSSSSHHDAKNQQPVPCENATPKRTIRDCFNYNEDSPTQPTLPKRGLFLKEETFKNDLKGNGGKRQMVDLKPEMSRSTPSLVDPPDRSKLCLVLQSSYPNSPSAASQSYECLHKVGNGNLENTVKFHIKEISSSLGRLNDCYKEKSRLKKPHKTSEEVPPCRTPKRGTGSGKQAKNTKSSAVPNGELSYTSKAIEGPQTNSASTSSLEPCNQRSWNAKLQLQSETSSSPAFTQSSESSVGSDNIMSPVPLL

SEQ ID NO: 657 - protein, 25 aa, Homo sapiens
  Payload ID: 112;
  Gene Symbol: AKAP6;
  Gene Name: A kinase (PRKA) anchor prt 6;
  ENSP ID: ENSP00000451246
MTSSQVKTKPFDSWSYSEMEKEFPE

SEQ ID NO: 658 - protein, 1245 aa, Homo sapiens
  Payload ID: 112;
  Gene Symbol: AKAP6;
  Gene Name: A kinase (PRKA) anchor prt 6;
  ENSP ID: ENSP00000451247
MLTMSVTLSPLRSQDLDPMATDASPMAINMTPTVEQGEGEEAMKDMDSDQQYEKPPPLHTGADWKIVLHLPEIETWLRMTSERVRDLTYSVQQDSDSKHVDVHLVQLKDICEDISDHVEQIHALLETEFSLKLLSYSVNVIVDIHAVQLLWHQLRVSVLVLRERILQGLQDANGNYTRQTDILQAFSEETKEGRLDSLTEVDDSGQLTIKCSQNYLSLDCGITAFELSDYSPSEDLLSGLGDMTSSQVKTKPFDSWSYSEMEKEFPELIRSVGLLTVAADSISTNGSEAVTEEVSQVSLSVDDKGGCEEDNASAVEEQPGLTLGVSSSSGEALTNAAQPSSETVQQESSSSSHHDAKNQQPVPCENATPKRTIRDCFNYNEDSPTQPTLPKRGLFLKEETFKNDLKGNGGKRQMVDLKPEMSRSTPSLVDPPDRSKLCLVLQSSYPNSPSAASQSYECLHKVGNGNLENTVKFHIKEISSSLGRLNDCYKEKSRLKKPHKTSEEVPPCRTPKRGTGSGKQAKNTKSSAVPNGELSYTSKAIEGPQTNSASTSSLEPCNQRSWNAKLQLQSETSSSPAFTQSSESSVGSDNIMSPVPLLSKHKSKKGQASSPSHVTRNGEVVEAWYGSDEYLALPSHLKQTEVLALKLENLTKLLPQKPRGETIQNIDDWELSEMNSDSEIYPTYHVKKKHTRLGRVSPSSSSDIASSLGESIESGPLSDILSDEESSMPLAGMKKYADEKSERASSSEKNESHSATKSALIQKLMQDIQHQDNYEAIWEKIEGFVNKLDEFIQWLNEAMETTENWTPPKAEMDDLKLYLETHLSFKLNVDSHCALKEAVEEEGHQLLELIASHKAGLKDMLRMIASQWKELQRQIKRQHSWILRALDTIKAEILATDVSVEDEEGTGSPKAEVQLCYLEAQRDAVEQMSLKLYSEQYTSSSKRKEEFADMSKVHSVGSNGLLDFDSEYQELWDWLIDMESLVMDSHDLMMSEEQQQHLYKRYSVEMSIRHLKKTELLSKVEALKKGGVLLPNDLLEKVDSINEKWELLGKTLGEKIQDTMAGHSGSSPRDLLSPESGSLVRQLEVRIKELKGWLRDTELFIFNSCLRQEKEGTMNTEKQLQYFKSLCREIKQRRRGVASILRLCQHLLDDRETCNLNADHQPMQLIIVNLERRWEAIVMQAVQWQTRLQKKMGKESIRLAATQGWPHPPALGWPLVPSRLSLPFITLTSPKMNLPSKCVFSTQAL

SEQ ID NO: 659 - protein, 118 aa, Homo sapiens
  Payload ID: 112;
  Gene Symbol: AKAP6;
  Gene Name: A kinase (PRKA) anchor prt 6;
  ENSP ID: ENSP00000452109
  MOD_RES (1)..(1): Any amino acid
XNTEKQLQYFKSLCREIKQRRRGVASILRLCQHLLDDRETCNLNADHQPMQLIIVNLERRWEAIVMQAVQWQTRLQKKMGKESVSDAFFKHNCLSFSQTKNNSFRLGNGVHLINGFTN

SEQ ID NO: 660 - protein, 47 aa, Homo sapiens
  Payload ID: 112;
  Gene Symbol: AKAP6;
  Gene Name: A kinase (PRKA) anchor prt 6;
  ENSP ID: ENSP00000452204
MTSSQVKTKPFDSWSYSEMEKEFPELIRSVGLLTVAADSISTNGSEA

SEQ ID NO: 661 - protein, 84 aa, Homo sapiens
  Payload ID: 113;
  Gene Symbol: AKAP7;
  Gene Name: A kinase (PRKA) anchor prt 7;
  ENSP ID: ENSP00000263050
MLKKKQSNGYYHCESSIVIGEKNGGEPDDAELVRLSKRLVENAVLKAVQQYLEETQNKNKPGEGSSVKTEAADQNGNDNENNRK

SEQ ID NO: 662 - protein, 81 aa, Homo sapiens
  Payload ID: 113;
  Gene Symbol: AKAP7;
  Gene Name: A kinase (PRKA) anchor prt 7;
  Uniprot ID:  O43687;
  ENSP ID: ENSP00000345149
MGQLCCFPFSRDEGKISEKNGGEPDDAELVRLSKRLVENAVLKAVQQYLEETQNKNKPGEGSSVKTEAADQNGNDNENNRK

SEQ ID NO: 663 - protein, 348 aa, Homo sapiens
  Payload ID: 113;
  Gene Symbol: AKAP7;
  Gene Name: A kinase (PRKA) anchor prt 7;
  Uniprot ID:  Q9P0M2;
  ENSP ID: ENSP00000405252
MERPEAGGINSNECENVSRKKKMSEEFEANTMDSLVDMPFATVDIQDDCGITDEPQINLKRSQENEWVKSDQVKKRKKKRKDYQPNYFLSIPITNKEIIKGIKILQNAIIQQDERLAKAMVSDGSFHITLLVMQLLNEDEVNIGIDALLELKPFIEELLQGKHLTLPFQGIGTFGNQVGFVKLAEGDHVNSLLEIAETANRTFQEKGILVGESRSFKPHLTFMKLSKSPWLRKNGVKKIDPDLYEKFISHRFGEEILYRIDLCSMLKKKQSNGYYHCESSIVIGEKNGGEPDDAELVRLSKRLVENAVLKAVQQYLEETQNKNKPGEGSSVKTEAADQNGNDNENNRK

SEQ ID NO: 664 - protein, 104 aa, Homo sapiens
  Payload ID: 113;
  Gene Symbol: AKAP7;
  Gene Name: A kinase (PRKA) anchor prt 7;
  Uniprot ID:  O43687;
  ENSP ID: ENSP00000418208
MGQLCCFPFSRDEGKISELESSSSAVLQRYSKDIPSWSSGEKNGGEPDDAELVRLSKRLVENAVLKAVQQYLEETQNKNKPGEGSSVKTEAADQNGNDNENNRK

SEQ ID NO: 665 - protein, 350 aa, Homo sapiens
  Payload ID: 113;
  Gene Symbol: AKAP7;
  Gene Name: A kinase (PRKA) anchor prt 7;
  ENSP ID: ENSP00000441048
MERPEAGINSNECENVSRKKKMSEEFEANTMDSLVDMPFATVDIQDDCGITDEPQINLKRSQENEWVKSDQVKKRKKKRKDYQPNYFLSIPITNKEIIKGIKILQNAIIQQDERLAKAMVSDGSFHITLLVMQLLNEDEVNIGIDALLELKPFIEELLQGKHLTLPFQGIGTFGNQVGFVKLAEGDHVNSLLEIAETANRTFQEKGILVGESRSFKPHLTFMKLSKSPWLRKNGVKKIDPDLYEKFISHRFGEEILYRIDLCSMLKKKQSNGYYHCESSIVIGKKPIGIRDLINEALHRETMGLKSKVKQIKELLLKPETQARIRRELFEGRLINNSNSANDVDFSTTLT

SEQ ID NO: 666 - protein, 51 aa, Homo sapiens
  Payload ID: 113;
  Gene Symbol: AKAP7;
  Gene Name: A kinase (PRKA) anchor prt 7;
  ENSP ID: ENSP00000445486
  MOD_RES (1)..(1): Any amino acid
XTDEPQINLKRSQENEWVKSDQVKKRKKKRKDYQPNYFLSIPITNKERSRC

SEQ ID NO: 667 - protein, 87 aa, Homo sapiens
  Payload ID: 113;
  Gene Symbol: AKAP7;
  Gene Name: A kinase (PRKA) anchor prt 7;
  ENSP ID: ENSP00000446022
MLKKKQSNGYYHCESSIVIGKKPIGIRDLINEALHRETMGLKSKVKQIKELLLKPETQARIRRELFEGRLINNSNSANDVDFSTTLT

SEQ ID NO: 668 - protein, 692 aa, Homo sapiens
  Payload ID: 114;
  Gene Symbol: AKAP8;
  Gene Name: A kinase (PRKA) anchor prt 8;
  Uniprot ID:  O43823;
  ENSP ID: ENSP00000269701
MDQGYGGYGAWSAGPANTQGAYGTGVASWQGYENYNYYGAQNTSVTTGATYSYGPASWEAAKANDGGLAAGAPAMHMASYGPEPCTDNSDSLIAKINQRLDMMSKEGGRGGSGGGGEGIQDRESSFRFQPFESYDSRPCLPEHNPYRPSYSYDYEFDLGSDRNGSFGGQYSECRDPARERGSLDGFMRGRGQGRFQDRSNPGTFMRSDPFVPPAASSEPLSTPWNELNYVGGRGLGGPSPSRPPPSLFSQSMAPDYGVMGMQGAGGYDSTMPYGCGRSQPRMRDRDRPKRRGFDRFGPDGTGRKRKQFQLYEEPDTKLARVDSEGDFSENDDAAGDFRSGDEEFKGEDELCDSGRQRGEKEDEDEDVKKRREKQRRRDRTRDRAADRIQFACSVCKFRSFDDEEIQKHLQSKFHKETLRFISTKLPDKTVEFLQEYIVNRNKKIEKRRQELMEKETAKPKPDPFKGIGQEHFFKKIEAAHCLACDMLIPAQPQLLQRHLHSVDHNHNRRLAAEQFKKTSLHVAKSVLNNRHIVKMLEKYLKGEDPFTSETVDPEMEGDDNLGGEDKKETPEEVAADVLAEVITAAVRAVDGEGAPAPESSGEPAEDEGPTDTAEAGSDPQAEQLLEEQVPCGTAHEKGVPKARSEAAEAGNGAETMAAEAESAQTRVAPAPAAADAEVEQTDAESKDAVPTE

SEQ ID NO: 669 - protein, 133 aa, Homo sapiens
  Payload ID: 114;
  Gene Symbol: AKAP8;
  Gene Name: A kinase (PRKA) anchor prt 8;
  ENSP ID: ENSP00000468902
MDQGYGGYGAWSAGPANTQGAYGTGVASWQAPSASSRSSPMTPGPACRSTTPTAPATATTMSSTWGPTAMAALGGSTVNAETQPGSGAPLMASCGAGARAASRTGATLAPSCAATPSCPPLRPLSPCPRPGTS

SEQ ID NO: 670 - protein, 178 aa, Homo sapiens
  Payload ID: 114;
  Gene Symbol: AKAP8;
  Gene Name: A kinase (PRKA) anchor prt 8;
  ENSP ID: ENSP00000469908
  MOD_RES (1)..(1): Any amino acid
XRGRGQGRFQDRSNPGTFMRSDPFVPPAASSEPLSTPWNELNYVGGRGLGGPSPSRPPPSLFSQSMAPDYGVMGMQGAGGYDSTMPYGCGRSQPRMRDRDRPKRRGFDRFGPDGTGRKRKQFQLYEEPDTKLARVDSEGDFSENDDAAGDFRSGDEEFKGEDELCDSGRQRGPATYPG

SEQ ID NO: 671 - protein, 646 aa, Homo sapiens
  Payload ID: 115;
  Gene Symbol: AKAP8L;
  Gene Name: A kinase (PRKA) anchor prt 8-like;
  Uniprot ID:  Q9ULX6;
  ENSP ID: ENSP00000380557
MSYTGFVQGSETTLQSTYSDTSAQPTCDYGYGTWNSGTNRGYEGYGYGYGYGQDNTTNYGYGMATSHSWEMPSSDTNANTSASGSASADSVLSRINQRLDMVPHLETDMMQGGVYGSGGERYDSYESCDSRAVLSERDLYRSGYDYSELDPEMEMAYEGQYDAYRDQFRMRGNDTFGPRAQGWARDARSGRPMASGYGRMWEDPMGARGQCMSGASRLPSLFSQNIIPEYGMFQGMRGGGAFPGGSRFGFGFGNGMKQMRRTWKTWTTADFRTKKKKRKQGGSPDEPDSKATRTDCSDNSDSDNDEGTEGEATEGLEGTEAVEKGSRVDGEDEEGKEDGREEGKEDPEKGALTTQDENGQTKRKLQAGKKSQDKQKKRQRDRMVERIQFVCSLCKYRTFYEDEMASHLDSKFHKEHFKYVGTKLPKQTADFLQEYVTNKTKKTEELRKTVEDLDGLIQQIYRDQDLTQEIAMEHFVKKVEAAHCAACDLFIPMQFGIIQKHLKTMDHNRNRRLMMEQSKKSSLMVARSILNNKLISKKLERYLKGENPFTDSPEEEKEQEEAEGGALDEGAQGEAAGISEGAEGVPAQPPVPPEPAPGAVSPPPPPPPEEEEEGAVPLLGGALQRQIRGIPGLDVEDDEEGGGGAP

SEQ ID NO: 672 - protein, 162 aa, Homo sapiens
  Payload ID: 115;
  Gene Symbol: AKAP8L;
  Gene Name: A kinase (PRKA) anchor prt 8-like;
  ENSP ID: ENSP00000470067
MSYTGFVQGSETTLQSTYSDTSAQPTCDYGYEGYGYGYGYGQDNTTNYGYGMATSHSWEMPSSDTNANTSASGSASADSVLSRINQRLDMVPHLETDMMQGGVYGSGGERYDSYESCDSRAVLSERDLYRSGYDYSELDPEMEMAYEGQYDAYRDQFRMRGN

SEQ ID NO: 673 - protein, 66 aa, Homo sapiens
  Payload ID: 115;
  Gene Symbol: AKAP8L;
  Gene Name: A kinase (PRKA) anchor prt 8-like;
  ENSP ID: ENSP00000470906
MSYTGFVQGSETTLQSTYSDTSAQPTCDYGYGTWNSGTNRGYEGYGYGYGYGQDNTTNYGYELTSA

SEQ ID NO: 674 - protein, 161 aa, Homo sapiens
  Payload ID: 115;
  Gene Symbol: AKAP8L;
  Gene Name: A kinase (PRKA) anchor prt 8-like;
  ENSP ID: ENSP00000470912
MSYTGFVQGSETTLQSTYSDTSAQPTCDYDTLVSVFVSVSVCLPSACPHHLSVSVSLTAGYEGYGYGYGYGQDNTTNYGYGMATSHSWEMPSSDTNANTSASGSASADSVLSRINQRLDMVPHLETDMMQGGVYGSGGERYDSYESCDSRAVLSERDLYRS

SEQ ID NO: 675 - protein, 585 aa, Homo sapiens
  Payload ID: 115;
  Gene Symbol: AKAP8L;
  Gene Name: A kinase (PRKA) anchor prt 8-like;
  Uniprot ID:  Q9ULX6;
  ENSP ID: ENSP00000470952
MSYTGFVQGSETTLQSTYSDTSAQPTCDYGYGTWNSGTNRGYEGYGYGYGYGQDNTTNYGYDSYESCDSRAVLSERDLYRSGYDYSELDPEMEMAYEGQYDAYRDQFRMRGNDTFGPRAQGWARDARSGRPMASGYGRMWEDPMGARGQCMSGASRLPSLFSQNIIPEYGMFQGMRGGGAFPGGSRFGFGFGNGMKQMRRTWKTWTTADFRTKKKKRKQGGSPDEPDSKATRTDCSDNSDSDNDEGTEGEATEGLEGTEAVEKGSRVDGEDEEGKEDGREEGKEDPEKGALTTQDENGQTKRKLQAGKKSQDKQKKRQRDRMVERIQFVCSLCKYRTFYEDEMASHLDSKFHKEHFKYVGTKLPKQTADFLQEYVTNKTKKTEELRKTVEDLDGLIQQIYRDQDLTQEIAMEHFVKKVEAAHCAACDLFIPMQFGIIQKHLKTMDHNRNRRLMMEQSKKSSLMVARSILNNKLISKKLERYLKGENPFTDSPEEEKEQEEAEGGALDEGAQGEAAGISEGAEGVPAQPPVPPEPAPGAVSPPPPPPPEEEEEGAVPLLGGALQRQIRGIPGLDVEDDEEGGGGAP

SEQ ID NO: 676 - protein, 45 aa, Homo sapiens
  Payload ID: 115;
  Gene Symbol: AKAP8L;
  Gene Name: A kinase (PRKA) anchor prt 8-like;
  ENSP ID: ENSP00000471958
MSYTGFVQGSETTLQSTYSDTSAQPTCDYGYGTWNSGTNRELTSA

SEQ ID NO: 677 - protein, 109 aa, Homo sapiens
  Payload ID: 115;
  Gene Symbol: AKAP8L;
  Gene Name: A kinase (PRKA) anchor prt 8-like;
  ENSP ID: ENSP00000472188
MATSHSWEMPSSDTNANTSASGSASADSVLSRINQRLDMVPHLETDMMQGGVYGSGGERYDSYESCDSRAVLSERDLYRSGYDYSELDPEMEMAYEGQYDAYRDQFRMR

SEQ ID NO: 678 - protein, 431 aa, Homo sapiens
  Payload ID: 115;
  Gene Symbol: AKAP8L;
  Gene Name: A kinase (PRKA) anchor prt 8-like;
  ENSP ID: ENSP00000477434
MSYTGFVQGSETTLQSTYSDTSAQPTCDYGYGTWNSGTNRGYEGYGYGYGYGQDNTTNYGINQRLDMVPHLETDMMQGGVYGSGGERYDSYESCDSRAVLSERDLYRSGYDYSELDPEMEMAYEGQYDAYRDQFRMRGNDTFGPRAQGWARDARSGRPMASGYGRMWEDPMGARGQCMSGASRLPSLFSQNIIPEYGMFQGMRGGGAFPGGSRFGFGFGNGMKQMRRTWKTWTTADFRTKKKKRKQGGSPDEPDSKATRTDCSDNSDSDNDEGTEGEATEGLEGTEAVEKGSRVDGEDEEGKEDGREEGKEDPEKGALTTQDENGQTKRKLQAGKKSQDKQKKRQRDRMVERAPALALASSASDSCSCWTFLSLAGARPLGSPDKADPVAQIRTSGRGSSLCVLCANTGPSMRTRWPAILTASSTRNTLST

SEQ ID NO: 679 - protein, 3907 aa, Homo sapiens
  Payload ID: 116;
  Gene Symbol: AKAP9;
  Gene Name: A kinase (PRKA) anchor prt 9;
  Uniprot ID:  Q99996;
  ENSP ID: ENSP00000348573
MEDEERQKKLEAGKAKLAQFRQRKAQSDGQSPSKKQKKKRKTSSSKHDVSAHHDLNIDQSQCNEMYINSSQRVESTVIPESTIMRTLHSGEITSHEQGFSVELESEISTTADDCSSEVNGCSFVMRTGKPTNLLREEEFGVDDSYSEQGAQDSPTHLEMMESELAGKQHEIEELNRELEEMRVTYGTEGLQQLQEFEAAIKQRDGIITQLTANLQQARREKDETMREFLELTEQSQKLQIQFQQLQASETLRNSTHSSTAADLLQAKQQILTHQQQLEEQDHLLEDYQKKKEDFTMQISFLQEKIKVYEMEQDKKVENSNKEEIQEKETIIEELNTKIIEEEKKTLELKDKLTTADKLLGELQEQIVQKNQEIKNMKLELTNSKQKERQSSEEIKQLMGTVEELQKRNHKDSQFETDIVQRMEQETQRKLEQLRAELDEMYGQQIVQMKQELIRQHMAQMEEMKTRHKGEMENALRSYSNITVNEDQIKLMNVAINELNIKLQDTNSQKEKLKEELGLILEEKCALQRQLEDLVEELSFSREQIQRARQTIAEQESKLNEAHKSLSTVEDLKAEIVSASESRKELELKHEAEVTNYKIKLEMLEKEKNAVLDRMAESQEAELERLRTQLLFSHEEELSKLKEDLEIEHRINIEKLKDNLGIHYKQQIDGLQNEMSQKIETMQFEKDNLITKQNQLILEISKLKDLQQSLVNSKSEEMTLQINELQKEIEILRQEEKEKGTLEQEVQELQLKTELLEKQMKEKENDLQEKFAQLEAENSILKDEKKTLEDMLKIHTPVSQEERLIFLDSIKSKSKDSVWEKEIEILIEENEDLKQQCIQLNEEIEKQRNTFSFAEKNFEVNYQELQEEYACLLKVKDDLEDSKNKQELEYKSKLKALNEELHLQRINPTTVKMKSSVFDEDKTFVAETLEMGEVVEKDTTELMEKLEVTKREKLELSQRLSDLSEQLKQKHGEISFLNEEVKSLKQEKEQVSLRCRELEIIINHNRAENVQSCDTQVSSLLDGVVTMTSRGAEGSVSKVNKSFGEESKIMVEDKVSFENMTVGEESKQEQLILDHLPSVTKESSLRATQPSENDKLQKELNVLKSEQNDLRLQMEAQRICLSLVYSTHVDQVREYMENEKDKALCSLKEELIFAQEEKIKELQKIHQLELQTMKTQETGDEGKPLHLLIGKLQKAVSEECSYFLQTLCSVLGEYYTPALKCEVNAEDKENSGDYISENEDPELQDYRYEVQDFQENMHTLLNKVTEEYNKLLVLQTRLSKIWGQQTDGMKLEFGEENLPKEETEFLSIHSQMTNLEDIDVNHKSKLSSLQDLEKTKLEEQVQELESLISSLQQQLKETEQNYEAEIHCLQKRLQAVSESTVPPSLPVDSVVITESDAQRTMYPGSCVKKNIDGTIEFSGEFGVKEETNIVKLLEKQYQEQLEEEVAKVIVSMSIAFAQQTELSRISGGKENTASSKQAHAVCQQEQHYFNEMKLSQDQIGFQTFETVDVKFKEEFKPLSKELGEHGKEILLSNSDPHDIPESKDCVLTISEEMFSKDKTFIVRQSIHDEISVSSMDASRQLMLNEEQLEDMRQELVRQYQEHQQATELLRQAHMRQMERQREDQEQLQEEIKRLNRQLAQRSSIDNENLVSERERVLLEELEALKQLSLAGREKLCCELRNSSTQTQNGNENQGEVEEQTFKEKELDRKPEDVPPEILSNERYALQKANNRLLKILLEVVKTTAAVEETIGRHVLGILDRSSKSQSSASLIWRSEAEASVKSCVHEEHTRVTDESIPSYSGSDMPRNDINMWSKVTEEGTELSQRLVRSGFAGTEIDPENEELMLNISSRLQAAVEKLLEAISETSSQLEHAKVTQTELMRESFRQKQEATESLKCQEELRERLHEESRAREQLAVELSKAEGVIDGYADEKTLFERQIQEKTDIIDRLEQELLCASNRLQELEAEQQQIQEERELLSRQKEAMKAEAGPVEQQLLQETEKLMKEKLEVQCQAEKVRDDLQKQVKALEIDVEEQVSRFIELEQEKNTELMDLRQQNQALEKQLEKMRKFLDEQAIDREHERDVFQQEIQKLEQQLKVVPRFQPISEHQTREVEQLANHLKEKTDKCSELLLSKEQLQRDIQERNEEIEKLEFRVRELEQALLVSADTFQKVEDRKHFGAVEAKPELSLEVQLQAERDAIDRKEKEITNLEEQLEQFREELENKNEEVQQLHMQLEIQKKESTTRLQELEQENKLFKDDMEKLGLAIKESDAMSTQDQHVLFGKFAQIIQEKEVEIDQLNEQVTKLQQQLKITTDNKVIEEKNELIRDLETQIECLMSDQECVKRNREEEIEQLNEVIEKLQQELANIGQKTSMNAHSLSEEADSLKHQLDVVIAEKLALEQQVETANEEMTFMKNVLKETNFKMNQLTQELFSLKRERESVEKIQSIPENSVNVAIDHLSKDKPELEVVLTEDALKSLENQTYFKSFEENGKGSIINLETRLLQLESTVSAKDLELTQCYKQIKDMQEQGQFETEMLQKKIVNLQKIVEEKVAAALVSQIQLEAVQEYAKFCQDNQTISSEPERTNIQNLNQLREDELGSDISALTLRISELESQVVEMHTSLILEKEQVEIAEKNVLEKEKKLLELQKLLEGNEKKQREKEKKRSPQDVEVLKTTTELFHSNEESGFFNELEALRAESVATKAELASYKEKAEKLQEELLVKETNMTSLQKDLSQVRDHLAEAKEKLSILEKEDETEVQESKKACMFEPLPIKLSKSIASQTDGTLKISSSNQTPQILVKNAGIQINLQSECSSEEVTEIISQFTEKIEKMQELHAAEILDMESRHISETETLKREHYVAVQLLKEECGTLKAVIQCLRSKEGSSIPELAHSDAYQTREICSSDSGSDWGQGIYLTHSQGFDIASEGRGEESESATDSFPKKIKGLLRAVHNEGMQVLSLTESPYSDGEDHSIQQVSEPWLEERKAYINTISSLKDLITKMQLQREAEVYDSSQSHESFSDWRGELLLALQQVFLEERSVLLAAFRTELTALGTTDAVGLLNCLEQRIQEQGVEYQAAMECLQKADRRSLLSEIQALHAQMNGRKITLKREQESEKPSQELLEYNIQQKQSQMLEMQVELSSMKDRATELQEQLSSEKMVVAELKSELAQTKLELETTLKAQHKHLKELEAFRLEVKDKTDEVHLLNDTLASEQKKSRELQWALEKEKAKLGRSEERDKEELEDLKFSLESQKQRNLQLNLLLEQQKQLLNESQQKIESQRMLYDAQLSEEQGRNLELQVLLESEKVRIREMSSTLDRERELHAQLQSSDGTGQSRPPLPSEDLLKELQKQLEEKHSRIVELLNETEKYKLDSLQTRQQMEKDRQVHRKTLQTEQEANTEGQKKMHELQSKVEDLQRQLEEKRQQVYKLDLEGQRLQGIMQEFQKQELEREEKRESRRILYQNLNEPTTWSLTSDRTRNWVLQQKIEGETKESNYAKLIEMNGGGTGCNHELEMIRQKLQCVASKLQVLPQKASERLQFETADDEDFIWVQENIDEIILQLQKLTGQQGEEPSLVSPSTSCGSLTERLLRQNAELTGHISQLTEEKNDLRNMVMKLEEQIRWYRQTGAGRDNSSRFSLNGGANIEAIIASEKEVWNREKLTLQKSLKRAEAEVYKLKAELRNDSLLQTLSPDSEHVTLKRIYGKYLRAESFRKALIYQKKYLLLLLGGFQECEDATLALLARMGGQPAFTDLEVITNRPKGFTRFRSAVRVSIAISRMKFLVRRWHRVTGSVSININRDGFGLNQGAEKTDSFYHSSGGLELYGEPRHTTYRSRSDLDYIRSPLPFQNRYPGTPADFNPGSLACSQLQNYDPDRALTDYITRLEALQRRLGTIQSGSTTQFHAGMRR

SEQ ID NO: 680 - protein, 3126 aa, Homo sapiens
  Payload ID: 116;
  Gene Symbol: AKAP9;
  Gene Name: A kinase (PRKA) anchor prt 9;
  ENSP ID: ENSP00000350813
MEDEERQKKLEAGKAKLAQFRQRKAQSDGQSPSKKQKKKRKTSSSKHDVSAHHDLNIDQSQCNEMYINSSQRVESTVIPESTIMRTLHSGEITSHEQGFSVELESEISTTADDCSSEVNGCSFVMRTGKPTNLLREEEFGVDDSYSEQGAQDSPTHLEMMESELAGKQHEIEELNRELEEMRVTYGTEGLQQLQEFEAAIKQRDGIITQLTANLQQARREKDETMREFLELTEQSQKLQIQFQQLQASETLRNSTHSSTAADLLQAKQQILTHQQQLEEQDHLLEDYQKKKEDFTMQISFLQEKIKVYEMEQDKKVENSNKEEIQEKETIIEELNTKIIEEEKKTLELKDKLTTADKLLGELQEQIVQKNQEIKNMKLELTNSKQKERQSSEEIKQLMGTVEELQKRNHKDSQFETDIVQRMEQETQRKLEQLRAELDEMYGQQIVQMKQELIRQHMAQMEEMKTRHKGEMENALRSYSNITVNEDQIKLMNVAINELNIKLQDTNSQKEKLKEELGLILEEKCALQRQLEDLVEELSFSREQIQRARQTIAEQESKLNEAHKSLSTVEDLKAEIVSASESRKELELKHEAEVTNYKIKLEMLEKEKNAVLDRMAESQEAELERLRTQLLFSHEEELSKLKEDLEIEHRINIEKLKDNLGIHYKQQIDGLQNEMSQKIETMQFEKDNLITKQNQLILEISKLKDLQQSLVNSKSEEMTLQINELQKEIEILRQEEKEKGTLEQEVQELQLKTELLEKQMKEKENDLQEKFAQLEAENSILKDEKKTLEDMLKIHTPVSQEERLIFLDSIKSKSKDSVWEKEIEILIEENEDLKQQCIQLNEEIEKQRNTFSFAEKNFEVNYQELQEEYACLLKVKDDLEDSKNKQELEYKSKLKALNEELHLQRINPTTVKMKSSVFDEDKTFVAETLEMGEVVEKDTTELMEKLEVTKREKLELSQRLSDLSEQLKQKHGEISFLNEEVKSLKQEKEQVSLRCRELEIIINHNRAENVQSCDTQVSSLLDGVVTMTSRGAEGSVSKVNKSFGEESKIMVEDKVSFENMTVGEESKQEQLILDHLPSVTKESSLRATQPSENDKLQKELNVLKSEQNDLRLQMEAQRICLSLVYSTHVDQVREYMENEKDKALCSLKEELIFAQEEKIKELQKIHQLELQTMKTQETGDEGKPLHLLIGKLQKAVSEECSYFLQTLCSVLGEYYTPALKCEVNAEDKENSGDYISENEDPELQDYRYEVQDFQENMHTLLNKVTEEYNKLLVLQTRLSKIWGQQTDGMKLEFGEENLPKEETEFLSIHSQMTNLEDIDVNHKSKLSSLQDLEKTKLEEQVQELESLISSLQQQLKETEQNYEAEIHCLQKRLQAVSESTVPPSLPVDSVVITESDAQRTMYPGSCVKKNIDGTIEFSGEFGVKEETNIVKLLEKQYQEQLEEEVAKVIVSMSIAFAQQTELSRISGGKENTASSKQAHAVCQQEQHYFNEMKLSQDQIGFQTFETVDVKFKEEFKPLSKELGEHGKEILLSNSDPHDIPESKDCVLTISEEMFSKDKTFIVRQSIHDEISVSSMDASRQLMLNEEQLEDMRQELVRQYQEHQQATELLRQAHMRQMERQREDQEQLQEEIKRLNRQLAQNGNENQGEVEEQTFKEKELDRKPEDVPPEILSNERYALQKANNRLLKILLEVVKTTAAVEETIGRHVLGILDRSSKSQSSASLIWRSEAEASVKSCVHEEHTRVTDESIPSYSGSDMPRNDINMWSKVTEEGTELSQRLVRSGFAGTEIDPENEELMLNISSRLQAAVEKLLEAISETSSQLEHAKVTQTELMRESFRQKQEATESLKCQEELRERLHEESRAREQLAVELSKAEGVIDGYADEKTLFERQIQEKTDIIDRLEQELLCASNRLQELEAEQQQIQEERELLSRQKEAMKAEAGPVEQQLLQETEKLMKEKLEVQCQAEKVRDDLQKQVKALEIDVEEQVSRFIELEQEKNTELMDLRQQNQALEKQLEKMRKFLDEQAIDREHERDVFQQEIQKLEQQLKVVPRFQPISEHQTREVEQLANHLKEKTDKCSELLLSKEQLQRDIQERNEEIEKLEFRVRELEQALLVSADTFQKVEDRKHFGAVEAKPELSLEVQLQAERDAIDRKEKEITNLEEQLEQFREELENKNEEVQQLHMQLEIQKKESTTRLQELEQENKLFKDDMEKLGLAIKESDAMSTQDQHVLFGKFAQIIQEKEVEIDQLNEQVTKLQQQLKITTDNKVIEEKNELIRDLETQIECLMSDQECVKRNREEEIEQLNEVIEKLQQELANIGQKTSMNAHSLSEEADSLKHQLDVVIAEKLALEQQVETANEEMTFMKNVLKETNFKMNQLTQELFSLKRERESVEKIQSIPENSVNVAIDHLSKDKPELEVVLTEDALKSLENQTYFKSFEENGKGSIINLETRLLQLESTVSAKDLELTQCYKQIKDMQEQGQFETEMLQKKIVNLQKIVEEKVAAALVSQIQLEAVQEYAKFCQDNQTISSEPERTNIQNLNQLREDELGSDISALTLRISELESQVVEMHTSLILEKEQVEIAEKNVLEKEKKLLELQKLLEGNEKKQREKEKKRSPQDVEVLKTTTELFHSNEESGFFNELEALRAESVATKAELASYKEKAEKLQEELLVKETNMTSLQKDLSQVRDHLAEAKEKLSILEKEDETEVQESKKACMFEPLPIKLSKSIASQTDGTLKISSSNQTPQILVKNAGIQINLQSECSSEEVTEIISQFTEKIEKMQELHAAEILDMESRHISETETLKREHYVAVQLLKEECGTLKAVIQCLRSKEGSSIPELAHSDAYQTREICSSDSGSDWGQGIYLTHSQGFDIASEGRGEESESATDSFPKKIKGLLRAVHNEGMQVLSLTESPYSDGEDHSIQQVSEPWLEERKAYINTISSLKDLITKMQLQREAEVYDSSQSHESFSDWRGELLLALQQVFLEERSVLLAAFRTELTALGTTDAVGLLNCLEQRIQEQGVEYQAAMECLQKADRRSLLSEIQALHAQMNGRKITLKREQESEKPSQGMLYDKLIWLHKQVKRFHFVFFLIIIKLKHIFLVTFSSHSHNVKDTIYINYSRG

SEQ ID NO: 681 - protein, 3910 aa, Homo sapiens
  Payload ID: 116;
  Gene Symbol: AKAP9;
  Gene Name: A kinase (PRKA) anchor prt 9;
  ENSP ID: ENSP00000351922
MEDEERQKKLEAGKAKVGEPEGYFLFSLAQFRQRKAQSDGQSPSKKQKKKRKTSSSKHDVSAHHDLNIDQSQCNEMYINSSQRVESTVIPESTIMRTLHSGEITSHEQGFSVELESEISTTADDCSSEVNGCSFVMRTGKPTNLLREEEFGVDDSYSEQGAQDSPTHLEMMESELAGKQHEIEELNRELEEMRVTYGTEGLQQLQEFEAAIKQRDGIITQLTANLQQARREKDETMREFLELTEQSQKLQIQFQQLQASETLRNSTHSSTAADLLQAKQQILTHQQQLEEQDHLLEDYQKKKEDFTMQISFLQEKIKVYEMEQDKKVENSNKEEIQEKETIIEELNTKIIEEEKKTLELKDKLTTADKLLGELQEQIVQKNQEIKNMKLELTNSKQKERQSSEEIKQLMGTVEELQKRNHKDSQFETDIVQRMEQETQRKLEQLRAELDEMYGQQIVQMKQELIRQHMAQMEEMKTRHKGEMENALRSYSNITVNEDQIKLMNVAINELNIKLQDTNSQKEKLKEELGLILEEKCALQRQLEDLVEELSFSREQIQRARQTIAEQESKLNEAHKSLSTVEDLKAEIVSASESRKELELKHEAEVTNYKIKLEMLEKEKNAVLDRMAESQEAELERLRTQLLFSHEEELSKLKEDLEIEHRINIEKLKDNLGIHYKQQIDGLQNEMSQKIETMQFEKDNLITKQNQLILEISKLKDLQQSLVNSKSEEMTLQINELQKEIEILRQEEKEKGTLEQEVQELQLKTELLEKQMKEKENDLQEKFAQLEAENSILKDEKKTLEDMLKIHTPVSQEERLIFLDSIKSKSKDSVWEKEIEILIEENEDLKQQCIQLNEEIEKQRNTFSFAEKNFEVNYQELQEEYACLLKVKDDLEDSKNKQELEYKSKLKALNEELHLQRINPTTVKMKSSVFDEDKTFVAETLEMGEVVEKDTTELMEKLEVTKREKLELSQRLSDLSEQLKQKHGEISFLNEEVKSLKQEKEQVSLRCRELEIIINHNRAENVQSCDTQVSSLLDGVVTMTSRGAEGSVSKVNKSFGEESKIMVEDKVSFENMTVGEESKQEQLILDHLPSVTKESSLRATQPSENDKLQKELNVLKSEQNDLRLQMEAQRICLSLVYSTHVDQVREYMENEKDKALCSLKEELIFAQEEKIKELQKIHQLELQTMKTQETGDEGKPLHLLIGKLQKAVSEECSYFLQTLCSVLGEYYTPALKCEVNAEDKENSGDYISENEDPELQDYRYEVQDFQENMHTLLNKVTEEYNKLLVLQTRLSKIWGQQTDGMKLEFGEENLPKEETEFLSIHSQMTNLEDIDVNHKSKLSSLQDLEKTKLEEQVQELESLISSLQQQLKETEQNYEAEIHCLQKRLQAVSESTVPPSLPVDSVVITESDAQRTMYPGSCVKKNIDGTIEFSGEFGVKEETNIVKLLEKQYQEQLEEEVAKVIVSMSIAFAQQTELSRISGGKENTASSKQAHAVCQQEQHYFNEMKLSQDQIGFQTFETVDVKFKEEFKPLSKELGEHGKEILLSNSDPHDIPESKDCVLTISEEMFSKDKTFIVRQSIHDEISVSSMDASRQLMLNEEQLEDMRQELVRQYQEHQQATELLRQAHMRQMERQREDQEQLQEEIKRLNRQLAQRSSIDNENLVSERERVLLEELEALKQLSLAGREKLCCELRNSSTQTQNGNENQGEVEEQTFKEKELDRKPEDVPPEILSNERYALQKANNRLLKILLEVVKTTAAVEETIGRHVLGILDRSSKSQSSASLIWRSEAEASVKSCVHEEHTRVTDESIPSYSGSDMPRNDINMWSKVTEEGTELSQRLVRSGFAGTEIDPENEELMLNISSRLQAAVEKLLEAISETSSQLEHAKVTQTELMRESFRQKQEATESLKCQEELRERLHEESRAREQLAVELSKAEGVIDGYADEKTLFERQIQEKTDIIDRLEQELLCASNRLQELEAEQQQIQEERELLSRQKEAMKAEAGPVEQQLLQETEKLMKEKLEVQCQAEKVRDDLQKQVKALEIDVEEQVSRFIELEQEKNTELMDLRQQNQALEKQLEKMRKFLDEQAIDREHERDVFQQEIQKLEQQLKVVPRFQPISEHQTREVEQLANHLKEKTDKCSELLLSKEQLQRDIQERNEEIEKLEFRVRELEQALLVSADTFQKVEDRKHFGAVEAKPELSLEVQLQAERDAIDRKEKEITNLEEQLEQFREELENKNEEVQQLHMQLEIQKKESTTRLQELEQENKLFKDDMEKLGLAIKESDAMSTQDQHVLFGKFAQIIQEKEVEIDQLNEQVTKLQQQLKITTDNKVIEEKNELIRDLETQIECLMSDQECVKRNREEEIEQLNEVIEKLQQELANIGQKTSMNAHSLSEEADSLKHQLDVVIAEKLALEQQVETANEEMTFMKNVLKETNFKMNQLTQELFSLKRERESVEKIQSIPENSVNVAIDHLSKDKPELEVVLTEDALKSLENQTYFKSFEENGKGSIINLETRLLQLESTVSAKDLELTQCYKQIKDMQEQGQFETEMLQKKIVNLQKIVEEKVAAALVSQIQLEAVQEYAKFCQDNQTISSEPERTNIQNLNQLREDELGSDISALTLRISELESQVVEMHTSLILEKEQVEIAEKNVLEKEKKLLELQKLLEGNEKKQREKEKKRSPQDVEVLKTTTELFHSNEESGFFNELEALRAESVATKAELASYKEKAEKLQEELLVKETNMTSLQKDLSQVRDHLAEAKEKLSILEKEDETEVQESKKACMFEPLPIKLSKSIASQTDGTLKISSSNQTPQILVKNAGIQINLQSECSSEEVTEIISQFTEKIEKMQELHAAEILDMESRHISETETLKREHYVAVQLLKEECGTLKAVIQCLRSKEVFGFYNMCFSTLCDSGSDWGQGIYLTHSQGFDIASEGRGEESESATDSFPKKIKGLLRAVHNEGMQVLSLTESPYSDGEDHSIQQVSEPWLEERKAYINTISSLKDLITKMQLQREAEVYDSSQSHESFSDWRGELLLALQQVFLEERSVLLAAFRTELTALGTTDAVGLLNCLEQRIQEQGVEYQAAMECLQKADRRSLLSEIQALHAQMNGRKITLKREQESEKPSQELLEYNIQQKQSQMLEMQVELSSMKDRATELQEQLSSEKMVVAELKSELAQTKLELETTLKAQHKHLKELEAFRLEVKDKTDEVHLLNDTLASEQKKSRELQWALEKEKAKLGRSEERDKEELEDLKFSLESQKQRNLQLNLLLEQQKQLLNESQQKIESQRMLYDAQLSEEQGRNLELQVLLESEKVRIREMSSTLDRERELHAQLQSSDGTGQSRPPLPSEDLLKELQKQLEEKHSRIVELLNETEKYKLDSLQTRQQMEKDRQVHRKTLQTEQEANTEGQKKMHELQSKVEDLQRQLEEKRQQVYKLDLEGQRLQGIMQEFQKQELEREEKRESRRILYQNLNEPTTWSLTSDRTRNWVLQQKIEGETKESNYAKLIEMNGGGTGCNHELEMIRQKLQCVASKLQVLPQKASERLQFETADDEDFIWVQENIDEIILQLQKLTGQQGEEPSLVSPSTSCGSLTERLLRQNAELTGHISQLTEEKNDLRNMVMKLEEQIRWYRQTGAGRDNSSRFSLNGGANIEAIIASEKEVWNREKLTLQKSLKRAEAEVYKLKAELRNDSLLQTLSPDSEHVTLKRIYGKYLRAESFRKALIYQKKYLLLLLGGFQECEDATLALLARMGGQPAFTDLEVITNRPKGFTRFRSAVRVSIAISRMKFLVRRWHRVTGSVSININRDGFGLNQGAEKTDSFYHSSGGLELYGEPRHTTYRSRSDLDYIRSPLPFQNRYPGTPADFNPGSLACSQLQNYDPDRALTDYITRLEALQRRLGTIQSGSTTQFHAGMRR

SEQ ID NO: 682 - protein, 1769 aa, Homo sapiens
  Payload ID: 116;
  Gene Symbol: AKAP9;
  Gene Name: A kinase (PRKA) anchor prt 9;
  ENSP ID: ENSP00000378042
EKLEFRVRELEQALLVEDRKHFGAVEAKPELSLEVQLQAERDAIDRKEKEITNLEEQLEQFREELENKNEEVQQLHMQLEIQKKESTTRLQELEQENKLFKDDMEKLGLAIKESDAMSTQDQHVLFGKFAQIIQEKEVEIDQLNEQVTKLQQQLKITTDNKVIEEKNELIRDLETQIECLMSDQECVKRNREEEIEQLNEVIEKLQQELANIGQKTSMNAHSLSEEADSLKHQLDVVIAEKLALEQQVETANEEMTFMKNVLKETNFKMNQLTQELFSLKRERESVEKIQSIPENSVNVAIDHLSKDKPELEVVLTEDALKSLENQTYFKSFEENGKGSIINLETRLLQLESTVSAKDLELTQCYKQIKDMQEQGQFETEMLQKKIVNLQKIVEEKVAAALVSQIQLEAVQEYAKFCQDNQTISSEPERTNIQNLNQLREDELGSDISALTLRISELESQVVEMHTSLILEKEQVEIAEKNVLEKEKKLLELQKLLEGNEKKQREKEKKRSPQDVEVLKTTTELFHSNEESGFFNELEALRAESVATKAELASYKEKAEKLQEELLVKETNMTSLQKDLSQVRDHLAEAKEKLSILEKEDETEVQESKKACMFEPLPIKLSKSIASQTDGTLKISSSNQTPQILVKNAGIQINLQSECSSEEVTEIISQFTEKIEKMQELHAAEILDMESRHISETETLKREHYVAVQLLKEECGTLKAVIQCLRSKEGSSIPELAHSDAYQTREICSSDSGSDWGQGIYLTHSQGFDIASEGRGEESESATDSFPKKIKGLLRAVHNEGMQVLSLTESPYSDGEDHSIQQVSEPWLEERKAYINTISSLKDLITKMQLQREAEVYDSSQSHESFSDWRGELLLALQQVFLEERSVLLAAFRTELTALGTTDAVGLLNCLEQRIQEQGVEYQAAMECLQKADRRSLLSEIQALHAQMNGRKITLKREQESEKPSQELLEYNIQQKQSQMLEMQVELSSMKDRATELQEQLSSEKMVVAELKSELAQTKLELETTLKAQHKHLKELEAFRLEVKDKTDEVHLLNDTLASEQKKSRELQWALEKEKAKLGRSEERDKEELEDLKFSLESQKQRNLQLNLLLEQQKQLLNESQQKIESQRMLYDAQLSEEQGRNLELQVLLESEKVRIREMSSTLDRERELHAQLQSSDGTGQSRPPLPSEDLLKELQKQLEEKHSRIVELLNETEKYKLDSLQTRQQMEKDRQVHRKTLQTEQEANTEGQKKMHELQSKVEDLQRQLEEKRQQVYKLDLEGQRLQGIMQEFQKQELEREEKRESRRILYQNLNEPTTWSLTSDRTRNWVLQQKIEGETKESNYAKLIEMNGGGTGCNHELEMIRQKLQCVASKLQVLPQKASERLQFETADDEDFIWVQENIDEIILQLQKLTGQQGEEPSLVSPSTSCGSLTERLLRQNAELTGHISQLTEEKNDLRNMVMKLEEQIRWYRQTGAGRDNSSRFSLNGGANIEAIIASEKEVWNREKLTLQKSLKRAEAEVYKLKAELRNDSLLQTLSPDSEHVTLKRIYGKYLRAESFRKALIYQKKYLLLLLGGFQECEDATLALLARMGGQPAFTDLEVITNRPKGFTRFRSAVRVSIAISRMKFLVRRWHRVTGSVSININRDGFGLNQGAEKTDSFYHSSGGLELYGEPRHTTYRSRSDLDYIRSPLPFQNRYPGTPADFNPGSLACSQLQNYDPDRALTDYITRLEALQRRLGTIQSGALSLTTSWQHHSARPTAPLSLKFFHTH

SEQ ID NO: 683 - protein, 314 aa, Homo sapiens
  Payload ID: 116;
  Gene Symbol: AKAP9;
  Gene Name: A kinase (PRKA) anchor prt 9;
  ENSP ID: ENSP00000378065
MEDEERQKKLEAGKAKLAQFRQRKAQSDGQSPSKKQKKKRKTSSSKHDVSAHHDLNIDQSQCNEMYINSSQRVESTVIPESTIMRTLHSGEITSHEQGFSVELESEISTTADDCSSEVNGCSFVMRTGKPTNLLREEEFGVDDSYSEQGAQDSPTHLEMMESELAGKQHEIEELNRELEEMRVTYGTEGLQQLQEFEAAIKQRDGIITQLTANLQQARREKDETMREFLELTEQSQKLQIQFQQLQASETLRNSTHSSTAADLLQAKQQILTHQQQLEEQDHLLEDYQKKKEDFTMQISFLQEKIKVYEMVCLF

SEQ ID NO: 684 - protein, 232 aa, Homo sapiens
  Payload ID: 116;
  Gene Symbol: AKAP9;
  Gene Name: A kinase (PRKA) anchor prt 9;
  ENSP ID: ENSP00000391704
PSKKQKKKRKTSSSKHDVSAHHDLNIDQSQCNEMYINSSQRVESTVIPESTIMRTLHSGEITSHEQGFSVELESEISTTADDCSSEEEEFGVDDSYSEQGAQDSPTHLEMMESELAGKQHEIEELNRELEEMRVTYGTEGLQQLQEFEAAIKQRDGIITQLTANLQQARREKDETMREFLELTEQSQKLQIQFQQLQASETLRNSTHSSTAADLLQAKQQILTHQQQLEEQD

SEQ ID NO: 685 - protein, 318 aa, Homo sapiens
  Payload ID: 116;
  Gene Symbol: AKAP9;
  Gene Name: A kinase (PRKA) anchor prt 9;
  ENSP ID: ENSP00000406937
  MOD_RES (1)..(1): Any amino acid
XHYVAVQLLKEECGTLKAVIQCLRSKEGSSIPELAHSDAYQTREICSSDSGSDWGQGIYLTHSQGFDIASEGRGEESESATDSFPKKIKGLLRAVHNEGMQVLSLTESPYSDGEDHSIQQVSEPWLEERKAYINTISSLKDLITKMQLQREAEVYDSSQSHESFSDWRGELLLALQQVFLEERSVLLAAFRTELTALGTTDAVGLLNCLEQRIQEQGVEYQAAMECLQKADRRSLLSEIQALHAQMNGRKITLKREQESEKPSQGMLYDKLIWLHKQVKRFHFVFFLIIIKLKHIFLVTFSSHSHNVKDTIYINYSRG

SEQ ID NO: 686 - protein, 1637 aa, Homo sapiens
  Payload ID: 116;
  Gene Symbol: AKAP9;
  Gene Name: A kinase (PRKA) anchor prt 9;
  ENSP ID: ENSP00000480807
MEDEERQKKLEAGKAKVGELIFFFLAQFRQRKAQSDGQSPSKKQKKKRKTSSSKHDVSAHHDLNIDQSQCNEMYINSSQRVESTVIPESTIMRTLHSGEITSHEQGFSVELESEISTTADDCSSEVNGCSFVMRTGKPTNLLREEEFGVDDSYSEQGAQDSPTHLEMMESELAGKQHEIEELNRELEEMRVTYGTEGLQQLQEFEAAIKQRDGIITQLTANLQQARREKDETMREFLELTEQSQKLQIQFQQLQASETLRNSTHSSTAADLLQAKQQILTHQQQLEEQDHLLEDYQKKKEDFTMQISFLQEKIKVYEMEQDKKVENSNKEEIQEKETIIEELNTKIIEEEKKTLELKDKLTTADKLLGELQEQIVQKNQEIKNMKLELTNSKQKERQSSEEIKQLMGTVEELQKRNHKDSQFETDIVQRMEQETQRKLEQLRAELDEMYGQQIVQMKQELIRQHMAQMEEMKTRHKGEMENALRSYSNITVNEDQIKLMNVAINELNIKLQDTNSQKEKLKEELGLILEEKCALQRQLEDLVEELSFSREQIQRARQTIAEQESKLNEAHKSLSTVEDLKAEIVSASESRKELELKHEAEVTNYKIKLEMLEKEKNAVLDRMAESQEAELERLRTQLLFSHEEELSKLKEDLEIEHRINIEKLKDNLGIHYKQQIDGLQNEMSQKIETMQFEKDNLITKQNQLILEISKLKDLQQSLVNSKSEEMTLQINELQKEIEILRQEEKEKGTLEQEVQELQLKTELLEKQMKEKENDLQEKFAQLEAENSILKDEKKTLEDMLKIHTPVSQEERLIFLDSIKSKSKDSVWEKEIEILIEENEDLKQQCIQLNEEIEKQRNTFSFAEKNFEVNYQELQEEYACLLKVKDDLEDSKNKQELEYKSKLKALNEELHLQRINPTTVKMKSSVFDEDKTFVAETLEMGEVVEKDTTELMEKLEVTKREKLELSQRLSDLSEQLKQKHGEISFLNEEVKSLKQEKEQVSLRCRELEIIINHNRAENVQSCDTQVSSLLDGVVTMTSRGAEGSVSKVNKSFGEESKIMVEDKVSFENMTVGEESKQEQLILDHLPSVTKESSLRATQPSENDKLQKELNVLKSEQNDLRLQMEAQRICLSLVYSTHVDQVREYMENEKDKALCSLKEELIFAQEEKIKELQKIHQLELQTMKTQETGDEGKPLHLLIGKLQKAVSEECSYFLQTLCSVLGEYYTPALKCEVNAEDKENSGDYISENEDPELQDYRYEVQDFQENMHTLLNKVTEEYNKLLVLQTRLSKIWGQQTDGMKLEFGEENLPKEETEFLSIHSQMTNLEDIDVNHKSKLSSLQDLEKTKLEEQVQELESLISSLQQQLKETEQNYEAEIHCLQKRLQAVSESTVPPSLPVDSVVITESDAQRTMYPGSCVKKNIDGTIEFSGEFGVKEETNIVKLLEKQYQEQLEEEVAKVIVSMSIAFAQQTELSRISGGKENTASSKQAHAVCQQEQHYFNEMKLSQDQIGFQTFETVDVKFKEEFKPLSKELGEHGKEILLSNSDPHDIPESKDCVLTISEEMFSKDKTFIVRQSIHDEISVSSMDASRQLMLNEEQLEDMRQELVRQYQEHQQATELLRQAHMRQMERQREDQEQTRRD

SEQ ID NO: 687 - protein, 183 aa, Homo sapiens
  Payload ID: 117;
  Gene Symbol: AKIP1;
  Gene Name: A kinase (PRKA) interacting prt 1;
  Uniprot ID:  Q9NQ31;
  ENSP ID: ENSP00000299576
MDNCLAAAALNGVDRRSLQRSARLALEVLERAKRRAVDWHALERPKGCMGVLAREAPHLEKQPAAGPQRVLPGEKYYSSVPEEGGATHVYRYHRGESKLHMCLDIGNGQRKDRKKTSLGPGGSYQISEHAPEASQPAENISKDLYIEVYPGTYSVTVGSNDLTKKTHVVAVDSGQSVDLVFPV

SEQ ID NO: 688 - protein, 210 aa, Homo sapiens
  Payload ID: 117;
  Gene Symbol: AKIP1;
  Gene Name: A kinase (PRKA) interacting prt 1;
  Uniprot ID:  Q9NQ31;
  ENSP ID: ENSP00000310459
MDNCLAAAALNGVDRRSLQRSARLALEVLERAKRRAVDWHALERPKGCMGVLAREAPHLEKQPAAGPQRVLPGEREERPPTLSASFRTMAEFMDYTSSQCGKYYSSVPEEGGATHVYRYHRGESKLHMCLDIGNGQRKDRKKTSLGPGGSYQISEHAPEASQPAENISKDLYIEVYPGTYSVTVGSNDLTKKTHVVAVDSGQSVDLVFPV

SEQ ID NO: 689 - protein, 183 aa, Homo sapiens
  Payload ID: 117;
  Gene Symbol: AKIP1;
  Gene Name: A kinase (PRKA) interacting prt 1;
  Uniprot ID:  Q9NQ31;
  ENSP ID: ENSP00000310644
MDNCLAAAALNGVDRRSLQRSARLALEVLERAKRRAVDWHALERPKGCMGVLAREAPHLEKQPAAGPQRVLPGEREERPPTLSASFRTMAEFMDYTSSQCGKYYSSVPEEGGATHVYRYHRGESKLHMCLDIGNGQAENISKDLYIEVYPGTYSVTVGSNDLTKKTHVVAVDSGQSVDLVFPV

SEQ ID NO: 690 - protein, 183 aa, Homo sapiens; identical to SEQ ID NO: 687
  Payload ID: 117;
  Gene Symbol: AKIP1;
  Gene Name: A kinase (PRKA) interacting prt 1;
  Uniprot ID:  Q9NQ31;
  ENSP ID: ENSP00000379885

SEQ ID NO: 691 - protein, 210 aa, Homo sapiens; identical to SEQ ID NO: 688
  Payload ID: 117;
  Gene Symbol: AKIP1;
  Gene Name: A kinase (PRKA) interacting prt 1;
  Uniprot ID:  Q9NQ31;
  ENSP ID: ENSP00000431331

SEQ ID NO: 692 - protein, 151 aa, Homo sapiens
  Payload ID: 117;
  Gene Symbol: AKIP1;
  Gene Name: A kinase (PRKA) interacting prt 1;
  ENSP ID: ENSP00000431602
AAAALNGVDRRSLQRSARLALEVLERAKRRAVDWHALERPKGCMGVLAREAPHLEKQPAAGPQRVLPGEKYYSSVPEEGGATHVYRYHRGESKLHMCLDIGNGQAENISKDLYIEVYPGTYSVTVGSNDLTKKTHVVAVDSGQSVDLVFPV

SEQ ID NO: 693 - protein, 195 aa, Homo sapiens
  Payload ID: 117;
  Gene Symbol: AKIP1;
  Gene Name: A kinase (PRKA) interacting prt 1;
  ENSP ID: ENSP00000433510
MDNCLAAAALNGVDRRSLQRSARLALEVLERAKRRAVDWHALERPKGCMGVLAREAPHLEKQPAAGPQRVLPGEREERPPTLSASFRTMAEFMDYTSSQCGKYYSSVPEEGGATHVYRYHRGESKLHMCLDIGNGQRKDRKKTSLGPGGSYQISEHAPEASQPVSTELLTHWVSPPLQLHEPVDMVLRGLFELSL

SEQ ID NO: 694 - protein, 168 aa, Homo sapiens
  Payload ID: 117;
  Gene Symbol: AKIP1;
  Gene Name: A kinase (PRKA) interacting prt 1;
  ENSP ID: ENSP00000434726
MDNCLAAAALNGVDRRSLQRSARLALEVLERAKRRAVDWHALERPKGCMGVLAREAPHLEKQPAAGPQRVLPGEKYYSSVPEEGGATHVYRYHRGESKLHMCLDIGNGQRKDRKKTSLGPGGSYQISEHAPEASQPVSTELLTHWVSPPLQLHEPVDMVLRGLFELSL

SEQ ID NO: 695 - protein, 179 aa, Homo sapiens
  Payload ID: 117;
  Gene Symbol: AKIP1;
  Gene Name: A kinase (PRKA) interacting prt 1;
  ENSP ID: ENSP00000434785
MDNCLAAAALNGVDRRSLQRSARLALEVLERAKRRAVDWHALERPKGCMGVLAREAPHLEKQPAAGPQRVLPGEREERPPTLSASFRTMAEFMDYTSSQCGKYYSSVPEEGGATHVYRYHRGESKLHMCLDIGNGQRKDRKKTSLGPGGSYQISEHAPEASQPVSTELLTHWVSPPLQL

SEQ ID NO: 696 - protein, 168 aa, Homo sapiens; identical to SEQ ID NO: 694
  Payload ID: 117;
  Gene Symbol: AKIP1;
  Gene Name: A kinase (PRKA) interacting prt 1;
  ENSP ID: ENSP00000434820

SEQ ID NO: 697 - protein, 101 aa, Homo sapiens
  Payload ID: 117;
  Gene Symbol: AKIP1;
  Gene Name: A kinase (PRKA) interacting prt 1;
  ENSP ID: ENSP00000436989
MAEFMDYTSSQCGKYYSSVPEEGGATHVYRYHRGESKLHMCLDIGNGQRKDRKKTSLGPGGSYQISEHAPEASQPAENISKDLYIEVYPGTYSVTVGSNDL

SEQ ID NO: 698 - protein, 384 aa, Homo sapiens
  Payload ID: 118;
  Gene Symbol: AAR2;
  Gene Name: AAR2 splicing  factor homolog;
  Uniprot ID:  Q9Y312;
  ENSP ID: ENSP00000313674
MAAVQMDPELAKRLFFEGATVVILNMPKGTEFGIDYNSWEVGPKFRGVKMIPPGIHFLHYSSVDKANPKEVGPRMGFFLSLHQRGLTVLRWSTLREEVDLSPAPESEVEAMRANLQELDQFLGPYPYATLKKWISLTNFISEATVEKLQPENRQICAFSDVLPVLSMKHTKDRVGQNLPRCGIECKSYQEGLARLPEMKPRAGTEIRFSELPTQMFPEGATPAEITKHSMDLSYALETVLNKQFPSSPQDVLGELQFAFVCFLLGNVYEAFEHWKRLLNLLCRSEAAMMKHHTLYINLISILYHQLGEIPADFFVDIVSQDNFLTSTLQVFFSSACSIAVDATLRKKAEKFQAHLTKKFRWDFAAEPEDCAPVVVELPEGIEMG

SEQ ID NO: 699 - protein, 384 aa, Homo sapiens; identical to SEQ ID NO: 698
  Payload ID: 118;
  Gene Symbol: AAR2;
  Gene Name: AAR2 splicing  factor homolog;
  Uniprot ID:  Q9Y312;
  ENSP ID: ENSP00000363043

SEQ ID NO: 700 - protein, 398 aa, Homo sapiens
  Payload ID: 118;
  Gene Symbol: AAR2;
  Gene Name: AAR2 splicing  factor homolog;
  ENSP ID: ENSP00000380455
MAAVQMDPELAKRLFFEGATVVILNMPKGTEFGIDYNSWEVGPKFRGVKMIPPGIHFLHYSSVDKANPKEVGPRMGFFLSLHQRGLTVLRWSTLREEVDLSPAPESEVEAMRANLQELDQFLGPYPYATLKKWISLTNFISEATVEKLQPENRQICAFSDVLPVLSMKHTKDRVGQNLPRCGIECKSYQEGLARLPEMKPRAGTEIRFSELPTQMFPEGATPAEITKHSMDLSYALETVLNKQFPSSPQDVLGELQFAFVCFLLGNVYEAFEHWKRLLNLLCRSEAAMMKHHTLYINLISILYHQLGEIPADFFVDIVSQDNFLTSTLQRQSLAVSPRLKCSDLIIARCSLELLGSYDPPTSASRVAGTTGRYHHTRLINNNKKNCRDKVFLCCPGWS

SEQ ID NO: 701 - protein, 523 aa, Homo sapiens
  Payload ID: 119;
  Gene Symbol: ADCK1;
  Gene Name: aarF domain containing kinase 1;
  Uniprot ID:  Q86TW2;
  ENSP ID: ENSP00000238561
MARKALKLASWTSMALAASGIYFYSNKYLDPNDFGAVRVGRAVATTAVISYDYLTSLKSVPYGSEEYLQLRSKVHLRSARRLCELCCANRGTFIKVGQHLGALDYLLPEEYTSTLKVLHSQAPQSSMQEIRQVIREDLGKEIHDLFQSFDDTPLGTASLAQVHKAVLHDGRTVAVKVQHPKVRAQSSKDILLMEVLVLAVKQLFPEFEFMWLVDEAKKNLPLELDFLNEGRNAEKVSQMLRHFDFLKVPRIHWDLSTERVLLMEFVDGGQVNDRDYMERNKIDVNEISRHLGKMYSEMIFVNGFVHCDPHPGNVLVRKHPGTGKAEIVLLDHGLYQMLTEEFRLNYCHLWQSLIWTDMKRVKEYSQRLGAGDLYPLFACMLTARSWDSVNRGISQAPVTATEDLEIRNNAANYLPQISHLLNHVPRQMLLILKTNDLLRGIEAALGTRASASSFLNMSRCCIRALAEHKKKNTCSFFRRTQISFSEAFNLWQINLHELILRVKGLKLADRVLALICWLFPAPL

SEQ ID NO: 702 - protein, 455 aa, Homo sapiens
  Payload ID: 119;
  Gene Symbol: ADCK1;
  Gene Name: aarF domain containing kinase 1;
  Uniprot ID:  Q86TW2;
  ENSP ID: ENSP00000339663
MARKALKLASWTSMALAASGIYFYSNKYLDPNDFGAVRVGRAVATTAVISYDYLTSLKSVPYGSEEYLQLRSKIHDLFQSFDDTPLGTASLAQVHKAVLHDGRTVAVKVQHPKVRAQSSKDILLMEVLVLAVKQLFPEFEFMWLVDEAKKNLPLELDFLNEGRNAEKVSQMLRHFDFLKVPRIHWDLSTERVLLMEFVDGGQVNDRDYMERNKIDVNEISRHLGKMYSEMIFVNGFVHCDPHPGNVLVRKHPGTGKAEIVLLDHGLYQMLTEEFRLNYCHLWQSLIWTDMKRVKEYSQRLGAGDLYPLFACMLTARSWDSVNRGISQAPVTATEDLEIRNNAANYLPQISHLLNHVPRQMLLILKTNDLLRGIEAALGTRASASSFLNMSRCCIRALAEHKKKNTCSFFRRTQISFSEAFNLWQINLHELILRVKGLKLADRVLALICWLFPAPL

SEQ ID NO: 703 - protein, 218 aa, Homo sapiens
  Payload ID: 119;
  Gene Symbol: ADCK1;
  Gene Name: aarF domain containing kinase 1;
  ENSP ID: ENSP00000377256
MARKALKLASWTSMALAASGIYFYSNKYLDPNDFGAVRVGRAVATTAVISYDYLTSLKSVPYGSEEYLQLRSKVHLRSARRLCELCCANRGTFIKVGQHLGALDYLLPEEYTSTLKVLHSQAPQSSMQEIRQVIREDLGKEVLVLAVKQLFPEFEFMWLVDEAKKNLPLELDFLNEGRNAEKVSQMLRHFDFLKPGQQSETASQGTTTTTKKKWDRKL

SEQ ID NO: 704 - protein, 122 aa, Homo sapiens
  Payload ID: 119;
  Gene Symbol: ADCK1;
  Gene Name: aarF domain containing kinase 1;
  ENSP ID: ENSP00000451271
MARKALKLASWTSMALAASGIYFYSNKYLDPNDFGAVRVGRAVATTAVISYDYLTSLKSVPYGSEEYLQLRSKSLAVSPRLECIGVISAHCNLYLLGSSDSPASASQVAGTTGAPSLCQASL

SEQ ID NO: 705 - protein, 265 aa, Homo sapiens
  Payload ID: 119;
  Gene Symbol: ADCK1;
  Gene Name: aarF domain containing kinase 1;
  ENSP ID: ENSP00000451549
MARKALKLASWTSMALAASGIYFYSNKYLDPNDFGAVRVGRAVATTAVISYDYLTSLKSVPYGSEEYLQLRSKVHLRSARRLCELCCANRGTFIKVGQHLGALDYLLPEEYTSTLKVLHSQAPQSSMQEIRQVIREDLGKEIHDLFQSFDDTPLGTASLAQVHKAVLHDGRTVAVKVQHPKVRAQSSKDILLMEVLVLAVKQLFPEFEFMWLVDEAKKNLPLELDFLNEGRNAEKVSQMLRHFDFLKISRHLGKMYSEMIFVNGF

SEQ ID NO: 706 - protein, 626 aa, Homo sapiens
  Payload ID: 120;
  Gene Symbol: ADCK2;
  Gene Name: aarF domain containing kinase 2;
  Uniprot ID:  Q7Z695;
  ENSP ID: ENSP00000072869
MVAPWRVSVRVCLSHLRCFELRQGLSLLRPSECPRDARLCWLLLGTLPKVVSLCGDVGEGAPDVLSRRRVRCSGAAGAGPAESLPRAGPLGGVFLHLRLWLRAGALLVKFFPLLLLYPLTYLAPSVSTLWLHLLLKATETSGPTYIKLGQWASTRRDLFSEAFCAQFSKLHVRVTPHPWTHTERFLRQAFGDDWGSILSFENREPVGSGCVAQVYKAYANTAFLETDSVQRLGRASCLPPFSHTGAVGGLRELFGYLGNGRKPPENLADQSFLERLLLPKADLVGSNAGVSRAQVPGHQPEATNLISVAVKVLHPGLLAQVHMDLLLMKIGSRVLGVLPGIKWLSLPEIVEEFEKLMVQQIDLRYEAQNLEHFQVNFRNVKAVKFPTPLRPFVTREVLVETYEESVPVSSYQQAGIPVDLKRKIARLGINMLLKMIFVDNFVHADLHPGNILVQGANGLSSSQEAQLQQADICDTLVVAVPSSLCPLRLVLLDAGIVAELQAPDLRNFRAVFMAVVMGQGQRVAELILHHARASECRDVEGFKTEMAMLVTQARKNTITLEKLHVSSLLSSVFKLLMTHKVKLESNFASIVFAIMVLEGLGRSLDPKLDILEAARPFLLTGPVCPP

SEQ ID NO: 707 - protein, 470 aa, Homo sapiens
  Payload ID: 120;
  Gene Symbol: ADCK2;
  Gene Name: aarF domain containing kinase 2;
  ENSP ID: ENSP00000417367
  MOD_RES (1)..(1): Any amino acid
XCAQFSKLHVRVTPHPWTHTERFLRQAFGDDWGSILSFENREPVGSGCVAQVYKAYANTAFLETDSVQRLGRASCLPPFSHTGAVGGLRELFGYLGNGRKPPENLADQSFLERLLLPKADLVGSNAGVSRAQVPGHQPEATNLISVAVKVLHPGLLAQVHMDLLLMKIGSRVLGVLPGIKWLSLPEIVEEFEKLMVQQIDLRYEAQNLEHFQVNFRNVKAVKFPTPLRPFVTREVLVETYEESVPVSSYQQAGIPVDLKRKIARLGINMLLKMIFVDNFVHADLHPGNILVQGANGLSSSQEAQLQQADICDTLVVAVPSSLCPLRLVLLDAGIVAELQAPDLRNFRAVFMAVVMGQGQRVAELILHHARASECRDVEGFKTEMAMLVTQARKNTITLEKLHVSSLLSSVFKLLMTHKVLRGHSKQAERGWDGSRWLGGRTPAGHAAPRASAHQVQCGGGKGTKRRQSLP

SEQ ID NO: 708 - protein, 223 aa, Homo sapiens
  Payload ID: 120;
  Gene Symbol: ADCK2;
  Gene Name: aarF domain containing kinase 2;
  ENSP ID: ENSP00000420288
IDLRYEAQNLEHFQVNFRNVKAVKFPTPLRPFVTREVLVETYEESVPVSSYQQAGIPVDLKRKIARLGINMLLKMIFVDNFVHADLHPGNILVQGANGLSSSQEAQLQQADICDTLVVAVPSSLCPLRLVLLDAGIVAELQAPDLRNFRAVFMAVVMGQLHVSSLLSSVFKLLMTHKVKLESNFASIVFAIMVLEGLGRSLDPKLDILEAARPFLLTGPVCPP

SEQ ID NO: 709 - protein, 590 aa, Homo sapiens
  Payload ID: 120;
  Gene Symbol: ADCK2;
  Gene Name: aarF domain containing kinase 2;
  ENSP ID: ENSP00000420512
MVAPWRVSVRVCLSHLRCFELRQGLSLLRPSECPRDARLCWLLLGTLPKVVSLCGDVGEGAPDVLSRRRVRCSGAAGAGPAESLPRAGPLGGVFLHLRLWLRAGALLVKFFPLLLLYPLTYLAPSVSTLWLHLLLKATETSGPTYIKLGQWASTRRDLFSEAFCAQFSKLHVRVTPHPWTHTERFLRQAFGDDWGSILSFENREPVGSGCVAQVYKAYANTAFLETDSVQRLGRASCLPPFSHTGAVGGLRELFGYLGNGRKPPENLADQSFLERLLLPKADLVGSNAGVSRAQVPGHQPEATNLISVAVKVLHPGLLAQVHMDLLLMKIGSRVLGVLPGIKWLSLPEIVEEFEKLMVQQIDLRYEAQNLEHFQVNFRNVKAVKFPTPLRPFVTREVLVETYEESVPVSSYQQAGIPVDLKRKIARLGINMLLKMIFVDNFVHADLHPGNILVQGANGLSSSQEAQLQQADICDTLVVAVPSSLCPLRLVLLDAGIVAELQAPDLRNFRAVFMAVVMGQGQRVAELILHHARASECRDVEGFKTEMAMLVTQARKNTITLEKLHVSSLLSSVFKLLMTHKVKSQFIPAPS

SEQ ID NO: 710 - protein, 407 aa, Homo sapiens
  Payload ID: 120;
  Gene Symbol: ADCK2;
  Gene Name: aarF domain containing kinase 2;
  ENSP ID: ENSP00000480996
MVAPWRVSVRVCLSHLRCFELRQGLSLLRPSECPRDARLCWLLLGTLPKVVSLCGDVGEGAPDVLSRRRVRCSGAAGAGPAESLPRAGPLGGVFLHLRLWLRAGALLVKFFPLLLLYPLTYLAPSVSTLWLHLLLKATETSGPTYIKLGQWASTRRDLFSEAFCAQFSKLHVRVTPHPWTHTERFLRQAFGDDWGSILSFENREPVGSGCVAQVYKAYANTAFLETDSVQRLGRASCLPPFSHTGAVGGLRELFGYLGNGRKPPENLADQSFLERLLLPKADLVGSNAGVSRAQVPGHQPEATNLISVAVKVLHPGLLAQVHMDLLLMKIGSRVLGVLPGIKWLSLPEIVEEFEKLMVQQIDLRYEAQNLEHFQVNFRNVKAVKFPTPLRPSYGSWDVLKLGHQFQM

SEQ ID NO: 711 - protein, 647 aa, Homo sapiens
  Payload ID: 121;
  Gene Symbol: ADCK3;
  Gene Name: aarF domain containing kinase 3;
  Uniprot ID:  Q8NI60;
  ENSP ID: ENSP00000355739
MAAILGDTIMVAKGLVKLTQAAVETHLQHLGIGGELIMAARALQSTAVEQIGMFLGKVQGQDKHEEYFAENFGGPEGEFHFSVPHAAGASTDFSSASAPDQSAPPSLGHAHSEGPAPAYVASGPFREAGFPGQASSPLGRANGRLFANPRDSFSAMGFQRRFFHQDQSPVGGLTAEDIEKARQAKARPENKQHKQTLSEHARERKVPVTRIGRLANFGGLAVGLGFGALAEVAKKSLRSEDPSGKKAVLGSSPFLSEANAERIVRTLCKVRGAALKLGQMLSIQDDAFINPHLAKIFERVRQSADFMPLKQMMKTLNNDLGPNWRDKLEYFEERPFAAASIGQVHLARMKGGREVAMKIQYPGVAQSINSDVNNLMAVLNMSNMLPEGLFPEHLIDVLRRELALECDYQREAACARKFRDLLKGHPFFYVPEIVDELCSPHVLTTELVSGFPLDQAEGLSQEIRNEICYNILVLCLRELFEFHFMQTDPNWSNFFYDPQQHKVALLDFGATREYDRSFTDLYIQIIRAAADRDRETVRAKSIEMKFLTGYEVKVMEDAHLDAILILGEAFASDEPFDFGTQSTTEKIHNLIPVMLRHRLVPPPEETYSLHRKMGGSFLICSKLKARFPCKAMFEEAYSNYCKRQAQQ

SEQ ID NO: 712 - protein, 595 aa, Homo sapiens
  Payload ID: 121;
  Gene Symbol: ADCK3;
  Gene Name: aarF domain containing kinase 3;
  Uniprot ID:  Q8NI60;
  ENSP ID: ENSP00000355740
MFLGKVQGQDKHEEYFAENFGGPEGEFHFSVPHAAGASTDFSSASAPDQSAPPSLGHAHSEGPAPAYVASGPFREAGFPGQASSPLGRANGRLFANPRDSFSAMGFQRRFFHQDQSPVGGLTAEDIEKARQAKARPENKQHKQTLSEHARERKVPVTRIGRLANFGGLAVGLGFGALAEVAKKSLRSEDPSGKKAVLGSSPFLSEANAERIVRTLCKVRGAALKLGQMLSIQDDAFINPHLAKIFERVRQSADFMPLKQMMKTLNNDLGPNWRDKLEYFEERPFAAASIGQVHLARMKGGREVAMKIQYPGVAQSINSDVNNLMAVLNMSNMLPEGLFPEHLIDVLRRELALECDYQREAACARKFRDLLKGHPFFYVPEIVDELCSPHVLTTELVSGFPLDQAEGLSQEIRNEICYNILVLCLRELFEFHFMQTDPNWSNFFYDPQQHKVALLDFGATREYDRSFTDLYIQIIRAAADRDRETVRAKSIEMKFLTGYEVKVMEDAHLDAILILGEAFASDEPFDFGTQSTTEKIHNLIPVMLRHRLVPPPEETYSLHRKMGGSFLICSKLKARFPCKAMFEEAYSNYCKRQAQQ

SEQ ID NO: 713 - protein, 647 aa, Homo sapiens; identical to SEQ ID NO: 711
  Payload ID: 121;
  Gene Symbol: ADCK3;
  Gene Name: aarF domain containing kinase 3;
  Uniprot ID:  Q8NI60;
  ENSP ID: ENSP00000355741

SEQ ID NO: 714 - protein, 503 aa, Homo sapiens
  Payload ID: 122;
  Gene Symbol: ADCK4;
  Gene Name: aarF domain containing kinase 4;
  Uniprot ID:  Q96D53;
  ENSP ID: ENSP00000243583
MWLKVGGLLRGTGGQLGQTVGWPCGALGPGPHRWGPCGGSWAQKFYQDGPGRGLGEEDIRRAREARPRKTPRPQLSDRSRERKVPASRISRLANFGGLAVGLGLGVLAEMAKKSMPGGRLQSDNSFISPQLQHIFERVRQSADFMPRWQMLRVLEEELGRDWQAKVASLEEVPFAAASIGQVHQGLLRDGTEVAVKIQYPGIAQSIQSDVQNLLAVLKMSAALPAGLFAEQSLQALQQELAWECDYRREAACAQNFRQLLANDPFFRVPAVVKELCTTRVLGMELAGGVPLDQCQGLSQDLRNQICFQLLTLCLRELFEFRFMQTDPNWANFLYDASSHQVTLLDFGASREFGTEFTDHYIEVVKAAADGDRDCVLQKSRDLKFLTGFETKAFSDAHVEAVMILGEPFATQGPYDFGSGETARRIQDLIPVLLRHRLCPPPEETYALHRKLAGAFLACAHLRAHIACRDLFQDTYHRYWASRQPDAATAGSLPTKGDSWVDPS

SEQ ID NO: 715 - protein, 544 aa, Homo sapiens
  Payload ID: 122;
  Gene Symbol: ADCK4;
  Gene Name: aarF domain containing kinase 4;
  Uniprot ID:  Q96D53;
  ENSP ID: ENSP00000315118
MWLKVGGLLRGTGGQLGQTVGWPCGALGPGPHRWGPCGGSWAQKFYQDGPGRGLGEEDIRRAREARPRKTPRPQLSDRSRERKVPASRISRLANFGGLAVGLGLGVLAEMAKKSMPGGRLQSEGGSGLDSSPFLSEANAERIVQTLCTVRGAALKVGQMLSIQDNSFISPQLQHIFERVRQSADFMPRWQMLRVLEEELGRDWQAKVASLEEVPFAAASIGQVHQGLLRDGTEVAVKIQYPGIAQSIQSDVQNLLAVLKMSAALPAGLFAEQSLQALQQELAWECDYRREAACAQNFRQLLANDPFFRVPAVVKELCTTRVLGMELAGGVPLDQCQGLSQDLRNQICFQLLTLCLRELFEFRFMQTDPNWANFLYDASSHQVTLLDFGASREFGTEFTDHYIEVVKAAADGDRDCVLQKSRDLKFLTGFETKAFSDAHVEAVMILGEPFATQGPYDFGSGETARRIQDLIPVLLRHRLCPPPEETYALHRKLAGAFLACAHLRAHIACRDLFQDTYHRYWASRQPDAATAGSLPTKGDSWVDPS

SEQ ID NO: 716 - protein, 149 aa, Homo sapiens
  Payload ID: 122;
  Gene Symbol: ADCK4;
  Gene Name: aarF domain containing kinase 4;
  ENSP ID: ENSP00000470876
MWLKVGGLLRGTGGQLGQTVGWPCGALGPGPHRWGPCGGSWAQKFYQDGPGRGLGEEDIRRAREARPRKTPRPQLSDRSRERKVPASRISRLANFGGLAVGLGLGVLAEMAKKSMPGGRLQSEGGSGLDSSPFLSEANAERIVQTLCTV

SEQ ID NO: 717 - protein, 204 aa, Homo sapiens
  Payload ID: 122;
  Gene Symbol: ADCK4;
  Gene Name: aarF domain containing kinase 4;
  ENSP ID: ENSP00000470894
MAKKSMPGGRLQSEGGSGLDSSPFLSEANAERIVQTLCTVRGAALKVGQMLSIQDNSFISPQLQHIFERVRQSADFMPRWQMLRVLEEELGRDWQAKVASLEEVPFAAASIGQVHQGLLRDGTEVAVKIQYPGIAQSIQSDVQNLLAVLKMSAALPAGLFAEQSLQALQQELAWECDYRREAACAQNFRQLLANDPFFRVPAVV

SEQ ID NO: 718 - protein, 230 aa, Homo sapiens
  Payload ID: 122;
  Gene Symbol: ADCK4;
  Gene Name: aarF domain containing kinase 4;
  ENSP ID: ENSP00000470916
MWLKVGGLLRGTGGQLGQTVGWPCGALGPGPHRWGPCGGSWAQKFYQDGPGRGLGEEDIRRAREARPRKTPRPQLSDRSRERKVPASRISRLANFGGLAVGLGLGVLAEMAKKSMPGGRLQSEGGSGLDSSPFLSEANAERIVQTLCTVRGAALKVGQMLSIQDNSFISPQLQHIFERVRQSADFMPRWQMLRVLEEELGRDWQAKVASLEEVPFAAASIGQVHQGLLRD

SEQ ID NO: 719 - protein, 115 aa, Homo sapiens
  Payload ID: 122;
  Gene Symbol: ADCK4;
  Gene Name: aarF domain containing kinase 4;
  ENSP ID: ENSP00000471192
MWLKVGGLLRGTGGQLGQTVGWPCGALGPGPHRWGPCGGSWAQKFYQDGPGRGLGEEDIRRAREARPRKTPRPQLSDRSRERKTTASSALSCSTSLSGSARAPTSCPAGRCCTPA

SEQ ID NO: 720 - protein, 134 aa, Homo sapiens
  Payload ID: 122;
  Gene Symbol: ADCK4;
  Gene Name: aarF domain containing kinase 4;
  ENSP ID: ENSP00000471310
MWLKVGGLLRGTGGQLGQTVGWPCGALGPGPHRWGPCGGSWAQKFYQDGPGRGLGEEDIRRAREARPRKTPRPQLSDRSRERKVPASRISRLANFGEGGSGLDSSPFLSEANAERIVQTLCTVRGAALKVGQML

SEQ ID NO: 721 - protein, 81 aa, Homo sapiens
  Payload ID: 122;
  Gene Symbol: ADCK4;
  Gene Name: aarF domain containing kinase 4;
  ENSP ID: ENSP00000472519
MWLKVGGLLRGTGGQLGQTVGWPCGALGPGPHRWGPCGGSWAQKFYQDGPGRGLGEEDIRRAREARPRKTPRPQTLSPFPS

SEQ ID NO: 722 - protein, 10 aa, Homo sapiens
  Payload ID: 122;
  Gene Symbol: ADCK4;
  Gene Name: aarF domain containing kinase 4;
  ENSP ID: ENSP00000472775
MWLKVGGLLR

SEQ ID NO: 723 - protein, 110 aa, Homo sapiens
  Payload ID: 122;
  Gene Symbol: ADCK4;
  Gene Name: aarF domain containing kinase 4;
  ENSP ID: ENSP00000472925
MWLKVGGLLRGTGGQLGQTVGWPCGALGPGPHRWGPCGGSWAQKFYQDGPGRGLGEEDIRRAREARPRKTPRPQLSDRSRERKVPASRISRLANFGGLAVGLGLGVLAEM

SEQ ID NO: 724 - protein, 121 aa, Homo sapiens
  Payload ID: 122;
  Gene Symbol: ADCK4;
  Gene Name: aarF domain containing kinase 4;
  ENSP ID: ENSP00000472978
MWLKVGGLLRGTGGQLGQTVGWPCGALGPGPHRWGPCGGSWAQKFYQDGPGRGLGEEDIRRAREARPRKTPRPQLSDRSRERKVPASRISRLANFGGLAVGLGLGVLAEMAKKSMPGGRLQ

SEQ ID NO: 725 - protein, 73 aa, Homo sapiens
  Payload ID: 122;
  Gene Symbol: ADCK4;
  Gene Name: aarF domain containing kinase 4;
  ENSP ID: ENSP00000473017
MAKKSMPGGRLQSEGGSGLDSSPFLSEANAERIVQTLCTVRGAALKVGQMLSIQASSALSCSTSLSGSARAPT

SEQ ID NO: 726 - protein, 157 aa, Homo sapiens
  Payload ID: 122;
  Gene Symbol: ADCK4;
  Gene Name: aarF domain containing kinase 4;
  ENSP ID: ENSP00000473189
MWLKVGGLLRGTGGQLGQTVGWPCGALGPGPHRWGPCGGSWAQKFYQDGPGRGLGEEDIRRAREARPRKTPRPQLSDRSRERKVPASRISRLANFGGLAVGLGLGVLAEMAKKSMPGGRLQSEGGSGLDSSPFLSEANAERIVQTLCTVRGAALKVG

SEQ ID NO: 727 - protein, 580 aa, Homo sapiens
  Payload ID: 123;
  Gene Symbol: ADCK5;
  Gene Name: aarF domain containing kinase 5;
  Uniprot ID:  Q3MIX3;
  ENSP ID: ENSP00000310547
MWRPVQLCHFHSALLHSRQKPWPSPAVFFRRNVRGLPPRFSSPTPLWRKVLSTAVVGAPLLLGARYVMAEAREKRRMRLVVDGMGRFGRSLKVGLQISLDYWWCTNVVLRGVEENSPGYLEVMSACHQRAADALVAGAISNGGLYVKLGQGLCSFNHLLPPEYTRTLRVLEDRALKRGFQEVDELFLEDFQALPHELFQEFDYQPIAAASLAQVHRAKLHDGTSVAVKVQYIDLRDRFDGDIHTLELLLRLVEVMHPSFGFSWVLQDLKGTLAQELDFENEGRNAERCARELAHFPYVVVPRVHWDKSSKRVLTADFCAGCKVNDVEAIRSQGLAVHDIAEKLIKAFAEQIFYTGFIHSDPHPGNVLVRKGPDGKAELVLLDHGLYQFLEEKDRAALCQLWRAIILRDDAAMRAHAAALGVQDYLLFAEMLMQRPVRLGQLWGSHLLSREEAAYMVDMARERFEAVMAVLRELPRPMLLVLRNINTVRAINVALGAPVDRYFLMAKRAVRGWSRLAGATYRGVYGTSLLRHAKVVWEMLKFEVALRLETLAMRLTALLARALVHLSLVPPAEELYQYLET

SEQ ID NO: 728 - protein, 129 aa, Homo sapiens
  Payload ID: 123;
  Gene Symbol: ADCK5;
  Gene Name: aarF domain containing kinase 5;
  ENSP ID: ENSP00000431875
MWRPVQLCHFHSALLHSRQKPWPSPAVFFRRNVRGLPPRFSSPTPLWRKVLSTAVVGAPLLLGARYVMAEAREKRRMRLVVDGMGRFGRSLKVGLQISLDYWWCTNVVLRGVEEPRLLGGDVCVSPAGG

SEQ ID NO: 729 - protein, 115 aa, Homo sapiens
  Payload ID: 123;
  Gene Symbol: ADCK5;
  Gene Name: aarF domain containing kinase 5;
  ENSP ID: ENSP00000436484
MWRPVQLCHFHSALLHSRQKPWPSPAVFFRRNVRGLPPRFSSPTPLWRKVLSTAVVGAPLLLGARYVMAEAREKRRMRLVVDGMGRFGRPCLPRPWRPTLLVSSSLPSGPQAAGL

SEQ ID NO: 730 - protein, 87 aa, Homo sapiens
  Payload ID: 123;
  Gene Symbol: ADCK5;
  Gene Name: aarF domain containing kinase 5;
  ENSP ID: ENSP00000473494
MWRPAGVQCLNLGSLQSPPTKIKRFSCLSLPTTWDYRCSSVISTLLCCTAGRSPGRPLLCSSGETSGAFLQGSPAPHPCGGRCSPPR

SEQ ID NO: 731 - protein, 1196 aa, Homo sapiens
  Payload ID: 124;
  Gene Symbol: AHI1;
  Gene Name: Abelson helper integration site 1;
  Uniprot ID:  Q8N157;
  ENSP ID: ENSP00000265602
MPTAESEAKVKTKVRFEELLKTHSDLMREKKKLKKKLVRSEENISPDTIRSNLHYMKETTSDDPDTIRSNLPHIKETTSDDVSAANTNNLKKSTRVTKNKLRNTQLATENPNGDASVEEDKQGKPNKKVIKTVPQLTTQDLKPETPENKVDSTHQKTHTKPQPGVDHQKSEKANEGREETDLEEDEELMQAYQCHVTEEMAKEIKRKIRKKLKEQLTYFPSDTLFHDDKLSSEKRKKKKEVPVFSKAETSTLTISGDTVEGEQKKESSVRSVSSDSHQDDEISSMEQSTEDSMQDDTKPKPKKTKKKTKAVADNNEDVDGDGVHEITSRDSPVYPKCLLDDDLVLGVYIHRTDRLKSDFMISHPMVKIHVVDEHTGQYVKKDDSGRPVSSYYEKENVDYILPIMTQPYDFKQLKSRLPEWEEQIVFNENFPYLLRGSDESPKVILFFEILDFLSVDEIKNNSEVQNQECGFRKIAWAFLKLLGANGNANINSKLRLQLYYPPTKPRSPLSVVEAFEWWSKCPRNHYPSTLYVTVRGLKVPDCIKPSYRSMMALQEEKGKPVHCERHHESSSVDTEPGLEESKEVIKWKRLPGQACRIPNKHLFSLNAGERGCFCLDFSHNGRILAAACASRDGYPIILYEIPSGRFMRELCGHLNIIYDLSWSKDDHYILTSSSDGTARIWKNEINNTNTFRVLPHPSFVYTAKFHPAVRELVVTGCYDSMIRIWKVEMREDSAILVRQFDVHKSFINSLCFDTEGHHMYSGDCTGVIVVWNTYVKINDLEHSVHHWTINKEIKETEFKGIPISYLEIHPNGKRLLIHTKDSTLRIMDLRILVARKFVGAANYREKIHSTLTPCGTFLFAGSEDGIVYVWNPETGEQVAMYSDLPFKSPIRDISYHPFENMVAFCAFGQNEPILLYIYDFHVAQQEAEMFKRYNGTFPLPGIHQSQDALCTCPKLPHQGSFQIDEFVHTESSSTKMQLVKQRLETVTEVIRSCAAKVNKNLSFTSPPAVSSQQSKLKQSNMLTAQEILHQFGFTQTGIISIERKPCNHQVDTAPTVVALYDYTANRSDELTIHRGDIIRVFFKDNEDWWYGSIGKGQEGYFPANHVASETLYQELPPEIKERSPPLSPEEKTKIEKSPAPQKQSINKNKSQDFRLGSESMTHSEMRKEQSHEDQGHIMDTRMRKNKQAGRKVTLIE

SEQ ID NO: 732 - protein, 1053 aa, Homo sapiens
  Payload ID: 124;
  Gene Symbol: AHI1;
  Gene Name: Abelson helper integration site 1;
  Uniprot ID:  Q8N157;
  ENSP ID: ENSP00000322478
MPTAESEAKVKTKVRFEELLKTHSDLMREKKKLKKKLVRSEENISPDTIRSNLHYMKETTSDDPDTIRSNLPHIKETTSDDVSAANTNNLKKSTRVTKNKLRNTQLATENPNGDASVEEDKQGKPNKKVIKTVPQLTTQDLKPETPENKVDSTHQKTHTKPQPGVDHQKSEKANEGREETDLEEDEELMQAYQCHVTEEMAKEIKRKIRKKLKEQLTYFPSDTLFHDDKLSSEKRKKKKEVPVFSKAETSTLTISGDTVEGEQKKESSVRSVSSDSHQDDEISSMEQSTEDSMQDDTKPKPKKTKKKTKAVADNNEDVDGDGVHEITSRDSPVYPKCLLDDDLVLGVYIHRTDRLKSDFMISHPMVKIHVVDEHTGQYVKKDDSGRPVSSYYEKENVDYILPIMTQPYDFKQLKSRLPEWEEQIVFNENFPYLLRGSDESPKVILFFEILDFLSVDEIKNNSEVQNQECGFRKIAWAFLKLLGANGNANINSKLRLQLYYPPTKPRSPLSVVEAFEWWSKCPRNHYPSTLYVTVRGLKVPDCIKPSYRSMMALQEEKGKPVHCERHHESSSVDTEPGLEESKEVIKWKRLPGQACRIPNKHLFSLNAGERGCFCLDFSHNGRILAAACASRDGYPIILYEIPSGRFMRELCGHLNIIYDLSWSKDDHYILTSSSDGTARIWKNEINNTNTFRVLPHPSFVYTAKFHPAVRELVVTGCYDSMIRIWKVEMREDSAILVRQFDVHKSFINSLCFDTEGHHMYSGDCTGVIVVWNTYVKINDLEHSVHHWTINKEIKETEFKGIPISYLEIHPNGKRLLIHTKDSTLRIMDLRILVARKFVGAANYREKIHSTLTPCGTFLFAGSEDGIVYVWNPETGEQVAMYSDLPFKSPIRDISYHPFENMVAFCAFGQNEPILLYIYDFHVAQQEAEMFKRYNGTFPLPGIHQSQDALCTCPKLPHQGSFQIDEFVHTESSSTKMQLVKQRLETVTEVIRSCAAKVNKNLSFTSPPAVSSQQSKLKQSNMLTAQEILHQFGFTQTDSHFAEFNTCILWWKKH

SEQ ID NO: 733 - protein, 668 aa, Homo sapiens
  Payload ID: 124;
  Gene Symbol: AHI1;
  Gene Name: Abelson helper integration site 1;
  ENSP ID: ENSP00000356773
  MOD_RES (1)..(1): Any amino acid
XPTKPRSPLSVVEAFEWWSKCPRNHYPSTLYVTVRGLKVPDCIKPSYRSMMALQEEKGKPVHCERHHESSSVDTEPGLEESKEVIKWKRLPGQACRIPNKHLFSLNAGERGCFCLDFSHNGRILAAACASRDGYPIILYEIPSGRFMRELCGHLNIIYDLSWSKDDHYILTSSSDGTARIWKNEINNTNTFRVLPHPSFVYTAKFHPAVRELVVTGCYDSMIRIWKVEMREDSAILVRQFDVHKSFINSLCFDTEGHHMYSGDCTGVIVVWNTYVKINDLEHSVHHWTINKEIKETEFKGIPISYLEIHPNGKRLLIHTKDSTLRIMDLRILVARKFVGAANYREKIHSTLTPCGTFLFAGSEDGIVYVWNPETGEQVAMYSDLPFKSPIRDISYHPFENMVAFCAFGQNEPILLYIYDFHVAQQEAEMFKRYNGTFPLPGIHQSQDALCTCPKLPHQGSFQIDEFVHTESSSTKMQLVKQRLETVTEVIRSCAAKVNKNLSFTSPPAVSSQQSKLKQSNMLTAQEILHQFGFTQTGIISIERKPCNHQVDTAPTVVALYDYTANRSDELTIHRGDIIRVFFKDNEDWWYGSIGKGQEGYFPANHVASETLYQELPPEIKERSPPLSPEEKTKIEKSPAPQKQSINKNKSQDFRLGSESMTHKELKKS

SEQ ID NO: 734 - protein, 1196 aa, Homo sapiens; identical to SEQ ID NO: 731
  Payload ID: 124;
  Gene Symbol: AHI1;
  Gene Name: Abelson helper integration site 1;
  Uniprot ID:  Q8N157;
  ENSP ID: ENSP00000356774

SEQ ID NO: 735 - protein, 1196 aa, Homo sapiens; identical to SEQ ID NO: 731
  Payload ID: 124;
  Gene Symbol: AHI1;
  Gene Name: Abelson helper integration site 1;
  Uniprot ID:  Q8N157;
  ENSP ID: ENSP00000388650

SEQ ID NO: 736 - protein, 609 aa, Homo sapiens
  Payload ID: 124;
  Gene Symbol: AHI1;
  Gene Name: Abelson helper integration site 1;
  Uniprot ID:  Q8N157;
  ENSP ID: ENSP00000432167
MPTAESEAKVKTKVRFEELLKTHSDLMREKKKLKKKLVRSEENISPDTIRSNLHYMKETTSDDPDTIRSNLPHIKETTSDDVSAANTNNLKKSTRVTKNKLRNTQLATENPNGDASVEEDKQGKPNKKVIKTVPQLTTQDLKPETPENKVDSTHQKTHTKPQPGVDHQKSEKANEGREETDLEEDEELMQAYQCHVTEEMAKEIKRKIRKKLKEQLTYFPSDTLFHDDKLSSEKRKKKKEVPVFSKAETSTLTISGDTVEGEQKKESSVRSVSSDSHQDDEISSMEQSTEDSMQDDTKPKPKKTKKKTKAVADNNEDVDGDGVHEITSRDSPVYPKCLLDDDLVLGVYIHRTDRLKSDFMISHPMVKIHVVDEHTGQYVKKDDSGRPVSSYYEKENVDYILPIMTQPYDFKQLKSRLPEWEEQIVFNENFPYLLRGSDESPKVILFFEILDFLSVDEIKNNSEVQNQECGFRKIAWAFLKLLGANGNANINSKLRLQLYYPPTKPRSPLSVVEAFEWWSKCPRNHYPSTLYVTVRGLKVPDCIKPSYRSMMALQEEKGKPVHCERHHESSSVDTEPGLEESKEVIKWKRLPGQENEDVFVLISPTMEEY

SEQ ID NO: 737 - protein, 54 aa, Homo sapiens
  Payload ID: 124;
  Gene Symbol: AHI1;
  Gene Name: Abelson helper integration site 1;
  ENSP ID: ENSP00000433017
MPTAESEAKVKTKVRFEELLKTHSDLMREKKKLKKKLVRSEENISNQEKSMAVW

SEQ ID NO: 738 - protein, 288 aa, Homo sapiens
  Payload ID: 124;
  Gene Symbol: AHI1;
  Gene Name: Abelson helper integration site 1;
  ENSP ID: ENSP00000433063
MPTAESEAKVKTKVRFEELLKTHSDLMREKKKLKKKLVRSEENISPDTIRSNLPHIKETTSDDVSAANTNNLKKSTRVTKNKLRNTQLATENPNGDASVEEDKQGKPNKKVIKTVPQLTTQDLKPETPENKVDSTHQKTHTKPQPGVDHQKSEKANEGREETDLEEDEELMQAYQCHVTEEMAKEIKRKIRKKLKEQLTYFPSDTLFHDDKLSSEKRKKKKEVPVFSKAETSTLTISGDTVEGEQKKESSVRSVSSDSHQDDEISSMEQSTEDSMQDDTKPKPKKTKK

SEQ ID NO: 739 - protein, 29 aa, Homo sapiens
  Payload ID: 124;
  Gene Symbol: AHI1;
  Gene Name: Abelson helper integration site 1;
  ENSP ID: ENSP00000433864
  MOD_RES (1)..(1): Any amino acid
XDFRLGSESMTQRELNEKAGGICIAREGL

SEQ ID NO: 740 - protein, 129 aa, Homo sapiens
  Payload ID: 124;
  Gene Symbol: AHI1;
  Gene Name: Abelson helper integration site 1;
  ENSP ID: ENSP00000434697
  MOD_RES (1)..(1): Any amino acid
XGTFPLPGIHQSQDALCTCPKLPHQGSFQIDEFVHTESSSTKMQLVKQRLETVTEVIRSCAAKVNKNLSFTSPPAVSSQQSKLKQSNMLTAQEILHQFGFTQTGEPLSYFDNSFKCSDACCVDEYHLFL

SEQ ID NO: 741 - protein, 542 aa, Homo sapiens
  Payload ID: 124;
  Gene Symbol: AHI1;
  Gene Name: Abelson helper integration site 1;
  ENSP ID: ENSP00000435710
  MOD_RES (1)..(1): Any amino acid
XSLNAGERGCFCLDFSHNGRILAAACASRDGYPIILYEIPSGRFMRELCGHLNIIYDLSWSKDDHYILTSSSDGTARIWKNEINNTNTFRVLPHPSFVYTAKFHPAVRELVVTGCYDSMIRIWKVEMREDSAILVRQFDVHKSFINSLCFDTEGHHMYSGDCTGVIVVWNTYVKINDLEHSVHHWTINKEIKETEFKGIPISYLEIHPNGKRLLIHTKDSTLRIMDLRILVARKFVGAANYREKIHSTLTPCGTFLFAGSEDGIVYVWNPETGEQVAMYSDLPFKSPIRDISYHPFENMVAFCAFGQNEPILLYIYDFHVAQQEAEMFKRYNGTFPLPGIHQSQDALCTCPKLPHQGSFQIDEFVHTESSSTKMQLVKQRLETVTEVIRSCAAKVNKNLSFTSPPAVSSQQSKLKQSNMLTAQEILHQFGFTQTGIISIERKPCNHQVDTAPTVVALYDYTANRSDELTIHRGDIIRVFFKDNEDWWYGSIGKGQEGYFPANHVASETLYQELPPEIKERSPPLSPEEKTKIEKSPAPQKVK

SEQ ID NO: 742 - protein, 48 aa, Homo sapiens
  Payload ID: 124;
  Gene Symbol: AHI1;
  Gene Name: Abelson helper integration site 1;
  ENSP ID: ENSP00000436071
MPTAESEAKVKTKVRFEELLKTHSDLMREKKKLKKKLVRSEENISVSK

SEQ ID NO: 743 - protein, 48 aa, Homo sapiens; identical to SEQ ID NO: 742
  Payload ID: 124;
  Gene Symbol: AHI1;
  Gene Name: Abelson helper integration site 1;
  ENSP ID: ENSP00000436516

SEQ ID NO: 744 - protein, 167 aa, Homo sapiens
  Payload ID: 125;
  Gene Symbol: ABHD14A-ACY1;
  Gene Name: ABHD14A-ACY1 readthrough;
  ENSP ID: ENSP00000417688
MVGALCGCWFRLGGARPLIPLGPTVVQTSMSRSQVALLGLSLLLMLLLYVGLPGPPEQTSCLWGDPNVTVLAGLTPGNSPIFYREVLPLNQAHRVEVVLLHGKAFNSHTWEQLGTLQLLSQRGYRAVALDLPAHHAQRHDQQGSRGGAPIGDALPPVPAYPHCPAQA

SEQ ID NO: 745 - protein, 167 aa, Homo sapiens; identical to SEQ ID NO: 744
  Payload ID: 125;
  Gene Symbol: ABHD14A-ACY1;
  Gene Name: ABHD14A-ACY1 readthrough;
  ENSP ID: ENSP00000420395

SEQ ID NO: 746 - protein, 509 aa, Homo sapiens
  Payload ID: 125;
  Gene Symbol: ABHD14A-ACY1;
  Gene Name: ABHD14A-ACY1 readthrough;
  ENSP ID: ENSP00000420487
MVGALCGCWFRLGGARPLIPLGPTVVQTSMSRSQVALLGLSLLLMLLLYVGLPGPPEQTSCLWGDPNVTVLAGLTPGNSPIFYREVLPLNQAHRVEVVLLHGKAFNSHTWEQLGTLQLLSQRGYRAVALDLPGAAVAFFEETARQLGLGCQKVEVAPGYVVTVLTWPGTNPTLSSILLNSHTDVVPVFKEHWSHDPFEAFKDSEGYIYARGAQDMKCVSIQYLEAVRRLKVEGHRFPRTIHMTFVPDEEVGGHQGMELFVQRPEFHALRAGFALDEGIANPTDAFTVFYSERSPWWVRVTSTGRPGHASRFMEDTAAEKLHKVVNSILAFREKEWQRLQSNPHLKEGSVTSVNLTKLEGGVAYNVIPATMSASFDFRVAPDVDFKAFEEQLQSWCQAAGEGVTLEFAQKWMHPQVTPTDDSNPWWAAFSRVCKDMNLTLEPEIMPAATDNRYIRAVGVPALGFSPMNRTPVLLHDHDERLHEAVFLRGVDIYTRLLPALASVPALPSDS

SEQ ID NO: 747 - protein, 405 aa, Homo sapiens
  Payload ID: 126;
  Gene Symbol: ABHD1;
  Gene Name: abhydrolase domain containing 1;
  Uniprot ID:  Q96SE0;
  ENSP ID: ENSP00000326491
MLSSFLSPQNGTWADTFSLLLALAVALYLGYYWACVLQRPRLVAGPQFLAFLEPHCSITTETFYPTLWCFEGRLQSIFQVLLQSQPLVLYQSDILQTPDGGQLLLDWAKQPDSSQDPDPTTQPIVLLLPGITGSSQETYVLHLVNQALRDGYQAVVFNNRGCRGEELRTHRAFCASNTEDLETVVNHIKHRYPQAPLLAVGISFGGILVLNHLAQARQAAGLVAALTLSACWDSFETTRSLETPLNSLLFNQPLTAGLCQLVERNRKVIEKVVDIDFVLQARTIRQFDERYTSVAFGYQDCVTYYKAASPRTKIDAIRIPVLYLSAADDPFSPVCALPIQAAQHSPYVALLITARGGHIGFLEGLLPWQHWYMSRLLHQYAKAIFQDPEGLPDLRALLPSEDRNS

SEQ ID NO: 748 - protein, 102 aa, Homo sapiens
  Payload ID: 126;
  Gene Symbol: ABHD1;
  Gene Name: abhydrolase domain containing 1;
  ENSP ID: ENSP00000390390
MAPGQTPSLCSWLLPLPSTWATTGHVCFSDILQTPDGGQLLLDWAKQPDSSQDPDPTTQPIVLLLPGITGSSQETYVLHLVNQALRDGYQPTGLFVPAILKI

SEQ ID NO: 749 - protein, 177 aa, Homo sapiens
  Payload ID: 126;
  Gene Symbol: ABHD1;
  Gene Name: abhydrolase domain containing 1;
  ENSP ID: ENSP00000397522
MAPGQTPSLCSWLLPLPSTWATTGHVCFSDILQTPDGGQLLLDWAKQPDSSQDPDPTTQPIVLLLPGITGSSQETYVLHLVNQALRDGYQAVVFNNRGCRGEELRTHRAFCASNTEDLETVVNHIKHRYPQAPLLAVGISFGGILVLNHLAQARQAAGLVAALTLSACWDSFETTRS

SEQ ID NO: 750 - protein, 305 aa, Homo sapiens
  Payload ID: 126;
  Gene Symbol: ABHD1;
  Gene Name: abhydrolase domain containing 1;
  Uniprot ID:  Q96SE0;
  ENSP ID: ENSP00000410756
MLSSFLSPQNGTWADTFSLLLALAVALYLGYYWACVLQRPRLVAGPQFLAFLEPHCSITTETFYPTLWCFEGRLQSIFQVLLQSQPLVLYQSDILQTPDGGQLLLDWAKQPDSSQDPDPTTQPIVLLLPGITGSSQETYVLHLVNQALRDGYQAVVFNNRGCRGEELRTHRAFCASNTEDLETVVNHIKHRYPQAPLLAVGISFGGILVLNHLAQARQAAGLVAALTLSACWDSFETTRSLETPLNSLLFNQPLTAGLCQLVERLSYGKTCRPVQSASLMSATHLWPLDIKTVLPTTKQQALEPR

SEQ ID NO: 751 - protein, 305 aa, Homo sapiens; identical to SEQ ID NO: 750
  Payload ID: 126;
  Gene Symbol: ABHD1;
  Gene Name: abhydrolase domain containing 1;
  Uniprot ID:  Q96SE0;
  ENSP ID: ENSP00000481238

SEQ ID NO: 752 - protein, 306 aa, Homo sapiens
  Payload ID: 127;
  Gene Symbol: ABHD10;
  Gene Name: abhydrolase domain containing 10;
  Uniprot ID:  Q9NUJ1;
  ENSP ID: ENSP00000273359
MAVARLAAVAAWVPCRSWGWAAVPFGPHRGLSVLLARIPQRAPRWLPACRQKTSLSFLNRPDLPNLAYKKLKGKSPGIIFIPGYLSYMNGTKALAIEEFCKSLGHACIRFDYSGVGSSDGNSEESTLGKWRKDVLSIIDDLADGPQILVGSSLGGWLMLHAAIARPEKVVALIGVATAADTLVTKFNQLPVELKKEVEMKGVWSMPSKYSEEGVYNVQYSFIKEAEHHCLLHSPIPVNCPIRLLHGMKDDIVPWHTSMQVADRVLSTDVDVILRKHSDHRMREKADIQLLVYTIDDLIDKLSTIVN

SEQ ID NO: 753 - protein, 52 aa, Homo sapiens
  Payload ID: 127;
  Gene Symbol: ABHD10;
  Gene Name: abhydrolase domain containing 10;
  ENSP ID: ENSP00000417880
MAVARLAAVAAWVPCRSWGWAAVPFGPHRGLSVLLARIPQRAPRWLPDSCWI

SEQ ID NO: 754 - protein, 75 aa, Homo sapiens
  Payload ID: 127;
  Gene Symbol: ABHD10;
  Gene Name: abhydrolase domain containing 10;
  ENSP ID: ENSP00000418162
MAVARLAAVAAWVPCRSWGWAAVPFGPHRGLSVLLARIPQRAPRWLPGLITQELEVQMVTQRKAHWGNGEKMFFL

SEQ ID NO: 755 - protein, 205 aa, Homo sapiens
  Payload ID: 127;
  Gene Symbol: ABHD10;
  Gene Name: abhydrolase domain containing 10;
  Uniprot ID:  Q9NUJ1;
  ENSP ID: ENSP00000418973
MAVARLAAVAAWVPCRSWGWAAVPFGPHRGLSVLLARIPQRAPRWLPACRQKTSLSFLNRPDLPNLAYKKLKGKSPGIIFIPGYLSYMNGTKALAIEEFCKSLGHACIRFDYSGVGSSDGNSEESTLGKWRKDVLSIIDDLADGPQILVGSSLGGWLMLHAAIARPEKVVALIGVATAADTLVTKFNQLPVEDSGRKNYISLHSA

SEQ ID NO: 756 - protein, 315 aa, Homo sapiens
  Payload ID: 128;
  Gene Symbol: ABHD11;
  Gene Name: abhydrolase domain containing 11;
  Uniprot ID:  Q8NFV4;
  ENSP ID: ENSP00000222800
MRAGQQLASMLRWTRAWRLPREGLGPHGPSFARVPVAPSSSSGGRGGAEPRPLPLSYRLLDGEAALPAVVFLHGLFGSKTNFNSIAKILAQQTGRRVLTVDARNHGDSPHSPDMSYEIMSQDLQDLLPQLGLVPCVVVGHSMGGKTAMLLALQRPELVERLIAVDISPVESTGVSHFATYVAAMRAINIADELPRSRARKLADEQLSSVIQDMAVRQHLLTNLVEVDGRFVWRVNLDALTQHLDKILAFPQRQESYLGPTLFLLGGNSQFVHPSHHPEIMRLFPRAQMQTVPNAGHWIHADRPQDFIAAIRGFLV

SEQ ID NO: 757 - protein, 258 aa, Homo sapiens
  Payload ID: 128;
  Gene Symbol: ABHD11;
  Gene Name: abhydrolase domain containing 11;
  Uniprot ID:  Q8NFV4;
  ENSP ID: ENSP00000378579
MRAGQQLASMLRWTRAWRLPREGLGPHGPSFARVPVAPSSSSGGRGGAEPRPLPLSYRLLDGEAALPAVVFLHGLFGSKTNFNSIAKILAQQTGRRVLTVDARNHGDSPHSPDMSYEIMSQDLQDLLPQLGLVPCVVVGHSMGGKTAMLLALQRDMAVRQHLLTNLVEVDGRFVWRVNLDALTQHLDKILAFPQRQESYLGPTLFLLGGNSQFVHPSHHPEIMRLFPRAQMQTVPNAGHWIHADRPQDFIAAIRGFLV

SEQ ID NO: 758 - protein, 184 aa, Homo sapiens
  Payload ID: 128;
  Gene Symbol: ABHD11;
  Gene Name: abhydrolase domain containing 11;
  ENSP ID: ENSP00000387908
  MOD_RES (1)..(1): Any amino acid
XREGLGPHGPSFARVPVAPSSSSGGRGGAEPRPLPLSYRLLDGEAALPAVVFLHGLFGSKTNFNSIAKILAQQTGRRVLTVDARNHGDSPHSPDMSYEIMSQDLQDLLPQLGLVPCVVVGHSMGGKTAMLLALQRVIHPRCPGWYCRPGPVKGRVAPPDRTRNLPQLLHPHRTWPCGSTCSLTW

SEQ ID NO: 759 - protein, 101 aa, Homo sapiens
  Payload ID: 128;
  Gene Symbol: ABHD11;
  Gene Name: abhydrolase domain containing 11;
  Uniprot ID:  Q8NFV4;
  ENSP ID: ENSP00000392945
MRAGQQLASMLRWTRAWRLPREGLGPHGPSFARVPVAPSSSSGGRGGAEPRPLPLSYRLLDGEAALPAVVFLHGLFGSKTNFNSIAKILAQQTGRADGGCS

SEQ ID NO: 760 - protein, 159 aa, Homo sapiens
  Payload ID: 128;
  Gene Symbol: ABHD11;
  Gene Name: abhydrolase domain containing 11;
  ENSP ID: ENSP00000397666
MRAGQQLASMLRWTRAWRLPREGLGPHGPSFARVPVAPSSSSGGRGGAEPRPLPLSYRLLDGEAALPAVVFLHGLFGSKTNFNSIAKILAQQTGRRVLTVDARNHGDSPHSPDMSYEIMSQDLQDLLPQLGLVPCVVVGHSMGGKTAMLLALQRSQPPP

SEQ ID NO: 761 - protein, 123 aa, Homo sapiens
  Payload ID: 128;
  Gene Symbol: ABHD11;
  Gene Name: abhydrolase domain containing 11;
  ENSP ID: ENSP00000410536
  MOD_RES (1)..(1): Any amino acid
XPLPLSYRLLDGEAALPAVVFLHGLFGSKTNFNSIAKILAQQTGRRVLTVDARNHGDSPHSPDMSYEIMSQDLQDLLPQLGLVPCVVVGHSMGGKTAMLLALQRISAQWKAQVSPTLQPMWQP

SEQ ID NO: 762 - protein, 308 aa, Homo sapiens
  Payload ID: 128;
  Gene Symbol: ABHD11;
  Gene Name: abhydrolase domain containing 11;
  Uniprot ID:  Q8NFV4;
  ENSP ID: ENSP00000416970
MRAGQQLASMLRWTRAWRLPREGLGPHGPSFARVPVAPSSSSGGRGGAEPRLLDGEAALPAVVFLHGLFGSKTNFNSIAKILAQQTGRRVLTVDARNHGDSPHSPDMSYEIMSQDLQDLLPQLGLVPCVVVGHSMGGKTAMLLALQRPELVERLIAVDISPVESTGVSHFATYVAAMRAINIADELPRSRARKLADEQLSSVIQDMAVRQHLLTNLVEVDGRFVWRVNLDALTQHLDKILAFPQRQESYLGPTLFLLGGNSQFVHPSHHPEIMRLFPRAQMQTVPNAGHWIHADRPQDFIAAIRGFLV

SEQ ID NO: 763 - protein, 87 aa, Homo sapiens
  Payload ID: 128;
  Gene Symbol: ABHD11;
  Gene Name: abhydrolase domain containing 11;
  ENSP ID: ENSP00000430937
LRWTRAWRLPREGLGPHGPSFARVPVAPSSSSGGRGGAEPRPLPLSYRLLDGEAALPAVVFLHGLFGSKTNFNSIAKILAQQTGRRG

SEQ ID NO: 764 - protein, 398 aa, Homo sapiens
  Payload ID: 129;
  Gene Symbol: ABHD12;
  Gene Name: abhydrolase domain containing 12;
  Uniprot ID:  Q8N2K0;
  ENSP ID: ENSP00000341408
MRKRTEPVALEHERCAAAGSSSSGSAAAALDADCRLKQNLRLTGPAAAEPRCAADAGMKRALGRRKGVWLRLRKILFCVLGLYIAIPFLIKLCPGIQAKLIFLNFVRVPYFIDLKKPQDQGLNHTCNYYLQPEEDVTIGVWHTVPAVWWKNAQGKDQMWYEDALASSHPIILYLHGNAGTRGGDHRVELYKVLSSLGYHVVTFDYRGWGDSVGTPSERGMTYDALHVFDWIKARSGDNPVYIWGHSLGTGVATNLVRRLCERETPPDALILESPFTNIREEAKSHPFSVIYRYFPGFDWFFLDPITSSGIKFANDENVKHISCPLLILHAEDDPVVPFQLGRKLYSIAAPARSFRDFKVQFVPFHSDLGYRHKYIYKSPELPRILREFLGKSEPEHQH

SEQ ID NO: 765 - protein, 404 aa, Homo sapiens
  Payload ID: 129;
  Gene Symbol: ABHD12;
  Gene Name: abhydrolase domain containing 12;
  Uniprot ID:  Q8N2K0;
  ENSP ID: ENSP00000365725
MRKRTEPVALEHERCAAAGSSSSGSAAAALDADCRLKQNLRLTGPAAAEPRCAADAGMKRALGRRKGVWLRLRKILFCVLGLYIAIPFLIKLCPGIQAKLIFLNFVRVPYFIDLKKPQDQGLNHTCNYYLQPEEDVTIGVWHTVPAVWWKNAQGKDQMWYEDALASSHPIILYLHGNAGTRGGDHRVELYKVLSSLGYHVVTFDYRGWGDSVGTPSERGMTYDALHVFDWIKARSGDNPVYIWGHSLGTGVATNLVRRLCERETPPDALILESPFTNIREEAKSHPFSVIYRYFPGFDWFFLDPITSSGIKFANDENVKHISCPLLILHAEDDPVVPFQLGRKLYSIAAPARSFRDFKVQFVPFHSDLGYRHKYIYKSPELPRILRPQQGPGSSPDPSMWSELV

SEQ ID NO: 766 - protein, 187 aa, Homo sapiens
  Payload ID: 129;
  Gene Symbol: ABHD12;
  Gene Name: abhydrolase domain containing 12;
  ENSP ID: ENSP00000413311
MSGGGHGGVCFLCCILLQGRKGVWLRLRKILFCVLGLYIAIPFLIKLCPGIQAKLIFLNFVRVPYFIDLKKPQDQGLNHTCNYYLQPEEDVTIGVWHTVPAVWWKNAQGKDQMWYEDALASSHPIILYLHGNAGTRGGDHRVELYKVLSSLGYHVVTFDYRGWGDSVGTPSERGMTYDALHVFDWIK

SEQ ID NO: 767 - protein, 194 aa, Homo sapiens
  Payload ID: 129;
  Gene Symbol: ABHD12;
  Gene Name: abhydrolase domain containing 12;
  ENSP ID: ENSP00000459121
ARSGDNPVYIWGHSLGTGVATNLVRRLCERETPPDALILESPFTNIREEAKSHPFSVIYRYFPGFDWFFLDPITSSGIKFANDENVKHISCPLLILHAEDDPVVPFQLGRKVGPGLCLWCSWHLAHSASVGGPGWEWAGGKAAPACCITGCAPATSGSGGHLILPASPPGCFGRTWEVWCKGWGRGPLMLSPRI

SEQ ID NO: 768 - protein, 13 aa, Homo sapiens
  Payload ID: 129;
  Gene Symbol: ABHD12;
  Gene Name: abhydrolase domain containing 12;
  ENSP ID: ENSP00000459278
  MOD_RES (1)..(1): Any amino acid
XEFLGKSEPEHQH

SEQ ID NO: 769 - protein, 159 aa, Homo sapiens
  Payload ID: 129;
  Gene Symbol: ABHD12;
  Gene Name: abhydrolase domain containing 12;
  ENSP ID: ENSP00000459495
MWYEDALASSHPIILYLHGNAGTRGGDHRVELYKVLSSLGYHVVTFDYRGWGDSVGTPSERGMTYDALHVFDWIKARSGDNPVYIWGHSLGTGVATNLVRRLCERETPPDALILESPFTNIREEAKSHPFSVIYRYFPGFDWFFLDPITSSGIKFANDE

SEQ ID NO: 770 - protein, 118 aa, Homo sapiens
  Payload ID: 129;
  Gene Symbol: ABHD12;
  Gene Name: abhydrolase domain containing 12;
  ENSP ID: ENSP00000460249
MRKRTEPVALEHERCAAAGSSSSGSAAAALDADCRLKQNLRLTGPAAAEPRCAADAGMKRALGRRKGVWLRLRKILFCVLGLYIAIPFLIKLCPGIQAKLIFLNFGPCAPSQLEDFLC

SEQ ID NO: 771 - protein, 105 aa, Homo sapiens
  Payload ID: 129;
  Gene Symbol: ABHD12;
  Gene Name: abhydrolase domain containing 12;
  ENSP ID: ENSP00000460950
MWYEDALASSHPIILYLHGNAGTRGGDHRVELYKVLSSLGYHVVTFDYRGWGDSVGTPSERGMTYDALHVFDWIKARSGDNPVYIWGHSLGTGVATNLVRRLCER

SEQ ID NO: 772 - protein, 362 aa, Homo sapiens
  Payload ID: 130;
  Gene Symbol: ABHD12B;
  Gene Name: abhydrolase domain containing 12B;
  Uniprot ID:  Q7Z5M8;
  ENSP ID: ENSP00000336693
MDAQDCQAAASPEPPGPPARSCVAAWWDMVDRNLRYFPHSCSMLGRKIAALYDSFTSKSLKEHVFLPLIDMLIYFNFFKAPFLVDLKKPELKIPHTVNFYLRVEPGVMLGIWHTVPSCRGEDAKGKDCCWYEAALRDGNPIIVYLHGSAEHRAASHRLKLVKVLSDGGFHVLSVDYRGFGDSTGKPTEEGLTTDAICVYEWTKARSGITPVCLWGHSLGTGVATNAAKVLEEKGCPVDAIVLEAPFTNMWVASINYPLLKIYRNIPGFLRTLMDALRKDKIIFPNDENVKFLSSPLLILHGEDDRTVPLEYGKKLYEIARNAYRNKERVKMVIFPPGFQHNLLCKSPTLLITVRDFLSKQWS

SEQ ID NO: 773 - protein, 285 aa, Homo sapiens
  Payload ID: 130;
  Gene Symbol: ABHD12B;
  Gene Name: abhydrolase domain containing 12B;
  Uniprot ID:  Q7Z5M8;
  ENSP ID: ENSP00000343951
MDAQDCQAAASPEPPGPPARSCVAAWWDMVDRNLRHTVPSCRGEDAKGKDCCWYEAALRDGNPIIVYLHGSAEHRAASHRLKLVKVLSDGGFHVLSVDYRGFGDSTGKPTEEGLTTDAICVYEWTKARSGITPVCLWGHSLGTGVATNAAKVLEEKGCPVDAIVLEAPFTNMWVASINYPLLKIYRNIPGFLRTLMDALRKDKIIFPNDENVKFLSSPLLILHGEDDRTVPLEYGKKLYEIARNAYRNKERVKMVIFPPGFQHNLLCKSPTLLITVRDFLSKQWS

SEQ ID NO: 774 - protein, 60 aa, Homo sapiens
  Payload ID: 130;
  Gene Symbol: ABHD12B;
  Gene Name: abhydrolase domain containing 12B;
  Uniprot ID:  Q7Z5M8;
  ENSP ID: ENSP00000371460
MDAQDCQAAASPEPPGPPARSCVAAWWDMVDRNLRQSPISCGFKETRVKDSSHSELLPES

SEQ ID NO: 775 - protein, 60 aa, Homo sapiens; identical to SEQ ID NO: 774
  Payload ID: 130;
  Gene Symbol: ABHD12B;
  Gene Name: abhydrolase domain containing 12B;
  Uniprot ID:  Q7Z5M8;
  ENSP ID: ENSP00000450643

SEQ ID NO: 776 - protein, 337 aa, Homo sapiens
  Payload ID: 131;
  Gene Symbol: ABHD13;
  Gene Name: abhydrolase domain containing 13;
  Uniprot ID:  Q7L211;
  ENSP ID: ENSP00000365063
MEKSWMLWNFVERWLIALASWSWALCRISLLPLIVTFHLYGGIILLLLIFISIAGILYKFQDVLLYFPEQPSSSRLYVPMPTGIPHENIFIRTKDGIRLNLILIRYTGDNSPYSPTIIYFHGNAGNIGHRLPNALLMLVNLKVNLLLVDYRGYGKSEGEASEEGLYLDSEAVLDYVMTRPDLDKTKIFLFGRSLGGAVAIHLASENSHRISAIMVENTFLSIPHMASTLFSFFPMRYLPLWCYKNKFLSYRKISQCRMPSLFISGLSDQLIPPVMMKQLYELSPSRTKRLAIFPDGTHNDTWQCQGYFTALEQFIKEVVKSHSPEEMAKTSSNVTII

SEQ ID NO: 777 - protein, 271 aa, Homo sapiens
  Payload ID: 132;
  Gene Symbol: ABHD14A;
  Gene Name: abhydrolase domain containing 14A;
  Uniprot ID:  Q9BUJ0;
  ENSP ID: ENSP00000273596
MVGALCGCWFRLGGARPLIPLGPTVVQTSMSRSQVALLGLSLLLMLLLYVGLPGPPEQTSCLWGDPNVTVLAGLTPGNSPIFYREVLPLNQAHRVEVVLLHGKAFNSHTWEQLGTLQLLSQRGYRAVALDLPGFGNSAPSKEASTEAGRAALLERALRDLEVQNAVLVSPSLSGHYALPFLMRGHHQLHGFVPIAPTSTQNYTQEQFWAVKTPTLILYGELDHILARESLRQLRHLPNHSVVKLRNAGHACYLHKPQDFHLVLLAFLDHLP

SEQ ID NO: 778 - protein, 229 aa, Homo sapiens [sequence omitted]

SEQ ID NO: 779 - protein, 224 aa, Homo sapiens
  Payload ID: 132;
  Gene Symbol: ABHD14A;
  Gene Name: abhydrolase domain containing 14A;
  ENSP ID: ENSP00000418242
MQQQYREASLPTAGQGLSEEEGLALHLDGALALLHACCHACCCCAGEGPVVQNHDDEGPQNTLPRVAVPEEQQGSLQEVSRTLRTCLGTVVQTSMSRSQVALLGLSLLLMLLLYVGLPGPPEQTSCLWGDPNVTVLAGLTPGNSPIFYREVLPLNQAHRVEVVLLHGKAFNSHTWEQLGTLQLLSQRGYRAVALDLPGFGNSAPSKEASTEAGRAALLERALRD

SEQ ID NO: 780 - protein, 124 aa, Homo sapiens
  Payload ID: 132;
  Gene Symbol: ABHD14A;
  Gene Name: abhydrolase domain containing 14A;
  ENSP ID: ENSP00000418824
MVGALCGCWFRLGGARPLIPLGPTVVQTSMSRSQVALLGLSLLLMLLLYVGLPGPPEQTSCLWGDPNVTVLAGLTPGNSPIFYREVLPLNQAHRLQPLSCMESWTTSWLESHCGSSATCPTTLW

SEQ ID NO: 781 - protein, 152 aa, Homo sapiens
  Payload ID: 132;
  Gene Symbol: ABHD14A;
  Gene Name: abhydrolase domain containing 14A;
  ENSP ID: ENSP00000420475
MVATPKEGTQGSEKGRLGTVVQTSMSRSQVALLGLSLLLMLLLYVGLPGPPEQTSCLWGDPNVTVLAGLTPGNSPIFYREVLPLNQAHRVEVVLLHGKAFNSHTWEQLGTLQLLSQRGYRAVALDLPGFGNSAPSKEASTEAGRAALLERAL

SEQ ID NO: 782 - protein, 208 aa, Homo sapiens
  Payload ID: 133;
  Gene Symbol: ABHD14B;
  Gene Name: abhydrolase domain containing 14B;
  ENSP ID: ENSP00000318248
MAASVEQREGTIQVQGQALFFREALPGSGQARFSVLLLHGIRFSSETWQNLGTLHRLAQAGYRAVAIDLPGLKGEPPAQEPLLSQSRASFLAAVVDALELGPPVVISPSLSGMYSLPFLTAPGSQLPGFVPVAPICTDKINAANYASVKTPALIVYGDQDPMGQTSFEHLKQLPNHRVLIMKGAGHPCYLDKPEEWHTGLLDFLQGLQ

SEQ ID NO: 783 - protein, 210 aa, Homo sapiens
  Payload ID: 133;
  Gene Symbol: ABHD14B;
  Gene Name: abhydrolase domain containing 14B;
  Uniprot ID:  Q96IU4;
  ENSP ID: ENSP00000354841
MAASVEQREGTIQVQGQALFFREALPGSGQARFSVLLLHGIRFSSETWQNLGTLHRLAQAGYRAVAIDLPGLGHSKEAAAPAPIGELAPGSFLAAVVDALELGPPVVISPSLSGMYSLPFLTAPGSQLPGFVPVAPICTDKINAANYASVKTPALIVYGDQDPMGQTSFEHLKQLPNHRVLIMKGAGHPCYLDKPEEWHTGLLDFLQGLQ

SEQ ID NO: 784 - protein, 210 aa, Homo sapiens; identical to SEQ ID NO: 783
  Payload ID: 133;
  Gene Symbol: ABHD14B;
  Gene Name: abhydrolase domain containing 14B;
  Uniprot ID:  Q96IU4;
  ENSP ID: ENSP00000378455

SEQ ID NO: 785 - protein, 188 aa, Homo sapiens
  Payload ID: 133;
  Gene Symbol: ABHD14B;
  Gene Name: abhydrolase domain containing 14B;
  ENSP ID: ENSP00000417564
MAASVEQREGTIQVQGQALFFREALPGSGQARFSVLLLHGIRFSSETWQNLGTLHRLAQAGYRAVAIDLPGLGHSKEAAAPAPIGELAPGSFLAAVVDALELGPPVVISPSLSGMYSLPFLTAPGSQLPGFVPVAPICTDKINAANYASVKVPLCGKLRCPCQEQGRVHPWAFLIWGLDNQGVSSGRS

SEQ ID NO: 786 - protein, 210 aa, Homo sapiens; identical to SEQ ID NO: 783
  Payload ID: 133;
  Gene Symbol: ABHD14B;
  Gene Name: abhydrolase domain containing 14B;
  Uniprot ID:  Q96IU4;
  ENSP ID: ENSP00000420065

SEQ ID NO: 787 - protein, 210 aa, Homo sapiens; identical to SEQ ID NO: 783
  Payload ID: 133;
  Gene Symbol: ABHD14B;
  Gene Name: abhydrolase domain containing 14B;
  Uniprot ID:  Q96IU4;
  ENSP ID: ENSP00000433388

SEQ ID NO: 788 - protein, 468 aa, Homo sapiens
  Payload ID: 134;
  Gene Symbol: ABHD15;
  Gene Name: abhydrolase domain containing 15;
  Uniprot ID:  Q6UXT9;
  ENSP ID: ENSP00000302657
MPPWGAALALILAVLALLGLLGPRLRGPWGRAVGERTLPGAQDRDDGEEADGGGPADQFSDGREPLPGGCSLVCKPSALAQCLLRALRRSEALEAGPRSWFSGPHLQTLCHFVLPVAPGPELAREYLQLADDGLVALDWVVGPCVRGRRITSAGGLPAVLLVIPNAWGRLTRNVLGLCLLALERGYYPVIFHRRGHHGCPLVSPRLQPFGDPSDLKEAVTYIRFRHPAAPLFAVSEGSGSALLLSYLGECGSSSYVTGAACISPVLRCREWFEAGLPWPYERGFLLHQKIALSRYATALEDTVDTSRLFRSRSLREFEEALFCHTKSFPISWDTYWDRNDPLRDVDEAAVPVLCICSADDPVCGPPDHTLTTELFHSNPYFFLLLSRHGGHCGFLRQEPLPAWSHEVILESFRALTEFFRTEERIKGLSRHRASFLGGRRRGGALQRREVSSSSNLEEIFNWKRSYTR

SEQ ID NO: 789 - protein, 558 aa, Homo sapiens
  Payload ID: 135;
  Gene Symbol: ABHD16A;
  Gene Name: abhydrolase domain containing 16A;
  Uniprot ID:  O95870;
  ENSP ID: ENSP00000379282
MAKLLSCVLGPRLYKIYRERDSERAPASVPETPTAVTAPHSSSWDTYYQPRALEKHADSILALASVFWSISYYSSPFAFFYLYRKGYLSLSKVVPFSHYAGTLLLLLAGVACLRGIGRWTNPQYRQFITILEATHRNQSSENKRQLANYNFDFRSWPVDFHWEEPSSRKESRGGPSRRGVALLRPEPLHRGTADTLLNRVKKLPCQITSYLVAHTLGRRMLYPGSVYLLQKALMPVLLQGQARLVEECNGRRAKLLACDGNEIDTMFVDRRGTAEPQGQKLVICCEGNAGFYEVGCVSTPLEAGYSVLGWNHPGFAGSTGVPFPQNEANAMDVVVQFAIHRLGFQPQDIIIYAWSIGGFTATWAAMSYPDVSAMILDASFDDLVPLALKVMPDSWRGLVTRTVRQHLNLNNAEQLCRYQGPVLLIRRTKDEIITTTVPEDIMSNRGNDLLLKLLQHRYPRVMAEEGLRVVRQWLEASSQLEEASIYSRWEVEEDWCLSVLRSYQAEHGPDFPWSVGEDMSADGRRQLALFLARKHLHNFEATHCTPLPAQNFQMPWHL

SEQ ID NO: 790 - protein, 263 aa, Homo sapiens
  Payload ID: 135;
  Gene Symbol: ABHD16A;
  Gene Name: abhydrolase domain containing 16A;
  ENSP ID: ENSP00000388346
MPPPALFLSSLYPRLEFQNDFYRSCIRRSSPQPPPNLAWRPESLYSGELAGGGYLSLSKVVPFSHYAGTLLLLLAGVACLRGIGRWTNPQYRQFITILEATHRNQSSENKRQLANYNFDFRSWPVDFHWEEPSSRKESRGGPSRRGVALLRPEPLHRGTADTLLNRVKKLPCQITSYLVAHTLGRRMLYPGSVYLLQKALMPVLLQGQARLVEECNGRRAKLLACDGNEIDTMFVDRRGTAEPQGQKLVICCEGNAGFYEVGC

SEQ ID NO: 791 - protein, 601 aa, Homo sapiens
  Payload ID: 135;
  Gene Symbol: ABHD16A;
  Gene Name: abhydrolase domain containing 16A;
  ENSP ID: ENSP00000389155
MSQLARRRSRYGLTSRAHNTSEAGRAGPAGGPAAGRAAARAGAMAKLLSCVLGPRLYKIYRERDSERAPASVPETPTAVTAPHSSSWDTYYQPRALEKHADSILALASVFWSISYYSSPFAFFYLYRKGYLSLSKVVPFSHYAGTLLLLLAGVACLRGIGRWTNPQYRQFITILEATHRNQSSENKRQLANYNFDFRSWPVDFHWEEPSSRKESRGGPSRRGVALLRPEPLHRGTADTLLNRVKKLPCQITSYLVAHTLGRRMLYPGSVYLLQKALMPVLLQGQARLVEECNGRRAKLLACDGNEIDTMFVDRRGTAEPQGQKLVICCEGNAGFYEVGCVSTPLEAGYSVLGWNHPGFAGSTGVPFPQNEANAMDVVVQFAIHRLGFQPQDIIIYAWSIGGFTATWAAMSYPDVSAMILDASFDDLVPLALKVMPDSWRGLVTRTVRQHLNLNNAEQLCRYQGPVLLIRRTKDEIITTTVPEDIMSNRGNDLLLKLLQHRYPRVMAEEGLRVVRQWLEASSQLEEASIYSRWEVEEDWCLSVLRSYQAEHGPDFPWSVGEDMSADGRRQLALFLARKHLHNFEATHCTPLPAQNFQMPWHL

SEQ ID NO: 792 - protein, 263 aa, Homo sapiens; identical to SEQ ID NO: 790
  Payload ID: 135;
  Gene Symbol: ABHD16A;
  Gene Name: abhydrolase domain containing 16A;
  ENSP ID: ENSP00000393632

SEQ ID NO: 793 - protein, 263 aa, Homo sapiens; identical to SEQ ID NO: 790
  Payload ID: 135;
  Gene Symbol: ABHD16A;
  Gene Name: abhydrolase domain containing 16A;
  ENSP ID: ENSP00000394825

SEQ ID NO: 794 - protein, 558 aa, Homo sapiens; identical to SEQ ID NO: 789
  Payload ID: 135;
  Gene Symbol: ABHD16A;
  Gene Name: abhydrolase domain containing 16A;
  Uniprot ID:  O95870;
  ENSP ID: ENSP00000395665

SEQ ID NO: 795 - protein, 263 aa, Homo sapiens; identical to SEQ ID NO: 790
  Payload ID: 135;
  Gene Symbol: ABHD16A;
  Gene Name: abhydrolase domain containing 16A;
  ENSP ID: ENSP00000396207

SEQ ID NO: 796 - protein, 601 aa, Homo sapiens; identical to SEQ ID NO: 791
  Payload ID: 135;
  Gene Symbol: ABHD16A;
  Gene Name: abhydrolase domain containing 16A;
  ENSP ID: ENSP00000405428

SEQ ID NO: 797 - protein, 601 aa, Homo sapiens; identical to SEQ ID NO: 791
  Payload ID: 135;
  Gene Symbol: ABHD16A;
  Gene Name: abhydrolase domain containing 16A;
  ENSP ID: ENSP00000406965

SEQ ID NO: 798 - protein, 263 aa, Homo sapiens; identical to SEQ ID NO: 790
  Payload ID: 135;
  Gene Symbol: ABHD16A;
  Gene Name: abhydrolase domain containing 16A;
  ENSP ID: ENSP00000407263

SEQ ID NO: 799 - protein, 601 aa, Homo sapiens; identical to SEQ ID NO: 791
  Payload ID: 135;
  Gene Symbol: ABHD16A;
  Gene Name: abhydrolase domain containing 16A;
  ENSP ID: ENSP00000407727

SEQ ID NO: 800 - protein, 525 aa, Homo sapiens
  Payload ID: 135;
  Gene Symbol: ABHD16A;
  Gene Name: abhydrolase domain containing 16A;
  Uniprot ID:  O95870;
  ENSP ID: ENSP00000410347
MPPPALFLSSLYPRLEFQNDFYRSCIRRSSPQPPPNLAWRPESLYSGELAGGGYLSLSKVVPFSHYAGTLLLLLAGVACLRGIGRWTNPQYRQFITILEATHRNQSSENKRQLANYNFDFRSWPVDFHWEEPSSRKESRGGPSRRGVALLRPEPLHRGTADTLLNRVKKLPCQITSYLVAHTLGRRMLYPGSVYLLQKALMPVLLQGQARLVEECNGRRAKLLACDGNEIDTMFVDRRGTAEPQGQKLVICCEGNAGFYEVGCVSTPLEAGYSVLGWNHPGFAGSTGVPFPQNEANAMDVVVQFAIHRLGFQPQDIIIYAWSIGGFTATWAAMSYPDVSAMILDASFDDLVPLALKVMPDSWRGLVTRTVRQHLNLNNAEQLCRYQGPVLLIRRTKDEIITTTVPEDIMSNRGNDLLLKLLQHRYPRVMAEEGLRVVRQWLEASSQLEEASIYSRWEVEEDWCLSVLRSYQAEHGPDFPWSVGEDMSADGRRQLALFLARKHLHNFEATHCTPLPAQNFQMPWHL

SEQ ID NO: 801 - protein, 263 aa, Homo sapiens; identical to SEQ ID NO: 790
  Payload ID: 135;
  Gene Symbol: ABHD16A;
  Gene Name: abhydrolase domain containing 16A;
  ENSP ID: ENSP00000415240

SEQ ID NO: 802 - protein, 601 aa, Homo sapiens; identical to SEQ ID NO: 791
  Payload ID: 135;
  Gene Symbol: ABHD16A;
  Gene Name: abhydrolase domain containing 16A;
  ENSP ID: ENSP00000416404

SEQ ID NO: 803 - protein, 65 aa, Homo sapiens
  Payload ID: 135;
  Gene Symbol: ABHD16A;
  Gene Name: abhydrolase domain containing 16A;
  ENSP ID: ENSP00000417566
MPPPALFLSSLYPRLEFQNDFYRSCIRRSSPQPPPNLAWRPESLYSGELAGGGYVLSAPCPGETC

SEQ ID NO: 804 - protein, 65 aa, Homo sapiens
  Payload ID: 135;
  Gene Symbol: ABHD16A;
  Gene Name: abhydrolase domain containing 16A;
  ENSP ID: ENSP00000418170
MAKLLSCVLGPRLYKIYRERDSERAPASVPETPTAVTAPHSSSWDTYYQPRALEKHADSILALVT

SEQ ID NO: 805 - protein, 46 aa, Homo sapiens
  Payload ID: 135;
  Gene Symbol: ABHD16A;
  Gene Name: abhydrolase domain containing 16A;
  ENSP ID: ENSP00000418331
MAKLLSCVLGPRLYKIYRERDSERAPASVPETPTAVTAPHSSSWVT

SEQ ID NO: 806 - protein, 65 aa, Homo sapiens; identical to SEQ ID NO: 804
  Payload ID: 135;
  Gene Symbol: ABHD16A;
  Gene Name: abhydrolase domain containing 16A;
  ENSP ID: ENSP00000419742

SEQ ID NO: 807 - protein, 65 aa, Homo sapiens; identical to SEQ ID NO: 803
  Payload ID: 135;
  Gene Symbol: ABHD16A;
  Gene Name: abhydrolase domain containing 16A;
  ENSP ID: ENSP00000420585

SEQ ID NO: 808 - protein, 46 aa, Homo sapiens; identical to SEQ ID NO: 805
  Payload ID: 135;
  Gene Symbol: ABHD16A;
  Gene Name: abhydrolase domain containing 16A;
  ENSP ID: ENSP00000420628

SEQ ID NO: 809 - protein, 525 aa, Homo sapiens; identical to SEQ ID NO: 800
  Payload ID: 135;
  Gene Symbol: ABHD16A;
  Gene Name: abhydrolase domain containing 16A;
  Uniprot ID:  O95870;
  ENSP ID: ENSP00000447498

SEQ ID NO: 810 - protein, 525 aa, Homo sapiens; identical to SEQ ID NO: 800
  Payload ID: 135;
  Gene Symbol: ABHD16A;
  Gene Name: abhydrolase domain containing 16A;
  Uniprot ID:  O95870;
  ENSP ID: ENSP00000447549

SEQ ID NO: 811 - protein, 525 aa, Homo sapiens; identical to SEQ ID NO: 800
  Payload ID: 135;
  Gene Symbol: ABHD16A;
  Gene Name: abhydrolase domain containing 16A;
  Uniprot ID:  O95870;
  ENSP ID: ENSP00000447846

SEQ ID NO: 812 - protein, 525 aa, Homo sapiens; identical to SEQ ID NO: 800
  Payload ID: 135;
  Gene Symbol: ABHD16A;
  Gene Name: abhydrolase domain containing 16A;
  Uniprot ID:  O95870;
  ENSP ID: ENSP00000448431

SEQ ID NO: 813 - protein, 525 aa, Homo sapiens; identical to SEQ ID NO: 800
  Payload ID: 135;
  Gene Symbol: ABHD16A;
  Gene Name: abhydrolase domain containing 16A;
  Uniprot ID:  O95870;
  ENSP ID: ENSP00000448451

SEQ ID NO: 814 - protein, 525 aa, Homo sapiens; identical to SEQ ID NO: 800
  Payload ID: 135;
  Gene Symbol: ABHD16A;
  Gene Name: abhydrolase domain containing 16A;
  Uniprot ID:  O95870;
  ENSP ID: ENSP00000449579

SEQ ID NO: 815 - protein, 469 aa, Homo sapiens
  Payload ID: 136;
  Gene Symbol: ABHD16B;
  Gene Name: abhydrolase domain containing 16B;
  Uniprot ID:  Q9H3Z7;
  ENSP ID: ENSP00000358932
MCVICFVKALVRVFKIYLTASYTYPFRGWPVAFRWDDVRAVGRSSSHRALTCAAAAAGVWLLRDETLGGDALGRPPRGARSQAQCLLQQLRELPGQLASYALAHSLGRWLVYPGSVSLMTRALLPLLQQGQERLVERYHGRRAKLVACDGNEIDTMFMDRRQHPGSHVHGPRLVICCEGNAGFYEMGCLSAPLEAGYSVLGWNHPGFGSSTGVPFPQHDANAMDVVVEYALHRLHFPPAHLVVYGWSVGGFTATWATMTYPELGALVLDATFDDLVPLALKVMPHSWKGLVVRTVREHFNLNVAEQLCCYPGPVLLLRRTQDDVVSTSGRLRPLSPGDVEGNRGNELLLRLLEHRYPVVMAREGRAVVTRWLRAGSLAQEAAFYARYRVDEDWCLALLRSYRARCEEELEGEEALGPHGPAFPWLVGQGLSSRRRRRLALFLARKHLKNVEATHFSPLEPEEFQLPWRL

SEQ ID NO: 816 - protein, 361 aa, Homo sapiens
  Payload ID: 137;
  Gene Symbol: ABHD17A;
  Gene Name: abhydrolase domain containing 17A;
  Uniprot ID:  Q96GS6;
  ENSP ID: ENSP00000250974
MNGLSLSELCCLFCCPPCPGRIAAKLAFLPPEATYSLVPEPEPGPGGAGAAPLGTLRASSGAPGRWKLHLTERADFQYSQRELDTIEVFPTKSARGNRVSCMYVRCVPGARQGHQAQGGHPQLAWVGRLGDSNNPAPGGCLLGKSWGTGAALACGYIHLLARYTVLFSHGNAVDLGQMSSFYIGLGSRLHCNIFSYDYSGYGASSGRPSERNLYADIDAAWQALRTRYGISPDSIILYGQSIGTVPTVDLASRYECAAVVLHSPLTSGMRVAFPDTKKTYCFDAFPNIEKVSKITSPVLIIHGTEDEVIDFSHGLALYERCPKAVEPLWVEGAGHNDIELYSQYLERLRRFISQELPSQRA

SEQ ID NO: 817 - protein, 310 aa, Homo sapiens
  Payload ID: 137;
  Gene Symbol: ABHD17A;
  Gene Name: abhydrolase domain containing 17A;
  Uniprot ID:  Q96GS6;
  ENSP ID: ENSP00000292577
MNGLSLSELCCLFCCPPCPGRIAAKLAFLPPEATYSLVPEPEPGPGGAGAAPLGTLRASSGAPGRWKLHLTERADFQYSQRELDTIEVFPTKSARGNRVSCMYVRCVPGARYTVLFSHGNAVDLGQMSSFYIGLGSRLHCNIFSYDYSGYGASSGRPSERNLYADIDAAWQALRTRYGISPDSIILYGQSIGTVPTVDLASRYECAAVVLHSPLTSGMRVAFPDTKKTYCFDAFPNIEKVSKITSPVLIIHGTEDEVIDFSHGLALYERCPKAVEPLWVEGAGHNDIELYSQYLERLRRFISQELPSQRA

SEQ ID NO: 818 - protein, 39 aa, Homo sapiens
  Payload ID: 137;
  Gene Symbol: ABHD17A;
  Gene Name: abhydrolase domain containing 17A;
  ENSP ID: ENSP00000466977
  MOD_RES (1)..(1): Any amino acid
XYDYSGYGASSGRPSERNLYADIDAAWQALRTRNLGPEL

SEQ ID NO: 819 - protein, 225 aa, Homo sapiens
  Payload ID: 137;
  Gene Symbol: ABHD17A;
  Gene Name: abhydrolase domain containing 17A;
  ENSP ID: ENSP00000467638
MNGLSLSELCCLFCCPPCPGRIAAKLAFLPPEATYSLVPEPEPGPGGAGAAPLGTLRASSGAPGRWKLHLTERADFQYSQRELDTIEVFPTKSARGNRVSCMYVRCVPGASFYIGLGSRLHCNIFSYDYSGYGASSGRPSERNLYADIDAAWQALRTRASARCPPWTWPRATSVPRWCCTRRSPRACASPSPTPRRPTASTPSLTSRRCPRSRLPCSSSTARRTR

SEQ ID NO: 820 - protein, 288 aa, Homo sapiens
  Payload ID: 138;
  Gene Symbol: ABHD17B;
  Gene Name: abhydrolase domain containing 17B;
  Uniprot ID:  Q5VST6;
  ENSP ID: ENSP00000330222
MNNLSFSELCCLFCCPPCPGKIASKLAFLPPDPTYTLMCDESGSRWTLHLSERADWQYSSREKDAIECFMTRTSKGNRIACMFVRCSPNAKYTLLFSHGNAVDLGQMSSFYIGLGSRINCNIFSYDYSGYGASSGKPTEKNLYADIEAAWLALRTRYGIRPENVIIYGQSIGTVPSVDLAARYESAAVILHSPLTSGMRVAFPDTKKTYCFDAFPNIDKISKITSPVLIIHGTEDEVIDFSHGLALFERCQRPVEPLWVEGAGHNDVELYGQYLERLKQFVSQELVNL

SEQ ID NO: 821 - protein, 293 aa, Homo sapiens
  Payload ID: 138;
  Gene Symbol: ABHD17B;
  Gene Name: abhydrolase domain containing 17B;
  Uniprot ID:  Q5VST6;
  ENSP ID: ENSP00000366240
MNNLSFSELCCLFCCPPCPGKIASKLAFLPPDPTYTLMCDESGSRWTLHLSERADWQYSSREKDAIECFMTRTSKGNRIACMFVRCSPNAKYTLLFSHGNAVDLGQMSSFYIGLGSRINCNIFSYDYSGYGASSGKPTEKNLYADIEAAWLALRTRYGIRPENVIIYGQSIGTVPSVDLAARYESAAVILHSPLTSGMRVAFPDTKKTYCFDAFPNIDKISKITSPVLIIHGTEDEVIDFSHGLALFERCQRPVEPLWVEGAGHNDVELYGQYLERLKQFVSQELVQKHKEGK

SEQ ID NO: 822 - protein, 329 aa, Homo sapiens
  Payload ID: 139;
  Gene Symbol: ABHD17C;
  Gene Name: abhydrolase domain containing 17C;
  Uniprot ID:  Q6PCB6;
  ENSP ID: ENSP00000258884
MPEPGPRMNGFSLGELCWLFCCPPCPSRIAAKLAFLPPEPTYTVLAPEQRGAGASAPAPAQATAAAAAAQPAPQQPEEGAGAGPGACSLHLSERADWQYSQRELDAVEVFFSRTARDNRLGCMFVRCAPSSRYTLLFSHGNAVDLGQMCSFYIGLGSRINCNIFSYDYSGYGVSSGKPSEKNLYADIDAAWQALRTRYGVSPENIILYGQSIGTVPTVDLASRYECAAVILHSPLMSGLRVAFPDTRKTYCFDAFPSIDKISKVTSPVLVIHGTEDEVIDFSHGLAMYERCPRAVEPLWVEGAGHNDIELYAQYLERLKQFISHELPNS

SEQ ID NO: 823 - protein, 295 aa, Homo sapiens
  Payload ID: 139;
  Gene Symbol: ABHD17C;
  Gene Name: abhydrolase domain containing 17C;
  Uniprot ID:  Q6PCB6;
  ENSP ID: ENSP00000452778
MPEPGPRMNGFSLGELCWLFCCPPCPSRIAAKLAFLPPEPTYTVLAPEQRGAGASAPAPAQATAAAAAAQPAPQQPEEGAGAGPGACSLHLSERADWQYSQRELDAVEVFFSRTARDNRLGCMFVRCAPSSRYTLLFSHGNAVDLGQMCSFYIGLGSRINCNIFSYDYSGYGVSSGKPSEKNLYADIDAAWQALRTRYGVSPENIILYGQSIGTVPTVDLASSIDKISKVTSPVLVIHGTEDEVIDFSHGLAMYERCPRAVEPLWVEGAGHNDIELYAQYLERLKQFISHELPNS

SEQ ID NO: 824 - protein, 94 aa, Homo sapiens
  Payload ID: 139;
  Gene Symbol: ABHD17C;
  Gene Name: abhydrolase domain containing 17C;
  ENSP ID: ENSP00000453923
MSGLRVAFPDTRKTYCFDAFPSIDKISKVTSPVLVIHGTEDEVIDFSHGLAMYERCPRAVEPLWVEGAGHNDIELYAQYLERLKQFISHELPNS

SEQ ID NO: 825 - protein, 382 aa, Homo sapiens
  Payload ID: 140;
  Gene Symbol: ABHD18;
  Gene Name: abhydrolase domain containing 18;
  ENSP ID: ENSP00000373447
MLDTNLILLPLFQFIVPKEWNSKYRPVCIHLAGTGDHHYWRRRTLMARPMIKEARMASLLLENPYYGCRKPKDQVRSSLKNVSDLFVMGGALVLESAALLHWLEREGYGPLGMTGISMGGHMASLAVSNWPKPMPLIPCLSWSTASGVFTTGVLSKSINWRELEKQYYTQTVYEEEIIHMLEYCGTDSFKMGQEFVKHFTSSADKLTNLNLVSRTLNLDISNQVVSQKPADCHNSSKTSVSATSEGLLLQDTSKMKRFNQTLSTNKSGYTSRNPQSYHLLSKEQSRNSLRKESLIFMKGVMDECTHVANFSVPVDPSLIIVVQAKEDAYIPRTGVRSLQEIWPGCEIRYLEGGHISAYLFKQGLFRQAIYDAFDRFLHKYAN

SEQ ID NO: 826 - protein, 414 aa, Homo sapiens
  Payload ID: 140;
  Gene Symbol: ABHD18;
  Gene Name: abhydrolase domain containing 18;
  Uniprot ID:  Q0P651;
  ENSP ID: ENSP00000381937
MGVSKLDILYRRLLLTKLFIRGWGRPEDLKRLFEFRKMIGNRERCQNLVSSDYPVHIDKIEEQSDCKILDGHFVSPMAHYVPDIMPIESVIARFQFIVPKEWNSKYRPVCIHLAGTGDHHYWRRRTLMARPMIKEARMASLLLENPYYGCRKPKDQVRSSLKNVSDLFVMGGALVLESAALLHWLEREGYGPLGMTGISMGGHMASLAVSNWPKPMPLIPCLSWSTASGVFTTTDSFKMGQEFVKHFTSSADKLTNLNLVSRTLNLDISNQVVSQKPADCHNSSKTSVSATSEGLLLQDTSKMKRFNQTLSTNKSGYTSRNPQSYHLLSKEQSRNSLRKESLIFMKGVMDECTHVANFSVPVDPSLIIVVQAKEDAYIPRTGVRSLQEIWPGCEIRYLEGGHISAYLFKQGLFR

SEQ ID NO: 827 - protein, 414 aa, Homo sapiens; identical to SEQ ID NO: 826
  Payload ID: 140;
  Gene Symbol: ABHD18;
  Gene Name: abhydrolase domain containing 18;
  Uniprot ID:  Q0P651;
  ENSP ID: ENSP00000397229

SEQ ID NO: 828 - protein, 105 aa, Homo sapiens
  Payload ID: 140;
  Gene Symbol: ABHD18;
  Gene Name: abhydrolase domain containing 18;
  ENSP ID: ENSP00000421129
MGVSKLDILYRRLLLTKLFIRGWGRPEDLKRLFEFRKMIGNRERCQNLVSSDYPVHIDKIEEQSDCKILDGHFVSPMAHYVPDIMPIESVIARFQFIVPKEWNSK

SEQ ID NO: 829 - protein, 65 aa, Homo sapiens
  Payload ID: 140;
  Gene Symbol: ABHD18;
  Gene Name: abhydrolase domain containing 18;
  ENSP ID: ENSP00000425434
MGVSKLDILYRRLLLTKLFIRGWGRPEDLKRLFEFRKMIGNRERCQNLVSSDYPVHIDKVPIYCA

SEQ ID NO: 830 - protein, 321 aa, Homo sapiens
  Payload ID: 140;
  Gene Symbol: ABHD18;
  Gene Name: abhydrolase domain containing 18;
  Uniprot ID:  Q0P651;
  ENSP ID: ENSP00000480015
MARPMIKEARMASLLLENPYYGCRKPKDQVRSSLKNVSDLFVMGGALVLESAALLHWLEREGYGPLGMTGISMGGHMASLAVSNWPKPMPLIPCLSWSTASGVFTTGVLSKSINWRELEKQYYTQTVYEEEIIHMLEYCGTDSFKMGQEFVKHFTSSADKLTNLNLVSRTLNLDISNQVVSQKPADCHNSSKTSVSATSEGLLLQDTSKMKRFNQTLSTNKSGYTSRNPQSYHLLSKEQSRNSLRKESLIFMKGVMDECTHVANFSVPVDPSLIIVVQAKEDAYIPRTGVRSLQEIWPGCEIRYLEGGHISAYLFKQGLFR

SEQ ID NO: 831 - protein, 425 aa, Homo sapiens
  Payload ID: 141;
  Gene Symbol: ABHD2;
  Gene Name: abhydrolase domain containing 2;
  Uniprot ID:  P08910;
  ENSP ID: ENSP00000268129
MNAMLETPELPAVFDGVKLAAVAAVLYVIVRCLNLKSPTAPPDLYFQDSGLSRFLLKSCPLLTKEYIPPLIWGKSGHIQTALYGKMGRVRSPHPYGHRKFITMSDGATSTFDLFEPLAEHCVGDDITMVICPGIANHSEKQYIRTFVDYAQKNGYRCAVLNHLGALPNIELTSPRMFTYGCTWEFGAMVNYIKKTYPLTQLVVVGFSLGGNIVCKYLGETQANQEKVLCCVSVCQGYSALRAQETFMQWDQCRRFYNFLMADNMKKIILSHRQALFGDHVKKPQSLEDTDLSRLYTATSLMQIDDNVMRKFHGYNSLKEYYEEESCMRYLHRIYVPLMLVNAADDPLVHESLLTIPKSLSEKRENVMFVLPLHGGHLGFFEGSVLFPEPLTWMDKLVVEYANAICQWERNKLQCSDTEQVEADLE

SEQ ID NO: 832 - protein, 425 aa, Homo sapiens; identical to SEQ ID NO: 831
  Payload ID: 141;
  Gene Symbol: ABHD2;
  Gene Name: abhydrolase domain containing 2;
  Uniprot ID:  P08910;
  ENSP ID: ENSP00000347217

SEQ ID NO: 833 - protein, 123 aa, Homo sapiens
  Payload ID: 141;
  Gene Symbol: ABHD2;
  Gene Name: abhydrolase domain containing 2;
  ENSP ID: ENSP00000454531
MNAMLETPELPAVFDGVKLAAVAAVLYVIVRCLNLKSPTAPPDLYFQDSGLSRFLLKSCPLLTKEYIPPLIWGKSGHIQTALYGKMGRVRSPHPYGHRKFITMSDGATSTFDLFEPLAEHCVG

SEQ ID NO: 834 - protein, 55 aa, Homo sapiens
  Payload ID: 141;
  Gene Symbol: ABHD2;
  Gene Name: abhydrolase domain containing 2;
  ENSP ID: ENSP00000454645
MNAMLETPELPAVFDGVKLAAVAAVLYVIVRCLNLKSPTAPPDLYFQDSGLSRFL

SEQ ID NO: 835 - protein, 425 aa, Homo sapiens; identical to SEQ ID NO: 831
  Payload ID: 141;
  Gene Symbol: ABHD2;
  Gene Name: abhydrolase domain containing 2;
  Uniprot ID:  P08910;
  ENSP ID: ENSP00000455639

SEQ ID NO: 836 - protein, 131 aa, Homo sapiens
  Payload ID: 141;
  Gene Symbol: ABHD2;
  Gene Name: abhydrolase domain containing 2;
  ENSP ID: ENSP00000457882
MNAMLETPELPAVFDGVKLAAVAAVLYVIVRCLNLKSPTAPPDLYFQDSGLSRFLLKSCPLLTKEYIPPLIWGKSGHIQTALYGKMGRVRSPHPYGHRKFITMSDGATSTFDLFEPLAEHCVGDDITMVIC

SEQ ID NO: 837 - protein, 409 aa, Homo sapiens
  Payload ID: 142;
  Gene Symbol: ABHD3;
  Gene Name: abhydrolase domain containing 3;
  Uniprot ID:  Q8WU67;
  ENSP ID: ENSP00000289119
MQRLAMDLRMLSRELSLYLEHQVRVGFFGSGVGLSLILGFSVAYAFYYLSSIAKKPQLVTGGESFSRFLQDHCPVVTETYYPTVWCWEGRGQTLLRPFITSKPPVQYRNELIKTADGGQISLDWFDNDNSTCYMDASTRPTILLLPGLTGTSKESYILHMIHLSEELGYRCVVFNNRGVAGENLLTPRTYCCANTEDLETVIHHVHSLYPSAPFLAAGVSMGGMLLLNYLGKIGSKTPLMAAATFSVGWNTFACSESLEKPLNWLLFNYYLTTCLQSSVNKHRHMFVKQVDMDHVMKAKSIREFDKRFTSVMFGYQTIDDYYTDASPSPRLKSVGIPVLCLNSVDDVFSPSHAIPIETAKQNPNVALVLTSYGGHIGFLEGIWPRQSTYMDRVFKQFVQAMVEHGHELS

SEQ ID NO: 838 - protein, 214 aa, Homo sapiens
  Payload ID: 142;
  Gene Symbol: ABHD3;
  Gene Name: abhydrolase domain containing 3;
  ENSP ID: ENSP00000462578
MTFITPVTEIITYCSLQLQWPSKLFFPRMLLLNYLGKIGSKTPLMAAATFSVGWNTFACSESLEKPLNWLLFNYYLTTCLQSSVNKHRHMFVKQVDMDHVMKAKSIREFDKRFTSVMFGYQTIDDYYTDASPSPRLKSVGIPVLCLNSVDDVFSPSHAIPIETAKQNPNVALVLTSYGGHIGFLEGIWPRQSTYMDRVFKQFVQAMVEHGHELS

SEQ ID NO: 839 - protein, 356 aa, Homo sapiens
  Payload ID: 142;
  Gene Symbol: ABHD3;
  Gene Name: abhydrolase domain containing 3;
  ENSP ID: ENSP00000462935
MQRLAMDLRMLSRELSLYLEHQVRVGFFGSGVGLSLILGFSVAYAFYYLSSIAKKPQLVTGGESFSRFLQDHCPVVTETYYPTVWCWEGRGQTLLRPFITSKPPVQYRNELIKTADGGQISLDWFDNDNSTCYMDASTRPTILLLPGLTGTSKESYILHMIHLSEELGYRMLLLNYLGKIGSKTPLMAAATFSVGWNTFACSESLEKPLNWLLFNYYLTTCLQSSVNKHRHMFVKQVDMDHVMKAKSIREFDKRFTSVMFGYQTIDDYYTDASPSPRLKSVGIPVLCLNSVDDVFSPSHAIPIETAKQNPNVALVLTSYGGHIGFLEGIWPRQSTYMDRVFKQFVQAMVEHGHELS

SEQ ID NO: 840 - protein, 136 aa, Homo sapiens
  Payload ID: 142;
  Gene Symbol: ABHD3;
  Gene Name: abhydrolase domain containing 3;
  Uniprot ID:  Q8WU67;
  ENSP ID: ENSP00000463365
MQRLAMDLRMLSRELSLYLEHQVRVGFFGSGVGLSLILGFSVAYAFYYLSSIAKKRTTRRSGAGRVEDRPCLDLSSLRSPRCSTGMNLLKLQMEDRFHWTGLIMITVRVIWMPAPDLLSYCCLASREQARSHISFI

SEQ ID NO: 841 - protein, 112 aa, Homo sapiens
  Payload ID: 142;
  Gene Symbol: ABHD3;
  Gene Name: abhydrolase domain containing 3;
  ENSP ID: ENSP00000463848
  MOD_RES (1)..(1): Any amino acid
XVVTETYYPTVWCWEGRGQTLLRPFITSKPPVQYRNELIKTADGGQISLDWFDNDNSTCYMDASTRPTILLLPGLTGTSKESYILHMIHLSEELGYRCVVFNNRGVAGENLL

SEQ ID NO: 842 - protein, 37 aa, Homo sapiens
  Payload ID: 142;
  Gene Symbol: ABHD3;
  Gene Name: abhydrolase domain containing 3;
  ENSP ID: ENSP00000463996
  MOD_RES (1)..(1): Any amino acid
XYTDASPSPRLKSVGIPVLCLNSVDDVFSPSHGNLRS

SEQ ID NO: 843 - protein, 149 aa, Homo sapiens
  Payload ID: 143;
  Gene Symbol: ABHD4;
  Gene Name: abhydrolase domain containing 4;
  ENSP ID: ENSP00000216327
MADDLEQQSQGWLSSWLPTWRPTSMSQLKNVEARILQCFGRSSRPAFPRDPEGAEDEFVTSIETWRETMGIPSMILLGHSLGGFLATSYSIKYPDRVKHLILVDPWGFPLRPTNPSEIRAPPAWVKAVASVLGRSNPLAVLRVAGPWGE

SEQ ID NO: 844 - protein, 181 aa, Homo sapiens
  Payload ID: 143;
  Gene Symbol: ABHD4;
  Gene Name: abhydrolase domain containing 4;
  Uniprot ID:  Q8TB40;
  ENSP ID: ENSP00000388751
MADDLEQQSQGWLSSWLPTWRPTSMSQLKNVEARILQCLQNKFLARYVSLPNQNKIWTVTVSPEQNDRTPLVMVHGFGGGVGLWILNMDSLSARRTLHTFDLLGFGRSSRPAFPRDPEGAEDEFVTSIETWRETMGIPSMILLGHSLGGFLATSYSIKYPDRAWSGAAIPAGLQTQVCRLL

SEQ ID NO: 845 - protein, 342 aa, Homo sapiens
  Payload ID: 143;
  Gene Symbol: ABHD4;
  Gene Name: abhydrolase domain containing 4;
  Uniprot ID:  Q8TB40;
  ENSP ID: ENSP00000414558
MADDLEQQSQGWLSSWLPTWRPTSMSQLKNVEARILQCLQNKFLARYVSLPNQNKIWTVTVSPEQNDRTPLVMVHGFGGGVGLWILNMDSLSARRTLHTFDLLGFGRSSRPAFPRDPEGAEDEFVTSIETWRETMGIPSMILLGHSLGGFLATSYSIKYPDRVKHLILVDPWGFPLRPTNPSEIRAPPAWVKAVASVLGRSNPLAVLRVAGPWGPGLVQRFRPDFKRKFADFFEDDTISEYIYHCNAQNPSGETAFKAMMESFGWARRPMLERIHLIRKDVPITMIYGSDTWIDTSTGKKVKMQRPDSYVRDMEIKGASHHVYADQPHIFNAVVEEICDSVD

SEQ ID NO: 846 - protein, 90 aa, Homo sapiens
  Payload ID: 143;
  Gene Symbol: ABHD4;
  Gene Name: abhydrolase domain containing 4;
  ENSP ID: ENSP00000437385
MSQLKNVEARILQCLQNKFLARYVSLPNQNKIWTVTVSPEQNDRTPLVMVHGFGGGVGLWILNMDSLSARRTLHTFDLLGFGRSSRPAFP

SEQ ID NO: 847 - protein, 54 aa, Homo sapiens
  Payload ID: 143;
  Gene Symbol: ABHD4;
  Gene Name: abhydrolase domain containing 4;
  ENSP ID: ENSP00000438014
  MOD_RES (1)..(1): Any amino acid
XSQGWLSSWLPTWRPTSMSQLKNVEARILQCLQNKFLARYVSLPNQNKIWTVTS

SEQ ID NO: 848 - protein, 85 aa, Homo sapiens
  Payload ID: 143;
  Gene Symbol: ABHD4;
  Gene Name: abhydrolase domain containing 4;
  ENSP ID: ENSP00000438332
MADDLEQQSQGWLSSWLPTWRPTSMSQLKNVEARILQCLQNKFLARYVSLPNQNKIWTVTVSPEQNDRTPLVMLKASIPKGPGGG

SEQ ID NO: 849 - protein, 44 aa, Homo sapiens
  Payload ID: 143;
  Gene Symbol: ABHD4;
  Gene Name: abhydrolase domain containing 4;
  ENSP ID: ENSP00000444550
MCPQSHCWSQGWLSSWLPTWRPTSMSQLKNVEARILQCLQNKFL

SEQ ID NO: 850 - protein, 44 aa, Homo sapiens
  Payload ID: 144;
  Gene Symbol: ABHD5;
  Gene Name: abhydrolase domain containing 5;
  ENSP ID: ENSP00000013894
MAAEEEEVDSADTGERSGWLTGWLPTWCPTSISHLKEAEEKMLK

SEQ ID NO: 851 - protein, 349 aa, Homo sapiens
  Payload ID: 144;
  Gene Symbol: ABHD5;
  Gene Name: abhydrolase domain containing 5;
  Uniprot ID:  Q8WTS1;
  ENSP ID: ENSP00000390849
MAAEEEEVDSADTGERSGWLTGWLPTWCPTSISHLKEAEEKMLKCVPCTYKKEPVRISNGNKIWTLKFSHNISNKTPLVLLHGFGGGLGLWALNFGDLCTNRPVYAFDLLGFGRSSRPRFDSDAEEVENQFVESIEEWRCALGLDKMILLGHNLGGFLAAAYSLKYPSRVNHLILVEPWGFPERPDLADQDRPIPVWIRALGAALTPFNPLAGLRIAGPFGLSLVQRLRPDFKRKYSSMFEDDTVTEYIYHCNVQTPSGETAFKNMTIPYGWAKRPMLQRIGKMHPDIPVSVIFGARSCIDGNSGTSIQSLRPHSYVKTIAILGAGHYVYADQPEEFNQKVKEICDTVD

SEQ ID NO: 852 - protein, 126 aa, Homo sapiens
  Payload ID: 144;
  Gene Symbol: ABHD5;
  Gene Name: abhydrolase domain containing 5;
  ENSP ID: ENSP00000391582
MLKCVPCTYKKEPVRISNGNKIWTLKFSHNISNKTPLVLLHGFGGGLGLWALNFGDLCTNRPVYAFDLLGFGRSSRPRFDSDAEEVENQFVESIEEWRCALGLDKMILLGHNLGGFLAAAYSLKYP

SEQ ID NO: 853 - protein, 155 aa, Homo sapiens
  Payload ID: 144;
  Gene Symbol: ABHD5;
  Gene Name: abhydrolase domain containing 5;
  ENSP ID: ENSP00000392159
RVNHLILVEPWGFPERPDLADQDRPIPVWIRALGAALTPFNPLAGLRIAGPFGLSLVQRLRPDFKRKYSSMFEDDTVTEYIYHCNVQTPSFSDLWRPILHRWQFWHQHPVLTTTFICEDNSYSWGRTLCICRSTRRIQPESKGDLRHCGLNTLKL

SEQ ID NO: 854 - protein, 45 aa, Homo sapiens
  Payload ID: 144;
  Gene Symbol: ABHD5;
  Gene Name: abhydrolase domain containing 5;
  ENSP ID: ENSP00000412014
MLKCVPCTYKKEPVRISNGNKIWTLKFSHNISNKTPLVLLHGFGG

SEQ ID NO: 855 - protein, 337 aa, Homo sapiens
  Payload ID: 145;
  Gene Symbol: ABHD6;
  Gene Name: abhydrolase domain containing 6;
  Uniprot ID:  Q9BV23;
  ENSP ID: ENSP00000295962
MDLDVVNMFVIAGGTLAIPILAFVASFLLWPSALIRIYYWYWRRTLGMQVRYVHHEDYQFCYSFRGRPGHKPSILMLHGFSAHKDMWLSVVKFLPKNLHLVCVDMPGHEGTTRSSLDDLSIDGQVKRIHQFVECLKLNKKPFHLVGTSMGGQVAGVYAAYYPSDVSSLCLVCPAGLQYSTDNQFVQRLKELQGSAAVEKIPLIPSTPEEMSEMLQLCSYVRFKVPQQILQGLVDVRIPHNNFYRKLFLEIVSEKSRYSLHQNMDKIKVPTQIIWGKQDQVLDVSGADMLAKSIANCQVELLENCGHSVVMERPRKTAKLIIDFLASVHNTDNNKKLD

SEQ ID NO: 856 - protein, 51 aa, Homo sapiens
  Payload ID: 145;
  Gene Symbol: ABHD6;
  Gene Name: abhydrolase domain containing 6;
  ENSP ID: ENSP00000418209
MDLDVVNMFVIAGGTLAIPILAFVASFLLWPSALIRIYYCMSSVKDVAALS

SEQ ID NO: 857 - protein, 173 aa, Homo sapiens
  Payload ID: 145;
  Gene Symbol: ABHD6;
  Gene Name: abhydrolase domain containing 6;
  ENSP ID: ENSP00000418934
MDLDVVNMFVIAGGTLAIPILAFVASFLLWPSALIRIYYWYWRRTLGMQVRYVHHEDYQFCYSFRGRPGHKPSILMLHGFSAHKDMWLSVVKFLPKNLHLVCVDMPGHEGTTRSSLDDLSIDGQVKRIHQFVECLKLNKKPFHLVGTSMGGQVAGVYAAYYPSDVSSLCLVCP

SEQ ID NO: 858 - protein, 337 aa, Homo sapiens; identical to SEQ ID NO: 855
  Payload ID: 145;
  Gene Symbol: ABHD6;
  Gene Name: abhydrolase domain containing 6;
  Uniprot ID:  Q9BV23;
  ENSP ID: ENSP00000420315

SEQ ID NO: 859 - protein, 225 aa, Homo sapiens
  Payload ID: 145;
  Gene Symbol: ABHD6;
  Gene Name: abhydrolase domain containing 6;
  ENSP ID: ENSP00000420408
MDLDVVNMFVIAGGTLAIPILAFVASFLLWPSALIRIYYWYWRRTLGMQVRYVHHEDYQFCYSFRGRPGHKPSILMLHGFSAHKDMWLSVVKFLPKNLHLVCVDMPGHEGTTRSSLDDLSIDGQVKRIHQFVECLKLNKKPFHLVGTSMGGQVAGVYAAYYPSDVSSLCLVCPAGLQYSTDNQFVQRLKELQGSAAVEKIPLIPSTPEEMSEMLQLCSYVRFKVP

SEQ ID NO: 860 - protein, 318 aa, Homo sapiens
  Payload ID: 145;
  Gene Symbol: ABHD6;
  Gene Name: abhydrolase domain containing 6;
  ENSP ID: ENSP00000484876
MDLDVVNMFVIAGGTLAIPILAFVASFLLWPSALIRIYYWYWRRTLGMQVRYVHHEDYQFCYSFRGRPGHKPSILMLHGFSAHKDMWLSVVKFLPKNLHLVCVDMPGHEGTTRSSLDDLSIDGQVKRIHQFVECLKLNKKPFHLVGTSMGGQVAGVYAAYYPSDVSSLCLVCPAGLQYSTDNQFVQRLKELQGSAAVEKIPLIPSTPEEMSEMLQLCSYVRFKVPQQILQGLVDVRIPHNNFYRKLFLEIVSEKSRYSLHQNMDKIKVPTQIIWGKQDQVLDVSGADVGQVNCQLPGGASGKLWALSSDGKPGRQPSS

SEQ ID NO: 861 - protein, 439 aa, Homo sapiens
  Payload ID: 146;
  Gene Symbol: ABHD8;
  Gene Name: abhydrolase domain containing 8;
  Uniprot ID:  Q96I13;
  ENSP ID: ENSP00000247706
MLTGVTDGIFCCLLGTPPNAVGPLESVESSDGYTFVEVKPGRVLRVKHAGPAPAAAPPPPSSASSDAAQGDLSGLVRCQRRITVYRNGRLLVENLGRAPRADLLHGQNGSGEPPAALEVELADPAGSDGRLAPGSAGSGSGSGSGGRRRRARRPKRTIHIDCEKRITSCKGAQADVVLFFIHGVGGSLAIWKEQLDFFVRLGYEVVAPDLAGHGASSAPQVAAAYTFYALAEDMRAIFKRYAKKRNVLIGHSYGVSFCTFLAHEYPDLVHKVIMINGGGPTALEPSFCSIFNMPTCVLHCLSPCLAWSFLKAGFARQGAKEKQLLKEGNAFNVSSFVLRAMMSGQYWPEGDEVYHAELTVPVLLVHGMHDKFVPVEEDQRMAEILLLAFLKLIDEGSHMVMLECPETVNTLLHEFLLWEPEPSPKALPEPLPAPPEDKK

SEQ ID NO: 862 - protein, 175 aa, Homo sapiens
  Payload ID: 146;
  Gene Symbol: ABHD8;
  Gene Name: abhydrolase domain containing 8;
  ENSP ID: ENSP00000468883
MRIGDKSFSFLEAGHTMLTGVTDGIFCCLLGTPPNAVGPLESVESSDGYTFVEVKPGRVLRVKHAGPAPAAAPPPPSSASSDAAQGDLSGLVRCQRRITVYRNGRLLVENLGRAPRADLLHGQNGSGEPPAALEVELADPAGSDGRLAPGSAGSGSGSGSGGRRRRARRPKRTIH

SEQ ID NO: 863 - protein, 130 aa, Homo sapiens
  Payload ID: 146;
  Gene Symbol: ABHD8;
  Gene Name: abhydrolase domain containing 8;
  ENSP ID: ENSP00000470413
MRNIPTQDATTFPVDTLWGHTMLTGVTDGIFCCLLGTPPNAVGPLESVESSDGYTFVEVKPGRVLRVKHAGPAPAAAPPPPSSASSDAAQGDLSGLVRCQRRITVYRNGRLLVENLGRAPRADLLHGQNG

SEQ ID NO: 864 - protein, 366 aa, Homo sapiens
  Payload ID: 147;
  Gene Symbol: ABI3;
  Gene Name: ABI family, member 3;
  Uniprot ID:  Q9P2A4;
  ENSP ID: ENSP00000225941
MAELQQLQEFEIPTGREALRGNHSALLRVADYCEDNYVQATDKRKALEETMAFTTQALASVAYQVGNLAGHTLRMLDLQGAALRQVEARVSTLGQMVNMHMEKVARREIGTLATVQRLPPGQKVIAPENLPPLTPYCRRPLNFGCLDDIGHGIKDLSTQLSRTGTLSRKSIKAPATPASATLGRPPRIPEPVHLPVVPDGRLSAASSAFSLASAGSAEGVGGAPTPKGQAAPPAPPLPSSLDPPPPPAAVEVFQRPPTLEELSPPPPDEELPLPLDLPPPPPLDGDELGLPPPPPGFGPDEPSWVPASYLEKVVTLYPYTSQKDNELSFSEGTVICVTRRYSDGWCEGVSSEGTGFFPGNYVEPSC

SEQ ID NO: 865 - protein, 360 aa, Homo sapiens
  Payload ID: 147;
  Gene Symbol: ABI3;
  Gene Name: ABI family, member 3;
  Uniprot ID:  Q9P2A4;
  ENSP ID: ENSP00000406651
MAELQQLQEFEIPTGREALRGNHSALLRVADYCEDNYVQATDKRKALEETMAFTTQALASVAYQVGNLAGHTLRMLDLQGAALRQVEARMVNMHMEKVARREIGTLATVQRLPPGQKVIAPENLPPLTPYCRRPLNFGCLDDIGHGIKDLSTQLSRTGTLSRKSIKAPATPASATLGRPPRIPEPVHLPVVPDGRLSAASSAFSLASAGSAEGVGGAPTPKGQAAPPAPPLPSSLDPPPPPAAVEVFQRPPTLEELSPPPPDEELPLPLDLPPPPPLDGDELGLPPPPPGFGPDEPSWVPASYLEKVVTLYPYTSQKDNELSFSEGTVICVTRRYSDGWCEGVSSEGTGFFPGNYVEPSC

SEQ ID NO: 866 - protein, 191 aa, Homo sapiens
  Payload ID: 147;
  Gene Symbol: ABI3;
  Gene Name: ABI family, member 3;
  ENSP ID: ENSP00000459171
  MOD_RES (1)..(1): Any amino acid
XRPPRIPEPVHLPVVPDGRLSAASSAFSLASAGSAEGVGGAPTPKGQAAPPAPPLPSSLDPPPPPAAVEVFQRPPTLEELSPPPPAFLLFPQDEELPLPLDLPPPPPLDGDELGLPPPPPGFGPDEPSWVPASYLEKVVTLYPYTSQKDNELSFSEGTVICVTRRYSDGWCEGVSSEGTGFFPGNYVEPSC

SEQ ID NO: 867 - protein, 160 aa, Homo sapiens
  Payload ID: 147;
  Gene Symbol: ABI3;
  Gene Name: ABI family, member 3;
  ENSP ID: ENSP00000460776
  MOD_RES (1)..(1): Any amino acid
XTGTLSRKSIKAPATPASATLGRPPRIPEPVHLPVVPDGRLSAASSAFSLASAGSAEGVGGAPTPKGQAAPPAPPLPSSLDPPPPPAAVEVFQRPPTLEELSPPPPAFLLFPQDEELPLPLDLPPPPPLDGDELGLPPPPPGFGPDEPSWVPASYLEKGT

SEQ ID NO: 868 - protein, 1075 aa, Homo sapiens
  Payload ID: 148;
  Gene Symbol: ABI3BP;
  Gene Name: ABI family, member 3 (NESH) binding prt;
  Uniprot ID:  Q7Z7G0;
  ENSP ID: ENSP00000284322
MRGGKCNMLSSLGCLLLCGSITLALGNAQKLPKGKRPNLKVHINTTSDSILLKFLRPSPNVKLEGLLLGYGSNVSPNQYFPLPAEGKFTEAIVDAEPKYLIVVRPAPPPSQKKSCSGKTRSRKPLQLVVGTLTPSSVFLSWGFLINPHHDWTLPSHCPNDRFYTIRYREKDKEKKWIFQICPATETIVENLKPNTVYEFGVKDNVEGGIWSKIFNHKTVVGSKKVNGKIQSTYDQDHTVPAYVPRKLIPITIIKQVIQNVTHKDSAKSPEKAPLGGVILVHLIIPGLNETTVKLPASLMFEISDALKTQLAKNETLALPAESKTPEVEKISARPTTVTPETVPRSTKPTTSSALDVSETTLASSEKPWIVPTAKISEDSKVLQPQTATYDVFSSPTTSDEPEISDSYTATSDRILDSIPPKTSRTLEQPRATLAPSETPFVPQKLEIFTSPEMQPTTPAPQQTTSIPSTPKRRPRPKPPRTKPERTTSAGTITPKISKSPEPTWTTPAPGKTQFISLKPKIPLSPEVTHTKPAPKQTPRAPPKPKTSPRPRIPQTQPVPKVPQRVTAKPKTSPSPEVSYTTPAPKDVLLPHKPYPEVSQSEPAPLETRGIPFIPMISPSPSQEELQTTLEETDQSTQEPFTTKIPRTTELAKTTQAPHRFYTTVRPRTSDKPHIRPGVKQAPRPSGADRNVSVDSTHPTKKPGTRRPPLPPRPTHPRRKPLPPNNVTGKPGSAGIISSGPITTPPLRSTPRPTGTPLERIETDIKQPTVPASGEELENITDFSSSPTRETDPLGKPRFKGPHVRYIQKPDNSPCSITDSVKRFPKEEATEGNATSPPQNPPTNLTVVTVEGCPSFVILDWEKPLNDTVTEYEVISRENGSFSGKNKSIQMTNQTFSTVENLKPNTSYEFQVKPKNPLGEGPVSNTVAFSTESADPRVSEPVSAGRDAIWTERPFNSDSYSECKGKQYVKRTWYKKFVGVQLCNSLRYKIYLSDSLTGKFYNIGDQRGHGEDHCQFVDSFLDGRTGQQLTSDQLPIKEGYFRAVRQEPVQFGEIGGHTQINYVQWYECGTTIPGKW

SEQ ID NO: 869 - protein, 84 aa, Homo sapiens
  Payload ID: 148;
  Gene Symbol: ABI3BP;
  Gene Name: ABI family, member 3 (NESH) binding prt;
  ENSP ID: ENSP00000417325
  MOD_RES (1)..(1): Any amino acid
XFEKPRGTLASSEKPWIVPTAKISEDSKVLQPQTATSDRILDSIPPKTSRTLEQPRATLAPSETPFVPQKLEIFTSPEMQPTTP

SEQ ID NO: 870 - protein, 187 aa, Homo sapiens
  Payload ID: 148;
  Gene Symbol: ABI3BP;
  Gene Name: ABI family, member 3 (NESH) binding prt;
  ENSP ID: ENSP00000417745
  MOD_RES (1)..(1): Any amino acid
XKTTPHPEVPQTKLAPKVPQRTHRPHPKPKTTLSPEELQTELVPATIFEPVSPIKEAPGTTFVPVTDLEPVTFRTEIPATTLATKTSKRTRPPRPRPKTTPSPQAPETKPAPKQTPRAPPKPKTSPRPRIPQTQPVPKVPQRVTAKPKTSPSPEVSYTTPAPLETRGIPFIPMISPSPSQEELQTTL

SEQ ID NO: 871 - protein, 307 aa, Homo sapiens
  Payload ID: 148;
  Gene Symbol: ABI3BP;
  Gene Name: ABI family, member 3 (NESH) binding prt;
  ENSP ID: ENSP00000418024
  MOD_RES (1)..(1): Any amino acid
XPKPKTTPHPEVPQTKLATKTSKRTRPPRPRPKTTPSPQAPETKPVPATVLEPVTLRPEASTTLASKTSQRTRRPRLRTKTTPRPEAPESKPVPTAELKPVTLRTETWVTTQAPKQTPRAPPKPKTSPRPRIPQTQPVPKVPQRVTAKPKTSPSPEVSYTTPAPKDVLLPHKPYPEVSQSEPAPLETRGIPFIPMISPSPSQEELQTTLEETDQSTQEPFTTKIPRTTELAKTTQAPHRFYTTVRPRTSDKPHIRPVLNRTTTRPTRPKPSGMPSGNGVGTGVKQAPRPSGADRNVSVDSTHPTKKP

SEQ ID NO: 872 - protein, 187 aa, Homo sapiens
  Payload ID: 148;
  Gene Symbol: ABI3BP;
  Gene Name: ABI family, member 3 (NESH) binding prt;
  ENSP ID: ENSP00000418063
  MOD_RES (1)..(1): Any amino acid
XFISLKPKIPLSPEVTHTKPAPKTSQRTRTRRPRPKHKTTPRPETLQTKLDFGPITPGTSSAPTTTTKRTRRPHPKPKTTPHPEVPQTKLAPKQTPRAPPKPKTSPRPRIPQTQPVPKVPQRVTAKPKTSPSPEVSYTTPAPKDVLLPHKPYPEVSQSEPAPLETRGIPFIPMISPSPSQEELQTTL

SEQ ID NO: 873 - protein, 187 aa, Homo sapiens
  Payload ID: 148;
  Gene Symbol: ABI3BP;
  Gene Name: ABI family, member 3 (NESH) binding prt;
  ENSP ID: ENSP00000418479
  MOD_RES (1)..(1): Any amino acid
XNGKIQSTYDQDHTVPAYVPRKLIPITIIKQVIQNVTHKDSAKSPEKAPLGGVILVHLIIPGLNETTVKLPASLMFEISDALKTQLAKNETLALPAESKTPEVEKISARPTTVTPETVPRSTKPTTSSALDVSETTLVLSKRTPETLQTILIPQFELPLSTLASSEKPWIVPTAKISEDSKVLQPQT

SEQ ID NO: 874 - protein, 158 aa, Homo sapiens
  Payload ID: 148;
  Gene Symbol: ABI3BP;
  Gene Name: ABI family, member 3 (NESH) binding prt;
  ENSP ID: ENSP00000418800
VSDVLESVTLSTESPKETIAPAKTDYVYPTAKAPLWPEEPKTEVVESITYVSEPPETTLETSPLPSQSITLPSPDEPQTEPAPKQTPRAPPKPKTSPRPRIPQTQPVPKVPQRVTAKPKTSPSPEVSYTTPAPLETRGIPFIPMISPSPSQEELQTTL

SEQ ID NO: 875 - protein, 1131 aa, Homo sapiens
  Payload ID: 148;
  Gene Symbol: ABI3BP;
  Gene Name: ABI family, member 3 (NESH) binding prt;
  ENSP ID: ENSP00000418817
  MOD_RES (1)..(1): Any amino acid
XISLKPKIPLSPEVTHTKPAPEPQTLLPSQSTIGPETPGTKPSTTLALEPATIQPEPLVPTTASKPSERPKTTHRPDAPQIQPGSKPPKQLLPKPQTTAEPDMPPTKSVSEPVPFETEAPSMTIVPTTDIEPVTVRTEATVTTLAPKTSQRTRTRRPRPKHKTTPRPETLQTKLDFGPITPGTSSAPTTTTKRTRRPHPKPKTTPHPEVPQTKLVPATILEPVLRTEASGTTAVPATIFEPVSPIKEAPGTTFVPVTDLEPVTFRTEIPATTLATKTSKRTRPPRPRPKTTPSPQAPETKPVPATVLEPVTLRPEASTTLASKTSQRTRRPRLRTKTTPRPEAPESKPVPTAELKPVTLRTETWVTTQAPKTSQRTRRPRPKTKTTPSPEVPQTKLVPSTDLEPGTLRTEAPKTMVVTTVLEPDTFRTKFPETTLAPKTQRTRRPRPRPKTTSSPEVPQNKSVSVTGFEPVVHSTDAPGTTFALTELQTLILKPVTSPSLEMTESQPVSDVLESVTLSTESPKETIAPAKTDYVYPTAKAPLWPEEPKTEVVESITYVSEPPETTLETSPLPSQSITLPSPDEPQTEPAPKQTPRAPPKPKTSPRPRIPQTQPVPKVPQRVTAKPKTSPSPEVSYTTPAPKDVLLPHKPYPEVSQSEPAPLETRGIPFIPMISPSPSQEELQTTLEETDQSTQEPFTTKIPRTTELAKTTQAPHRFYTTVRPRTSDKPHIRPGVKQAPRPSGADRNVSVDSTHPTKKPGTRRPPLPPRPTHPRRKPLPPNNVTGKPGSAGIISSGPITTPPLRSTPRPTGTPLERIETDIKQPTVPASGEELENITDFSSSPTRETDPLGKPRFKGPHVRYIQKPDNSPCSITDSVKRFPKEEATEGNATSPPQNPPTNLTVVTVEGCPSFVILDWEKPLNDTVTEYEVISRENGSFSGKNKSIQMTNQTFSTVENLKPNTSYEFQVKPKNPLGEGPVSNTVAFSTESADPRVSEPVSAGRDAIWTERPFNSDSYSECKGKQYVKRTWYKKFVGVQLCNSLRYKIYLSDSLTGKFYNIGDQRGHGEDHCQFVDSFLDGRTGQQLTSDQLPIKEGYFRAVRQEPVQFGEIGGHTQINYVQWYECGTTIPGKW

SEQ ID NO: 876 - protein, 233 aa, Homo sapiens
  Payload ID: 148;
  Gene Symbol: ABI3BP;
  Gene Name: ABI family, member 3 (NESH) binding prt;
  ENSP ID: ENSP00000419029
QRVTAKPKTSPSPEVSYTTPAPKDVLLPHKPYPEVSQSEPAPLETRGIPFIPMISPSPSQEELQTTLAPHRFYTTVRPRTSDKPHIRPGVKQAPRPSGADRNVSVDSTHPTKKPGTRRPPLPPRPTHPRRKPLPPNNVTGKPGSAGIISSGPITTPPLRSTPRPTGTPLERIETDIKQPTVPASGEELENITDFSSSPTRETDPLGKPRFKGPHVRYIQKPDNSPCSITDSVK

SEQ ID NO: 877 - protein, 1777 aa, Homo sapiens
  Payload ID: 148;
  Gene Symbol: ABI3BP;
  Gene Name: ABI family, member 3 (NESH) binding prt;
  ENSP ID: ENSP00000420524
MRGGKCNMLSSLGCLLLCGSITLALGNAQKLPKGKRPNLKVHINTTSDSILLKFLRPSPNVKLEGLLLGYGSNVSPNQYFPLPAEGKFTEAIVDAEPKYLIVVRPAPPPSQKKSCSGKTRSRKPLQLVVGTLTPSSVFLSWGFLINPHHDWTLPSHCPNDRFYTIRYREKDKEKKWIFQICPATETIVENLKPNTVYEFGVKDNVEGGIWSKIFNHKTVVGSKKVNGKIQSTYDQDHTVPAYVPRKLIPITIIKQVIQNVTHKDSAKSPEKAPLGGVILVHLIIPGLNETTVKLPASLMFEISDALKTQLAKNETLALPAESKTPEVEKISARPTTVTPETVPRSTKPTTSSALDVSETTLVLSKRTPETLQTILIPQFELPLSTLAPKSLPEFPEAKTPFPFEKPRGTLASSEKPWIVPTAKISEDSKVLQPQTATYDVFSSPTTSDEPEISDSYTATSDRILDSIPPKTSRTLEQPRATLAPSETPFVPQKLEIFTSPEMQPTTPAPQQTTSIPSTPKRRPRPKPPRTKPERTTSAGTITPKISKSPEPTWTTPAPGKTQFISLKPKIPLSPEVTHTKPAPEPQTLLPSQSTIGPETPGTKPSTTLAPRKTKRPGRRPRPRPRPKTTPSPEVPKSKPALEPATIQPEPLVPTTASKPSERPKTTHRPDAPQIQPGSKPPKQLLPKPQTTAEPDMPPTKSVSEPVPFETEAPSMTIVPTTDIEPVTVRTEATVTTLAPKTSQRTRTRRPRPKHKTTPRPETLQTKLDFGPITPGTSSAPTTTTKRTRRPHPKPKTTPHPEVPQTKLVPATILEPVLRTEASGTTAAPKVPQRTHRPHPKPKTTLSPEELQTELVPATIFEPVSPIKEAPGTTFVPVTDLEPVTFRTEIPATTLATKTSKRTRPPRPRPKTTPSPQAPETKPVPATVLEPVTLRPEASTTLASKTSQRTRRPRLRTKTTPRPEAPESKPVPTAELKPVTLRTETWVTTQAPKTSQRTRRPRPKTKTTPSPEVPQTKLVPSTDLEPGTLRTEAPKTMVVTTVLEPDTFRTKFPETTLAPKTQRTRRPRPRPKTTSSPEVPQNKSVSVTGFEPVVHSTDAPGTTFALTELQTLILKPVTSPSLEMTESQPVSDVLESVTLSTESPKETIAPAKTDYVYPTAKAPLWPEEPKTEVVESITYVSEPPETTLETSPLPSQSITLPSPDEPQTEPAPKQTPRAPPKPKTSPRPRIPQTQPVPKVPQRVTAKPKTSPSPEVSYTTPAPKDVLLPHKPYPEVSQSEPAPLETRGIPFIPMISPSPSQEELQTTLEETDQSTQEPFTTKIPRTTELAKTTQAPHRFYTTVRPRTSDKPHIRPVLNRTTTRPTRPKPSGMPSGNGVGTGVKQAPRPSGADRNVSVDSTHPTKKPGTRRPPLPPRPTHPRRKPLPPNNVTGKPGSAGIISSGPITTPPLRSTPRPTGTPLERIETDIKQPTVPASGEELENITDFSSSPTRETDPLGKPRFKGPHVRYIQKPDNSPCSITDSVKRFPKEEATEGNATSPPQNPPTNLTVVTVEGCPSFVILDWEKPLNDTVTEYEVISRENGSFSGKNKSIQMTNQTFSTVENLKPNTSYEFQVKPKNPLGEGPVSNTVAFSTESADPRVSEPVSAGRDAIWTERPFNSDSYSECKGKQYVKRTWYKKFVGVQLCNSLRYKIYLSDSLTGKFYNIGDQRGHGEDHCQFVDSFLDGRTGQQLTSDQLPIKEGYFRAVRQEPVQFGEIGGHTQINYVQWYECGTTIPGKW

SEQ ID NO: 878 - protein, 189 aa, Homo sapiens
  Payload ID: 148;
  Gene Symbol: ABI3BP;
  Gene Name: ABI family, member 3 (NESH) binding prt;
  ENSP ID: ENSP00000420704
  MOD_RES (1)..(1): Any amino acid
XTAKPKTSPSPEVSYTTPAPLETRGIPFIPMISPSPSQEELQTTLEETDQSTQEPFTTKIPRTTELAKTTQAPHRFYTTVRPRTSDKPHIRPVLNRTTTRPTRPKPSGMPSGNGVGTGVKQAPRPSGADRNVSVDSTHPTKKPGTRRPPLPPRPTHPRRKPLPPNNVTGKPGSAGIISSGPITTPPLRS

SEQ ID NO: 879 - protein, 151 aa, Homo sapiens
  Payload ID: 148;
  Gene Symbol: ABI3BP;
  Gene Name: ABI family, member 3 (NESH) binding prt;
  ENSP ID: ENSP00000431537
  MOD_RES (1)..(1): Any amino acid
XVESITYVSEPPETTLETSPLPSQSITLPSPDEPQTEPAPKQTPRAPPKPKTSPRPRIPQTQPVPKVPQRVTAKPKTSPSPEVSYTTPAPKDVLLPHKPYPEVSQSEPVLQPVTFRFEPPKTTIAPLETRGIPFIPMISPSPSQEELQTTL

SEQ ID NO: 880 - protein, 125 aa, Homo sapiens
  Payload ID: 148;
  Gene Symbol: ABI3BP;
  Gene Name: ABI family, member 3 (NESH) binding prt;
  ENSP ID: ENSP00000432069
  MOD_RES (1)..(1): Any amino acid
XKNETLALPAESKTPEVEKISARPTTVTPETVPRSTKPTTSSALDVSETTLAPKSLPEFPEAKTPFPFEKPRGTLASSEKPWIVPTAKISEDSKVLQPQTALTELQTLILKPVTSPSLEMTESQP

SEQ ID NO: 881 - protein, 187 aa, Homo sapiens
  Payload ID: 148;
  Gene Symbol: ABI3BP;
  Gene Name: ABI family, member 3 (NESH) binding prt;
  ENSP ID: ENSP00000433981
PRKTKRPGRRPRPRPRPKTTPSPEVPKSKPALEPATIQPEPLVPTTASKPSERPKTTHRPDAPQIQPVSEPVPFETEAPSMTIVPTTDIEPVTVRTEATVTTLAPKTSQRTRTRRPRPKHKTTPRPETLQTKLDFGPITPGTSSAPTTTTKRTRRPHPKPKTTPHPEVPQTKLAPKQTPRAPPKPKT

SEQ ID NO: 882 - protein, 1005 aa, Homo sapiens
  Payload ID: 148;
  Gene Symbol: ABI3BP;
  Gene Name: ABI family, member 3 (NESH) binding prt;
  ENSP ID: ENSP00000433993
MRGGKCNMLSSLGCLLLCGSITLALGNAQKLPKGKRPNLKVHINTTSDSILLKFLRPSPNVKLEGLLLGYGSNVSPNQYFPLPAEGKFTEAIVDAEPKYLIVVRPAPPPSQKKSCSGKTRSRKPLQLVVGTLTPSSVFLSWGFLINPHHDWTLPSHCPNDRFYTIRYREKDKEKKWIFQICPATETIVENLKPNTVYEFGVKDNVEGGIWSKIFNHKTVVGSKKVNGKIQSTYDQDHTVPAYVPRKLIPITIIKQVIQNVTHKDSAKSPEKAPLGGVILVHLIIPGLNETTVKLPASLMFEISDALKTQLAKNETLALPAESKTPEVEKISARPTTVTPETVPRSTKPTTSSALDVSETTLVLSKRTPETLQTILIPQFELPLSTLAPKSLPEFPEAKTPFPFEKPRGTLASSEKPWIVPTAKISEDSKVLQPQTATYDVFSSPTTSDEPEISDSYTATSDRILDSIPPKTSRTLEQPRATLAPSETPFVPQKLEIFTSPEMQPTTPAPQQTTSIPSTPKRRPRPKPPRTKPERTTSAGTITPKISKSPEPTWTTPAPGKTQFISLKPKIPLSPEVTHTKPAPEPQTLLPSQSTIGPETPGTKPSTTLAPRKTKRPGRRPRPRPRPKTTPSPEVPKSKPALEPATIQPEPLVPTTASKPSERPKTTHRPDAPQIQPGSKPPKQLLPKPQTTAEPDMPPTKSVSEPVPFETEAPSMTIVPTTDIEPVTVRTEATVTTLAPKTSQRTRTRRPRPKHKTTPRPETLQTKLDFGPITPGTSSAPTTTTKRTRRPHPKPKTTPHPEVPQTKLATKTSKRTRPPRPRPKTTPSPQAPETKPVPATVLEPVTLRPEASTTLASKTSQRTRRPRLRTKTTPRPEAPESKPVPTAELKPVTLRTETWVTTQAPKTSQRTRRPRPKTKTTPSPEVPQTKLVPSTDLEPGTLRTEAPKTMVVTTVLEPDTFRTKFPETTLAPKTQRTRRPRPRPKTTSSPEVPQNKSGKCMNPWLK

SEQ ID NO: 883 - protein, 60 aa, Homo sapiens
  Payload ID: 148;
  Gene Symbol: ABI3BP;
  Gene Name: ABI family, member 3 (NESH) binding prt;
  ENSP ID: ENSP00000434256
MRGGKCNMLSSLGCLLLCGSITLALGNAQKLPKANKRTELVIQHGWMSLIKMMLNERSQV

SEQ ID NO: 884 - protein, 87 aa, Homo sapiens
  Payload ID: 148;
  Gene Symbol: ABI3BP;
  Gene Name: ABI family, member 3 (NESH) binding prt;
  ENSP ID: ENSP00000434425
  MOD_RES (1)..(1): Any amino acid
XQTLLPSQSTIGPETPGTKPSTTLAPRKTKRPGRRPRPRPRPKTTPSPEVPKSKPALEPATIQPEPLVPTTVSEPVPFETEAPSMTI

SEQ ID NO: 885 - protein, 191 aa, Homo sapiens
  Payload ID: 148;
  Gene Symbol: ABI3BP;
  Gene Name: ABI family, member 3 (NESH) binding prt;
  ENSP ID: ENSP00000435319
CIVVLWYGWLHFYAEPKYLIVVRPAPPPSQKKSCSGKTRSRKPLQLVVGTLTPSSVFLSWGFLINPHHDWTLPSHCPNDRFYTIRYREKDKEKKWIFQICPATETIVENLKPNTVYEFGVKDNVEGGIWSKIFNHKTVVGSKKVNGKIQSTYDQDHTVPAYVPRKLIPITIIKQVIQNVTHKDSAKSPEKA

SEQ ID NO: 886 - protein, 187 aa, Homo sapiens
  Payload ID: 148;
  Gene Symbol: ABI3BP;
  Gene Name: ABI family, member 3 (NESH) binding prt;
  ENSP ID: ENSP00000436070
  MOD_RES (1)..(1): Any amino acid
XRTTSAGTITPKISKSPEPTWTTPAPGKTQFISLKPKIPLSPEVTHTKPVPTTDIEPVTVRTEATVTTLAPKTSQRTRTRRPRPKHKTTPRPETLQTKLDFGPITPGTSSAPTTTTKRTRRPHPKPKTTPHPEVPQTKLAPKVPQRTHRPHPKPKTTLSPEELQTELVPATIFEPVSPIKEAPGTTF

SEQ ID NO: 887 - protein, 161 aa, Homo sapiens
  Payload ID: 148;
  Gene Symbol: ABI3BP;
  Gene Name: ABI family, member 3 (NESH) binding prt;
  ENSP ID: ENSP00000436918
MRGGKCNMLSSLGCLLLCGSITLALGNAQKLPKDAEPKYLIVVRPAPPPSQKKSCSGKTRSRKPLQLVVGTLTPSSVFLSWGFLINPHHDWTLPSHCPNDRFYTIRYREKDKEKKWIFQICPATETIVENLKPNTVYEFGVKDNVEGGIWSKIFNHKTVVG

SEQ ID NO: 888 - protein, 303 aa, Homo sapiens
  Payload ID: 148;
  Gene Symbol: ABI3BP;
  Gene Name: ABI family, member 3 (NESH) binding prt;
  ENSP ID: ENSP00000437031
  MOD_RES (1)..(1): Any amino acid
XTPEVEKISARPTTVTPETVPRSTKPTTSSALDVSETTLASSEKPWIVPTAKISEDSKVLQPQTATYDVFSSPTTSDEPEISDSYTATSDRILDSIPPKTSRTLEQPRATLAPSETPFVPQKLEIFTSPEMQPTTPAPQQTTSIPSTPKRRPRPKPPRTKPERTTSAGTITPKISKSPEPTWTTPAPGKTQFISLKPKIPLSPEVTHTKPAPEPQTLLPSQSTIGPETPGTKPSTTLAPRKTKRPGRRPRPRPRPKTTPSPEVPKSKPALEPATIQPEPLVPTTASKPSERPKTTHRPDAPQI

SEQ ID NO: 889 - protein, 150 aa, Homo sapiens
  Payload ID: 148;
  Gene Symbol: ABI3BP;
  Gene Name: ABI family, member 3 (NESH) binding prt;
  ENSP ID: ENSP00000437308
  MOD_RES (1)..(1): Any amino acid
XPETPGTKPSTTLAPRKTKRPGRRPRPRPRPKTTPSPEVPKSKPALEPATIQPEPLVPTTVPTTDIEPVTVRTEATVTTLAPKTSQRTRTRRPRPKHKTTPRPETLQTKLDFGPITPGTSSAPTTTTKRTRRPHPKPKTTPHPEVPQTKL

SEQ ID NO: 890 - protein, 1130 aa, Homo sapiens
  Payload ID: 149;
  Gene Symbol: ABL1;
  Gene Name: ABL proto-oncogene 1, non-receptor tyr kinase;
  Uniprot ID:  P00519;
  ENSP ID: ENSP00000323315
MLEICLKLVGCKSKKGLSSSSSCYLEEALQRPVASDFEPQGLSEAARWNSKENLLAGPSENDPNLFVALYDFVASGDNTLSITKGEKLRVLGYNHNGEWCEAQTKNGQGWVPSNYITPVNSLEKHSWYHGPVSRNAAEYLLSSGINGSFLVRESESSPGQRSISLRYEGRVYHYRINTASDGKLYVSSESRFNTLAELVHHHSTVADGLITTLHYPAPKRNKPTVYGVSPNYDKWEMERTDITMKHKLGGGQYGEVYEGVWKKYSLTVAVKTLKEDTMEVEEFLKEAAVMKEIKHPNLVQLLGVCTREPPFYIITEFMTYGNLLDYLRECNRQEVNAVVLLYMATQISSAMEYLEKKNFIHRDLAARNCLVGENHLVKVADFGLSRLMTGDTYTAHAGAKFPIKWTAPESLAYNKFSIKSDVWAFGVLLWEIATYGMSPYPGIDLSQVYELLEKDYRMERPEGCPEKVYELMRACWQWNPSDRPSFAEIHQAFETMFQESSISDEVEKELGKQGVRGAVSTLLQAPELPTKTRTSRRAAEHRDTTDVPEMPHSKGQGESDPLDHEPAVSPLLPRKERGPPEGGLNEDERLLPKDKKTNLFSALIKKKKKTAPTPPKRSSSFREMDGQPERRGAGEEEGRDISNGALAFTPLDTADPAKSPKPSNGAGVPNGALRESGGSGFRSPHLWKKSSTLTSSRLATGEEEGGGSSSKRFLRSCSASCVPHGAKDTEWRSVTLPRDLQSTGRQFDSSTFGGHKSEKPALPRKRAGENRSDQVTRGTVTPPPRLVKKNEEAADEVFKDIMESSPGSSPPNLTPKPLRRQVTVAPASGLPHKEEAGKGSALGTPAAAEPVTPTSKAGSGAPGGTSKGPAEESRVRRHKHSSESPGRDKGKLSRLKPAPPPPPAASAGKAGGKPSQSPSQEAAGEAVLGAKTKATSLVDAVNSDAAKPSQPGEGLKKPVLPATPKPQSAKPSGTPISPAPVPSTLPSASSALAGDQPSSTAFIPLISTRVSLRKTRQPPERIASGAITKGVVLDSTEALCLAISRNSEQMASHSAVLEAGKNLYTFCVSYVDSIQQMRNKFAFREAINKLENNLRELQICPATAGSGPAATQDFSKLLSSVKEISDIVQR

SEQ ID NO: 891 - protein, 1149 aa, Homo sapiens
  Payload ID: 149;
  Gene Symbol: ABL1;
  Gene Name: ABL proto-oncogene 1, non-receptor tyr kinase;
  Uniprot ID:  P00519;
  ENSP ID: ENSP00000361423
MGQQPGKVLGDQRRPSLPALHFIKGAGKKESSRHGGPHCNVFVEHEALQRPVASDFEPQGLSEAARWNSKENLLAGPSENDPNLFVALYDFVASGDNTLSITKGEKLRVLGYNHNGEWCEAQTKNGQGWVPSNYITPVNSLEKHSWYHGPVSRNAAEYLLSSGINGSFLVRESESSPGQRSISLRYEGRVYHYRINTASDGKLYVSSESRFNTLAELVHHHSTVADGLITTLHYPAPKRNKPTVYGVSPNYDKWEMERTDITMKHKLGGGQYGEVYEGVWKKYSLTVAVKTLKEDTMEVEEFLKEAAVMKEIKHPNLVQLLGVCTREPPFYIITEFMTYGNLLDYLRECNRQEVNAVVLLYMATQISSAMEYLEKKNFIHRDLAARNCLVGENHLVKVADFGLSRLMTGDTYTAHAGAKFPIKWTAPESLAYNKFSIKSDVWAFGVLLWEIATYGMSPYPGIDLSQVYELLEKDYRMERPEGCPEKVYELMRACWQWNPSDRPSFAEIHQAFETMFQESSISDEVEKELGKQGVRGAVSTLLQAPELPTKTRTSRRAAEHRDTTDVPEMPHSKGQGESDPLDHEPAVSPLLPRKERGPPEGGLNEDERLLPKDKKTNLFSALIKKKKKTAPTPPKRSSSFREMDGQPERRGAGEEEGRDISNGALAFTPLDTADPAKSPKPSNGAGVPNGALRESGGSGFRSPHLWKKSSTLTSSRLATGEEEGGGSSSKRFLRSCSASCVPHGAKDTEWRSVTLPRDLQSTGRQFDSSTFGGHKSEKPALPRKRAGENRSDQVTRGTVTPPPRLVKKNEEAADEVFKDIMESSPGSSPPNLTPKPLRRQVTVAPASGLPHKEEAGKGSALGTPAAAEPVTPTSKAGSGAPGGTSKGPAEESRVRRHKHSSESPGRDKGKLSRLKPAPPPPPAASAGKAGGKPSQSPSQEAAGEAVLGAKTKATSLVDAVNSDAAKPSQPGEGLKKPVLPATPKPQSAKPSGTPISPAPVPSTLPSASSALAGDQPSSTAFIPLISTRVSLRKTRQPPERIASGAITKGVVLDSTEALCLAISRNSEQMASHSAVLEAGKNLYTFCVSYVDSIQQMRNKFAFREAINKLENNLRELQICPATAGSGPAATQDFSKLLSSVKEISDIVQR

SEQ ID NO: 892 - protein, 64 aa, Homo sapiens
  Payload ID: 149;
  Gene Symbol: ABL1;
  Gene Name: ABL proto-oncogene 1, non-receptor tyr kinase;
  ENSP ID: ENSP00000376971
MGQQPGKVLGDQRRPSLPALHFIKGAGKKESSRHGGPHCNVFVEHALQRPVASDFEPQGLSEAA

SEQ ID NO: 893 - protein, 1064 aa, Homo sapiens
  Payload ID: 150;
  Gene Symbol: ABL2;
  Gene Name: ABL proto-oncogene 2, non-receptor tyr kinase;
  Uniprot ID:  P42684;
  ENSP ID: ENSP00000339209
MVLGTVLLPPNSYGRDQDTSLCCLCTEASESALPDLTDHFASCVEDGFEGDKTGGSSPEALHRPYGCDVEPQALNEAIRWSSKENLLGATESDPNLFVALYDFVASGDNTLSITKGEKLRVLGYNQNGEWSEVRSKNGQGWVPSNYITPVNSLEKHSWYHGPVSRSAAEYLLSSLINGSFLVRESESSPGQLSISLRYEGRVYHYRINTTADGKVYVTAESRFSTLAELVHHHSTVADGLVTTLHYPAPKCNKPTVYGVSPIHDKWEMERTDITMKHKLGGGQYGEVYVGVWKKYSLTVAVKTLKEDTMEVEEFLKEAAVMKEIKHPNLVQLLGVCTLEPPFYIVTEYMPYGNLLDYLRECNREEVTAVVLLYMATQISSAMEYLEKKNFIHRDLAARNCLVGENHVVKVADFGLSRLMTGDTYTAHAGAKFPIKWTAPESLAYNTFSIKSDVWAFGVLLWEIATYGMSPYPGIDLSQVYDLLEKGYRMEQPEGCPPKVYELMRACWKWSPADRPSFAETHQAFETMFHDSSISEEVAEELGRAASSSSVVPYLPRLPILPSKTRTLKKQVENKENIEGAQDATENSASSLAPGFIRGAQASSGSPALPRKQRDKSPSSLLEDAKETCFTRDRKGGFFSSFMKKRNAPTPPKRSSSFREMENQPHKKYELTGLPEQDRMAMTLPRNCQRSKLQLERTVSTSSQPEENVDRANDMLPKKSEESAAPSRERPKAKLLPRGATALPLRTPSGDLAITEKDPPGVGVAGVAAAPKGKEKNGGARLGMAGVPEDGEQPGWPSPAKAAPVLPTTHNHKVPVLISPTLKHTPADVQLIGTDSQGNKFKLLSEHQVTSSGDKDRPRRVKPKCAPPPPPVMRLLQHPSICSDPTEEPTALTAGQSTSETQEGGKKAALGAVPISGKAGRPVMPPPQVPLPTSSISPAKMANGTAGTKVALRKTKQAAEKISADKISKEALLECADLLSSALTEPVPNSQLVDTGHQLLDYCSGYVDCIPQTRNKFAFREAVSKLELSLQELQVSSAAAGVPGTNPVLNNLLSCVQEISDVVQR

SEQ ID NO: 894 - protein, 1161 aa, Homo sapiens
  Payload ID: 150;
  Gene Symbol: ABL2;
  Gene Name: ABL proto-oncogene 2, non-receptor tyr kinase;
  Uniprot ID:  P42684;
  ENSP ID: ENSP00000356595
MGQQVGRVGEAPGLQQPQPRGIRGSSAARPSGRRRDPAGRTTETGFNIFTQHEALHRPYGCDVEPQALNEAIRWSSKENLLGATESDPNLFVALYDFVASGDNTLSITKGEKLRVLGYNQNGEWSEVRSKNGQGWVPSNYITPVNSLEKHSWYHGPVSRSAAEYLLSSLINGSFLVRESESSPGQLSISLRYEGRVYHYRINTTADGKVYVTAESRFSTLAELVHHHSTVADGLVTTLHYPAPKCNKPTVYGVSPIHDKWEMERTDITMKHKLGGGQYGEVYVGVWKKYSLTVAVKTLKEDTMEVEEFLKEAAVMKEIKHPNLVQLLGVCTLEPPFYIVTEYMPYGNLLDYLRECNREEVTAVVLLYMATQISSAMEYLEKKNFIHRDLAARNCLVGENHVVKVADFGLSRLMTGDTYTAHAGAKFPIKWTAPESLAYNTFSIKSDVWAFGVLLWEIATYGMSPYPGIDLSQVYDLLEKGYRMEQPEGCPPKVYELMRACWKWSPADRPSFAETHQAFETMFHDSSISEEVAEELGRAASSSSVVPYLPRLPILPSKTRTLKKQVENKENIEGAQDATENSASSLAPGFIRGAQASSGSPALPRKQRDKSPSSLLEDAKETCFTRDRKGGFFSSFMKKRNAPTPPKRSSSFREMENQPHKKYELTGNFSSVASLQHADGFSFTPAQQEANLVPPKCYGGSFAQRNLCNDDGGGGGGSGTAGGGWSGITGFFTPRLIKKTLGLRAGKPTASDDTSKPFPRSNSTSSMSSGLPEQDRMAMTLPRNCQRSKLQLERTVSTSSQPEENVDRANDMLPKKSEESAAPSRERPKAKLLPRGATALPLRTPSGDLAITEKDPPGVGVAGVAAAPKGKEKNGGARLGMAGVPEDGEQPGWPSPAKAAPVLPTTHNHKVPVLISPTLKHTPADVQLIGTDSQGNKFKLLSEHQVTSSGDKDRPRRVKPKCAPPPPPVMRLLQHPSICSDPTEEPTALTAGQSTSETQEGGKKAALGAVPISGKAGRPVMPPPQVPLPTSSISPAKMANGTAGTKVALRKTKQAAEKISADKISKEALLECADLLSSALTEPVPNSQLVDTGHQLLDYCSGYVDCIPQTRNKFAFREAVSKLELSLQELQVSSAAAGVPGTNPVLNNLLSCVQEISDVVQR

SEQ ID NO: 895 - protein, 542 aa, Homo sapiens
  Payload ID: 150;
  Gene Symbol: ABL2;
  Gene Name: ABL proto-oncogene 2, non-receptor tyr kinase;
  Uniprot ID:  P42684;
  ENSP ID: ENSP00000375897
MGQQVGRVGEAPGLQQPQPRGIRGSSAARPSGRRRDPAGRTTETGFNIFTQHEALHRPYGCDVEPQALNEAIRWSSKENLLGATESDPNLFVALYDFVASGDNTLSITKGEKLRVLGYNQNGEWSEVRSKNGQGWVPSNYITPVNSLEKHSWYHGPVSRSAAEYLLSSLINGSFLVRESESSPGQLSISLRYEGRVYHYRINTTADGKVYVTAESRFSTLAELVHHHSTVADGLVTTLHYPAPKCNKPTVYGVSPIHDKWEMERTDITMKHKLGGGQYGEVYVGVWKKYSLTVAVKTLKEDTMEVEEFLKEAAVMKEIKHPNLVQLLGVCTLEPPFYIVTEYMPYGNLLDYLRECNREEVTAVVLLYMATQISSAMEYLEKKNFIHRDLAARNCLVGENHVVKVADFGLSRLMTGDTYTAHAGAKFPIKWTAPESLAYNTFSIKSDVWAFGVLLWEIATYGMSPYPGIDLSQVYDLLEKGYRMEQPEGCPPKVYELMRACWKWSPADRPSFAETHQAFETMFHDSSISEVLLHCANQTCITL

SEQ ID NO: 896 - protein, 1058 aa, Homo sapiens
  Payload ID: 150;
  Gene Symbol: ABL2;
  Gene Name: ABL proto-oncogene 2, non-receptor tyr kinase;
  Uniprot ID:  P42684;
  ENSP ID: ENSP00000423413
MGQQVGRVGEAPGLQQPQPRGIRGSSAARPSGRRRDPAGRTTETGFNIFTQHEALHRPYGCDVEPQALNEAIRWSSKENLLGATESDPNLFVALYDFVASGDNTLSITKGEKLRVLGYNQNGEWSEVRSKNGQGWVPSNYITPVNSLEKHSWYHGPVSRSAAEYLLSSLINGSFLVRESESSPGQLSISLRYEGRVYHYRINTTADGKVYVTAESRFSTLAELVHHHSTVADGLVTTLHYPAPKCNKPTVYGVSPIHDKWEMERTDITMKHKLGGGQYGEVYVGVWKKYSLTVAVKTLKEDTMEVEEFLKEAAVMKEIKHPNLVQLLGVCTLEPPFYIVTEYMPYGNLLDYLRECNREEVTAVVLLYMATQISSAMEYLEKKNFIHRDLAARNCLVGENHVVKVADFGLSRLMTGDTYTAHAGAKFPIKWTAPESLAYNTFSIKSDVWAFGVLLWEIATYGMSPYPGIDLSQVYDLLEKGYRMEQPEGCPPKVYELMRACWKWSPADRPSFAETHQAFETMFHDSSISEEVAEELGRAASSSSVVPYLPRLPILPSKTRTLKKQVENKENIEGAQDATENSASSLAPGFIRGAQASSGSPALPRKQRDKSPSSLLEDAKETCFTRDRKGGFFSSFMKKRNAPTPPKRSSSFREMENQPHKKYELTGLPEQDRMAMTLPRNCQRSKLQLERTVSTSSQPEENVDRANDMLPKKSEESAAPSRERPKAKLLPRGATALPLRTPSGDLAITEKDPPGVGVAGVAAAPKGKEKNGGARLGMAGVPEDGEQPGWPSPAKAAPVLPTTHNHKVPVLISPTLKHTPADVQLIGTDSQGNKFKLLSEHQVTSSGDKDRPRRVKPKCAPPPPPVMRLLQHPSICSDPTEEPTALTAGQSTSETQEGGKKAALGAVPISGKAGRPVMPPPQVPLPTSSISPAKMANGTAGTKVALRKTKQAAEKISADKISKEALLECADLLSSALTEPVPNSQLVDTGHQLLDYCSGYVDCIPQTRNKFAFREAVSKLELSLQELQVSSAAAGVPGTNPVLNNLLSCVQEISDVVQR

SEQ ID NO: 897 - protein, 1167 aa, Homo sapiens
  Payload ID: 150;
  Gene Symbol: ABL2;
  Gene Name: ABL proto-oncogene 2, non-receptor tyr kinase;
  Uniprot ID:  P42684;
  ENSP ID: ENSP00000423578
MVLGTVLLPPNSYGRDQDTSLCCLCTEASESALPDLTDHFASCVEDGFEGDKTGGSSPEALHRPYGCDVEPQALNEAIRWSSKENLLGATESDPNLFVALYDFVASGDNTLSITKGEKLRVLGYNQNGEWSEVRSKNGQGWVPSNYITPVNSLEKHSWYHGPVSRSAAEYLLSSLINGSFLVRESESSPGQLSISLRYEGRVYHYRINTTADGKVYVTAESRFSTLAELVHHHSTVADGLVTTLHYPAPKCNKPTVYGVSPIHDKWEMERTDITMKHKLGGGQYGEVYVGVWKKYSLTVAVKTLKEDTMEVEEFLKEAAVMKEIKHPNLVQLLGVCTLEPPFYIVTEYMPYGNLLDYLRECNREEVTAVVLLYMATQISSAMEYLEKKNFIHRDLAARNCLVGENHVVKVADFGLSRLMTGDTYTAHAGAKFPIKWTAPESLAYNTFSIKSDVWAFGVLLWEIATYGMSPYPGIDLSQVYDLLEKGYRMEQPEGCPPKVYELMRACWKWSPADRPSFAETHQAFETMFHDSSISEEVAEELGRAASSSSVVPYLPRLPILPSKTRTLKKQVENKENIEGAQDATENSASSLAPGFIRGAQASSGSPALPRKQRDKSPSSLLEDAKETCFTRDRKGGFFSSFMKKRNAPTPPKRSSSFREMENQPHKKYELTGNFSSVASLQHADGFSFTPAQQEANLVPPKCYGGSFAQRNLCNDDGGGGGGSGTAGGGWSGITGFFTPRLIKKTLGLRAGKPTASDDTSKPFPRSNSTSSMSSGLPEQDRMAMTLPRNCQRSKLQLERTVSTSSQPEENVDRANDMLPKKSEESAAPSRERPKAKLLPRGATALPLRTPSGDLAITEKDPPGVGVAGVAAAPKGKEKNGGARLGMAGVPEDGEQPGWPSPAKAAPVLPTTHNHKVPVLISPTLKHTPADVQLIGTDSQGNKFKLLSEHQVTSSGDKDRPRRVKPKCAPPPPPVMRLLQHPSICSDPTEEPTALTAGQSTSETQEGGKKAALGAVPISGKAGRPVMPPPQVPLPTSSISPAKMANGTAGTKVALRKTKQAAEKISADKISKEALLECADLLSSALTEPVPNSQLVDTGHQLLDYCSGYVDCIPQTRNKFAFREAVSKLELSLQELQVSSAAAGVPGTNPVLNNLLSCVQEISDVVQR

SEQ ID NO: 898 - protein, 1079 aa, Homo sapiens
  Payload ID: 150;
  Gene Symbol: ABL2;
  Gene Name: ABL proto-oncogene 2, non-receptor tyr kinase;
  Uniprot ID:  P42684;
  ENSP ID: ENSP00000424697
MGQQVGRVGEAPGLQQPQPRGIRGSSAARPSGRRRDPAGRTTETGFNIFTQHDHFASCVEDGFEGDKTGGSSPEALHRPYGCDVEPQALNEAIRWSSKENLLGATESDPNLFVALYDFVASGDNTLSITKGEKLRVLGYNQNGEWSEVRSKNGQGWVPSNYITPVNSLEKHSWYHGPVSRSAAEYLLSSLINGSFLVRESESSPGQLSISLRYEGRVYHYRINTTADGKVYVTAESRFSTLAELVHHHSTVADGLVTTLHYPAPKCNKPTVYGVSPIHDKWEMERTDITMKHKLGGGQYGEVYVGVWKKYSLTVAVKTLKEDTMEVEEFLKEAAVMKEIKHPNLVQLLGVCTLEPPFYIVTEYMPYGNLLDYLRECNREEVTAVVLLYMATQISSAMEYLEKKNFIHRDLAARNCLVGENHVVKVADFGLSRLMTGDTYTAHAGAKFPIKWTAPESLAYNTFSIKSDVWAFGVLLWEIATYGMSPYPGIDLSQVYDLLEKGYRMEQPEGCPPKVYELMRACWKWSPADRPSFAETHQAFETMFHDSSISEEVAEELGRAASSSSVVPYLPRLPILPSKTRTLKKQVENKENIEGAQDATENSASSLAPGFIRGAQASSGSPALPRKQRDKSPSSLLEDAKETCFTRDRKGGFFSSFMKKRNAPTPPKRSSSFREMENQPHKKYELTGLPEQDRMAMTLPRNCQRSKLQLERTVSTSSQPEENVDRANDMLPKKSEESAAPSRERPKAKLLPRGATALPLRTPSGDLAITEKDPPGVGVAGVAAAPKGKEKNGGARLGMAGVPEDGEQPGWPSPAKAAPVLPTTHNHKVPVLISPTLKHTPADVQLIGTDSQGNKFKLLSEHQVTSSGDKDRPRRVKPKCAPPPPPVMRLLQHPSICSDPTEEPTALTAGQSTSETQEGGKKAALGAVPISGKAGRPVMPPPQVPLPTSSISPAKMANGTAGTKVALRKTKQAAEKISADKISKEALLECADLLSSALTEPVPNSQLVDTGHQLLDYCSGYVDCIPQTRNKFAFREAVSKLELSLQELQVSSAAAGVPGTNPVLNNLLSCVQEISDVVQR

SEQ ID NO: 899 - protein, 1043 aa, Homo sapiens
  Payload ID: 150;
  Gene Symbol: ABL2;
  Gene Name: ABL proto-oncogene 2, non-receptor tyr kinase;
  Uniprot ID:  P42684;
  ENSP ID: ENSP00000426831
MVLGTVLLPPNSYGRDQDTSLCCLCTEASESALPDLTEALHRPYGCDVEPQALNEAIRWSSKENLLGATESDPNLFVALYDFVASGDNTLSITKGEKLRVLGYNQNGEWSEVRSKNGQGWVPSNYITPVNSLEKHSWYHGPVSRSAAEYLLSSLINGSFLVRESESSPGQLSISLRYEGRVYHYRINTTADGKVYVTAESRFSTLAELVHHHSTVADGLVTTLHYPAPKCNKPTVYGVSPIHDKWEMERTDITMKHKLGGGQYGEVYVGVWKKYSLTVAVKTLKEDTMEVEEFLKEAAVMKEIKHPNLVQLLGVCTLEPPFYIVTEYMPYGNLLDYLRECNREEVTAVVLLYMATQISSAMEYLEKKNFIHRDLAARNCLVGENHVVKVADFGLSRLMTGDTYTAHAGAKFPIKWTAPESLAYNTFSIKSDVWAFGVLLWEIATYGMSPYPGIDLSQVYDLLEKGYRMEQPEGCPPKVYELMRACWKWSPADRPSFAETHQAFETMFHDSSISEEVAEELGRAASSSSVVPYLPRLPILPSKTRTLKKQVENKENIEGAQDATENSASSLAPGFIRGAQASSGSPALPRKQRDKSPSSLLEDAKETCFTRDRKGGFFSSFMKKRNAPTPPKRSSSFREMENQPHKKYELTGLPEQDRMAMTLPRNCQRSKLQLERTVSTSSQPEENVDRANDMLPKKSEESAAPSRERPKAKLLPRGATALPLRTPSGDLAITEKDPPGVGVAGVAAAPKGKEKNGGARLGMAGVPEDGEQPGWPSPAKAAPVLPTTHNHKVPVLISPTLKHTPADVQLIGTDSQGNKFKLLSEHQVTSSGDKDRPRRVKPKCAPPPPPVMRLLQHPSICSDPTEEPTALTAGQSTSETQEGGKKAALGAVPISGKAGRPVMPPPQVPLPTSSISPAKMANGTAGTKVALRKTKQAAEKISADKISKEALLECADLLSSALTEPVPNSQLVDTGHQLLDYCSGYVDCIPQTRNKFAFREAVSKLELSLQELQVSSAAAGVPGTNPVLNNLLSCVQEISDVVQR

SEQ ID NO: 900 - protein, 1182 aa, Homo sapiens
  Payload ID: 150;
  Gene Symbol: ABL2;
  Gene Name: ABL proto-oncogene 2, non-receptor tyr kinase;
  Uniprot ID:  P42684;
  ENSP ID: ENSP00000427562
MGQQVGRVGEAPGLQQPQPRGIRGSSAARPSGRRRDPAGRTTETGFNIFTQHDHFASCVEDGFEGDKTGGSSPEALHRPYGCDVEPQALNEAIRWSSKENLLGATESDPNLFVALYDFVASGDNTLSITKGEKLRVLGYNQNGEWSEVRSKNGQGWVPSNYITPVNSLEKHSWYHGPVSRSAAEYLLSSLINGSFLVRESESSPGQLSISLRYEGRVYHYRINTTADGKVYVTAESRFSTLAELVHHHSTVADGLVTTLHYPAPKCNKPTVYGVSPIHDKWEMERTDITMKHKLGGGQYGEVYVGVWKKYSLTVAVKTLKEDTMEVEEFLKEAAVMKEIKHPNLVQLLGVCTLEPPFYIVTEYMPYGNLLDYLRECNREEVTAVVLLYMATQISSAMEYLEKKNFIHRDLAARNCLVGENHVVKVADFGLSRLMTGDTYTAHAGAKFPIKWTAPESLAYNTFSIKSDVWAFGVLLWEIATYGMSPYPGIDLSQVYDLLEKGYRMEQPEGCPPKVYELMRACWKWSPADRPSFAETHQAFETMFHDSSISEEVAEELGRAASSSSVVPYLPRLPILPSKTRTLKKQVENKENIEGAQDATENSASSLAPGFIRGAQASSGSPALPRKQRDKSPSSLLEDAKETCFTRDRKGGFFSSFMKKRNAPTPPKRSSSFREMENQPHKKYELTGNFSSVASLQHADGFSFTPAQQEANLVPPKCYGGSFAQRNLCNDDGGGGGGSGTAGGGWSGITGFFTPRLIKKTLGLRAGKPTASDDTSKPFPRSNSTSSMSSGLPEQDRMAMTLPRNCQRSKLQLERTVSTSSQPEENVDRANDMLPKKSEESAAPSRERPKAKLLPRGATALPLRTPSGDLAITEKDPPGVGVAGVAAAPKGKEKNGGARLGMAGVPEDGEQPGWPSPAKAAPVLPTTHNHKVPVLISPTLKHTPADVQLIGTDSQGNKFKLLSEHQVTSSGDKDRPRRVKPKCAPPPPPVMRLLQHPSICSDPTEEPTALTAGQSTSETQEGGKKAALGAVPISGKAGRPVMPPPQVPLPTSSISPAKMANGTAGTKVALRKTKQAAEKISADKISKEALLECADLLSSALTEPVPNSQLVDTGHQLLDYCSGYVDCIPQTRNKFAFREAVSKLELSLQELQVSSAAAGVPGTNPVLNNLLSCVQEISDVVQR

SEQ ID NO: 901 - protein, 496 aa, Homo sapiens
  Payload ID: 151;
  Gene Symbol: ABI1;
  Gene Name: abl-interactor 1;
  Uniprot ID:  Q8IZP0;
  ENSP ID: ENSP00000279599
MAELQMLLEEEIPSGKRALIESYQNLTRVADYCENNYIQRHGFAVLLCLLSNSWPQATDKRKALEETKAYTTQSLASVAYQINALANNVLQLLDIQASQLRRMESSINHISQTVDIHKEKVARREIGILTTNKNTSRTHKIIAPANMERPVRYIRKPIDYTVLDDVGHGVKWLKAKHGNNQPARTGTLSRTNPPTQKPPSPPMSGRGTLGRNTPYKTLEPVKPPTVPNDYMTSPARLGSQHSPGRTASLNQRPRTHSGSSGGSGSRENSGSSSIGIPIAVPTPSPPTIGPENISVPPPSGAPPAPPLAPLLPVSTVIAAPGSAPGSQYGTMTRQISRHNSTTSSTSSGGYRRTPSVTAQFSAQPHVNGGPLYSQNSIADSPTPPPPPPPDDIPMFDDSPPPPPPPPVDYEDEEAAVVQYNDPYADGDPAWAPKNYIEKVVAIYDYTKDKDDELSFMEGAIIYVIKKNDDGWYEGVCNRVTGLFPGNYVESIMHYTD

SEQ ID NO: 902 - protein, 480 aa, Homo sapiens
  Payload ID: 151;
  Gene Symbol: ABI1;
  Gene Name: abl-interactor 1;
  Uniprot ID:  Q8IZP0;
  ENSP ID: ENSP00000352114
MAELQMLLEEEIPSGKRALIESYQNLTRVADYCENNYIQATDKRKALEETKAYTTQSLASVAYQINALANNVLQLLDIQASQLRRMESSINHISQTVDIHKEKVARREIGILTTNKNTSRTHKIIAPANMERPVRYIRKPIDYTVLDDVGHGVKWLKAKHGNNQPARTGTLSRTNPPTQKPPSPPMSGRGTLGRNTPYKTLEPVKPPTVPNDYMTSPARLGSQHSPGRTASLNQRPRTHSGSSGGSGSRENSGSSSIGIPIAVPTPSPPTIGPAPGSAPGSQYGTMTRQISRHNSTTSSTSSGGYRRTPSVTAQFSAQPHVNGGPLYSQNSISIAPPPPPMPQLTPQIPLTGFVARVQENIADSPTPPPPPPPDDIPMFDDSPPPPPPPPVDYEDEEAAVVQYNDPYADGDPAWAPKNYIEKVVAIYDYTKDKDDELSFMEGAIIYVIKKNDDGWYEGVCNRVTGLFPGNYVESIMHYTD

SEQ ID NO: 903 - protein, 422 aa, Homo sapiens
  Payload ID: 151;
  Gene Symbol: ABI1;
  Gene Name: abl-interactor 1;
  Uniprot ID:  Q8IZP0;
  ENSP ID: ENSP00000365307
MAELQMLLEEEIPSGKRALIESYQNLTRVADYCENNYIQATDKRKALEETKAYTTQSLASVAYQINALANNVLQLLDIQASQLRRMESSINHISQTVDIHKEKVARREIGILTTNKNTSRTHKIIAPANMERPVRYIRKPIDYTVLDDVGHGVKWLKAKHGNNQPARTGTLSRTNPPTQKPPSPPMSGRGTLGRNTPYKTLEPVKPPTVPNDYMTSPARLGSQHSPGRTASLNQRPRTHSGSSGGSGSRENSGSSSIGIPIAVPTPSPPTIGPVSIAPPPPPMPQLTPQIPLTGFVARVQENIADSPTPPPPPPPDDIPMFDDSPPPPPPPPVDYEDEEAAVVQYNDPYADGDPAWAPKNYIEKVVAIYDYTKDKDDELSFMEGAIIYVIKKNDDGWYEGVCNRVTGLFPGNYVESIMHYTD

SEQ ID NO: 904 - protein, 452 aa, Homo sapiens
  Payload ID: 151;
  Gene Symbol: ABI1;
  Gene Name: abl-interactor 1;
  Uniprot ID:  Q8IZP0;
  ENSP ID: ENSP00000365308
MAELQMLLEEEIPSGKRALIESYQNLTRVADYCENNYIQATDKRKALEETKAYTTQSLASVAYQINALANNVLQLLDIQASQLRRMESSINHISQTVDIHKEKVARREIGILTTNKNTSRTHKIIAPANMERPVRYIRKPIDYTVLDDVGHGVKWLKAKHGNNQPARTGTLSRTNPPTQKPPSPPMSGRGTLGRNTPYKTLEPVKPPTVPNDYMTSPARLGSQHSPGRTASLNQRPRTHSGSSGGSGSRENSGSSSIGIPIAVPTPSPPTIGPAAPGSAPGSQYGTMTRQISRHNSTTSSTSSGGYRRTPSVTAQFSAQPHVNGGPLYSQNSIADSPTPPPPPPPDDIPMFDDSPPPPPPPPVDYEDEEAAVVQYNDPYADGDPAWAPKNYIEKVVAIYDYTKDKDDELSFMEGAIIYVIKKNDDGWYEGVCNRVTGLFPGNYVESIMHYTD

SEQ ID NO: 905 - protein, 476 aa, Homo sapiens
  Payload ID: 151;
  Gene Symbol: ABI1;
  Gene Name: abl-interactor 1;
  Uniprot ID:  Q8IZP0;
  ENSP ID: ENSP00000365309
MAELQMLLEEEIPSGKRALIESYQNLTRVADYCENNYIQATDKRKALEETKAYTTQSLASVAYQINALANNVLQLLDIQASQLRRMESSINHISQTVDIHKEKVARREIGILTTNKNTSRTHKIIAPANMERPVRYIRKPIDYTVLDDVGHGVKHGNNQPARTGTLSRTNPPTQKPPSPPMSGRGTLGRNTPYKTLEPVKPPTVPNDYMTSPARLGSQHSPGRTASLNQRPRTHSGSSGGSGSRENSGSSSIGIPIAVPTPSPPTIGPAAPGSAPGSQYGTMTRQISRHNSTTSSTSSGGYRRTPSVTAQFSAQPHVNGGPLYSQNSISIAPPPPPMPQLTPQIPLTGFVARVQENIADSPTPPPPPPPDDIPMFDDSPPPPPPPPVDYEDEEAAVVQYNDPYADGDPAWAPKNYIEKVVAIYDYTKDKDDELSFMEGAIIYVIKKNDDGWYEGVCNRVTGLFPGNYVESIMHYTD

SEQ ID NO: 906 - protein, 481 aa, Homo sapiens
  Payload ID: 151;
  Gene Symbol: ABI1;
  Gene Name: abl-interactor 1;
  Uniprot ID:  Q8IZP0;
  ENSP ID: ENSP00000365310
MAELQMLLEEEIPSGKRALIESYQNLTRVADYCENNYIQATDKRKALEETKAYTTQSLASVAYQINALANNVLQLLDIQASQLRRMESSINHISQTVDIHKEKVARREIGILTTNKNTSRTHKIIAPANMERPVRYIRKPIDYTVLDDVGHGVKWLKAKHGNNQPARTGTLSRTNPPTQKPPSPPMSGRGTLGRNTPYKTLEPVKPPTVPNDYMTSPARLGSQHSPGRTASLNQRPRTHSGSSGGSGSRENSGSSSIGIPIAVPTPSPPTIGPAAPGSAPGSQYGTMTRQISRHNSTTSSTSSGGYRRTPSVTAQFSAQPHVNGGPLYSQNSISIAPPPPPMPQLTPQIPLTGFVARVQENIADSPTPPPPPPPDDIPMFDDSPPPPPPPPVDYEDEEAAVVQYNDPYADGDPAWAPKNYIEKVVAIYDYTKDKDDELSFMEGAIIYVIKKNDDGWYEGVCNRVTGLFPGNYVESIMHYTD

SEQ ID NO: 907 - protein, 508 aa, Homo sapiens
  Payload ID: 151;
  Gene Symbol: ABI1;
  Gene Name: abl-interactor 1;
  Uniprot ID:  Q8IZP0;
  ENSP ID: ENSP00000365312
MAELQMLLEEEIPSGKRALIESYQNLTRVADYCENNYIQATDKRKALEETKAYTTQSLASVAYQINALANNVLQLLDIQASQLRRMESSINHISQTVDIHKEKVARREIGILTTNKNTSRTHKIIAPANMERPVRYIRKPIDYTVLDDVGHGVKWLKAKHGNNQPARTGTLSRTNPPTQKPPSPPMSGRGTLGRNTPYKTLEPVKPPTVPNDYMTSPARLGSQHSPGRTASLNQRPRTHSGSSGGSGSRENSGSSSIGIPIAVPTPSPPTIGPENISVPPPSGAPPAPPLAPLLPVSTVIAAPGSAPGSQYGTMTRQISRHNSTTSSTSSGGYRRTPSVTAQFSAQPHVNGGPLYSQNSISIAPPPPPMPQLTPQIPLTGFVARVQENIADSPTPPPPPPPDDIPMFDDSPPPPPPPPVDYEDEEAAVVQYNDPYADGDPAWAPKNYIEKVVAIYDYTKDKDDELSFMEGAIIYVIKKNDDGWYEGVCNRVTGLFPGNYVESIMHYTD

SEQ ID NO: 908 - protein, 475 aa, Homo sapiens
  Payload ID: 151;
  Gene Symbol: ABI1;
  Gene Name: abl-interactor 1;
  ENSP ID: ENSP00000365330
MAELQMLLEEEIPSGKRALIESYQNLTRVADYCENNYIQATDKRKALEETKAYTTQSLASVAYQINALANNVLQLLDIQASQLRRMESSINHISQTVDIHKEKVARREIGILTTNKNTSRTHKIIAPANMERPVRYIRKPIDYTVLDDVGHGVKHGNNQPARTGTLSRTNPPTQKPPSPPMSGRGTLGRNTPYKTLEPVKPPTVPNDYMTSPARLGSQHSPGRTASLNQRPRTHSGSSGGSGSRENSGSSSIGIPIAVPTPSPPTIGPAPGSAPGSQYGTMTRQISRHNSTTSSTSSGGYRRTPSVTAQFSAQPHVNGGPLYSQNSISIAPPPPPMPQLTPQIPLTGFVARVQENIADSPTPPPPPPPDDIPMFDDSPPPPPPPPVDYEDEEAAVVQYNDPYADGDPAWAPKNYIEKVVAIYDYTKDKDDELSFMEGAIIYVIKKNDDGWYEGVCNRVTGLFPGNYVESIMHYTD

SEQ ID NO: 909 - protein, 446 aa, Homo sapiens
  Payload ID: 151;
  Gene Symbol: ABI1;
  Gene Name: abl-interactor 1;
  Uniprot ID:  Q8IZP0;
  ENSP ID: ENSP00000365336
MAELQMLLEEEIPSGKRALIESYQNLTRVADYCENNYIQATDKRKALEETKAYTTQSLASVAYQINALANNVLQLLDIQASQLRRMESSINHISQTVDIHKEKVARREIGILTTNKNTSRTHKIIAPANMERPVRYIRKPIDYTVLDDVGHGVKHGNNQPARTGTLSRTNPPTQKPPSPPMSGRGTLGRNTPYKTLEPVKPPTVPNDYMTSPARLGSQHSPGRTASLNQRPRTHSGSSGGSGSRENSGSSSIGIPIAVPTPSPPTIGPAPGSAPGSQYGTMTRQISRHNSTTSSTSSGGYRRTPSVTAQFSAQPHVNGGPLYSQNSIADSPTPPPPPPPDDIPMFDDSPPPPPPPPVDYEDEEAAVVQYNDPYADGDPAWAPKNYIEKVVAIYDYTKDKDDELSFMEGAIIYVIKKNDDGWYEGVCNRVTGLFPGNYVESIMHYTD

SEQ ID NO: 910 - protein, 451 aa, Homo sapiens
  Payload ID: 151;
  Gene Symbol: ABI1;
  Gene Name: abl-interactor 1;
  Uniprot ID:  Q8IZP0;
  ENSP ID: ENSP00000365340
MAELQMLLEEEIPSGKRALIESYQNLTRVADYCENNYIQATDKRKALEETKAYTTQSLASVAYQINALANNVLQLLDIQASQLRRMESSINHISQTVDIHKEKVARREIGILTTNKNTSRTHKIIAPANMERPVRYIRKPIDYTVLDDVGHGVKWLKAKHGNNQPARTGTLSRTNPPTQKPPSPPMSGRGTLGRNTPYKTLEPVKPPTVPNDYMTSPARLGSQHSPGRTASLNQRPRTHSGSSGGSGSRENSGSSSIGIPIAVPTPSPPTIGPAPGSAPGSQYGTMTRQISRHNSTTSSTSSGGYRRTPSVTAQFSAQPHVNGGPLYSQNSIADSPTPPPPPPPDDIPMFDDSPPPPPPPPVDYEDEEAAVVQYNDPYADGDPAWAPKNYIEKVVAIYDYTKDKDDELSFMEGAIIYVIKKNDDGWYEGVCNRVTGLFPGNYVESIMHYTD

SEQ ID NO: 911 - protein, 393 aa, Homo sapiens
  Payload ID: 151;
  Gene Symbol: ABI1;
  Gene Name: abl-interactor 1;
  ENSP ID: ENSP00000439646
MAELQMLLEEEIPSGKRALIESYQNLTRVADYCENNYIQATDKRKALEETKAYTTQSLASVAYQINALANNVLQLLDIQASQLRRMESSINHISQTVDIHKEKVARREIGILTTNKNTSRTHKIIAPANMERPVRYIRKPIDYTVLDDVGHGVKWLKAKHGNNQPARTGTLSRTNPPTQKPPSPPMSGRGTLGRNTPYKTLEPVKPPTVPNDYMTSPARLGSQHSPGRTASLNQRPRTHSGSSGGSGSRENSGSSSIGIPIAVPTPSPPTIGPVADSPTPPPPPPPDDIPMFDDSPPPPPPPPVDYEDEEAAVVQYNDPYADGDPAWAPKNYIEKVVAIYDYTKDKDDELSFMEGAIIYVIKKNDDGWYEGVCNRVTGLFPGNYVESIMHYTD

SEQ ID NO: 912 - protein, 329 aa, Homo sapiens
  Payload ID: 151;
  Gene Symbol: ABI1;
  Gene Name: abl-interactor 1;
  Uniprot ID:  Q8IZP0;
  ENSP ID: ENSP00000440101
MAELQMLLEEEIPSGKRALIESYQNLTRVADYCENNYIQATDKRKALEETKAYTTQSLASVAYQINALANNVLQLLDIQASQLRRMESSINHISQHGNNQPARTGTLSRTNPPTQKPPSPPMSGRGTLGRNTPYKTLEPVKPPTVPNDYMTSPARLGSQHSPGRTASLNQRPRTHSGSSGGSGSRENSGSSSIGIPIAVPTPSPPTIGPVADSPTPPPPPPPDDIPMFDDSPPPPPPPPVDYEDEEAAVVQYNDPYADGDPAWAPKNYIEKVVAIYDYTKDKDDELSFMEGAIIYVIKKNDDGWYEGVCNRVTGLFPGNYVESIMHYTD

SEQ ID NO: 913 - protein, 390 aa, Homo sapiens
  Payload ID: 152;
  Gene Symbol: ABI2;
  Gene Name: abl-interactor 2;
  ENSP ID: ENSP00000261016
MFFKSYLLKISILRQIRGVDLESTFVTKFGNNCSLRLNETVDIHKEKVARREIGILTTNKNTSRTHKIIAPANLERPVRYIRKPIDYTILDDIGHGVKVSTQNMKMGGLPRTTPPTQKPPSPPMSGKGTLGRHSPYRTLEPVRPPVVPNDYVPSPTRNMAPSQQSPVRTASVNQRNRTYSSSGSSGGSHPSSRSSSRENSGSGSVGVPIAVPTPSPPSVFPGHPVQFYSMNRPASRHTPPTIGGSLPYRRPPSITSQTSLQNQMNGGPFYSQNPVSDTPPPPPPVEEPVFDESPPPPPPPEDYEEEEAAVVEYSDPYAEEDPPWAPRSYLEKVVAIYDYTKDKEDELSFQEGAIIYVIKKNDDGWYEGVMNGVTGLFPGNYVESIMHYSE

SEQ ID NO: 914 - protein, 475 aa, Homo sapiens
  Payload ID: 152;
  Gene Symbol: ABI2;
  Gene Name: abl-interactor 2;
  Uniprot ID:  Q9NYB9;
  ENSP ID: ENSP00000261017
MAELQMLLEEEIPGGRRALFDSYTNLERVADYCENNYIQSADKQRALEETKAYTTQSLASVAYLINTLANNVLQMLDIQASQLRRMESSINHISQTVDIHKEKVARREIGILTTNKNTSRTHKIIAPANLERPVRYIRKPIDYTILDDIGHGVKVSTQNMKMGGLPRTTPPTQKPPSPPMSGKGTLGRHSPYRTLEPVRPPVVPNDYVPSPTRNMAPSQQSPVRTASVNQRNRTYSSSGSSGGSHPSSRSSSRENSGSGSVGVPIAVPTPSPPSVFPGHPVQFYSMNRPASRHTPPTIGGSLPYRRPPSITSQTSLQNQMNGGPFYSQNPVSLAPPPPSILQVTPQLPLMGFVARVQENISDTPPPPPPVEEPVFDESPPPPPPPEDYEEEEAAVVEYSDPYAEEDPPWAPRSYLEKVVAIYDYTKDKEDELSFQEGAIIYVIKKNDDGWYEGVMNGVTGLFPGNYVESIMHYSE

SEQ ID NO: 915 - protein, 513 aa, Homo sapiens
  Payload ID: 152;
  Gene Symbol: ABI2;
  Gene Name: abl-interactor 2;
  ENSP ID: ENSP00000261018
MAELQMLLEEEIPGGRRALFDSYTNLERVADYCENNYIQSADKQRALEETKAYTTQSLASVAYLINTLANNVLQMLDIQASQLRRMESSINHISQTVDIHKEKVARREIGILTTNKNTSRTHKIIAPANLERPVRYIRKPIDYTILDDIGHGVKWLLRFKVSTQNMKMGGLPRTTPPTQKPPSPPMSGKGTLGRHSPYRTLEPVRPPVVPNDYVPSPTRNMAPSQQSPVRTASVNQRNRTYSSSGSSGGSHPSSRSSSRENSGSGSVGVPIAVPTPSPPSVFPAPAGSAGTPPLPATSASAPAPLVPATVPSSTAPDAAAGGAQTLADGFTSPTPPVVSSTPPTGHPVQFYSMNRPASRHTPPTIGGSLPYRRPPSITSQTSLQNQMNGGPFYSQNPVSDTPPPPPPVEEPVFDESPPPPPPPEDYEEEEAAVVEYSDPYAEEDPPWAPRSYLEKVVAIYDYTKDKEDELSFQEGAIIYVIKKNDDGWYEGVMNGVTGLFPGNYVESIMHYSE

SEQ ID NO: 916 - protein, 513 aa, Homo sapiens; identical to SEQ ID NO: 915
  Payload ID: 152;
  Gene Symbol: ABI2;
  Gene Name: abl-interactor 2;
  ENSP ID: ENSP00000295851

SEQ ID NO: 917 - protein, 507 aa, Homo sapiens
  Payload ID: 152;
  Gene Symbol: ABI2;
  Gene Name: abl-interactor 2;
  ENSP ID: ENSP00000391433
MAELQMLLEEEIPGGRRALFDSYTNLERVADYCENNYIQSADKQRALEETKAYTTQSLASVAYLINTLANNVLQMLDIQASQLRRMESSINHISQTVDIHKEKVARREIGILTTNKNTSRTHKIIAPANLERPVRYIRKPIDYTILDDIGHGVKVSTQNMKMGGLPRTTPPTQKPPSPPMSGKGTLGRHSPYRTLEPVRPPVVPNDYVPSPTRNMAPSQQSPVRTASVNQRNRTYSSSGSSGGSHPSSRSSSRENSGSGSVGVPIAVPTPSPPSVFPAPAGSAGTPPLPATSASAPAPLVPATVPSSTAPDAAAGGAQTLADGFTSPTPPVVSSTPPTGHPVQFYSMNRPASRHTPPTIGGSLPYRRPPSITSQTSLQNQMNGGPFYSQNPVSDTPPPPPPVEEPVFDESPPPPPPPEDYEEEEAAVVEYSDPYAEEDPPWAPRSYLEKVVAIYDYTKDKEDELSFQEGAIIYVIKKNDDGWYEGVMNGVTGLFPGNYVESIMHYSE

SEQ ID NO: 918 - protein, 480 aa, Homo sapiens
  Payload ID: 152;
  Gene Symbol: ABI2;
  Gene Name: abl-interactor 2;
  ENSP ID: ENSP00000396249
MAELQMLLEEEIPGGRRALFDSYTNLERVADYCENNYIQSADKQRALEETKAYTTQSLASVAYLINTLANNVLQMLDIQASQLRRMESSINHISQTVDIHKEKVARREIGILTTNKNTSRTHKIIAPANLERPVRYIRKPIDYTILDDIGHGVKWLLRFKVSTQNMKMGGLPRTTPPTQKPPSPPMSGKGTLGRHSPYRTLEPVRPPVVPNDYVPSPTRNMAPSQQSPVRTASVNQRNRTYSSSGSSGGSHPSSRSSSRENSGSGSVGVPIAVPTPSPPSVFPDAAAGGAQTLADGFTSPTPPVVSSTPPTGHPVQFYSMNRPASRHTPPTIGGSLPYRRPPSITSQTSLQNQMNGGPFYSQNPVSDTPPPPPPVEEPVFDESPPPPPPPEDYEEEEAAVVEYSDPYAEEDPPWAPRSYLEKVVAIYDYTKDKEDELSFQEGAIIYVIKKNDDGWYEGVMNGVTGLFPGNYVESIMHYSE

SEQ ID NO: 919 - protein, 75 aa, Homo sapiens
  Payload ID: 152;
  Gene Symbol: ABI2;
  Gene Name: abl-interactor 2;
  ENSP ID: ENSP00000397850
MAELQMLLEEEIPGGRRALFDSYTNLERVADYCENNYIQRWGLGMSCRLECSGVIIAHCSLELLCSSDHPASVSQ

SEQ ID NO: 920 - protein, 44 aa, Homo sapiens
  Payload ID: 152;
  Gene Symbol: ABI2;
  Gene Name: abl-interactor 2;
  ENSP ID: ENSP00000398487
MAELQMLLEEEIPGGRRALFDSYTNLERVADYCENNYIQISREP

SEQ ID NO: 921 - protein, 59 aa, Homo sapiens
  Payload ID: 152;
  Gene Symbol: ABI2;
  Gene Name: abl-interactor 2;
  ENSP ID: ENSP00000399040
MAELQMLLEEEIPGGRRALFDSYTNLERVADYCENNYIQAFRFDSAYPLVLPDKEYMES

SEQ ID NO: 922 - protein, 293 aa, Homo sapiens
  Payload ID: 152;
  Gene Symbol: ABI2;
  Gene Name: abl-interactor 2;
  ENSP ID: ENSP00000404352
  MOD_RES (1)..(1): Any amino acid
XVSTQNMKMGGLPRTTPPTQKPPSPPMSGKGTLGRHSPYRTLEPVRPPVVPNDYVPSPTRNMAPSQQSPVRTASVNQRNRTYSSSGSSGGSHPSSRSSSRENSGSGSVGVPIAVPTPSPPSVFPGHPVQFYSMNRPASRHTPPTIGGSLPYRRPPSITSQTSLQNQMNGGPFYSQNPVSDTPPPPPPVEEPVFDESPPPPPPPEDYEEEEAAVVEYSDPYAEEDPPWAPRSYLEKVVAIYDYTKDKEDELSFQEGAIIYVIKKNDDGWYEGVMNGVTGLFPGNYVESIMHYSE

SEQ ID NO: 923 - protein, 53 aa, Homo sapiens
  Payload ID: 152;
  Gene Symbol: ABI2;
  Gene Name: abl-interactor 2;
  ENSP ID: ENSP00000405255
MAELQMLLEEEIPGGRRALFDSYTNLERVADYCENNYIQLLSIFPFCEVSVSR

SEQ ID NO: 924 - protein, 87 aa, Homo sapiens
  Payload ID: 152;
  Gene Symbol: ABI2;
  Gene Name: abl-interactor 2;
  ENSP ID: ENSP00000405801
MAELQMLLEEEIPGGRRALFDSYTNLERVADYCENNYIQSADKQRALEETKAYTTQSLASVAYLINTLANNVLQMLDIQVILYSSTA

SEQ ID NO: 925 - protein, 108 aa, Homo sapiens
  Payload ID: 152;
  Gene Symbol: ABI2;
  Gene Name: abl-interactor 2;
  ENSP ID: ENSP00000408334
MAELQMLLEEEIPGGRRALFDSYTNLERVADYCENNYIQSADKQRALEETKAYTTQSLASVAYLINTLANNVLQMLDIQASQLRRMESSINHISQMFSHTDGQLTEAN

SEQ ID NO: 926 - protein, 458 aa, Homo sapiens
  Payload ID: 152;
  Gene Symbol: ABI2;
  Gene Name: abl-interactor 2;
  ENSP ID: ENSP00000408898
MAELQMLLEEEIPGGRRALFDSYTNLERVADYCENNYIQSADKQRALEETKAYTTQSLASVAYLINTLANNVLQMLDIQASQLRRMESSINHISQTVDIHKEKVARREIGILTTNKNTSRTHKIIAPANLERPVRYIRKPIDYTILDDIGHGVKVSTQNMKMGGLPRTTPPTQKPPSPPMSGKGTLGSSGSSGGSHPSSRSSSRENSGSGSVGVPIAVPTPSPPSVFPAPAGSAGTPPLPATSASAPAPLVPATVPSSTAPDAAAGGAQTLADGFTSPTPPVVSSTPPTGHPVQFYSMNRPASRHTPPTIGGSLPYRRPPSITSQTSLQNQMNGGPFYSQNPVSDTPPPPPPVEEPVFDESPPPPPPPEDYEEEEAAVVEYSDPYAEEDPPWAPRSYLEKVVAIYDYTKDKEDELSFQEGAIIYVIKKNDDGWYEGVMNGVTGLFPGNYVESIMHYSE

SEQ ID NO: 927 - protein, 43 aa, Homo sapiens
  Payload ID: 152;
  Gene Symbol: ABI2;
  Gene Name: abl-interactor 2;
  ENSP ID: ENSP00000410509
  MOD_RES (1)..(1): Any amino acid
XQSLASVAYLINTLANNVLQMLDIQASQLRRMESSINHISQAN

SEQ ID NO: 928 - protein, 201 aa, Homo sapiens
  Payload ID: 152;
  Gene Symbol: ABI2;
  Gene Name: abl-interactor 2;
  ENSP ID: ENSP00000413375
  MOD_RES (1)..(1): Any amino acid
XLERPVRYIRKPIDYTILDDIGHGVKVSTQNMKMGGLPRTTPPTQKPPSPPMSGKGTLGRHSPYRTLEPVRPPVVPNDYVPSPTRNMAPSQQSPVRTASVNQRNRTYSSGSSGGSHPSSRSSSRENSGSGSVGVPIAVPTPSPPSVFPGHPVQFYSMNRPASRHTPPTIGGSLPYRRPPSITSQTSLQNQMNGGPFYSQNP

SEQ ID NO: 929 - protein, 486 aa, Homo sapiens
  Payload ID: 152;
  Gene Symbol: ABI2;
  Gene Name: abl-interactor 2;
  ENSP ID: ENSP00000414703
MAELQMLLEEEIPGGRRALFDSYTNLERVADYCENNYIQSADKQRALEETKAYTTQSLASVAYLINTLANNVLQMLDIQASQLRRMESSINHISQTVDIHKEKVARREIGILTTNKNTSRTHKIIAPANLERPVRYIRKPIDYTILDDIGHGVKWLLRFKVSTQNMKMGGLPRTTPPTQKPPSPPMSGKGTLGRHSPYRTLEPVRPPVVPNDYVPSPTRNMAPSQQSPVRTASVNQRNRTYSSSGSSGGSHPSSRSSSRENSGSGSVGVPIAVPTPSPPSVFPAPAGSAGTPPLPATSASAPAPLVPATVPSSTAPDAAAGGAQTLADGFTSPTPPVVSSTPPTGHPVQFYSMNRPASRHTPPTIGGSLPYRRPPSITSQTSLQNQMNGGPFYSQNPVSDTPPPPPPVEEPVFDESPPPPPPPEDYEEEEAAVVEYSDPYAEEDPPWAPRSYLEKVVAIYDYTKDKEDELSFQEGAIIYVIKKNDD

SEQ ID NO: 930 - protein, 1892 aa, Homo sapiens
  Payload ID: 153;
  Gene Symbol: ASPM;
  Gene Name: abnormal spindle microtubule assembly;
  Uniprot ID:  Q8IZT6;
  ENSP ID: ENSP00000294732
MANRRVGRGCWEVSPTERRPPAGLRGPAAEEEASSPPVLSLSHFCRSPFLCFGDVLLGASRTLSLALDNPNEEVAEVKISHFPAADLGFSVSQRCFVLQPKEKIVISVNWTPLKEGRVREIMTFLVNDVLKHQAILLGNAEEQKKKKRSLWDTIKKKKISASTSHNRRVSNIQNVNKTFSVSQKVDRVRSPLQACENLAMNEGGPPTENNSLILEENKIPISPISPAFNECHGATCLPLSVRRSTTYSSLHASENRELLNVHSANVSKVSFNEKAVTETSFNSVNVNGQRGENSKLSLTPNCSSTLNITQSQIHFLSPDSFVNNSHGANNELELVTCLSSDMFMKDNSQPVHLESTIAHEIYQKILSPDSFIKDNYGLNQDLESESVNPILSPNQFLKDNMAYMCTSQQTCKVPLSNENSQVPQSPEDWRKSEVSPRIPECQGSKSPKAIFEELVEMKSNYYSFIKQNNPKFSAVQDISSHSHNKQPKRRPILSATVTKRKATCTRENQTEINKPKAKRCLNSAVGEHEKVINNQKEKEDFHSYLPIIDPILSKSKSYKNEVTPSSTTASVARKRKSDGSMEDANVRVAITEHTEVREIKRIHFSPSEPKTSAVKKTKNVTTPISKRISNREKLNLKKKTDLSIFRTPISKTNKRTKPIIAVAQSSLTFIKPLKTDIPRHPMPFAAKNMFYDERWKEKQEQGFTWWLNFILTPDDFTVKTNISEVNAATLLLGIENQHKISVPRAPTKEEMSLRAYTARCRLNRLRRAACRLFTSEKMVKAIKKLEIEIEARRLIVRKDRHLWKDVGERQKVLNWLLSYNPLWLRIGLETTYGELISLEDNSDVTGLAMFILNRLLWNPDIAAEYRHPTVPHLYRDGHEEALSKFTLKKLLLLVCFLDYAKISRLIDHDPCLFCKDAEFKASKEILLAFSRDFLSGEGDLSRHLGLLGLPVNHVQTPFDEFDFAVTNLAVDLQCGVRLVRTMELLTQNWDLSKKLRIPAISRLQKMHNVDIVLQVLKSRGIELSDEHGNTILSKDIVDRHREKTLRLLWKIAFAFQVDISLNLDQLKEEIAFLKHTKSIKKTISLLSCHSDDLINKKKGKRDSGSFEQYSENIKLLMDWVNAVCAFYNKKVENFTVSFSDGRVLCYLIHHYHPCYVPFDAICQRTTQTVECTQTGSVVLNSSSESDDSSLDMSLKAFDHENTSELYKELLENEKKNFHLVRSAVRDLGGIPAMINHSDMSNTIPDEKVVITYLSFLCARLLDLRKEIRAARLIQTTWRKYKLKTDLKRHQEREKAARIIQLAVINFLAKQRLRKRVNAALVIQKYWRRVLAQRKLLMLKKEKLEKVQNKAASLIQAMWRRYRAKKYLCKVKAACKIQAWYRCWRAHKEYLAILKAVKIIQGCFYTKLERTRFLNVRASAIIIQRKWRAILPAKIAHEHFLMIKRHRAACLIQAHYRGYKGRQVFLRQKSAALIIQKYIRAREAGKHERIKYIEFKKSTVILQALVRGWLVRKRFLEQRAKIRLLHFTAAAYYHLNAVRIQRAYKLYLAVKNANKQVNSVICIQRWFRARLQEKRFIQKYHSIKKIEHEGQECLSQRNRAASVIQKAVRHFLLRKKQEKFTSGIIKIQALWRGYSWRKKNDCTKIKAIRLSLQVVNREIREENKLYKRTALALHYLLTYKHLSAILEALKHLEVVTRLSPLCCENMAQSGAISKIFVLIRSCNRSIPCMEVIRYAVQVLLNVSKYEKTTSAVYDVENCIDILLELLQIYREKPGNKVADKGGSIFTKTCCLLAILLKTTNRASDVRSRSKVVDRIYSLYKLTAHKHKMNTERILYKQKKNSSISIPFIPETPVRTRIVSRLKPDWVLRRDNMEEITNPLQAIQMVMDTLGIPY

SEQ ID NO: 931 - protein, 1142 aa, Homo sapiens
  Payload ID: 153;
  Gene Symbol: ASPM;
  Gene Name: abnormal spindle microtubule assembly;
  ENSP ID: ENSP00000356378
MSLRAYTARCRLNRLRRAACRLFTSEKMVKAIKKLEIEIEARRLIVRKDRHLWKDVGERQKVLNWLLSYNPLWLRIGLETTYGELISLEDNSDVTGLAMFILNRLLWNPDIAAEYRHPTVPHLYRDGHEEALSKFTLKKLLLLVCFLDYAKISRLIDHDPCLFCKDAEFKASKEILLAFSRDFLSGEGDLSRHLGLLGLPVNHVQTPFDEFDFAVTNLAVDLQCGVRLVRTMELLTQNWDLSKKLRIPAISRLQKMHNVDIVLQVLKSRGIELSDEHGNTILSKDIVDRHREKTLRLLWKIAFAFQVDISLNLDQLKEEIAFLKHTKSIKKTISLLSCHSDDLINKKKGKRDSGSFEQYSENIKLLMDWVNAVCAFYNKKVENFTVSFSDGRVLCYLIHHYHPCYVPFDAICQRTTQTVECTQTGSVVLNSSSESDDSSLDMSLKAFDHENTSELYKELLENEKKNFHLVRSAVRDLGGIPAMINHSDMSNTIPDEKVVITYLSFLCARLLDLRKEIRAARLIQTTWRKYKLKTDLKRHQEREKAARIIQLAVINFLAKQRLRKRVNAALVIQKYWRRVLAQRKLLMLKKEKLEKVQNKAASLIQAMWRRYRAKKYLCKVKAACKIQAWYRCWRAHKEYLAILKAVKIIQGCFYTKLERTRFLNVRASAIIIQRKWRAILPAKIAHEHFLMIKRHRAACLIQAHYRGYKGRQVFLRQKSAALIIQKYIRAREAGKHERIKYIEFKKSTVILQALVRGWLVRKRFLEQRAKIRLLHFTAAAYYHLNAVRIQRAYKLYLAVKNANKQVNSVICIQRWFRARLQEKRFIQKYHSIKKIEHEGQECLSQRNRAASVIQKAVRHFLLRKKQEKFTSGIIKIQALWRGYSWRKKNDCTKIKAIRLSLQVVNREIREENKLYKRTALALHYLLTYKHLSAILEALKHLEVVTRLSPLCCENMAQSGAISKIFVLIRSCNRSIPCMEVIRYAVQVLLNVSKYEKTTSAVYDVENCIDILLELLQIYREKPGNKVADKGGSIFTKTCCLLAILLKTTNRASDVRSRSKVVDRIYSLYKLTAHKHKMNTERILYKQKKNSSISIPFIPETPVRTRIVSRLKPDWVLRRDNMEEITNPLQAIQMVMDTLGIPY

SEQ ID NO: 932 - protein, 3477 aa, Homo sapiens
  Payload ID: 153;
  Gene Symbol: ASPM;
  Gene Name: abnormal spindle microtubule assembly;
  Uniprot ID:  Q8IZT6;
  ENSP ID: ENSP00000356379
MANRRVGRGCWEVSPTERRPPAGLRGPAAEEEASSPPVLSLSHFCRSPFLCFGDVLLGASRTLSLALDNPNEEVAEVKISHFPAADLGFSVSQRCFVLQPKEKIVISVNWTPLKEGRVREIMTFLVNDVLKHQAILLGNAEEQKKKKRSLWDTIKKKKISASTSHNRRVSNIQNVNKTFSVSQKVDRVRSPLQACENLAMNEGGPPTENNSLILEENKIPISPISPAFNECHGATCLPLSVRRSTTYSSLHASENRELLNVHSANVSKVSFNEKAVTETSFNSVNVNGQRGENSKLSLTPNCSSTLNITQSQIHFLSPDSFVNNSHGANNELELVTCLSSDMFMKDNSQPVHLESTIAHEIYQKILSPDSFIKDNYGLNQDLESESVNPILSPNQFLKDNMAYMCTSQQTCKVPLSNENSQVPQSPEDWRKSEVSPRIPECQGSKSPKAIFEELVEMKSNYYSFIKQNNPKFSAVQDISSHSHNKQPKRRPILSATVTKRKATCTRENQTEINKPKAKRCLNSAVGEHEKVINNQKEKEDFHSYLPIIDPILSKSKSYKNEVTPSSTTASVARKRKSDGSMEDANVRVAITEHTEVREIKRIHFSPSEPKTSAVKKTKNVTTPISKRISNREKLNLKKKTDLSIFRTPISKTNKRTKPIIAVAQSSLTFIKPLKTDIPRHPMPFAAKNMFYDERWKEKQEQGFTWWLNFILTPDDFTVKTNISEVNAATLLLGIENQHKISVPRAPTKEEMSLRAYTARCRLNRLRRAACRLFTSEKMVKAIKKLEIEIEARRLIVRKDRHLWKDVGERQKVLNWLLSYNPLWLRIGLETTYGELISLEDNSDVTGLAMFILNRLLWNPDIAAEYRHPTVPHLYRDGHEEALSKFTLKKLLLLVCFLDYAKISRLIDHDPCLFCKDAEFKASKEILLAFSRDFLSGEGDLSRHLGLLGLPVNHVQTPFDEFDFAVTNLAVDLQCGVRLVRTMELLTQNWDLSKKLRIPAISRLQKMHNVDIVLQVLKSRGIELSDEHGNTILSKDIVDRHREKTLRLLWKIAFAFQVDISLNLDQLKEEIAFLKHTKSIKKTISLLSCHSDDLINKKKGKRDSGSFEQYSENIKLLMDWVNAVCAFYNKKVENFTVSFSDGRVLCYLIHHYHPCYVPFDAICQRTTQTVECTQTGSVVLNSSSESDDSSLDMSLKAFDHENTSELYKELLENEKKNFHLVRSAVRDLGGIPAMINHSDMSNTIPDEKVVITYLSFLCARLLDLRKEIRAARLIQTTWRKYKLKTDLKRHQEREKAARIIQLAVINFLAKQRLRKRVNAALVIQKYWRRVLAQRKLLMLKKEKLEKVQNKAASLIQGYWRRYSTRQRFLKLKYYSIILQSRIRMIIAVTSYKRYLWATVTIQRHWRAYLRRKQDQQRYEMLKSSTLIIQSMFRKWKQRKMQSQVKATVILQRAFREWHLRKQAKEENSAIIIQSWYRMHKELRKYIYIRSCVVIIQKRFRCFQAQKLYKRRKESILTIQKYYKAYLKGKIERTNYLQKRAAAIQLQAAFRRLKAHNLCRQIRAACVIQSYWRMRQDRVRFLNLKKTIIKFQAHVRKHQQRQKYKKMKKAAVIIQTHFRAYIFAMKVLASYQKTRSAVIVLQSAYRGMQARKMYIHILTSVIKIQSYYRAYVSKKEFLSLKNATIKLQSTVKMKQTRKQYLHLRAAALFIQQCYRSKKIAAQKREEYMQMRESCIKLQAFVRGYLVRKQMRLQRKAVISLQSYFRMRKARQYYLKMYKAIIVIQNYYHAYKAQVNQRKNFLQVKKAATCLQAAYRGYKVRQLIKQQSIAALKIQSAFRGYNKRVKYQSVLQSIIKIQRWYRAYKTLHDTRTHFLKTKAAVISLQSAYRGWKVRKQIRREHQAALKIQSAFRMAKAQKQFRLFKTAALVIQQNFRAWTAGRKQCMEYIELRHAVLVLQSMWKGKTLRRQLQRQHKCAIIIQSYYRMHVQQKKWKIMKKAALLIQKYYRAYSIGREQNHLYLKTKAAVVTLQSAYRGMKVRKRIKDCNKAAVTIQSKYRAYKTKKKYATYRASAIIIQRWYRGIKITNHQHKEYLNLKKTAIKIQSVYRGIRVRRHIQHMHRAATFIKAMFKMHQSRISYHTMRKAAIVIQVRCRAYYQGKMQREKYLTILKAVKVLQASFRGVRVRRTLRKMQTAATLIQSNYRRYRQQTYFNKLKKITKTVQQRYWAMKERNIQFQRYNKLRHSVIYIQAIFRGKKARRHLKMMHIAATLIQRRFRTLMMRRRFLSLKKTAILIQRKYRAHLCTKHHLQFLQVQNAVIKIQSSYRRWMIRKRMREMHRAATFIQSTFRMHRLHMRYQALKQASVVIQQQYQANRAAKLQRQHYLRQRHSAVILQAAFRGMKTRRHLKSMHSSATLIQSRFRSLLVRRRFISLKKATIFVQRKYRATICAKHKLYQFLHLRKAAITIQSSYRRLMVKKKLQEMQRAAVLIQATFRMYRTYITFQTWKHASILIQQHYRTYRAAKLQRENYIRQWHSAVVIQAAYKGMKARQLLREKHKASIVIQSTYRMYRQYCFYQKLQWATKIIQEKYRANKKKQKVFQHNELKKETCVQAGFQDMNIKKQIQEQHQAAIIIQKHCKAFKIRKHYLHLRATVVSIQRRYRKLTAVRTQAVICIQSYYRGFKVRKDIQNMHRAATLIQSFYRMHRAKVDYETKKTAIVVIQNYYRLYVRVKTERKNFLAVQKSVRTIQAAFRGMKVRQKLKNVSEEKMAAIVNQSALCCYRSKTQYEAVQSEGVMIQEWYKASGLACSQEAEYHSQSRAAVTIQKAFCRMVTRKLETQKCAALRIQFFLQMAVYRRRFVQQKRAAITLQHYFRTWQTRKQFLLYRKAAVVLQNHYRAFLSAKHQRQVYLQIRSSVIIIQARSKGFIQKRKFQEIKNSTIKIQAMWRRYRAKKYLCKVKAACKIQAWYRCWRAHKEYLAILKAVKIIQGCFYTKLERTRFLNVRASAIIIQRKWRAILPAKIAHEHFLMIKRHRAACLIQAHYRGYKGRQVFLRQKSAALIIQKYIRAREAGKHERIKYIEFKKSTVILQALVRGWLVRKRFLEQRAKIRLLHFTAAAYYHLNAVRIQRAYKLYLAVKNANKQVNSVICIQRWFRARLQEKRFIQKYHSIKKIEHEGQECLSQRNRAASVIQKAVRHFLLRKKQEKFTSGIIKIQALWRGYSWRKKNDCTKIKAIRLSLQVVNREIREENKLYKRTALALHYLLTYKHLSAILEALKHLEVVTRLSPLCCENMAQSGAISKIFVLIRSCNRSIPCMEVIRYAVQVLLNVSKYEKTTSAVYDVENCIDILLELLQIYREKPGNKVADKGGSIFTKTCCLLAILLKTTNRASDVRSRSKVVDRIYSLYKLTAHKHKMNTERILYKQKKNSSISIPFIPETPVRTRIVSRLKPDWVLRRDNMEEITNPLQAIQMVMDTLGIPY

SEQ ID NO: 933 - protein, 1389 aa, Homo sapiens
  Payload ID: 153;
  Gene Symbol: ASPM;
  Gene Name: abnormal spindle microtubule assembly;
  ENSP ID: ENSP00000479244
MANRRVGRGCWEVSPTERRPPAGLRGPAAEEEASSPPVLSLSHFCRSPFLCFGDVLLGASRTLSLALDNPNEEVAEVKISHFPAADLGFSVSQRCFVLQPKEKIVISVNWTPLKEGRVREIMTFLVNDVLKHQAILLGNAEEQKKKKRSLWDTIKKKKISASTSHNRRVSNIQNVNKTFSVSQKVDRRYRQQTYFNKLKKITKTVQQRYWAMKERNIQFQRYNKLRHSVIYIQAIFRGKKARRHLKMMHIAATLIQRRFRTLMMRRRFLSLKKTAILIQRKYRAHLCTKHHLQFLQVQNAVIKIQSSYRRWMIRKRMREMHRAATFIQSTFRMHRLHMRYQALKQASVVIQQQYQANRAAKLQRQHYLRQRHSAVILQAAFRGMKTRRHLKSMHSSATLIQSRFRSLLVRRRFISLKKATIFVQRKYRATICAKHKLYQFLHLRKAAITIQSSYRRLMVKKKLQEMQRAAVLIQATFRMYRTYITFQTWKHASILIQQHYRTYRAAKLQRENYIRQWHSAVVIQAAYKGMKARQLLREKHKASIVIQSTYRMYRQYCFYQKLQWATKIIQEKYRANKKKQKVFQHNELKKETCVQAGFQDMNIKKQIQEQHQAAIIIQKHCKAFKIRKHYLHLRATVVSIQRRYRKLTAVRTQAVICIQSYYRGFKVRKDIQNMHRAATLIQSFYRMHRAKVDYETKKTAIVVIQNYYRLYVRVKTERKNFLAVQKSVRTIQAAFRGMKVRQKLKNVSEEKMAAIVNQSALCCYRSKTQYEAVQSEGVMIQEWYKASGLACSQEAEYHSQSRAAVTIQKAFCRMVTRKLETQKCAALRIQFFLQMAVYRRRFVQQKRAAITLQHYFRTWQTRKQFLLYRKAAVVLQNHYRAFLSAKHQRQVYLQIRSSVIIIQARSKGFIQKRKFQEIKNSTIKIQAMWRRYRAKKYLCKVKAACKIQAWYRCWRAHKEYLAILKAVKIIQGCFYTKLERTRFLNVRASAIIIQRKWRAILPAKIAHEHFLMIKRHRAACLIQAHYRGYKGRQVFLRQKSAALIIQKYIRAREAGKHERIKYIEFKKSTVILQALVRGWLVRKRFLEQRAKIRLLHFTAAAYYHLNAVRIQRAYKLYLAVKNANKQVNSVICIQRWFRARLQEKRFIQKYHSIKKIEHEGQECLSQRNRAASVIQKAVRHFLLRKKQEKFTSGIIKIQALWRGYSWRKKNDCTKIKAIRLSLQVVNREIREENKLYKRTALALHYLLTYKHLSAILEALKHLEVVTRLSPLCCENMAQSGAISKIFVLIRSCNRSIPCMEVIRYAVQVLLNVSKYEKTTSAVYDVENCIDILLELLQIYREKPGNKVADKGGSIFTKTCCLLAILLKTTNRASVSISQLPFFKIIFLWS

SEQ ID NO: 934 - protein, 373 aa, Homo sapiens
  Payload ID: 154;
  Gene Symbol: ABO;
  Gene Name: ABO blood group (transferase A, alpha 1-3-N-acetylgalactosaminyltransferase;
  transferase B, alpha 1-3-galactosyltransferase);
  ENSP ID: ENSP00000483018
MAEVLRTLAGKPKCHALRPMILFLIMLVLVLFGYGVLSPRSLMPGSLERGFCMAVREPDHLQRVSLPRMVYPQPKVLTPCRKDVLVTPWLAPIVWEGTFNIDILNEQFRLQNTTIGLTVFAIKKYVAFLKLFLETAEKHFMVGHRVHYYVFTDQPAAVPRVTLGTGRQLSVLEVRAYKRWQDVSMRRMEMISDFCERRFLSEVDYLVCVDVDMEFRDHVGVEILTPLFGTLHPGFYGSSREAFTYERRPQSQAYIPKDEGDFYYLGGFFGGSVQEVQRLTRACHQAMMVDQANGIEAVWHDESHLNKYLLRHKPTKVLSPEYLWDQQLLGWPAVLRKLRFTAVPKNHQAVRRERLPGALGGLPAAPSPSRPWF

SEQ ID NO: 935 - protein, 353 aa, Homo sapiens
  Payload ID: 154;
  Gene Symbol: ABO;
  Gene Name: ABO blood group (transferase A, alpha 1-3-N-acetylgalactosaminyltransferase;
  transferase B, alpha 1-3-galactosyltransferase);
  ENSP ID: ENSP00000483265
MAEVLRTLAGKPKCHALRPMILFLIMLVLVLFGYGVLSPRSLMPGSLERGFCMAVREPDHLQRVSLPRMVYPQPKVLTPCRKDVLVTPWLAPIVWEGTFNIDILNEQFRLQNTTIGLTVFAIKKYVAFLKLFLETAEKHFMVGHRVHYYVFTDQPAAVPRVTLGTGRQLSVLEVRAYKRWQDVSMRRMEMISDFCERRFLSEVDYLVCVDVDMEFRDHVGVEILTPLFGTLHPGFYGSSREAFTYERRPQSQAYIPKDEGDFYYLGGFFGGSVQEVQRLTRACHQAMMVDQANGIEAVWHDESHLNKYLLRHKPTKVLSPEYLWDQQLLGWPAVLRKLRFTAVPKNHQAVRNP

SEQ ID NO: 936 - protein, 81 aa, Homo sapiens
  Payload ID: 155;
  Gene Symbol: ABRACL;
  Gene Name: ABRA C-terminal like;
  Uniprot ID:  Q9P1F3;
  ENSP ID: ENSP00000356632
MNVDHEVNLLVEEIHRLGSKNADGKLSVKFGVLFRDDKCANLFEALVGTLKAAKRRKIVTYPGELLLQGVHDDVDIILLQD

SEQ ID NO: 937 - protein, 67 aa, Homo sapiens
  Payload ID: 155;
  Gene Symbol: ABRACL;
  Gene Name: ABRA C-terminal like;
  ENSP ID: ENSP00000418406
MNVDHEVNLLVEEIHRLGSKSKYLTEIEYFSWLYLGTGETGMLEKPMKGSPRASGHRSGSSAHSPRL

SEQ ID NO: 938 - protein, 1723 aa, Homo sapiens
  Payload ID: 156;
  Gene Symbol: AIM1;
  Gene Name: absent in melanoma 1;
  Uniprot ID:  Q9Y4K1;
  ENSP ID: ENSP00000358062
MEKRSSGRRSGRRRGSQKSTDSPGADAELPESAARDDAVFDDEVAPNAASDNASAEKKVKSPRAALDGGVASAASPESKPSPGTKGQLRGESDRSKQPPPASSPTKRKGRSRALEAVPAPPASGPRAPAKESPPKRVPDPSPVTKGTAAESGEEAARAIPRELPVKSSSLLPEIKPEHKRGPLPNHFNGRAEGGRSRELGRAAGAPGASDADGLKPRNHFGVGRSTVTTKVTLPAKPKHVELNLKTPKNLDSLGNEHNPFSQPVHKGNTATKISLFENKRTNSSPRHTDIRGQRNTPASSKTFVGRAKLNLAKKAKEMEQPEKKVMPNSPQNGVLVKETAIETKVTVSEEEILPATRGMNGDSSENQALGPQPNQDDKADVQTDAGCLSEPVASALIPVKDHKLLEKEDSEAADSKSLVLENVTDTAQDIPTTVDTKDLPPTAMPKPQHTFSDSQSPAESSPGPSLSLSAPAPGDVPKDTCVQSPISSFPCTDLKVSENHKGCVLPVSRQNNEKMPLLELGGETTPPLSTERSPEAVGSECPSRVLVQVRSFVLPVESTQDVSSQVIPESSEVREVQLPTCHSNEPEVVSVASCAPPQEEVLGNEHSHCTAELAAKSGPQVIPPASEKTLPIQAQSQGSRTPLMAESSPTNSPSSGNHLATPQRPDQTVTNGQDSPASLLNISAGSDDSVFDSSSDMEKFTEIIKQMDSAVCMPMKRKKARMPNSPAPHFAMPPIHEDHLEKVFDPKVFTFGLGKKKESQPEMSPALHLMQNLDTKSKLRPKRASAEQSVLFKSLHTNTNGNSEPLVMPEINDKENRDVTNGGIKRSRLEKSALFSSLLSSLPQDKIFSPSVTSVNTMTTAFSTSQNGSLSQSSVSQPTTEGAPPCGLNKEQSNLLPDNSLKVFNFNSSSTSHSSLKSPSHMEKYPQKEKTKEDLDSRSNLHLPETKFSELSKLKNDDMEKANHIESVIKSNLPNCANSDTDFMGLFKSSRYDPSISFSGMSLSDTMTLRGSVQNKLNPRPGKVVIYSEPDVSEKCIEVFSDIQDCSSWSLSPVILIKVVRGCWILYEQPNFEGHSIPLEEGELELSGLWGIEDILERHEEAESDKPVVIGSIRHVVQDYRVSHIDLFTEPEGLGILSSYFDDTEEMQGFGVMQKTCSMKVHWGTWLIYEEPGFQGVPFILEPGEYPDLSFWDTEEAYIGSMRPLKMGGRKVEFPTDPKVVVYEKPFFEGKCVELETGMCSFVMEGGETEEATGDDHLPFTSVGSMKVLRGIWVAYEKPGFTGHQYLLEEGEYRDWKAWGGYNGELQSLRPILGDFSNAHMIMYSEKNFGSKGSSIDVLGIVANLKETGYGVKTQSINVLSGVWVAYENPDFTGEQYILDKGFYTSFEDWGGKNCKISSVQPICLDSFTGPRRRNQIHLFSEPQFQGHSQSFEETTSQIDDSFSTKSCRVSGGSWVVYDGENFTGNQYVLEEGHYPCLSAMGCPPGATFKSLRFIDVEFSEPTIILFEREDFKGKKIELNAETVNLRSLGFNTQIRSVQVIGGIWVTYEYGSYRGRQFLLSPAEVPNWYEFSGCRQIGSLRPFVQKRIYFRLRNKATGLFMSTNGNLEDLKLLRIQVMEDVGADDQIWIYQEGCIKCRIAEDCCLTIVGSLVTSGSKLGLALDQNADSQFWSLKSDGRIYSKLKPNLVLDIKGGTQYDQNHIILNTVSKEKFTQVWEAMVLYT

SEQ ID NO: 939 - protein, 316 aa, Homo sapiens
  Payload ID: 156;
  Gene Symbol: AIM1;
  Gene Name: absent in melanoma 1;
  ENSP ID: ENSP00000391419
MQKPKTVAWENLGPEMSALGTAFSREGGRKVEFPTDPKVVVYEKPFFEGKCVELETGMCSFVMEGGETEEATGDDHLPFTSVGSMKVLRGIWVAYEKPGFTGHQYLLEEGEYRDWKAWGGYNGELQSLRPILGDFSNAHMIMYSEKNFGSKGSSIDVLGIVANLKETGYGVKTQSINVLSGVWVAYENPDFTGEQYILDKGFYTSFEDWGGKNCKISSVQPICLDSFTGPRRRNQIHLFSEPQFQGHSQSFEETTSQIDDSFSTKSCRVSGGSWVVYDGENFTGNQYVLEEGHYPCLSAMGCPPGATFKSLRFIDV

SEQ ID NO: 940 - protein, 2131 aa, Homo sapiens
  Payload ID: 156;
  Gene Symbol: AIM1;
  Gene Name: absent in melanoma 1;
  ENSP ID: ENSP00000488010
MPLSPPAQGDPGEPSPCRPPKKHTTFHLWRSKKKQQPAPPDCGVFVPHPLPAPAGEARALDVVDGKYVVRDSQEFPLHCGESQFFHTTSEALGSLLLESGIFKKSRAQPPEDNRRKPVLGKLGTLFTAGRRRNSRNGLESPTRSNAKPLSPKDVVASPKLPERESERSRSQSSQLKQTDTSEEGSPRENPREAEGELPESGGPAAPPDAELSPRWSSSAAAVAVQQCHENDSPQLEPLEAEGEPFPDATTTAKQLHSSPGNSSRQENAETPARSPGEDASPGAGHEQEAFLGVRGAPGSPTQERPAGGLGEAPNGAPSVCAEEGSLGPRNARSQPPKGASDLPGEPPAEGAAHTASSAQADCTARPKGHAHPAKVLTLDIYLSKTEGAQVDEPVVITPRAEDCGDWDDMEKRSSGRRSGRRRGSQKSTDSPGADAELPESAARDDAVFDDEVAPNAASDNASAEKKVKSPRAALDGGVASAASPESKPSPGTKGQLRGESDRSKQPPPASSPTKRKGRSRALEAVPAPPASGPRAPAKESPPKRVPDPSPVTKGTAAESGEEAARAIPRELPVKSSSLLPEIKPEHKRGPLPNHFNGRAEGGRSRELGRAAGAPGASDADGLKPRNHFGVGRSTVTTKVTLPAKPKHVELNLKTPKNLDSLGNEHNPFSQPVHKGNTATKISLFENKRTNSSPRHTDIRGQRNTPASSKTFVGRAKLNLAKKAKEMEQPEKKVMPNSPQNGVLVKETAIETKVTVSEEEILPATRGMNGDSSENQALGPQPNQDDKADVQTDAGCLSEPVASALIPVKDHKLLEKEDSEAADSKSLVLENVTDTAQDIPTTVDTKDLPPTAMPKPQHTFSDSQSPAESSPGPSLSLSAPAPGDVPKDTCVQSPISSFPCTDLKVSENHKGCVLPVSRQNNEKMPLLELGGETTPPLSTERSPEAVGSECPSRVLVQVRSFVLPVESTQDVSSQVIPESSEVREVQLPTCHSNEPEVVSVASCAPPQEEVLGNEHSHCTAELAAKSGPQVIPPASEKTLPIQAQSQGSRTPLMAESSPTNSPSSGNHLATPQRPDQTVTNGQDSPASLLNISAGSDDSVFDSSSDMEKFTEIIKQMDSAVCMPMKRKKARMPNSPAPHFAMPPIHEDHLEKVFDPKVFTFGLGKKKESQPEMSPALHLMQNLDTKSKLRPKRASAEQSVLFKSLHTNTNGNSEPLVMPEINDKENRDVTNGGIKRSRLEKSALFSSLLSSLPQDKIFSPSVTSVNTMTTAFSTSQNGSLSQSSVSQPTTEGAPPCGLNKEQSNLLPDNSLKVFNFNSSSTSHSSLKSPSHMEKYPQKEKTKEDLDSRSNLHLPETKFSELSKLKNDDMEKANHIESVIKSNLPNCANSDTDFMGLFKSSRYDPSISFSGMSLSDTMTLRGSVQNKLNPRPGKVVIYSEPDVSEKCIEVFSDIQDCSSWSLSPVILIKVVRGCWILYEQPNFEGHSIPLEEGELELSGLWGIEDILERHEEAESDKPVVIGSIRHVVQDYRVSHIDLFTEPEGLGILSSYFDDTEEMQGFGVMQKTCSMKVHWGTWLIYEEPGFQGVPFILEPGEYPDLSFWDTEEAYIGSMRPLKMGGRKVEFPTDPKVVVYEKPFFEGKCVELETGMCSFVMEGGETEEATGDDHLPFTSVGSMKVLRGIWVAYEKPGFTGHQYLLEEGEYRDWKAWGGYNGELQSLRPILGDFSNAHMIMYSEKNFGSKGSSIDVLGIVANLKETGYGVKTQSINVLSGVWVAYENPDFTGEQYILDKGFYTSFEDWGGKNCKISSVQPICLDSFTGPRRRNQIHLFSEPQFQGHSQSFEETTSQIDDSFSTKSCRVSGGSWVVYDGENFTGNQYVLEEGHYPCLSAMGCPPGATFKSLRFIDVEFSEPTIILFEREDFKGKKIELNAETVNLRSLGFNTQIRSVQVIGGIWVTYEYGSYRGRQFLLSPAEVPNWYEFSGCRQIGSLRPFVQKRIYFRLRNKATGLFMSTNGNLEDLKLLRIQVMEDVGADDQIWIYQEGCIKCRIAEDCCLTIVGSLVTSGSKLGLALDQNADSQFWSLKSDGRIYSKLKPNLVLDIKGGTQYDQNHIILNTVSKEKFTQVWEAMVLYT

SEQ ID NO: 941 - protein, 1661 aa, Homo sapiens
  Payload ID: 157;
  Gene Symbol: AIM1L;
  Gene Name: absent in melanoma 1-like;
  Uniprot ID:  Q8N1P7;
  ENSP ID: ENSP00000310435
MEEAGGPMARAKARVVSATLTWRQRPPTQEEIKHGFHKVSLVSGAQMEAPQKEMFEFSRREEVEVNGFATQEEETVNCQGPRDTAGSKNFQSHGPIFSKKYIPPPKEKRPEGRLKEAVDQSDGSRQAPRTEPPCVGAMARTELLVPLPGPREPSPHPGVGLTSGSSRSLEEYRVTRTVRTTTVVGGHVDRRMSSSVTVRPVSSGEALPRGRQVSRMVPPVVVGSPPGSPSRSQAVKVLSNLVPAGHSPPASHLPRPTAGGPRSTGLGSTVGAALRQLPETGTAELKDSSALASTGIPASAHLPKNQDAPAACPDRDQGRAPDARACELWQVLGAPSSTELPLQTSQGQASVPSSPRLETHVPSPGLTHPAKQPVVPTHPGARLTPLVLPPKKKDGPVDPPAATVLPMVRSEHVTVPGQPPAPSTTRRKDVPSPGGLSAPSSPRNKFVQNSENVPVLPFTQREVVKGPGAPAASSPTRKEVVQGSSASAASSPTWKEVVKGPGAPAASSPTQKEVVQGSSAPAALFPTWKEVVKGPGAPDASFPTWKEVVKGPGAPAASSPTQKEVVQGSGAPAALSTTPKEVVKGPGAPAASSPTQKEVVKGPCAPAASSPTQKEVVQGSGAPAALSPKSTEVVQGPKGSSSIQKEAVQGIAGSLAPPLTKEETVQGPIAPATSLPKQDKGVQDSEGSPISSLTQKEVVQDPDALPAPSSSVDRVSPSPGGTPAPVPTGAEASTESQLVSDPTEGKTCTETSREEDEVALAADLEIFLDTLRSMEPPEILRTHRLPRAPRSSYLSMYATLPAIEEDQLGPWVLGPGPQEVPSLEEKEEEEEEEPENPYLSDDEKLQRRQEKAGPSPSRDLHPARPTQVSCSPLEMMKKHVAGTKGPHSELGLELQGGSRPTSRLGGSLLFGSLVPTAKEASTPEPLGTKLSALLPHGAPGLRKVPGQLPLLCSERSSPTEKLACSLPLEGWSPALKTQGKLNTRPGKVIFFSESGCQGSGREVWGDIVDASGWAPVASIRVVRGCWVLYEEPEFRGQKLVLPEGDMELRTPGTKWSPQGIGSLRRVVWDYSTPEISLFSEEGLKGEQVKLTEALKNSQGLEKPLQVASATVSAGLWLLYPKPLFEDTPYILEPGEYPTSEAWGTSDPSVGSLKPMRLGCPSVEKPGEPRAVVYEAPGFQGRSWEVSRDIYNLQQPEDSQSPHLASVGSLRVLGGCWVGYEKEGFRGHQYLLEEGEYPDWSHWGGYDELLTSLRVIRTDFGDPAVVLFEAMDFEGHGVEVSKALPDVELVQHGPSTQAIHVLSGVWVAYQEVGFSGEQYVLEKGVYRNCEDWGAGNSTLASLQPVLQVGEHDLHFVSKIQLFSRPDFLGDHFSFEDDQAALPASFRPQSCRVHGGSWILFDETNFEGDQHILSEGEFPTLTAMGCLASTVLGSLQKVSLHFSEPSIFLYGLECFEGKEIELSREVRSLQAEGFNNHVLSVRIKGGIWVLCEHSDFRGRQWLVGSCEITNWLTYSGTQRVGSLYPIKQRRVYFRLWNAALGGFLAVPDHVEDMKAGRVVVADPQAGGSCIWYYEDGLLKNQMAPTMSLQVIGPPSPGSKVVLWAESRLPRQTWSISESGHICSQMFEGQILDVKGGRGYDRDHVVLWEPDEDRASQIWTIHVL

SEQ ID NO: 942 - protein, 352 aa, Homo sapiens
  Payload ID: 157;
  Gene Symbol: AIM1L;
  Gene Name: absent in melanoma 1-like;
  ENSP ID: ENSP00000363323
MEEAGGPMARAKARVDGPVDPPAATVLPMVRSEHVTVPGQPPAPSTTRRKDVPSPGVDRVSPSPGGTPAPVPTGAEASTESQLVSDPTEGKTCTETSREEDEVALAADLEIFLDTLRSMEPPEILRTHRLPRAPRSSYLSMYATLPAIEEDQLGPWVLGPGPQEVPSLEEKEEEEEEEPENPYLSDDEKLQRRQEKAGPSPSRDLHPARPTQVSCSPLEMMKKHVAGTKGPHSELGLELQGGSRPTSRLGGSLLFGSLVPTAKEASTPEPLGTKLSALLPHGAPGLRKVPGQLPLLCSERSSPTEKLACSLPLEGWPSLKDPGQAEHQAWKGDLLLRVWLPRQWQGGLGRHR

SEQ ID NO: 943 - protein, 296 aa, Homo sapiens
  Payload ID: 157;
  Gene Symbol: AIM1L;
  Gene Name: absent in melanoma 1-like;
  ENSP ID: ENSP00000409834
  MOD_RES (1)..(1): Any amino acid
XSQGLEKPLQVASATVSAGLWLLYPKPLFEDTPYILEPGEYPTSEAWGTSDPSVGSLKPMRLAVVYEAPGFQGRSWEVSRDIYNLQQPEDSQSPHLASVGSLRVLGGCWVGYEKEGFRGHQYLLEEGEYPDWSHWGGYDELLTSLRVIRTDFGDPAVVLFEAMDFEGHGVEVSKALPDVELVQHGPSTQAIHVLSGVWVAYQEVGFSGEQYVLEKGVYRNCEDWGAGNSTLASLQPVLQVGEHDLHFVSKIQLFSRPDFLGDHFSFEDDQAALPASFRPQSCRVHGGSWILFDETN

SEQ ID NO: 944 - protein, 466 aa, Homo sapiens
  Payload ID: 157;
  Gene Symbol: AIM1L;
  Gene Name: absent in melanoma 1-like;
  ENSP ID: ENSP00000428746
MEEAGGPMARAKARVVSATLTWRQRPPTQEEIKHGFHKVSLVSGAQMEAPQKEMFEFSRREEVEVNGFATQEEETVNCQGPRDTAGSKNFQSHGPIFSKKYIPPPKEKRPEGRLKEAVDQSDGSRQAPRTEPPCVGAMARTELLVPLPGPREPSPHPGVGLTSGSSRSLEEYRVTRTVRTTTVVGGHVDRRMSSSVTVRPVSSGEALPRGRQVSRMVPPVVVGSPPGSPSRSQAVKVLSNLVPAGHSPPASHLPRPTAGGPRSTGLGSTVGAALRQLPETGTAELKDSSALASTGIPASAHLPKNQDAPAACPDRDQGRAPDARACELWQVLGAPSSTELPLQTSQGQASVPSSPRLETHVPSPGLTHPAKQPVVPTHPGARLTPLVLPPKKKDGPVDPPAATVLPMVRSEHVTVPGQPPAPSTTRRKDVPSPGGLSAPSSPRNKFVQNSENVPVLPFTQREVVKG

SEQ ID NO: 945 - protein, 787 aa, Homo sapiens [sequence omitted]

SEQ ID NO: 946 - protein, 167 aa, Homo sapiens
  Payload ID: 158;
  Gene Symbol: AIM2;
  Gene Name: absent in melanoma 2;
  ENSP ID: ENSP00000357111
MVAQQESIREGFQKRCLPVMVLKAKKPFTFETQEGKQEMFHATVATEKEFFFVKVFNTLLKDKFIPKRIIIIARYYRHSGFLEVNSASRVLDAESDQKVNVPLNIIRKAGETPKINTLQTQPLGTIVNGLFVVQKVTEKKKNILFDLSDNTGKMEVLGVRNEDTMKC

SEQ ID NO: 947 - protein, 343 aa, Homo sapiens
  Payload ID: 158;
  Gene Symbol: AIM2;
  Gene Name: absent in melanoma 2;
  Uniprot ID:  O14862;
  ENSP ID: ENSP00000357112
MESKYKEILLLTGLDNITDEELDRFKFFLSDEFNIATGKLHTANRIQVATLMIQNAGAVSAVMKTIRIFQKLNYMLLAKRLQEEKEKVDKQYKSVTKPKPLSQAEMSPAASAAIRNDVAKQRAAPKVSPHVKPEQKQMVAQQESIREGFQKRCLPVMVLKAKKPFTFETQEGKQEMFHATVATEKEFFFVKVFNTLLKDKFIPKRIIIIARYYRHSGFLEVNSASRVLDAESDQKVNVPLNIIRKAGETPKINTLQTQPLGTIVNGLFVVQKVTEKKKNILFDLSDNTGKMEVLGVRNEDTMKCKEGDKVRLTFFTLSKNGEKLQLTSGVHSTIKVIKAKKKT

SEQ ID NO: 948 - protein, 355 aa, Homo sapiens
  Payload ID: 158;
  Gene Symbol: AIM2;
  Gene Name: absent in melanoma 2;
  ENSP ID: ENSP00000483485
MESKYKEILLLTGLDNITDEELDRFKFFLSDEFNIATGKLHTANRIQVATLMIQNAGAVSAVMKTIRIFQKLNYMLLAKRLQEEKEKVDKQYKSVTKPKPLSQAEMSPAASAAIRNDVAKQRAAPKVSPHVKPEQKQMVAQQESIREGFQKRCLPVMVLKAKKPFTFETQEGKQEMFHATVATEKEFFFVKVFNTLLKDKFIPKRIIIIARYYRHSGFLEVNSASRVLDAESDQKVNVPLNIIRKAGETPKINTLQTQPLGTIVNGLFVVQKVTEKKKNILFDLSDNTGKMEVLGVRNEDTMKCKEGDKVRLTFFTLSKNGEKLQLTSGVHSTIKVIKAKKKHREVKRTNSSQLV

SEQ ID NO: 949 - protein, 330 aa, Homo sapiens
  Payload ID: 159;
  Gene Symbol:;
  Gene Name: AC002310.11;
  ENSP ID: ENSP00000454241
MTDPSLGLTVPMAPPLAPLPPRDPNGAGSEWRKPGAVSFADVAVYFSREEWGCLRPAQRALYRDVMRETYGHLGALGVGGSKPALISWVEEKAELWDPAAQDPEVAKCPTEADPDSRNKEEERQREGTGALEKPDPVAAGSPGLKAPQAPFAGLEQLSKARRRSRPRFFAHPPVPRADQRHGCYVCGKSFAWRSTLVEHIYSHRGEKPFHCADCGKGFGHASSLSKHRAIHRGERPHRCPECGRAFMRRTALTSHLRVHTGEKPYRCPQCGRCFGLKTGMAKHQWVHRPGGEGRRGRRPGGLSVTLTPVRGDLDPPVGFQLYPEIFQECG

SEQ ID NO: 950 - protein, 93 aa, Homo sapiens
  Payload ID: 160;
  Gene Symbol:;
  Gene Name: AC002310.13;
  ENSP ID: ENSP00000455659
MAPPLAPLPPRDPNGAGPEWREPGAVSFADVAVYFCREEWGCLRPAQRALYRDVMRETYGHLSALGVGGSKPALISWVEEKAELWDPAAQDPE

SEQ ID NO: 951 - protein, 55 aa, Homo sapiens
  Payload ID: 161;
  Gene Symbol:;
  Gene Name: AC002398.9;
  ENSP ID: ENSP00000468389
MNLERVSNEEKLNLCRKYYLGGFAFLPFLWLVNIFWFFREAFLVPAYTEQSQIKG

SEQ ID NO: 952 - protein, 84 aa, Homo sapiens
  Payload ID: 162;
  Gene Symbol:;
  Gene Name: AC002985.3;
  ENSP ID: ENSP00000469669
  MOD_RES (1)..(1): Any amino acid
XQEVKEAARLAREKSQDGGELTSPALGLASHQVPPSPLVSANGPGEEKLFRSQSADAPGPTERERLKKMLSEGWLSWRLRQLQR

SEQ ID NO: 953 - protein, 84 aa, Homo sapiens; identical to SEQ ID NO: 952
  Payload ID: 162;
  Gene Symbol:;
  Gene Name: AC002985.3;
  ENSP ID: ENSP00000471765
  MOD_RES (1)..(1): Any amino acid

SEQ ID NO: 954 - protein, 102 aa, Homo sapiens
  Payload ID: 163;
  Gene Symbol:;
  Gene Name: AC003002.4;
  ENSP ID: ENSP00000472894
MAEMNPAQGHVVFEDVAIYFSQEEWGHLDEAQRLLYRDVMLENLALLSSLGSWHGAEDEEAPSQQGFSVGVSEVTASKPCLSSQKVHPSETCGPPLKDILCL

SEQ ID NO: 955 - protein, 106 aa, Homo sapiens
  Payload ID: 164;
  Gene Symbol:;
  Gene Name: AC003002.6;
  ENSP ID: ENSP00000471870
MNLTEGPLAMAEMDPTQGRVVFEDVAIYFSQEEWGHLDEAQRLLYRDVMLENLALLSSLGFIAVAAMLMDAGQDYMVFEDVAIHFSQEEWGILNDVQRHLHSDVML

SEQ ID NO: 956 - protein, 179 aa, Homo sapiens
  Payload ID: 164;
  Gene Symbol:;
  Gene Name: AC003002.6;
  ENSP ID: ENSP00000472277
MNLTEGPLAMAEMDPTQDYMVFEDVAIHFSQEEWGILNDVQRHLHSDVMLENFALLSSVGCWHGAKDEEAPSKQCVSVGVSQVTTLKPALSTQKAQPCETCSSLLKDILHLAEHDGTHPKRTAKLYLHQKEHLREKLTRSDEGRPSFVNDSVHLAKRNLTCMQGGKDFTGDSDLQQQAL

SEQ ID NO: 957 - protein, 59 aa, Homo sapiens
  Payload ID: 165;
  Gene Symbol:;
  Gene Name: AC003005.4;
  ENSP ID: ENSP00000471625
MAAAALRDPAQGYVTFEDVAVYFSQEEWRLLDDAQRLLYRNVMLENFTLLASLAGLCDL

SEQ ID NO: 958 - protein, 58 aa, Homo sapiens
  Payload ID: 165;
  Gene Symbol:;
  Gene Name: AC003005.4;
  ENSP ID: ENSP00000472846
MAAAALRDPAQGYVTFEDVAVYFSQEEWRLLDDAQRLLYRNVMLENFTLLASLGLCDL

SEQ ID NO: 959 - protein, 148 aa, Homo sapiens
  Payload ID: 166;
  Gene Symbol:;
  Gene Name: AC003006.7;
  ENSP ID: ENSP00000472160
MAAVALRDSAQGTVTFEDVAVNFSQEEWSLLSEAQRCLYHDVMLENLTLISSLGCWYGAKDETPSKQTLSIQQESPLRTHWTGVCTKKVHLWGMCGPLLGDILHQGTQHNQKLNGFGAYEKKLDDDANHHQDQKQHIGEKSYRSNAKG

SEQ ID NO: 960 - protein, 72 aa, Homo sapiens
  Payload ID: 167;
  Gene Symbol:;
  Gene Name: AC004076.7;
  ENSP ID: ENSP00000472152
  MOD_RES (1)..(1): Any amino acid
XQGPLAMAEMDPTQRQDLTLSPKLEYSGMIIAHCHLEPLGSSDPPASASQVAGTTGRKNEGRDQLSMPLEAI

SEQ ID NO: 961 - protein, 132 aa, Homo sapiens
  Payload ID: 168;
  Gene Symbol:;
  Gene Name: AC004076.9;
  ENSP ID: ENSP00000470969
MAAAEPMGPAQVPMNSEVIVDPIQGQVNFEDVFVYFSQEEWVLLDEAQRLLYRDVMLENFALMASLGIPQTMAAFGLKYLLNDTGYTSSKSNTITATDSPADLPRKPEPHTPSWSWKKQAMSIRTVLWHPTG

SEQ ID NO: 962 - protein, 124 aa, Homo sapiens [sequence omitted]

SEQ ID NO: 963 - protein, 394 aa, Homo sapiens
  Payload ID: 170;
  Gene Symbol:;
  Gene Name: AC004231.7;
  ENSP ID: ENSP00000459812
MSYSCCLPSLGCRTSCSSRPCVPPSCHGYTLPGACNIPANVSNCNWFCEGSFNGSEKETMQFLNDRLASYLEKVRQLERDNAELEKLIQERSQQQEPLLCPSYQSYFKTIEELQQKILCAKAENARLVVNIDNAKLASDDFRSKYQTEQSLRLLVESDINSIRRILDELTLCKSDLESQVESLREELICLKKNHEEEVNTLRSQLGDRLNVEVDTAPTVDLNQVLNETRSQYEALVETNRREVEQWFATQTEELNKQVVSSSEQLQSCQAEIIELRRTVNALEIELQAQHNLRDSLENTLTESEAHYSSQLSQVQSLITNVESQLAEIRCDLERQNQEYQVLLDVRARLECEINTYRSLLESEDCKLPCNPCATTNASGNSCGPCGTSQKGCCN

SEQ ID NO: 964 - protein, 153 aa, Homo sapiens
  Payload ID: 171;
  Gene Symbol:;
  Gene Name: AC004556.1;
  ENSP ID: ENSP00000478035
MARNVVYPLYRLGGPQLRVFRTNFFIQLVRPGVAQPEDTVQFRIPMEMTRVDLRNYLEGIYNVPVAAVRTRVQHGSNKRRDHRNVRIKKPDYKVAYVQLAHGQTFTFPDLFPEKDESPEGSTADDLYSMLEEERQQRQSSDPRRGGVPSWFGL

SEQ ID NO: 965 - protein, 531 aa, Homo sapiens
  Payload ID: 172;
  Gene Symbol:;
  Gene Name: AC004754.3;
  ENSP ID: ENSP00000471331
MLDHKDLEAEIHPLKNEERKSQENLGNPSKNEDNVKSAPPQSRLSRCRAAAFFLSLFLCLFVVFVVSFVIPCPDRPASQRMWRIDYSAAVIYDFLAVDDINGDRIQDVLFLYKNTNSSNNFSRSCVDEGFSSPCTFAAAVSGANGSTLWERPVAQDVALVECAVPQPRGSEAPSACILVGRPSSFIAVNLFTGETLWNHSSSFSGNASILSPLLQVPDVDGDGAPDLLVLTQEREEVSGHLYSGSTGHQIGLRGSLGVDGESGFLLHVTRTGAHYILFPCASSLCGCSVKGLYEKVTGSGGPFKSDPHWESMLNATTRRMLSHSSGAVRYLMHVPGNAGADVLLVGSEAFVLLDGQELTPRWTPKAAHVLRKPIFGRYKPDTLAVAVENGTGTDRQILFLDLGTGAVLCSLALPSLPGGPLSASLPTADHRSAFFFWGLHELGSTSETETGEARHSLYMFHPTLPRVLLELANVSTHIVAFDGSHWATAERLLDGAELAPRPACPRLVTGVWEAARLCILLPGIRWLIYWF

SEQ ID NO: 966 - protein, 124 aa, Homo sapiens
  Payload ID: 173;
  Gene Symbol:;
  Gene Name: AC004813.1;
  ENSP ID: ENSP00000485143
MTLKEHAAFKHLFNKAHLAPPLIHLTLSGHSTCFREHRVGDKVTDQQDPKAEEFFLVQNKMKSLPCLLLSTQTRQPSDFSIFSPPFPPFYSTKPPLSSWPVLNELLGTPPRRGGGRAEGLLTSQ

SEQ ID NO: 967 - protein, 63 aa, Homo sapiens
  Payload ID: 174;
  Gene Symbol:;
  Gene Name: AC004824.2;
  ENSP ID: ENSP00000485570
TGARHYAQLIFVFLIEMGFHRVGQAGLKLLTSGDPPASASQSAGITGVSHCARPGQFIILRYL

SEQ ID NO: 968 - protein, 63 aa, Homo sapiens; identical to SEQ ID NO: 967
  Payload ID: 175;
  Gene Symbol:;
  Gene Name: AC004824.3;
  ENSP ID: ENSP00000485939

SEQ ID NO: 969 - protein, 317 aa, Homo sapiens
  Payload ID: 176;
  Gene Symbol:;
  Gene Name: AC004853.1;
  ENSP ID: ENSP00000485535
MGTDNQTWVSEFILLGLSSDWDTRVSLFVLFLVMYVVTVLGNCLIVLLIRLDSRLHTPMYFFLTNLSLVDVSYATSVVPQLLAHFLAEHKAIPFQSCAAQLFFSLALGGIEFVLLAVMAYDRYVAVCDALRYSAIMHGGLCARLAITSWVSGFISSPVQTAITFQLPMCRNKFIDHISCELLAVVRLACVDTSSNEVTIMVSSIVLLMTPFCLVLLSYIQIISTILKIQSREGRKKAFHTCASHLTVVALCYGVAIFTYIQPHSSPSVLQEKLFSVFYAILTPMLNPMIYSLRNKEVKGAWQKLLWKFSGLTSKLAT

SEQ ID NO: 970 - protein, 91 aa, Homo sapiens
  Payload ID: 177;
  Gene Symbol:;
  Gene Name: AC004953.1;
  ENSP ID: ENSP00000485307
MLLRLTSNSWAQTILPPQPPKVLGLQVPGNSWDRGEGSVGAQVRRMVDSRDQQSFSDLNALSPRLECSGMISAHCNLCLQGSSDSLVSASQ

SEQ ID NO: 971 - protein, 13 aa, Homo sapiens
  Payload ID: 178;
  Gene Symbol:;
  Gene Name: AC005042.1;
  ENSP ID: ENSP00000486420
LPPPSQSLLVEEG

SEQ ID NO: 972 - protein, 82 aa, Homo sapiens
  Payload ID: 179;
  Gene Symbol:;
  Gene Name: AC005477.1;
  ENSP ID: ENSP00000485077
MLISKIDVQVECYIISEEEASSPSLRGENGLVEEWSLNSVLKYVQDCFMWKAERKNIPGDEMFQQGHRAEESNSNRNWLAWT

SEQ ID NO: 973 - protein, 25 aa, Homo sapiens
  Payload ID: 180;
  Gene Symbol:;
  Gene Name: AC005480.1;
  ENSP ID: ENSP00000485283
MRAKWRKKRMCSLKHKRRKMRQRSK

SEQ ID NO: 974 - protein, 27 aa, Homo sapiens
  Payload ID: 181;
  Gene Symbol:;
  Gene Name: AC005779.2;
  ENSP ID: ENSP00000466282
IVAGCRLLPDIRGVPGTEPEKDPGPRA

SEQ ID NO: 975 - protein, 56 aa, Homo sapiens
  Payload ID: 182;
  Gene Symbol:;
  Gene Name: AC005943.2;
  ENSP ID: ENSP00000468614
MVTRFLGPRYRELVKNWVPTAYTWGAVGAVGLVWATDWRLILDWVPYINGKFKKDN

SEQ ID NO: 976 - protein, 124 aa, Homo sapiens
  Payload ID: 183;
  Gene Symbol:;
  Gene Name: AC006026.2;
  ENSP ID: ENSP00000485594
MTLNEHAAFKHLFNKAHLAPPLIHLTLSGHSTCFREHRVGDKVTDQQDPKAEEFFLVQNKMKSLPCPLLSTQTRQPSDFSIFSPPFPPFYSTKPPLSSWPIPNESLGTPPRRGRGRAEGLLTSQ

SEQ ID NO: 977 - protein, 132 aa, Homo sapiens
  Payload ID: 184;
  Gene Symbol:;
  Gene Name: AC006328.4;
  ENSP ID: ENSP00000485474
MGPTVLGQGEEGQPEAGACSGLLQPPKRPIVFKEKLTMKTDSLMEEKLECSLWCCLSDPSIPGRCCVLERRIVPWMQQESYSSSSPIRSVDSDEPNLTSVLERLEDTKDNSSSVRKETKLFSLFLINIIFRN

SEQ ID NO: 978 - protein, 25 aa, Homo sapiens
  Payload ID: 185;
  Gene Symbol:;
  Gene Name: AC006386.1;
  ENSP ID: ENSP00000485436
MRAKWRKKRTLRLKRQRRKMRQKSK

SEQ ID NO: 979 - protein, 40 aa, Homo sapiens
  Payload ID: 186;
  Gene Symbol:;
  Gene Name: AC006445.1;
  ENSP ID: ENSP00000485950
PAPAPAPPAPPAPGPAPGPGGGGGGGAGGGGCGCGLVAMV

SEQ ID NO: 980 - protein, 121 aa, Homo sapiens
  Payload ID: 187;
  Gene Symbol:;
  Gene Name: AC006449.1;
  ENSP ID: ENSP00000479002
MRDVGGKRRRGLHPFIPSLGPVFKSNLTATVVQSGECKRLGKVGEQPLGDENPSLWFGLREGRSVLGGVSWFQCTESLGPLTLQHGNLGVDLLLFPSRQKLSFALSGPALGKGVGVNEQLF

SEQ ID NO: 981 - protein, 121 aa, Homo sapiens; identical to SEQ ID NO: 980
  Payload ID: 188;
  Gene Symbol:;
  Gene Name: AC006449.2;
  ENSP ID: ENSP00000485082

SEQ ID NO: 982 - protein, 167 aa, Homo sapiens
  Payload ID: 189;
  Gene Symbol:;
  Gene Name: AC006486.9;
  ENSP ID: ENSP00000470087
MKTPADTGDSGKVTTVVATLGQGPERSQEVAYTDIKVIGNGSFGVVYQARLAETRELVAIKKVLQDKRFKNRELQIMRKLDHCNIVRLRYFFYSSGEKKDELYLNLVLEYVPETVYRVARHFTKAKLTIPILYVKVYMYQLFRSLAYIHSQGVCHRDIKPQNLLVDP

SEQ ID NO: 983 - protein, 105 aa, Homo sapiens
  Payload ID: 190;
  Gene Symbol:;
  Gene Name: AC006538.4;
  ENSP ID: ENSP00000467958
MVKLLVAKILCMVGVFFFMLLGSLLPVKIIETDFEKAHRSKKILSLCNTFGGGVFLATCFNALLPAVREKARSGVLAAGTSPPGPGRPPAAGKMPEQSNDYRVVV

SEQ ID NO: 984 - protein, 107 aa, Homo sapiens [sequence omitted]

SEQ ID NO: 985 - protein, 197 aa, Homo sapiens
  Payload ID: 192;
  Gene Symbol:;
  Gene Name: AC007040.11;
  ENSP ID: ENSP00000475641
MWFMYLLSWLSLFIQVAFITLAVAAGLYYLAELIEEYTVATSRIIKYMIWFSTAVLIGLYVFERFPTSMIGVGLFTNLVYFGLLQTFPFIMLTSPNFILSCGLVVVNHYLAFQFFAEEYYPFSEVLAYFTFCLWIIPFAFFVSLSAGENVLPSTMQPGGLGLGRSTGHGDSCTDFYKDPPSVTTIWKTPGLEDSQRR

SEQ ID NO: 986 - protein, 49 aa, Homo sapiens
  Payload ID: 192;
  Gene Symbol:;
  Gene Name: AC007040.11;
  ENSP ID: ENSP00000475757
  MOD_RES (1)..(1): Any amino acid
XMYLLSWLSLFIQVAFITLAVAAGLYYLAELIEEYTVATSRIIKYMIWS

SEQ ID NO: 987 - protein, 124 aa, Homo sapiens
  Payload ID: 193;
  Gene Symbol:;
  Gene Name: AC007163.2;
  ENSP ID: ENSP00000485176
MTLNEHAAFKHLFNKAHLAPPLIHLTLSGHSTCFREHRVGDKVTDQQDPKAEEFFLVQNKMKSLPCLLLSTQTRQPCDFSIFSPPFPPFYSTKPPLSSWPIPNEPLGTPPRRGGGRAEGLLTSQ

SEQ ID NO: 988 - protein, 429 aa, Homo sapiens
  Payload ID: 194;
  Gene Symbol:;
  Gene Name: AC007325.1;
  ENSP ID: ENSP00000481613
MDSLWGPGAGSHPFGVHNTRLSPDLCPGKIVLRALKESGAGMPEQDKDPRVQENPGDQRRVPEVTGDAPSAFRPLRDNGGLSPFVPGPGPLQTDLHAQRSEIRYNQTSQTSWTSSCTNRNAISSSYSSTGGLPGLKRRRGPASSHCQLTLSSSKTVSEDRPQAVSSGHTQCEKAADIAPGQTLTLRNDSSTSEASRPSTHKFPLLPRRRGEPLMLPPPVELGYRVTVEDLDREKEAAFQRINSALQVEDKAISDCRPSRPSHTLSSLATGTSGLPAVSKAPSMDAQQETHKSQDCLGLLAPLASAAEVPSTAPVSGKKHRPPGPLFSSSDPLPATSSHSRDSAQVTSLIPAPFPAASMDAGMGRTRPGTSAPAAAAAAPPPSTLNPTLGSLLEWMEALHISGPQPQLQQVPRGQNQRSQTSRTSSCPKR

SEQ ID NO: 989 - protein, 600 aa, Homo sapiens
  Payload ID: 195;
  Gene Symbol:;
  Gene Name: AC007325.2;
  ENSP ID: ENSP00000481127
MALRRALPALRPCIPRFVPLSTAPASREQPAAGPAAVPGGGSATAVRPPVPAVDFGNAQEAYRSRRTWELARSLLVLRLCAWPALLARHEQLLYVSRKLLGQRLFNKLMKMTFYGHFVAGEDQESIQPLLRHYRAFGVSAILDYGVEEDLSPEEAEHKEMESCTSAAERDGSGTNKRDKQYQAHWAFGDRRNGVISARTYFYANEAKCDSHMETFLRCIEASGRVSDDGFIAIKLTALGRPQFLLQFSEVLAKWRCFFHQMAVEQGQAGLAAMDTKLEVAVLQESVAKLGIASRAEIEDWFTAETLGVSGTMDLLDWSSLIDSRTKLSKHLVVPNAQTGQLEPLLSRFTEEEELQMTRMLQRMDVLAKKATEMGVRLMVDAEQTYFQPAISRLTLEMQRKFNVEKPLIFNTYQCYLKDAYDNVTLDVELARREGWCFGAKLVRGAYLAQERARAAEIGYEDPINPTYEATNAMYHRCLDYVLEELKHNAKAKVMVASHNEDTVRFALRRMEELGLHPADHQVYFGQLLGMCDQISFPLGQAGYPVYKYVPYGPVMEVLPYLSRRALENSSLMKGTHRERQLLWLELLRRLRTGNLFHRPA

SEQ ID NO: 990 - protein, 492 aa, Homo sapiens
  Payload ID: 195;
  Gene Symbol:;
  Gene Name: AC007325.2;
  ENSP ID: ENSP00000482462
MKMTFYGHFVAGEDQESIQPLLRHYRAFGVSAILDYGVEEDLSPEEAEHKEMESCTSAAERDGSGTNKRDKQYQAHWAFGDRRNGVISARTYFYANEAKCDSHMETFLRCIEASGRVSDDGFIAIKLTALGRPQFLLQFSEVLAKWRCFFHQMAVEQGQAGLAAMDTKLEVAVLQESVAKLGIASRAEIEDWFTAETLGVSGTMDLLDWSSLIDSRTKLSKHLVVPNAQTGQLEPLLSRFTEEEELQMTRMLQRMDVLAKKATEMGVRLMVDAEQTYFQPAISRLTLEMQRKFNVEKPLIFNTYQCYLKDAYDNVTLDVELARREGWCFGAKLVRGAYLAQERARAAEIGYEDPINPTYEATNAMYHRCLDYVLEELKHNAKAKVMVASHNEDTVRFALRRMEELGLHPADHQVYFGQLLGMCDQISFPLGQAGYPVYKYVPYGPVMEVLPYLSRRALENSSLMKGTHRERQLLWLELLRRLRTGNLFHRPA

SEQ ID NO: 991 - protein, 220 aa, Homo sapiens
  Payload ID: 196;
  Gene Symbol:;
  Gene Name: AC007325.4;
  ENSP ID: ENSP00000482514
MERYAGALEEVADGARQQERHYQLLSALQSLVKELPSSFQQRLSYTTLSDLALALLDGTVFEIVQGLLEIQHLTEKSLYNQRLRLQNEHRVLRQALRQKHQEAQQACRPHNLPVLQAAQQRELEAVEHRIREEQRAMDQKIVLELDRKVADQQSTLEKAGVAGFYVTTNPQELMLQMNLLELIRKLQQRGCWAGKAALGLGGPWQLPAAQCDQKGSPVPP

SEQ ID NO: 992 - protein, 75 aa, Homo sapiens
  Payload ID: 197;
  Gene Symbol:;
  Gene Name: AC007326.1;
  ENSP ID: ENSP00000485226
MNPSEMQRKGPPRRWYLQVYPTAPKRQRPSRTGHDDDGGFVEKKRGKCGEKQERSDCYCVCVERSRHRRLHFVMC

SEQ ID NO: 993 - protein, 26 aa, Homo sapiens
  Payload ID: 198;
  Gene Symbol:;
  Gene Name: AC007557.5;
  ENSP ID: ENSP00000485284
SAKEKLRSQGIRRDKSRAASQGVRKG

SEQ ID NO: 994 - protein, 190 aa, Homo sapiens
  Payload ID: 199;
  Gene Symbol:;
  Gene Name: AC007906.1;
  ENSP ID: ENSP00000485088
MSLPIFVFSFNLEHVFVFLLSLSFGLDFILLPFFSSFPSTEAVGKFSGLITRGILRSPRSFAFAMASDIIRLAFSCLLSDSTFFLCFFSDMTLTWVFCNLVYVPEPSLFLEDGGLPLGLFTEDIFGVRQRLALCFFTTPGSAQEKSIERRFLNGLFSKLQPRDAQPSTNTHFDLSTHFCLGKFISTVHPI

SEQ ID NO: 995 - protein, 136 aa, Homo sapiens
  Payload ID: 200;
  Gene Symbol:;
  Gene Name: AC008074.1;
  ENSP ID: ENSP00000485379
MEAIFSAAESGFSGSLVGSNIPNPAAYMGTITGCFLLPVKRMFRVSIPKEDKSFLLLWEPPHWYLKPCASWISCSSVHTSSNSPLSGKASLVFIGKVLVSSKCFREVTSSSASGTSMEGKHASKIRSRRFKKLVNT

SEQ ID NO: 996 - protein, 173 aa, Homo sapiens
  Payload ID: 201;
  Gene Symbol:;
  Gene Name: AC008522.1;
  ENSP ID: ENSP00000485146
MALSVGSLQCVARPGLHQGGARQAVSQDGRHLALPVIDAFTQGAAVHAQLQVLALLVGHGQVFRHTDGKGQVATHLPHKHCGPYIAGVHLHIVATLPFHDTQALGIAVPTTGGAIHKGGRQVICHSLVDFLICTLMVGFEDNSDLWEGACTRFNRMGRKQNGVTLCSKSSPPF

SEQ ID NO: 997 - protein, 16 aa, Homo sapiens
  Payload ID: 202;
  Gene Symbol:;
  Gene Name: AC008622.1;
  ENSP ID: ENSP00000485124
ESRGGPVRIAGITGVC

SEQ ID NO: 998 - protein, 23 aa, Homo sapiens
  Payload ID: 203;
  Gene Symbol:;
  Gene Name: AC008641.1;
  ENSP ID: ENSP00000485568
MSRLVRGSSLLTYLVVALVLQSR

SEQ ID NO: 999 - protein, 128 aa, Homo sapiens
  Payload ID: 204;
  Gene Symbol:;
  Gene Name: AC008686.1;
  ENSP ID: ENSP00000485049
WLTPVIPALGEAEVGGLLESRSSRRSCAMIAPLHSSLGDRARPRLKKKKKKKKRKKRSLILRPCLTLSPRLTCNGTILAHCNLRLPGSSDSPASASQVAGITGTHHHTRLIFVFLVESPCWSAIVSSA

SEQ ID NO: 1000 - protein, 31 aa, Homo sapiens
  Payload ID: 205;
  Gene Symbol:;
  Gene Name: AC008759.1;
  ENSP ID: ENSP00000485338
KKILGRAQWLMPVIPALWEAEGLALSPRLEC

SEQ ID NO: 1001 - protein, 124 aa, Homo sapiens [sequence omitted]

SEQ ID NO: 1002 - protein, 24 aa, Homo sapiens
  Payload ID: 207;
  Gene Symbol:;
  Gene Name: AC008914.1;
  ENSP ID: ENSP00000485310
RCAWATRAKLHLKKKKKKTQKTNK

SEQ ID NO: 1003 - protein, 124 aa, Homo sapiens [sequence omitted]

SEQ ID NO: 1004 - protein, 126 aa, Homo sapiens
  Payload ID: 209;
  Gene Symbol:;
  Gene Name: AC009060.2;
  ENSP ID: ENSP00000485576
LVMTLNEHAAFKHLFNKAHLAPPLIHLTLSGHSTCFREHRVGGKVTDQQDPKAEEFFLVQNKMKSLPCLLLSTQTRQPSDFSIFSPPFPPFYSTKPPLSSWPVLNELLGTPPRRGGGQAGGLLTSQ

SEQ ID NO: 1005 - protein, 126 aa, Homo sapiens [sequence omitted]

SEQ ID NO: 1006 - protein, 178 aa, Homo sapiens
  Payload ID: 211;
  Gene Symbol:;
  Gene Name: AC009065.4;
  ENSP ID: ENSP00000485405
ELSSQKTGGNLDRHTASKPTALLQPGPGWQRGAACCLQILPESRVCFPTGLPLARKVTKLSWVGYKLQGRELQWPVYREELELERLLWRRRPGDRDLRRTGDLRLGERDLLLIRGGDLRHIGGGGNILLGGLNLLGGGLGQGASTAVAVISWPSICPPPSMCFSAFSASSGFSNSTYA

SEQ ID NO: 1007 - protein, 26 aa, Homo sapiens
  Payload ID: 212;
  Gene Symbol:;
  Gene Name: AC009121.2;
  ENSP ID: ENSP00000485751
SCSASTLSGGDLGSRTPAGPPENESA

SEQ ID NO: 1008 - protein, 164 aa, Homo sapiens
  Payload ID: 213;
  Gene Symbol:;
  Gene Name: AC009133.22;
  ENSP ID: ENSP00000404873
MDAEGLALLLPPVTLAALVDSWLREDCPGLNYAALVSGAGPSQAALWAKSPGVLAGQPFFDAIFTQLNCQVSWFLPEGSKLVPVARVAEVRGPAHCLLLGERVALNTLARCSGIASAAAAAVEAARGAGWTGHVAGTRKTTPGFRLVEKYGLLVGGAASHRYDL

SEQ ID NO: 1009 - protein, 359 aa, Homo sapiens
  Payload ID: 214;
  Gene Symbol:;
  Gene Name: AC009133.23;
  ENSP ID: ENSP00000476774
MAASSSEISEMKGVEESPKVPGEGPGHSEAETGPPQVLAGVPDQPEAPQPGPNTTAAPVDSGPKAGLAPETTETPAGASETAQATDLSLSPGGESKANCSPEDPCQETVSKPEVSKEATADQGSRLESAAPPEPAPEPAPQPDPRPDSQPTPKPALQPELPTQEDPTPEILSESVGEKQENGAVVPLQAGDGEEGPAPEPHSPPSKKSPPANGAPPRVLQQLVEEDRMRRAHSGHPGSPRGSLSRHPSSQLAGPGVEGGEGTQKPRDYIILAILSCFCPMWPVNIVAFAYAVMPAAGGRGRGPASGPGSQALKHRGAGGGSPHHHRLLRHQLRRVPALVAYVPCSGPWRHCGQYGGASV

SEQ ID NO: 1010 - protein, 123 aa, Homo sapiens
  Payload ID: 215;
  Gene Symbol:;
  Gene Name: AC009286.1;
  ENSP ID: ENSP00000487241
MAWTPLLLLLLSHCTGSLSQPVLTQPTSLSASPGASARFTCTLRSGINVGTYRIYWYQQKPGSLPRYLLRYKSDSDKQQGSGVPSRFSGSKDASTNAGLLLISGLQSEDEADYYCAIWYSSTS

SEQ ID NO: 1011 - protein, 146 aa, Homo sapiens
  Payload ID: 216;
  Gene Symbol:;
  Gene Name: AC009336.19;
  ENSP ID: ENSP00000424734
MVMSSYMVNSKYVDPKFPPCEEYLQGGYLGEQGADYYGGGAQGADFQPPGLYPRPDFGEQPFGGSGPGPGSALPARGHGQEPGGPGGHYAAPGEPCPAPPAPPPAPLPGARAYSQSDPKQPPSGTALKQPAVVYPWMKKVHVNSGI

SEQ ID NO: 1012 - protein, 128 aa, Homo sapiens
  Payload ID: 217;
  Gene Symbol:;
  Gene Name: AC009491.1;
  ENSP ID: ENSP00000485137
MHLHRHLLCQATGTCGNGDIHAVSVVCSHRRRCLDSEEVTEICSSDFIPGRDCVGESGPMIGMLSRSQGLLGKGRQHDKGKSKVEQSSYTLNWPPMGAGEGAGPHPPLTSLYPHLYLMIWLLKLSVLK

SEQ ID NO: 1013 - protein, 128 aa, Homo sapiens
  Payload ID: 218;
  Gene Symbol:;
  Gene Name: AC009491.2;
  ENSP ID: ENSP00000485446
MHLLGGLLLQQSAETWPLLAVSVVGSHWRRRCFDCEVITRNCSSDSIPERGSVQEIGPMGIGILSVSQGLSQIGRKHDKGKSKLEKYSHTSNWPLTHAGEGVGPHPPLTRLHLQPYLTFLLLILSVPE

SEQ ID NO: 1014 - protein, 314 aa, Homo sapiens
  Payload ID: 219;
  Gene Symbol:;
  Gene Name: AC009758.1;
  ENSP ID: ENSP00000485078
MPTVNHSGTSHTVFHLLGIPGLQDQHMWISIPFFISYVTALLGNSLLIFIILTKRSLHEPMYLFLCMLAGADIVLSTCTIPQALAIFWFRAGDISLDRCITQLFFIHSTFISESGILLVMAFDHYIAICYPLRYTTILTNALIKKICVTVSLRSYGTIFPIIFLLKRLTFCQNNIIPHTFCEHIGLAKYACNDIRINIWYGFSILMSTVVLDVVLIFISYMLILHAVFHMPSPDACHKALNTFGSHVCIIILFYGSGIFTILTQRFGRHIPPCIHIPLANVCILAPPMLNPIIYGIKTKQIQEQVVQFLFIKQK

SEQ ID NO: 1015 - protein, 555 aa, Homo sapiens
  Payload ID: 220;
  Gene Symbol:;
  Gene Name: AC009950.1;
  ENSP ID: ENSP00000439558
MGRGFRMFTMTRAMEEALFQHFMHQKLGIAYAIHKPFPFFEGLLDNSIITKRMYMESLEACRNLIPVSRVVHNILTQLERTFNLSLLVTLFSQINLREYPNLVTIYRSFKRVGASYEWQSRDTPILLEAPTGLAEGSSLHTPLALPPPQPPQPSCSPCAPRVSEPGTSSQQSDEILSESPSPSDPVLPLPALIQEGRSTSVTNDKLTSKMNAEEDSEEMPSLLTSTVQVASDNLIPQIRDKEDPQEMPHSPLGSMPEIRDNSPEPNDPEEPQEVSSTPSDKKGKKRKRCIWSTPKRRHKKKSLPGGTASSRHGIQKKLKRVDQVPQKKDDSTCNSTVETRAQKARTECARKSRSEEIIDGTSEMNEGKRSQKTPSTPRRVTQGAASPGHGIQEKLQVVDKVTQRKDDSTWNSEVMMRVQKARTKCARKSRLKEKKKEKDICSSSKRRFQKNIHRRGKPKSDTVDFHCSKLPVTCGEAKGILYKKKMKHGSSVKCIRNEDGTWLTPNEFEVEGKGRNAKNWKRNIRCEGMTLGELLKSGLLLCPPRINLKRELNSK

SEQ ID NO: 1016 - protein, 33 aa, Homo sapiens
  Payload ID: 221;
  Gene Symbol:;
  Gene Name: AC009977.1;
  ENSP ID: ENSP00000485119
KHKKKVIERWSLALLPRLECSGAILAHCKLRLP

SEQ ID NO: 1017 - protein, 23 aa, Homo sapiens
  Payload ID: 222;
  Gene Symbol:;
  Gene Name: AC010184.1;
  ENSP ID: ENSP00000485684
RAAAPAHAAPSRSCPAGSATLEP

SEQ ID NO: 1018 - protein, 120 aa, Homo sapiens
  Payload ID: 223;
  Gene Symbol:;
  Gene Name: AC010287.1;
  ENSP ID: ENSP00000485180
MPIIPSLWEAGRSLEARSSKIFCILIVVVVTQLYKFVKIQRTIHLKGRLLLYEVYLINNQPKNLCSHFSFPTTYIKKERLWLGPVAHTYNPSTLGGRGGWITRGQEFKTSLANMVEPCLY

SEQ ID NO: 1019 - protein, 124 aa, Homo sapiens
  Payload ID: 224;
  Gene Symbol:;
  Gene Name: AC010412.1;
  ENSP ID: ENSP00000485147
MTLNEHAAFKHLFNKAHLAPPLIHSTLSGHSTCFREHRVGGKVTDQQDPKAEEFFLVQNKMKSLPCLPLPTQTQQPSDFSIFSPPFPIFYSTKLPLSSWPVLNELLSTPPRRGGGRAEGLLTSQ

SEQ ID NO: 1020 - protein, 94 aa, Homo sapiens
  Payload ID: 225;
  Gene Symbol:;
  Gene Name: AC010547.9;
  ENSP ID: ENSP00000463741
MAAMPLKAQYQEMVTFEDVAVHFTKTEWTGLSPAQRALYRSVMLENFGNLTALGYPVPKPALISLLERGDMAWGLEAQDDPPAERTKNVCKVIL

SEQ ID NO: 1021 - protein, 137 aa, Homo sapiens [sequence omitted]

SEQ ID NO: 1022 - protein, 46 aa, Homo sapiens
  Payload ID: 227;
  Gene Symbol:;
  Gene Name: AC010646.3;
  ENSP ID: ENSP00000473056
MRKEAVQRGRIPHSLPGAVAASSGSPPGSALAAVASGGDLFPGQPV

SEQ ID NO: 1023 - protein, 22 aa, Homo sapiens
  Payload ID: 228;
  Gene Symbol:;
  Gene Name: AC010655.1;
  ENSP ID: ENSP00000485293
SHLFNNYLLNVKMTLGSVFASV

SEQ ID NO: 1024 - protein, 120 aa, Homo sapiens
  Payload ID: 229;
  Gene Symbol:;
  Gene Name: AC011043.2;
  ENSP ID: ENSP00000482855
MYSFPTTVVEERLSLSIHLVTFPTVSREILLEITSQTNKKQSWEMYDTHSAKEIGIIAGEQIQKTQAVPYICFLLRHQLISQSSQVRVEAMYSLLFLGTLLQGGKGQEVLLEDALRARAP

SEQ ID NO: 1025 - protein, 42 aa, Homo sapiens
  Payload ID: 230;
  Gene Symbol:;
  Gene Name: AC011155.1;
  ENSP ID: ENSP00000485198
GKDAKEKKQLTYNSSSYISWTVGMYHVFHLHCTCLRHRISLR

SEQ ID NO: 1026 - protein, 131 aa, Homo sapiens
  Payload ID: 231;
  Gene Symbol:;
  Gene Name: AC011295.1;
  ENSP ID: ENSP00000478066
MGPAVLGQGEEGQPEARACSGLLQPPKRPIVFKEKLTMKTDSLMEEKLECSLWCCLSDPSTPGRCCVLERRIVPWMQQESYSSSSPIWSVDSDEPNLTSVLERLEDTKDNSSVRKETKLFSLFLMNIIFRN

SEQ ID NO: 1027 - protein, 16 aa, Homo sapiens
  Payload ID: 232;
  Gene Symbol:;
  Gene Name: AC011380.1;
  ENSP ID: ENSP00000487555
NSQSGTREAETGRRKK

SEQ ID NO: 1028 - protein, 152 aa, Homo sapiens
  Payload ID: 233;
  Gene Symbol:;
  Gene Name: AC011513.3;
  ENSP ID: ENSP00000469421
MESPSAPPHRWCIPWQRLLLTASLLTFWNPPTTAKLTIESTPFNVAEGKEVLLLVHNLPQHLFGYSWYKGERVDGNRQIIGYVIGTQQATPGPAYSGREIIYPNASLLIQNIIQNDTGFYTLHVIKSDLVNEEATGQFRVYPELPKPSISSN

SEQ ID NO: 1029 - protein, 67 aa, Homo sapiens
  Payload ID: 233;
  Gene Symbol:;
  Gene Name: AC011513.3;
  ENSP ID: ENSP00000469926
MESPSAPPHRWCIPWQRLLLTASLLTFWNPPTTAKLTIESTPFNVAEGKEVLLLAHNLPQNRIGYSW

SEQ ID NO: 1030 - protein, 132 aa, Homo sapiens
  Payload ID: 234;
  Gene Symbol:;
  Gene Name: AC011530.4;
  ENSP ID: ENSP00000468837
PLVCKKIAQERLTVLLFLEDCIITACQEGLICTWARPGKAFTDEETEAQTGEGSWPRSPSKSVVEELGASELAQDKYVADFLQWAEPIVVRLKEVRLQRDDFEILKVIGRGAFSEVAVVKMKQTGQVYAMKI

SEQ ID NO: 1031 - protein, 107 aa, Homo sapiens
  Payload ID: 234;
  Gene Symbol:;
  Gene Name: AC011530.4;
  ENSP ID: ENSP00000469741
PLVCKKIAQERLTVLLFLEDCIITACQEGLICTWARPGKAELGASELAQDKYVADFLQWAEPIVVRLKEVRLQRDDFEILKVIGRGAFSEVAVVKMKQTGQVYAMKI

SEQ ID NO: 1032 - protein, 132 aa, Homo sapiens
  Payload ID: 234;
  Gene Symbol:;
  Gene Name: AC011530.4;
  ENSP ID: ENSP00000471312
  MOD_RES (1)..(1): Any amino acid
XGVAAEPGTPFSIGRFATLTLQERRDRGAEKEHKRYHSLGNISRGGSGGSGSGGEKPSGPVPRSRLDPAKVLGTALCPRIHEVPLLEPLVCKKIAQERLTVLLFLEDCIITACQEGLICTWARPGKARSPSW

SEQ ID NO: 1033 - protein, 56 aa, Homo sapiens
  Payload ID: 234;
  Gene Symbol:;
  Gene Name: AC011530.4;
  ENSP ID: ENSP00000472333
PLVCKKIAQERLTVLLFLEDCIITACQEGLICTWARPGKAPQIQGFPKCGSRTTCI

SEQ ID NO: 1034 - protein, 120 aa, Homo sapiens; identical to SEQ ID NO: 1024
  Payload ID: 235;
  Gene Symbol:;
  Gene Name: AC011841.1;
  ENSP ID: ENSP00000481644

SEQ ID NO: 1035 - protein, 25 aa, Homo sapiens
  Payload ID: 236;
  Gene Symbol:;
  Gene Name: AC012005.3;
  ENSP ID: ENSP00000485052
MRAKWRKKRTLRLKRQRRKMRQKSK

SEQ ID NO: 1036 - protein, 132 aa, Homo sapiens; identical to SEQ ID NO: 977
  Payload ID: 237;
  Gene Symbol:;
  Gene Name: AC012005.4;
  ENSP ID: ENSP00000485564

SEQ ID NO: 1037 - protein, 194 aa, Homo sapiens [sequence omitted]

SEQ ID NO: 1038 - protein, 139 aa, Homo sapiens
  Payload ID: 238;
  Gene Symbol:;
  Gene Name: AC012314.2;
  ENSP ID: ENSP00000486181
MPVARSWVCRKTYVTPRRPFEKSRLDQELKLIGEYGLRNKREVWRVKFTLAKIRKAARELLTLDEKDPRRLFEGNALLRRLVRIGVLDEGKMKLDYILGLKIEDFLERRLQTQVFKLGLAKSIHHARVLIRQRHISPRR

SEQ ID NO: 1039 - protein, 194 aa, Homo sapiens [sequence omitted]

SEQ ID NO: 1040 - protein, 139 aa, Homo sapiens; identical to SEQ ID NO: 1038
  Payload ID: 239;
  Gene Symbol:;
  Gene Name: AC012314.3;
  ENSP ID: ENSP00000486047

SEQ ID NO: 1041 - protein, 194 aa, Homo sapiens [sequence omitted]

SEQ ID NO: 1042 - protein, 139 aa, Homo sapiens; identical to SEQ ID NO: 1038
  Payload ID: 240;
  Gene Symbol:;
  Gene Name: AC012314.5;
  ENSP ID: ENSP00000485843

SEQ ID NO: 1043 - protein, 194 aa, Homo sapiens [sequence omitted]

SEQ ID NO: 1044 - protein, 139 aa, Homo sapiens; identical to SEQ ID NO: 1038
  Payload ID: 241;
  Gene Symbol:;
  Gene Name: AC012314.6;
  ENSP ID: ENSP00000486598

SEQ ID NO: 1045 - protein, 194 aa, Homo sapiens [sequence omitted]

SEQ ID NO: 1046 - protein, 139 aa, Homo sapiens; identical to SEQ ID NO: 1038
  Payload ID: 242;
  Gene Symbol:;
  Gene Name: AC012314.7;
  ENSP ID: ENSP00000486773

SEQ ID NO: 1047 - protein, 194 aa, Homo sapiens [sequence omitted]

SEQ ID NO: 1048 - protein, 139 aa, Homo sapiens; identical to SEQ ID NO: 1038
  Payload ID: 243;
  Gene Symbol:;
  Gene Name: AC012314.9;
  ENSP ID: ENSP00000486233

SEQ ID NO: 1049 - protein, 14 aa, Homo sapiens
  Payload ID: 244;
  Gene Symbol:;
  Gene Name: AC012363.2;
  ENSP ID: ENSP00000486995
LSGNESKGHSSLSL

SEQ ID NO: 1050 - protein, 149 aa, Homo sapiens
  Payload ID: 245;
  Gene Symbol:;
  Gene Name: AC013269.5;
  ENSP ID: ENSP00000386773
MTVNKIMVHADYNELHRMGSDITLLQLHHHVEFSSHILPACLPEPTTWLAPDSSCWISGWGMVTEDVFLPEPFQLQEAEVGVMDNTVCGSFFQPQYPGQPSSSDYTIHEDMLCAGDLITGKAICRCGELRPREEVYHPSETPGVPSSAH

SEQ ID NO: 1051 - protein, 16 aa, Homo sapiens
  Payload ID: 246;
  Gene Symbol:;
  Gene Name: AC013286.1;
  ENSP ID: ENSP00000487141
MAVSESIASTPQNHYT

SEQ ID NO: 1052 - protein, 93 aa, Homo sapiens
  Payload ID: 247;
  Gene Symbol:;
  Gene Name: AC015688.3;
  ENSP ID: ENSP00000463557
SWSPVIQRCSQPYGFSLLISFFLKCVSETSQQPPRQKNTACPALQTRSTRPRFRLLAINPTREMELHLLFLKMTPPTTKPVMTDSKCLHVYFS

SEQ ID NO: 1053 - protein, 66 aa, Homo sapiens
  Payload ID: 247;
  Gene Symbol:;
  Gene Name: AC015688.3;
  ENSP ID: ENSP00000464452
  MOD_RES (1)..(1): Any amino acid
XTSQQPPRQKNTACPALQTRSTRPRFRLLAINPTREMELHLLFLKMTPPTTKPVMTDSKCLHVYFS

SEQ ID NO: 1054 - protein, 124 aa, Homo sapiens [sequence omitted]

SEQ ID NO: 1055 - protein, 121 aa, Homo sapiens
  Payload ID: 249;
  Gene Symbol:;
  Gene Name: AC016549.1;
  ENSP ID: ENSP00000486279
MGALIISGSSAGPVTKQASLPPWGLSHGRCGFLLYMEMTLCSHRTQSFSELSQSLMRPGFLQMPYISCAKLSKIWFPASKPCLLAFLEVFLLMSRLSLFSKMICFLFLSFLFPPHIYTHAS

SEQ ID NO: 1056 - protein, 75 aa, Homo sapiens
  Payload ID: 250;
  Gene Symbol:;
  Gene Name: AC016577.1;
  ENSP ID: ENSP00000485075
MNPSEMQRKGPPRRWYLQVYPTAPKRQRPSRTGHDDDGGFVEKKRGKCGEKQERSNCYCVCVERSRHRRLHFVMC

SEQ ID NO: 1057 - protein, 268 aa, Homo sapiens
  Payload ID: 251;
  Gene Symbol:;
  Gene Name: AC016734.1;
  ENSP ID: ENSP00000480313
MAAVRALVASRLAAASAFTSLSPGGRTPSQRAALHLSVPRPAARVALVLSGCGVYDGTEIHEASAILVHLSRGGAEVQIFAPDVPQMHVIDHTKGQPSEGESRNVLTESARIARGKITDLANLSAANHDAAIFPGGFGAAKNLSTFAVDGKDCKVNKEVERVLKEFHQAGKPIGLCCIAPVLAAKVLRGVEVTVGHEQEEGGKWPYAGTAEAIKALGAKHCVKEVVEAHVDQKNKVVTTPAFMCETALHYIHDGIGAMVRKVLELTGK

SEQ ID NO: 1058 - protein, 182 aa, Homo sapiens
  Payload ID: 251;
  Gene Symbol:;
  Gene Name: AC016734.1;
  ENSP ID: ENSP00000483086
MHVIDHTKGQPSEGESRNVLTESARIARGKITDLANLSAANHDAAIFPGGFGAAKNLSTFAVDGKDCKVNKEVERVLKEFHQAGKPIGLCCIAPVLAAKVLRGVEVTVGHEQEEGGKWPYAGTAEAIKALGAKHCVKEVVEAHVDQKNKVVTTPAFMCETALHYIHDGIGAMVRKVLELTGK

SEQ ID NO: 1059 - protein, 106 aa, Homo sapiens
  Payload ID: 251;
  Gene Symbol:;
  Gene Name: AC016734.1;
  ENSP ID: ENSP00000485058
  MOD_RES (1)..(1): Any amino acid
XDGTEIHEASAILVHLSRGGAEVQIFAPDVPQMHVIDHTKGQPSEGESRNVLTESARIARGKITDLANLSAANHDAAIFPGGFGAAKNLGSPYSDPAKHRSLGLQL

SEQ ID NO: 1060 - protein, 237 aa, Homo sapiens
  Payload ID: 251;
  Gene Symbol:;
  Gene Name: AC016734.1;
  ENSP ID: ENSP00000485300
MAAVRALVASRLAAASAFTSLSPGGRTPSQRAALHLSVPRPAARVALVLSGCGVYDGTEIHEASAILVHLSRGGAEVQIFAPDVPQMHVIDHTKGQPSEGESRNVLTESARIARGKITDLANLSAANHDAAIFPGGFGAAKNLLCCIAPVLAAKVLRGVEVTVGHEQEEGGKWPYAGTAEAIKALGAKHCVKEVVEAHVDQKNKVVTTPAFMCETALHYIHDGIGAMVRKVLELTGK

SEQ ID NO: 1061 - protein, 224 aa, Homo sapiens
  Payload ID: 251;
  Gene Symbol:;
  Gene Name: AC016734.1;
  ENSP ID: ENSP00000485335
PSQRAALHLSVPRPAARVALVLSGCGVYDGTEIHEASAILVHLSRGGAEVQIFAPDVPQMHVIDHTKGQPSEGESRNVLTESARIARGKITDLANLSAANHDAAIFPGGFGAAKNLSTFAVDGKDCKVNKEVERVLKEFHQAGKPIGHSLKDLPGHCPGRPLKWSLRKRCRLRAPEGGPCCSRVTAGVKVSPMVSTSGSRPCQRSVPWMSAQREEPMALSSVTD

SEQ ID NO: 1062 - protein, 57 aa, Homo sapiens
  Payload ID: 251;
  Gene Symbol:;
  Gene Name: AC016734.1;
  ENSP ID: ENSP00000485404
MAAVRALVASRLAAASAFTSLSPGGRTPSQRAALHLSVPRPAARVALDPGAPEPWRG

SEQ ID NO: 1063 - protein, 137 aa, Homo sapiens
  Payload ID: 251;
  Gene Symbol:;
  Gene Name: AC016734.1;
  ENSP ID: ENSP00000485439
  MOD_RES (1)..(1): Any amino acid
XDGTEIHEASAILVHLSRGGAEVQIFAPDVPQMHVIDHTKGQPSEGESRNVLTESARIARGKITDLANLSAANHDAAIFPGGFGAAKNLSTFAVDGKDCKVNKEVERVLKEFHQAGKPIGGSPYSDPAKHRSLGLQL

SEQ ID NO: 1064 - protein, 25 aa, Homo sapiens
  Payload ID: 252;
  Gene Symbol:;
  Gene Name: AC016753.2;
  ENSP ID: ENSP00000486211
IIIIIIIIKFIFIYLFIFFETGSHC

SEQ ID NO: 1065 - protein, 88 aa, Homo sapiens
  Payload ID: 253;
  Gene Symbol:;
  Gene Name: AC017028.10;
  ENSP ID: ENSP00000485328
MRSQGQGGPGAWRRMESWSAEPAGPGQGRLGSPCEAAEQASFEKTVIGVGQARAALSEEEHRVWEAAAGVGGLEQWGCWEAGVTSGWG

SEQ ID NO: 1066 - protein, 126 aa, Homo sapiens
  Payload ID: 254;
  Gene Symbol:;
  Gene Name: AC017081.1;
  ENSP ID: ENSP00000485556
MVMTLNEHAAFKHLFNKAHLAPPLIHLTLSGHSTCFREHRVGGKVIDQQDPKAEEFFLVQNKMKSLPCLLLSTQTRQPSDFSIFSPPFPLFYSTKPPLSSWPVLNELLGTPPRRGGGRAEGLLTSQ

SEQ ID NO: 1067 - protein, 16 aa, Homo sapiens
  Payload ID: 255;
  Gene Symbol:;
  Gene Name: AC018512.1;
  ENSP ID: ENSP00000485162
MSQKKKKKSQKKEKKK

SEQ ID NO: 1068 - protein, 551 aa, Homo sapiens
  Payload ID: 256;
  Gene Symbol:;
  Gene Name: AC018755.18;
  ENSP ID: ENSP00000415200
MLPLLLLPLLWGGSLQEKPVYELQVQKSVTVQEGLCVLVPCSFSYPWRSWYSSPPLYVYWFRDGEIPYYAEVVATNNPDRRVKPETQGRFRLLGDVQKKNCSLSIGDARMEDTGSYFFRVERGRDVKYSYQQNKLNLEVTALIEKPDIHFLEPLESGRPTRLSCSLPGSCEAGPPLTFSWTGNALSPLDPETTRSSELTLTPRPEDHGTNLTCQMKRQGAQVTTERTVQLNVSYAPQTITIFRNGIALEILQNTSYLPVLEGQALRLLCDAPSNPPAHLSWFQGSPALNATPISNTGILELRRVRSAEEGGFTCRAQHPLGFLQIFLNLSVYSLPQLLGPSCSWEAEGLHCRCSFRARPAPSLCWRLEEKPLEGNSSQGSFKVNSSSAGPWANSSLILHGGLSSDLKVSCKAWNIYGSQSGSVLLLQGRSNLGTGVVPAALGGAGVMALLCICLCLIFFLIVKARRKQAAGRPEKMDDEDPIMGTITSGSRKKPWPDSPGDQASPPGDAPPLEEQKELHYASLSFSEMKSREPKDQEAPSTTEYSEIKTSK

SEQ ID NO: 1069 - protein, 551 aa, Homo sapiens; identical to SEQ ID NO: 1068
  Payload ID: 256;
  Gene Symbol:;
  Gene Name: AC018755.18;
  ENSP ID: ENSP00000470259

SEQ ID NO: 1070 - protein, 24 aa, Homo sapiens
  Payload ID: 257;
  Gene Symbol:;
  Gene Name: AC018867.1;
  ENSP ID: ENSP00000487424
IPPALASQAAGSTDSVSKKKKKII

SEQ ID NO: 1071 - protein, 15 aa, Homo sapiens
  Payload ID: 258;
  Gene Symbol:;
  Gene Name: AC018902.1;
  ENSP ID: ENSP00000486897
MVILKIYTEFSRVWI

SEQ ID NO: 1072 - protein, 64 aa, Homo sapiens
  Payload ID: 259;
  Gene Symbol:;
  Gene Name: AC019206.1;
  ENSP ID: ENSP00000485336
SRRRSKSSRRSSRRSSRRSRSKRSRSRRRSKSSRRSSRRSRRRSRTRRSRSSSRRSSTNRSSSK

SEQ ID NO: 1073 - protein, 51 aa, Homo sapiens
  Payload ID: 260;
  Gene Symbol:;
  Gene Name: AC021106.1;
  ENSP ID: ENSP00000485267
MKMELGRDVCSSALRIMKATNIKKRSGGRDTVAPQGMNQLGKEKKESLLSS

SEQ ID NO: 1074 - protein, 167 aa, Homo sapiens
  Payload ID: 261;
  Gene Symbol:;
  Gene Name: AC022016.1;
  ENSP ID: ENSP00000489443
MGKDFMTKTPKAMATKAKIDKWDLIKLKSFCTAKETTIRVNRQPTEWEKIFTIYPSDKGQSHYWVYTQRIINHATIKTHAHVCLLSIIKKQKQKQKQTSLPVVLALWEAKVGGLLELRRLRPAWAKWKNHVSTKNTKISWAWWCVPIVPATWEAEVGRSPEPQEVKV

SEQ ID NO: 1075 - protein, 18 aa, Homo sapiens
  Payload ID: 262;
  Gene Symbol:;
  Gene Name: AC022210.1;
  ENSP ID: ENSP00000485425
MTLPRKQTLSHEARKPLS

SEQ ID NO: 1076 - protein, 124 aa, Homo sapiens; identical to SEQ ID NO: 1019
  Payload ID: 263;
  Gene Symbol:;
  Gene Name: AC022405.1;
  ENSP ID: ENSP00000485588

SEQ ID NO: 1077 - protein, 27 aa, Homo sapiens
  Payload ID: 264;
  Gene Symbol:;
  Gene Name: AC022819.2;
  ENSP ID: ENSP00000485910
VTRLCTRISFSILPKNKNLFFNFTTLH

SEQ ID NO: 1078 - protein, 429 aa, Homo sapiens
  Payload ID: 265;
  Gene Symbol:;
  Gene Name: AC023491.2;
  ENSP ID: ENSP00000484693
MDSLWGPGAGSHPFGVHNTRLSPDLCPGKIVLRALKESGAGMPEQDKDPRVQENPGDQRRVPEVTGDAPSAFRPLRDNRGLSPFVPGPGPLQTDLHAQRSEIRYNQTSQISWTSSCTNRNAISSSYSSMGGLPGLKRRRGPASSHCQLTLSSSKTVSEDRPQAVSSGHTQCEKAADIAPGQTLALRNDSSTSEASRPSTHKFPLLPRRRGEPLMLPPPLELGYRVTVEDLDREKEAAFQRINSALQVEDKAISDCRPSRPSHTLSSLATGTSGLPAISKAPSMDVQQETHKSQDCLGLLAPLASAAGVPSTAPMSGKKHRPPGPLFSSSDPLPATSSHSQDSAQVTSLIPAPFPAASMDAGMRRTRCGTSAPAAAAAAPPPSTLNPTLGSLLEWMEALHISGPQPQLQQVPRGQNQRSQTSRTSSCPKR

SEQ ID NO: 1079 - protein, 21 aa, Homo sapiens
  Payload ID: 266;
  Gene Symbol:;
  Gene Name: AC024060.1;
  ENSP ID: ENSP00000486286
LKRLVDGVSLCRPGWSAVARS

SEQ ID NO: 1080 - protein, 18 aa, Homo sapiens [sequence omitted]

SEQ ID NO: 1081 - protein, 121 aa, Homo sapiens
  Payload ID: 268;
  Gene Symbol:;
  Gene Name: AC024592.12;
  ENSP ID: ENSP00000465499
MAPKVFRQYWDIPDGTDCHRKAYSTTSIASVAGLTAAAYRVTLNPPGTFLEGVAKVGQYTFTAAAVGAVFGLTTCISAHVREKPDDPLNYFLGGCAGGLTLGARKTGFHRVSQDGLDLLTS

SEQ ID NO: 1082 - protein, 169 aa, Homo sapiens
  Payload ID: 268;
  Gene Symbol:;
  Gene Name: AC024592.12;
  ENSP ID: ENSP00000466639
  MOD_RES (1)..(1): Any amino acid
XPKVFRQYWDIPDGTDCHRKAYSTTSIASVAGLTAAAYRVTLNPPGTFLEGVAKVGQYTFTADTGSERPRGSCCARLEALALPVYPAAAVGAVFGLTTCISAHVREKPDDPLNYFLGGCAGGLTLGARTTLTHGSPGPSQATVAVAPLSGRAAVSAAGGCVFLLLPACV

SEQ ID NO: 1083 - protein, 144 aa, Homo sapiens
  Payload ID: 268;
  Gene Symbol:;
  Gene Name: AC024592.12;
  ENSP ID: ENSP00000467210
  MOD_RES (1)..(1): Any amino acid
XPKVFRQYWDIPDGTDCHRKAYSTTSIASVAGLTAAAYRVTLNPPGTFLEGVAKVGQYTFTAAAVGAVFGLTTCISAHVREKPDDPLNYFLGGCAGGLTLGARTTLTHGSPGPSQATVAVAPLSGRAAVSAAGGCVFLLLPACV

SEQ ID NO: 1084 - protein, 76 aa, Homo sapiens
  Payload ID: 269;
  Gene Symbol:;
  Gene Name: AC025263.3;
  ENSP ID: ENSP00000454833
LQPIRFVKASAVECGGPKKCALTGQSKSCKHRIKLGDSSNYYYISPFCRYRITSVCNFFTYIRYIQQGLVKQQDVL

SEQ ID NO: 1085 - protein, 124 aa, Homo sapiens [sequence omitted]

SEQ ID NO: 1086 - protein, 185 aa, Homo sapiens
  Payload ID: 271;
  Gene Symbol:;
  Gene Name: AC026369.1;
  ENSP ID: ENSP00000480683
MESLLENPVRAVLYLKELTAIVQNQQSLIHTQRERIDELERRLDELSAENRSLWEHQQLLQAQPPPGLVPPSSAPLPAAPATAPAAAARAQEPLQDQGQRSAAAPHPAPDRPPRQHHGQLLEQPQRGPGSRAHTPQSPHKHLGTQGAVTDKEKERPPSCCAAAGALLQHKSPSALGKGVLSRRPE

SEQ ID NO: 1087 - protein, 21 aa, Homo sapiens
  Payload ID: 272;
  Gene Symbol:;
  Gene Name: AC026449.1;
  ENSP ID: ENSP00000485486
KVYFCFSLLHNFLRKRSWESF

SEQ ID NO: 1088 - protein, 291 aa, Homo sapiens
  Payload ID: 273;
  Gene Symbol:;
  Gene Name: AC037459.4;
  ENSP ID: ENSP00000399696
MDSEGGSLLLDEDSEVFKMLQENREGRAAPRQSSSFRLLQEALEAEERDGAGEGLARGCIVPGVTSTYRRIPDAAHGCSSWERGDKFRGVGREALFLKLASRDSGVEMAVGDSPLAALPGLSQDSLDFESSGSSEPPAQVGRLLASQKLGEVLERSRRLPTAPTSLSGQHRSLRLASKPEREVPLGAGQQESMEADTDLEAGLEEEAVGGLGPGAWACLPGQGLRYLEHLCLVLEQMARLQQLYLQLRIQRPPGDPGEEESTRAPLPSPLHTPGNRGQGPWELLSQTEHTG

SEQ ID NO: 1089 - protein, 132 aa, Homo sapiens
  Payload ID: 273;
  Gene Symbol:;
  Gene Name: AC037459.4;
  ENSP ID: ENSP00000428700
MDSEGGSLLLDEDSEVFKMLQENREGRAAPRQSSSFRLLQEALEAEERGGTPAFLPSSLSPQSSLPASRALATPPKLHTCEKCSTSIANQAVRIQEGRYRHPGCYTCADCGLNLKMRGHFWMGLARAWHGAA

SEQ ID NO: 1090 - protein, 141 aa, Homo sapiens
  Payload ID: 273;
  Gene Symbol:;
  Gene Name: AC037459.4;
  ENSP ID: ENSP00000429988
  MOD_RES (1)..(1): Any amino acid
XAVLVLPPSPGPRSSRPSMDSEGGSLLLDEDSEVFKMLQENREGRAAPRQSSSFRLLQEALEAEERGGTPAFLPSSLSPQSSLPASRALATPPKLHTCEKCSTSIAWGWRGPGTGLHSAWSHQHLQTDPRRCPRVLILGER

SEQ ID NO: 1091 - protein, 210 aa, Homo sapiens
  Payload ID: 274;
  Gene Symbol:;
  Gene Name: AC037482.2;
  ENSP ID: ENSP00000459798
MVSSCCGSVCSDQGCGQVLCQETCCRPSCCQTTCCRTTCYRPSCCVSSCCRPQCCQSVCCQPTCCRPSCCETTCCHPRCCISSCCRPSCCMSSCCKPQCCQSVCCQPTCCHPSCCISSCCRPSCCVSRCCRPQCCQSVCCQPTCCRPSCCISSCCRPSCCESSCCRPCCCRPCCCLRPVCGRVSCHTTCYRPTCVISTCPRPLCCASSCC

SEQ ID NO: 1092 - protein, 124 aa, Homo sapiens
  Payload ID: 275;
  Gene Symbol:;
  Gene Name: AC055733.1;
  ENSP ID: ENSP00000485356
MTLNEHAAFKHLFNKAHLAPPLIHLTLSGHSTCFREHRVGDKVTDQQDPKAEEFFLVQNKMKSLPCLLLSIQTRQPCDFSIFSPPFPPFYSTKPPLSSWPIPNEPLGTPPRRGGGRAEGLLTSQ

SEQ ID NO: 1093 - protein, 11 aa, Homo sapiens
  Payload ID: 276;
  Gene Symbol:;
  Gene Name: AC055866.1;
  ENSP ID: ENSP00000486664
GDFLPPGQVVL

SEQ ID NO: 1094 - protein, 17 aa, Homo sapiens
  Payload ID: 277;
  Gene Symbol:;
  Gene Name: AC063956.1;
  ENSP ID: ENSP00000485465
IKFRLFAISLILMLSVT

SEQ ID NO: 1095 - protein, 17 aa, Homo sapiens
  Payload ID: 278;
  Gene Symbol:;
  Gene Name: AC063956.2;
  ENSP ID: ENSP00000488950
IKFRLFAISLILMLSVT

SEQ ID NO: 1096 - protein, 95 aa, Homo sapiens
  Payload ID: 279;
  Gene Symbol:;
  Gene Name: AC064829.1;
  ENSP ID: ENSP00000485106
THLHRGLFLCQAAGNCRIQDISVVRSHWRKRFLNSEVVAENCFSDFIPERGCVQESGPMEIGLLSGKVEGPHPPLTRLYPLPYLILFLLTLCVPK

SEQ ID NO: 1097 - protein, 128 aa, Homo sapiens [sequence omitted]

SEQ ID NO: 1098 - protein, 124 aa, Homo sapiens
  Payload ID: 280;
  Gene Symbol:;
  Gene Name: AC066615.1;
  ENSP ID: ENSP00000453665
MTLNEHAAFKHLFNKAHLAPPLIHLTLSGHSTCFREHRVGDKVTDQQDPKAEEFFLVQNKMKSLPCLLLSTQTRQPSDFSIFSPPFPPFYSTKPPLSSWPIPNEPLGTPPRRGCGRAEGLLTSQ

SEQ ID NO: 1099 - protein, 307 aa, Homo sapiens
  Payload ID: 281;
  Gene Symbol:;
  Gene Name: AC068533.7;
  ENSP ID: ENSP00000396527
MDATSERDFVAEFLFWASLCMTHLSRMAEDLILYCTKEFSFVQLSDAYSTGSSLMPQKKNPDSLELIRSKAGRVFGRCAGLLMTLKGLPSTYNKDLQEDKEAVFEVSDTMSAVLQVATGVISTLQIHQENMGQALSPDMLATDLAYYLVRKGMPFRQAHEASGKAVFMAETKGVALNQLSLQELQTIRKDANSALLSNYEVFQLLTDLKEQRKESGKNKHSSGQQNLNTITYETLKYISKTPCRHQSPEIVREFLTALKSHKLTKAEKLQLLNHRPVTAVEIQLMVEESEERLTEEQIEALLHTVTS

SEQ ID NO: 1100 - protein, 22 aa, Homo sapiens
  Payload ID: 282;
  Gene Symbol:;
  Gene Name: AC069063.1;
  ENSP ID: ENSP00000485481
MTHIYSNFCFNKSVFAFDLIPM

SEQ ID NO: 1101 - protein, 36 aa, Homo sapiens
  Payload ID: 283;
  Gene Symbol:;
  Gene Name: AC069063.2;
  ENSP ID: ENSP00000485237
MIPLYPSFNFNKSHFAFQILPIATNILFFSGVAELI

SEQ ID NO: 1102 - protein, 227 aa, Homo sapiens
  Payload ID: 284;
  Gene Symbol:;
  Gene Name: AC069368.3;
  ENSP ID: ENSP00000397942
MEEEGVKEAGEKPRGAQMVDKAGWIKKSSGGLLGFWKDRYLLLCQAQLLVYENEDDQKCVETVELGSYEKCQDLRALLKRKHRFILLRSPGNKVSDIKFQAPTGEEKESWIKALNEGINRGKNKAFDEVKVDKSCALEHVTRDRVRGGQRRRPPTRVHLKEFGMNALLLSAWFGHLRILQILVNSGAKIHCESKEGNTALHLAAGRGHMAVLQRLVDIGLDLEEQNA

SEQ ID NO: 1103 - protein, 16 aa, Homo sapiens
  Payload ID: 285;
  Gene Symbol:;
  Gene Name: AC069499.1;
  ENSP ID: ENSP00000486986
AKSSCLKALLIRVSHY

SEQ ID NO: 1104 - protein, 41 aa, Homo sapiens
  Payload ID: 286;
  Gene Symbol:;
  Gene Name: AC073072.1;
  ENSP ID: ENSP00000486755
WLMPVISALWEAKVGGSPEICSFSGVQDQPGQHGETQSLQK

SEQ ID NO: 1105 - protein, 16 aa, Homo sapiens
  Payload ID: 287;
  Gene Symbol:;
  Gene Name: AC073130.2;
  ENSP ID: ENSP00000486045
LEQESEVKKMGKGHEQ

SEQ ID NO: 1106 - protein, 126 aa, Homo sapiens
  Payload ID: 288;
  Gene Symbol:;
  Gene Name: AC073333.1;
  ENSP ID: ENSP00000485072
MVMTLNEHAAFKHLFNKAHLAPPLIHLTLSGHSTCFREHRVGGKVIDQQDPKAEEFFLVQNKMKSLPCLLLSTQTQQPSDFSIFSPPFPLFYSTKPPLSSWPVLNELLGTPPRRGGGRAEGLLTSQ

SEQ ID NO: 1107 - protein, 62 aa, Homo sapiens
  Payload ID: 289;
  Gene Symbol:;
  Gene Name: AC073610.5;
  ENSP ID: ENSP00000443189
NKQDLPNAMNAAEITDKLGLHSLRHRNWYIQATCATSGDGLYEGLDWLANQLKNKNGCSGAV

SEQ ID NO: 1108 - protein, 60 aa, Homo sapiens
  Payload ID: 290;
  Gene Symbol:;
  Gene Name: AC073657.1;
  ENSP ID: ENSP00000485571
KNQSFFFLRRSFALSPRLECSGAISAHCKLCLPGSRHSPAPATREAEARESLEPGRWRLQ

SEQ ID NO: 1109 - protein, 15 aa, Homo sapiens
  Payload ID: 291;
  Gene Symbol:;
  Gene Name: AC074033.1;
  ENSP ID: ENSP00000486275
SGSNFDPFLQKLLKI

SEQ ID NO: 1110 - protein, 215 aa, Homo sapiens
  Payload ID: 292;
  Gene Symbol:;
  Gene Name: AC079355.1;
  ENSP ID: ENSP00000484537
TASGRWASPGPAWASRRPLQAQVVLKSASPGPAPASQQASSFGSAPAQLPPAFVDPELSPAKLLSPTSCLPVACTGPGLAGEQPLQAPLLPPRGVSRPSSRLTAASRDQVPACLPAACVRPSSSVTVACGPTHASGTLSRGVSPCLTLASLTLREVSVSPCLTLASLTLREVSVSPCLTLASLTLREVLPHAGLLRPSSCLCWLLLAQPLPVGGL

SEQ ID NO: 1111 - protein, 21 aa, Homo sapiens
  Payload ID: 293;
  Gene Symbol:;
  Gene Name: AC079907.1;
  ENSP ID: ENSP00000486880
NRFSLIVDHETGSCSVTQAGV

SEQ ID NO: 1112 - protein, 598 aa, Homo sapiens
  Payload ID: 294;
  Gene Symbol:;
  Gene Name: AC084219.2;
  ENSP ID: ENSP00000467018
MIDSGEKKPGRRAEEAVTFKDVAVIFTEEELGLLDPAQRKLYRDVMLENFRNLLSVGHQPFHGDTFHFLREEKFWVMGTTSQREGNLGTILLSLELCHSGLCKFPKVGGKMTMSKEAVTFKDVAVVFTEEELGLLDLAQRKLYRDVMLENFRNLLSVGHQPFHRDTFHFLREEKFWMMDIATQREGNSGGKIQPEMKTFPEAGPHEGWSCQQIWEEIASDLTRPQDSTIKSSQFFEQGDAHSQVEEGLSIMHTGQKPSNCGKCKQSFSDMSIFDLPQQIRSAEKSHSCDECGKSFCYISALHIHQRVHLGEKLFKCDVCGKEFSQSLHLQTHQRVHTGEKPFKCEQCGRGFRCRSALTVHCKLHMGEKHYNCEACGRAFIHDFQLQKHQRIHTGEKPFKCEICSVSFRLRSSLNRHCVVHTGKKPNSTGEYGKGFIRRLDLCKHQTIHTGEKPYNCKECGKSFRRSSYLLIHQRVHTGEKPYKCDKCGKSYITKSGLDLHHRAHTGERPYNCDDCGKSFRQASSILNHKRLHCRKKPFKCEDCGKKLVYRSYRKDQQKNHSGENPSKCEDCGKRYKRRLNLDIILSLFLNDTHNSVFS

SEQ ID NO: 1113 - protein, 32 aa, Homo sapiens
  Payload ID: 295;
  Gene Symbol:;
  Gene Name: AC087350.1;
  ENSP ID: ENSP00000487350
FLVLKKFKGLTFTQSKCFSKVMLYPGPSYYIV

SEQ ID NO: 1114 - protein, 19 aa, Homo sapiens
  Payload ID: 296;
  Gene Symbol:;
  Gene Name: AC087392.1;
  ENSP ID: ENSP00000486177
CSTVRLECTGMISAHCNLC

SEQ ID NO: 1115 - protein, 21 aa, Homo sapiens
  Payload ID: 297;
  Gene Symbol:;
  Gene Name: AC087651.1;
  ENSP ID: ENSP00000487442
RALRPSVLPGSTVRIKPELGG

SEQ ID NO: 1116 - protein, 21 aa, Homo sapiens
  Payload ID: 298;
  Gene Symbol:;
  Gene Name: AC087651.2;
  ENSP ID: ENSP00000486689
QMQKAVQSSLKRWGFTILARL

SEQ ID NO: 1117 - protein, 174 aa, Homo sapiens
  Payload ID: 299;
  Gene Symbol:;
  Gene Name: AC087762.1;
  ENSP ID: ENSP00000485301
MLCPCLGTASFPLPIWLPAAPCVPTPPAPVFGWPPLPAEPVPLRSCQQWGCARPPPVLQGAGFLLRPSRVSSSSAPCTRSADLTESAPLLQLALASCLPLSDPVVFCLLGLPPGLAAVSLPQLVFWGISNLPELPLPIWSPDLGSTTPLQNSPPSTPPWGLQAPSKEQQDSPSQ

SEQ ID NO: 1118 - protein, 57 aa, Homo sapiens
  Payload ID: 300;
  Gene Symbol:;
  Gene Name: AC090154.1;
  ENSP ID: ENSP00000485600
GWARWLTPVIPALWETEAGGSPEVRSSRPAWPTWRNPVSTKMTKLLQIYELMLEYQA

SEQ ID NO: 1119 - protein, 25 aa, Homo sapiens [sequence omitted]

SEQ ID NO: 1120 - protein, 107 aa, Homo sapiens
  Payload ID: 302;
  Gene Symbol:;
  Gene Name: AC090958.1;
  ENSP ID: ENSP00000487458
MALQTLQSSWVTFRKILSHFPEELSLAFVYGSGVYRQAGPSSDQKSYLTAASRTCWLPYPQSTFLQHGSLPFPVLPPVLPASLFNSRVLQDSDLSSLGEFLPPVPLI

SEQ ID NO: 1121 - protein, 17 aa, Homo sapiens
  Payload ID: 303;
  Gene Symbol:;
  Gene Name: AC091180.1;
  ENSP ID: ENSP00000486343
SKVEQNTTPSPHPPQPE

SEQ ID NO: 1122 - protein, 25 aa, Homo sapiens [sequence omitted]

SEQ ID NO: 1123 - protein, 46 aa, Homo sapiens
  Payload ID: 305;
  Gene Symbol:;
  Gene Name: AC092159.1;
  ENSP ID: ENSP00000485157
MAVTTFRRNIPIKTQQIWKTEHMKQKYLKIFRNLENLNYILRHRMS

SEQ ID NO: 1124 - protein, 16 aa, Homo sapiens
  Payload ID: 306;
  Gene Symbol:;
  Gene Name: AC092384.1;
  ENSP ID: ENSP00000486761
ADGDRQLLQQKVRSFP

SEQ ID NO: 1125 - protein, 306 aa, Homo sapiens
  Payload ID: 307;
  Gene Symbol:;
  Gene Name: AC092718.1;
  ENSP ID: ENSP00000485105
MGEDSPVAMFSWYLDNTPTEQAEPLLDACRLRGFWPRSLTLLQSNTSTLLLNSSFLQSRGEVIRIRATALTRHAYGEDTYVISTVPPREVPACTIAPEEGTVLTSFAIFCNASTALGPLEFCFCLESGSCLHCGPEPALPSVYLPLGEENNDFVLTVVISATNRAGDTQQTQAMAKVALGDTCVEDVAFQAAVSEKIPTALQGEGGPEQLLQLAKAVSSMLNQEHESQGSGQSLSIDVRQKVREHVLGSLSAVTTGLEDVQRVQELAEVLREVTCRSKELTPSAQGSCMGDSWEGAPPAAHVSHAR

SEQ ID NO: 1126 - protein, 522 aa, Homo sapiens
  Payload ID: 308;
  Gene Symbol:;
  Gene Name: AC092835.2;
  ENSP ID: ENSP00000478941
MEPEGRGSLFEDSDLLHAGNPKENDVTAVLLTPGSQELMIRDMAEALTQWRQLNSPQGDVPEKPRNLVLLGLPISTPDVISQLEHEEELEREVSKAASQKHWETIPESKELTPEKDISEEESAPGVLIVRFSKESSSECEDSLESQQENHEKHLIQEAVTEKSSRERSYQSDEFRRNCTQRSLLVQQQGERLHHCDSFKNNLKQNSDIIRHERICAGKKPWKCNECEKAFSYYSAFVLHQRIHTGEKPYECNECGKAFSQSIHLTLHQRIHTGEKPYECHECGKAFSHRSALIRHHIIHTGEKPYECNECGKAFNQSSYLTQHQRIHTGEKPYECNECGKAFSQSTFLTQHQVIHTGEKPYKCNECGKAFSDRSGLIQHQRTHTGERPYECNECGKAFGYCSALTQHQRTHTGEKPYKCNDCAKAFSDRSALIRHQRTHTGEKPYKCKDCGKAFSQSSSLTKHQKTHTGEKPYKCKECGKAFSQSSSLSQHQKTHAGVKTKKYVQALSEHLTFGQHKRIHTG

SEQ ID NO: 1127 - protein, 123 aa, Homo sapiens
  Payload ID: 308;
  Gene Symbol:;
  Gene Name: AC092835.2;
  ENSP ID: ENSP00000482715
MEPEGRGSLFEDSDLLHAGNPKENDVTAVLLTPGSQELMIRDMAEALTQWRQLNSPQGDVPEKPRNLVLLGLPISTPDVISQLEHEEELEREVSKAASQKRNSLGDNSPLKNVPFFWRKEGTF

SEQ ID NO: 1128 - protein, 118 aa, Homo sapiens
  Payload ID: 309;
  Gene Symbol:;
  Gene Name: AC092881.1;
  ENSP ID: ENSP00000485076
MQLEYKSMFIGFYSYHSMYSIHVNYWMKSPIIYIFGYNHTILELKTIQVSVPAFSGYLMALHNHFHPNLAKSKFKHFCIYSKTNSLSCLISVTLTSREGTLPSISLPPLTFLTIKNIQ

SEQ ID NO: 1129 - protein, 20 aa, Homo sapiens
  Payload ID: 310;
  Gene Symbol:;
  Gene Name: AC100821.2;
  ENSP ID: ENSP00000487589
ELMQEVKNISIKLENLRWYP

SEQ ID NO: 1130 - protein, 300 aa, Homo sapiens
  Payload ID: 311;
  Gene Symbol:;
  Gene Name: AC104057.1;
  ENSP ID: ENSP00000485196
MRGPDQMEIRGGPYLLLGEVVGHSALGAQPAQAANGDADELLELSALLQPRAGRGPCATLSGRCITPATALLLLSHRLRAQCRPMQATAAEAGSPGLGRLGKEPPSRESWTGSAPRRCPCQDASRAGSGVCRSRPQSRGGGSRKPRRQKAAATGQKAAAAQAKSLGGGGKKPRRQKCAAGQKAAAEESRRGGGKKPRRGGQKAVGAGAKKPQKAAAAGTKTPRRRRQKAAKAAVWGQKAAAGESLTPNSLASVSFSRPMFLRHYPFSSCECKSHKHGSTFDHFNCLTFHVTRPSTIESMY

SEQ ID NO: 1131 - protein, 301 aa, Homo sapiens
  Payload ID: 312;
  Gene Symbol:;
  Gene Name: AC104073.2;
  ENSP ID: ENSP00000485644
MRGPDQMEIRGGPYLLLGEVVGHSALGAQPAQAANGDADELLELSALLQPRAGRGPCATLSGRCITPATALLLLSHRLRAQCRSMQATAAEAGSPGLWRLGKEPPSRESWTGSAPRRCPCQDASRAGSGVCRSRPQSRGGGSRKPRRQKAAATGQKAAAAQAKSLGGGGKKPRRQKCAAAGQKAAAEESRRGGGKKPRRGGQKAVGAGAKKPQKAAAAGTKTPRQRRQKAAKAAVWGQKAAAGESLTPNSLASVSFSRPMFLRHYPFSSCECKSHKHGSTFDHFNCLTFHVTRPSTIESMY

SEQ ID NO: 1132 - protein, 137 aa, Homo sapiens
  Payload ID: 313;
  Gene Symbol:;
  Gene Name: AC104389.1;
  ENSP ID: ENSP00000485458
MDCQNGHQHISQELEVLRIHMQLVTVQFTQLGKGALEIIQVLYGISQGSQHLLAMCLDFGVAHDGRGRGQVAKAVKEPLGPWVDNQEPPSQGFSSSIFHIHLAPQACDSSLVLLCEMTHGVWTRSLLITSDVPEASV

SEQ ID NO: 1133 - protein, 137 aa, Homo sapiens
  Payload ID: 314;
  Gene Symbol:;
  Gene Name: AC104389.2;
  ENSP ID: ENSP00000485381
MDCQNGHQHISQELEVLRIHMQLVTVQFTQLGKGALEIIQVLCGISQGSQHLLAMCLDFGVAHDGRGRGQVAKAVKEPLGPWVDNQEPPSQGFSSSIFHIHLAPQACDSSLVLLCEMTHGVWTRSLLITSDVPEASV

SEQ ID NO: 1134 - protein, 68 aa, Homo sapiens
  Payload ID: 315;
  Gene Symbol:;
  Gene Name: AC104532.2;
  ENSP ID: ENSP00000468419
MSAPPALQIREANAHLAAVHRRAAELEARLDAAERTVHAQAERLALHDQQLRAALDELGRAKDRGTFH

SEQ ID NO: 1135 - protein, 321 aa, Homo sapiens
  Payload ID: 316;
  Gene Symbol:;
  Gene Name: AC104534.3;
  ENSP ID: ENSP00000470059
  MOD_RES (1)..(1): Any amino acid
XMVYGLDQSKMNCDRVFNVFCLYGNVEKVKFMKSKPGAAMVEMADGYAVDRAITHLNNNFMFGQKLNVCVSKQPAIMPGQSYGLEDGSCSYKDFSESRNNRFSTPEQAAKNRIQHPSNVLHFFNAPLEVTEENFFEICDELGVKRPSSVKVFSGKSERSSSGLLEWESKSDALETLGFLNHYQMKNPRLTGSNYPGLSISLRLTGSSAQEEASGVALGEAPDHSYESLRVTSAQKHVLHVQLNRPNKRNAMNKVFWREMVECFNKISRDADCRAVVISGAGKMFTAGIDLMDMASDILQPKGDDVARISWYLRDIITRYQE

SEQ ID NO: 1136 - protein, 114 aa, Homo sapiens
  Payload ID: 316;
  Gene Symbol:;
  Gene Name: AC104534.3;
  ENSP ID: ENSP00000471066
  MOD_RES (1)..(1): Any amino acid
XMVYGLDQSKMNCDRVFNVFCLYGNVEKICDELGVKRPSSVKVFSGKSERSSSGLLEWESKSDALETLGFLNHYQMKNPSIDLMDMASDILQPKGDDVARISWYLRDIITRYQE

SEQ ID NO: 1137 - protein, 114 aa, Homo sapiens; identical to SEQ ID NO: 1136
  Payload ID: 316;
  Gene Symbol:;
  Gene Name: AC104534.3;
  ENSP ID: ENSP00000489000
  MOD_RES (1)..(1): Any amino acid

SEQ ID NO: 1138 - protein, 321 aa, Homo sapiens; identical to SEQ ID NO: 1135
  Payload ID: 316;
  Gene Symbol:;
  Gene Name: AC104534.3;
  ENSP ID: ENSP00000489028
  MOD_RES (1)..(1): Any amino acid

SEQ ID NO: 1139 - protein, 16 aa, Homo sapiens
  Payload ID: 317;
  Gene Symbol:;
  Gene Name: AC104581.1;
  ENSP ID: ENSP00000487284
LWTRSLYLFGRNGVCL

SEQ ID NO: 1140 - protein, 28 aa, Homo sapiens
  Payload ID: 318;
  Gene Symbol:;
  Gene Name: AC104650.2;
  ENSP ID: ENSP00000487144
QNLPSTVSQAPLPYGRGPCRPQGGGSVR

SEQ ID NO: 1141 - protein, 124 aa, Homo sapiens [sequence omitted]

SEQ ID NO: 1142 - protein, 20 aa, Homo sapiens
  Payload ID: 320;
  Gene Symbol:;
  Gene Name: AC105009.1;
  ENSP ID: ENSP00000486401
EISPGAMDRVIRQFHYFQTN

SEQ ID NO: 1143 - protein, 160 aa, Homo sapiens [sequence omitted]

SEQ ID NO: 1144 - protein, 43 aa, Homo sapiens [sequence omitted]

SEQ ID NO: 1145 - protein, 124 aa, Homo sapiens [sequence omitted]

SEQ ID NO: 1146 - protein, 248 aa, Homo sapiens
  Payload ID: 324;
  Gene Symbol:;
  Gene Name: AC108938.5;
  ENSP ID: ENSP00000473841
MAFSGRARPCIIPENEEIPRAALNTVHEANGTEDERAVSKLQRRHSDVKVYKEFCDFYAKFNMANALASATCERCKGGFAPAETIVNSNGELYHEQCFVCAQCFQQFPEGLFYEFEGRKYCEHDFQMLFAPCCHQCGEFIIGRVIKAMNNSWHPECFRCDLCQEVLADIGFVKNAGRHLCRPCHNREKARGLGKYICQKCHAIIDEQPLIFKNDPYHPDHFNCANCGQEGSDCRCTGAERGAILPAMP

SEQ ID NO: 1147 - protein, 229 aa, Homo sapiens
  Payload ID: 325;
  Gene Symbol:;
  Gene Name: AC109344.1;
  ENSP ID: ENSP00000485520
MSPLIMGLDVNPDACLTALLDICKLLEAVCPSSPTSSGHEIPTQLLGKDLQSSLCPPFPLAWALLLPTPLLSFHPEGCAPSHSHCLACHLSLHPVQTSSSGLLAHQPVMGWMPKCRAKLMHLLLMSFSVCLMTSGDPSSSARQPRSPTLASAYLPSHGRQHPQSREVCASGTWNMQGFADRAPCYFLCPSHSLQNPHCSPVTTCALLIPSAPISHSPAILTPSATFLIP

SEQ ID NO: 1148 - protein, 124 aa, Homo sapiens
  Payload ID: 326;
  Gene Symbol:;
  Gene Name: AC109486.1;
  ENSP ID: ENSP00000485453
MTLNEHAAFKHLFNKAHLAPPLIHLTLSGHSTCFREHRVGGKVTDQQDPKAEEFFLVQNKMKSLPCLPLSTQTQQPSDFSIFSPPFPPFYSTKPPLSSWPVLNELLGTPPRWGGGRAEGLLTSQ

SEQ ID NO: 1149 - protein, 261 aa, Homo sapiens
  Payload ID: 327;
  Gene Symbol:;
  Gene Name: AC109829.1;
  ENSP ID: ENSP00000403181
MAPIWGMDVPLPSDISLLLLFVFFIWRLWTLFSRNRSWKQVAAKINSETSKQHRLKKIQKLTGQRDPILYSSAQDPQWEENLRMACTEANLTCVSELPVGWTQEYILWSMERSLQQIFRYLESARSRLVEQDLPESQDMISSSTTSVLVAQKTVLCCCDYKKAKHSTDHSISFSSSCNDSSLSHLPVFSEGTTWEFRSHSLPISHKKQSSVFRNQGRTLPLFQLSEPQKSKIFQNLADLSPLQPQSSFINSISEPLNICKQ

SEQ ID NO: 1150 - protein, 124 aa, Homo sapiens [sequence omitted]

SEQ ID NO: 1151 - protein, 36 aa, Homo sapiens
  Payload ID: 329;
  Gene Symbol:;
  Gene Name: AC110602.1;
  ENSP ID: ENSP00000487518
IREAGSSDSPTSPSRVAGNIILTPQACMFVKQLYLS

SEQ ID NO: 1152 - protein, 92 aa, Homo sapiens
  Payload ID: 330;
  Gene Symbol:;
  Gene Name: AC110615.1;
  ENSP ID: ENSP00000485507
MENLPGSYFILFLFFKSASRSANCFSRKERLFFDRTFWLYRIIIKFFCFFFSLFVELENGFVLVFFLTNSFRSVFPAIAVASLVSLSDFGFL

SEQ ID NO: 1153 - protein, 30 aa, Homo sapiens
  Payload ID: 331;
  Gene Symbol:;
  Gene Name: AC112719.2;
  ENSP ID: ENSP00000487114
SSVRVFNSDPEQPSKIGAIVIYILQKRKQA

SEQ ID NO: 1154 - protein, 156 aa, Homo sapiens
  Payload ID: 332;
  Gene Symbol:;
  Gene Name: AC118758.1;
  ENSP ID: ENSP00000469705
MASGRWAPPGPAWASQRPLQTQVVLKSASPGPAPASRQAICFGSAPAQLPLAFGGPKLSPAKLFRPTSCLPVACTGPALAGEQPLQAPLLPPRGLSRPSSRPTVASWGQVPACLPAARERPSSSLTVACLGPTRVSGTLSRGVSPCLTLASLMLRE

SEQ ID NO: 1155 - protein, 96 aa, Homo sapiens
  Payload ID: 333;
  Gene Symbol:;
  Gene Name: AC123512.1;
  ENSP ID: ENSP00000485642
MNVCCSSHPVNEKVWKPSSRKWSSKVWSMDEFDLQTACYWFMTRSTNCILRAQISREQCNLSQKDDYVYALSCLFPCLTQRRHKEKVSSAWINWRL

SEQ ID NO: 1156 - protein, 85 aa, Homo sapiens
  Payload ID: 334;
  Gene Symbol:;
  Gene Name: AC123512.2;
  ENSP ID: ENSP00000485548
MNVCCSSHPVNEKVWKPSSRKWSSKVWSMDEFDLQTACYWFMTRSTNCILRAQISREQCNLSQKDDYVYALSCVCMCMYIRYFHA

SEQ ID NO: 1157 - protein, 138 aa, Homo sapiens
  Payload ID: 335;
  Gene Symbol:;
  Gene Name: AC124312.1;
  ENSP ID: ENSP00000485422
MEPIYRVLSRKKISITNLLTTDFHCCYENTMGTKKSSAMKKNEPKNNKDVALGSLPNHKELSTSGEQGNPEPALKDKPGHTEAGYRLTLLCHLHIHPVLQTLCVLPSLTKRSPSHKESPLHRSTYCPVTPFDPKWTPS

SEQ ID NO: 1158 - protein, 32 aa, Homo sapiens
  Payload ID: 336;
  Gene Symbol:;
  Gene Name: AC126407.1;
  ENSP ID: ENSP00000486685
APPAAPRSALAESGAADSPEGSQTGRSGPDTP

SEQ ID NO: 1159 - protein, 133 aa, Homo sapiens
  Payload ID: 337;
  Gene Symbol:;
  Gene Name: AC129492.1;
  ENSP ID: ENSP00000485311
MQPTLSAVSSCTAPPRPRSRRSTRPPSSRLNRSRSRSTSGSIGGMAGVGVGAGAGQGRAGAEGGGGGAPLRRILSCRLLATKWVRSPWRLTVPSSSRGLEMVARRPPPAPDSALPEDPAPPHASLSPSRLRLS

SEQ ID NO: 1160 - protein, 198 aa, Homo sapiens
  Payload ID: 338;
  Gene Symbol:;
  Gene Name: AC130310.1;
  ENSP ID: ENSP00000484037
MGLQQQTGTQQLEPHPPQPEPQPPLDPPQEPQPPLEPPQEPQPPLDPPQEHSPPCSLHRSHSPPWSPQKSHSPLCHSWSRNRLAHGSTRACSSRRAHSSWSQNLHSQSHSPHSRSHSPHSRSHSPHSWSHSLRSSRNSPWFWWIEGGAGRGAGEREVQVWSSLSLDPLYPCPGSCVRLGTHFLVPVCAIFRAPFSCFL

SEQ ID NO: 1161 - protein, 57 aa, Homo sapiens
  Payload ID: 339;
  Gene Symbol:;
  Gene Name: AC131263.1;
  ENSP ID: ENSP00000487024
DRVSLCCPGWNVVVLSQLTAASASAGLKLLTSGDLPASASQSAGIIGVSHHARLTCK

SEQ ID NO: 1162 - protein, 102 aa, Homo sapiens
  Payload ID: 340;
  Gene Symbol:;
  Gene Name: AC133551.1;
  ENSP ID: ENSP00000479378
MRASPCISQPAASWHPRPSALRPTAGSGPDTRTPGTVEDGSAPCPAFRSPAVSPCGEEPCCFQISPAEETLELGRLVSPGCHKSSAPQERRLDPRARCVVHI

SEQ ID NO: 1163 - protein, 581 aa, Homo sapiens
  Payload ID: 341;
  Gene Symbol:;
  Gene Name: AC136352.4;
  ENSP ID: ENSP00000478796
MVAEVCSMPAASAVKKPFDLRSKMGKWCHHRFPCCRGSGKSNMGTSGDHDDSFMKTLRSKMGKCCHHCFPCCRGSGTSNVGTSGDHDNSFMKTLRSKMGKWCCHCFPCCRGSGKSNVGTWGDYDDSAFMEPRYHVRREDLDKLHRAAWWGKVPRKDLIVMLRDTDMNKRDKQKRTALHLASANGNSEVVQLLLDRRCQLNVLDNKKRTALIKAVQCQEDECVLMLLEHGADGNIQDEYGNTALHYAIYNEDKLMAKALLLYGADIESKNKCGLTPLLLGVHEQKQEVVKFLIKKKANLNALDRYGRTALILAVCCGSASIVNLLLEQNVDVSSQDLSGQTAREYAVSSHHHVICELLSDYKEKQMLKISSENSNPEQDLKLTSEEESQRLKVSENSQPEKMSQEPEINKDCDREVEEEIKKHGSNPVGLPENLTNGASAGNGDDGLIPQRKSRKPENQQFPDTENEEYHSDEQNDTQKQLSEEQNTGISQDEILTNKQKQIEVAEKEMNSELSLSHKKEEDLLRENSMLREEIAMLRLELDETKHQNQLRENKILEEIESVKEKLLKAIQLNEEALTKTSI

SEQ ID NO: 1164 - protein, 381 aa, Homo sapiens
  Payload ID: 341;
  Gene Symbol:;
  Gene Name: AC136352.4;
  ENSP ID: ENSP00000479796
MVAEVCSMPAASAVKKPFDLRSKMGKWCHHRFPCCRGSGKSNMGTSGDHDDSFMKTLRSKMGKCCHHCFPCCRGSGTSNVGTSGDHDNSFMKTLRSKMGKWCCHCFPCCRGSGKSNVGTWGDYDDSAFMEPRYHVRREDLDKLHRAAWWGKVPRKDLIVMLRDTDMNKRDKQKRTALHLASANGNSEVVQLLLDRRCQLNVLDNKKRTALIKAVQCQEDECVLMLLEHGADGNIQDEYGNTALHYAIYNEDKLMAKALLLYGADIESKNKCGLTPLLLGVHEQKQEVVKFLIKKKANLNALDRYGRTALILAVCCGSASIVNLLLEQNVDVSSQDLSGQTAREYAVSSHHHVICELLSDYKEKQMLKISSENSNPGKEAEE

SEQ ID NO: 1165 - protein, 199 aa, Homo sapiens
  Payload ID: 342;
  Gene Symbol:;
  Gene Name: AC136352.5;
  ENSP ID: ENSP00000482263
MALLLRFVLLCRVADFIRGWSITTPEQMIEKAKGETAYLPCKFTLSPEDQGPLDIEWLISPADNQKVDQVIILYSGDKIYDDYYPDLKGRVHFKSNDLKSGDASINVTNFQLSDIGTDQCKVKRAPGVANRKIQLVVLGKMCRLQRAARPLPEATAVIIHPWDPYLLPTWKDIPRLSINKYQVKTLNALLRVRLSHLLR

SEQ ID NO: 1166 - protein, 124 aa, Homo sapiens
  Payload ID: 343;
  Gene Symbol:;
  Gene Name: AC136612.1;
  ENSP ID: ENSP00000482038
MRASPCISQPAASWHPRPSALRPTAGSGPDTRTPGTVEDGSAPCPAFRSPAVSPCGEEPCCFQISPAEETLELGRLVSPGNCDTLSPRAAGFYACHVRSLIPCRSTKGRWPLTASAAGLSSFSG

SEQ ID NO: 1167 - protein, 635 aa, Homo sapiens
  Payload ID: 344;
  Gene Symbol:;
  Gene Name: AC136616.1;
  ENSP ID: ENSP00000480079
MAKKSAENGICSVSGDQKKGPLIAPGPDGARAKGDGPAGLGTPGGGLAVPARATWTRQMDFIMSCVGFAVDLGNVWRFPYLCYKNGGGVFLIPCILIALVGGIPIFFLEISLGQFMKAGSINVWNICPLFKGLGYASMVIVFYCNTYYIMVLAWGFYYLVKSFTTTLPWATCGHTWNTPDCVEIFRHEDCASASLANLTCDQLADRRSPVIEFWENKVLRLSGGLEVPGALNWEVTLCLLACWVLVYFCVKGVKSMGKIVYFTATFPYVVLVVLLVLGVLLPGTLDSIIYYLKPDWSKLGSPQVWIDVGTQIFFSYAIGLGALTALGSYNRFNNNCYKDAIILAVINSGTSFFAGFVVFSILGFMAAEQGMHISKVAESGPGLAFIAYPQAVTLMPVAPLWAALFFFMLLLLGLDSQFVGVEGFITGLLNLLPASYYFCFQREISVALCCALRFVIDLSMVTDGGMYVFQLFDYYSASGTTLLWQAFWECVVVAWVYGADRFTDDIACMIGYRPCPWMKWCWSFFTPLVCMGIFIFNVVYYEPLVYNNTNVYPWWGEAMGWAFVLSSMLCMPLHLLGCLLRAKGTMAECWKHLTQTIWGLHHLEYRAQDADVRGLTTLTPVSESSKVVVVESVMG

SEQ ID NO: 1168 - protein, 520 aa, Homo sapiens
  Payload ID: 344;
  Gene Symbol:;
  Gene Name: AC136616.1;
  ENSP ID: ENSP00000482251
MKAGSINVWNICPLFKGLGYASMVIVFYCNTYYIMVLAWGFYYLVKSFTTTLPWATCGHTWNTPDCVEIFRHEDCASASLANLTCDQLADRRSPVIEFWENKVLRLSGGLEVPGALNWEVTLCLLACWVLVYFCVKGVKSMGKIVYFTATFPYVVLVVLLVLGVLLPGTLDSIIYYLKPDWSKLGSPQVWIDVGTQIFFSYAIGLGALTALGSYNRFNNNCYKDAIILAVINSGTSFFAGFVVFSILGFMAAEQGMHISKVAESGPGLAFIAYPQAVTLMPVAPLWAALFFFMLLLLGLDSQFVGVEGFITGLLNLLPASYYFCFQREISVALCCALRFVIDLSMVTDGGMYVFQLFDYYSASGTTLLWQAFWECVVVAWVYGADRFTDDIACMIGYRPCPWMKWCWSFFTPLVCMGIFIFNVVYYEPLVYNNTNVYPWWGEAMGWAFVLSSMLCMPLHLLGCLLRAKGTMAECWKHLTQTIWGLHHLEYRAQDADVRGLTTLTPVSESSKVVVVESVMG

SEQ ID NO: 1169 - protein, 112 aa, Homo sapiens
  Payload ID: 345;
  Gene Symbol:;
  Gene Name: AC136616.2;
  ENSP ID: ENSP00000479675
AILKGVQCEVQLVESAGGLVQPGGSLRLSCAASGFTCSNAWMSWVRQAPGKGLEWVGRIKSKANGGTTDYAAPVKGRFTISRVDSKNTLYLQMNSLKTEDTAVYYCTTGGGV

SEQ ID NO: 1170 - protein, 75 aa, Homo sapiens
  Payload ID: 345;
  Gene Symbol:;
  Gene Name: AC136616.2;
  ENSP ID: ENSP00000484138
ASGFTCSNAWMSWVRQAPGKGLEWVGRIKSTGGGTYYADSVKGRFTISRDNAKNSLYLQMNSLRAEDMAVYYCAR

SEQ ID NO: 1171 - protein, 95 aa, Homo sapiens
  Payload ID: 346;
  Gene Symbol:;
  Gene Name: AC136616.3;
  ENSP ID: ENSP00000479119
QVQLLQPGAEVKKPGSSVKVSCQASGYTFTSYDIHCVRQAPGGFERMGGIYSGNGKTGYAQKFQGRVTMTRDMSTSTAYMELSSQRSEDIDVYYC

SEQ ID NO: 1172 - protein, 24 aa, Homo sapiens
  Payload ID: 347;
  Gene Symbol:;
  Gene Name: AC138028.1;
  ENSP ID: ENSP00000487195
LTPVGEAFGDCSPSIPPPWPRPTR

SEQ ID NO: 1173 - protein, 153 aa, Homo sapiens
  Payload ID: 348;
  Gene Symbol:;
  Gene Name: AC138969.4;
  ENSP ID: ENSP00000330634
MAAVEHRHSSGLPYWPYLTAETLKNRMGHQPPPPTQQHSIIDNSLSLKTPSECVLYPLPPSADDNLKTPPECLLTPLPPSALPSADDNLKTPAECLLYPLPPSADDNLKTPPECLLTPLPPSAPPSADDNLKTPPECVCSLPFHPQRMIISRN

SEQ ID NO: 1174 - protein, 369 aa, Homo sapiens
  Payload ID: 348;
  Gene Symbol:;
  Gene Name: AC138969.4;
  ENSP ID: ENSP00000370908
MFCCLGYEWLSGGCKTWHSAWVINTLADHRHRGTDFGGSPWLLIITVFLRSYKFAISLCTSYLCVSFLKTIFPSQNGHDGSTDVQQRARRSNCRRQEGIKIVLEDIFTLWRQVETKVRAKIRKMKVTTKVNRHDKINGKRKTAKEHLRKLSMKEREHGEKERQVSEAEENGKLDMKEIHTYMEMFQRAQALRRRAEDYYRCKITPSARKPLCNRVRMAAVEHRHSSGLPYWPYLTAETLKNRMGHQPPPPTQQHSIIDNSLSLKTPSECVLYPLPPSADDNLKTPPECLLTPLPPSALPSADDNLKTPAECLLYPLPPSADDNLKTPPECLLTPLPPSAPPSADDNLKTPPECVCSLPFHPQRMIISRN

SEQ ID NO: 1175 - protein, 270 aa, Homo sapiens
  Payload ID: 348;
  Gene Symbol:;
  Gene Name: AC138969.4;
  ENSP ID: ENSP00000435610
  MOD_RES (1)..(1): Any amino acid
XRHRGTDFGGSPWLLIITVFLRSYKFAISLCTSYLCVSFLKTIFPSQNGHDGSTDVQQRARRSNCRRQEGIKIVLEDIFTLWRQVETKVRAKIRKMKVTTKVNRHDKINGKRKTAKEHLRKLSMKEREHGEKERQVSEAEENGKLDMKEIHTYMEMFQRAQALRRRAEDYYRCKITPSARKPLCNRVSLLVFLAFGHSLPGQDMDTFFSLRLCAQALQREMAERKAAYKHHSPIPVGNCVAQKHLHPHPVGPPSNILSIRGSVFVIANGP

SEQ ID NO: 1176 - protein, 114 aa, Homo sapiens
  Payload ID: 348;
  Gene Symbol:;
  Gene Name: AC138969.4;
  ENSP ID: ENSP00000436257
AKIRKMKVTTKVNRHDKINGKRKTAKEHLRKLSMKEREHGEKERQVSEAEENGKLDMKEIHTYMEMFQRAQALRRRAEDYYRCKITPSARKPLCNRCTYNLVLPGSEKKYYSHA

SEQ ID NO: 1177 - protein, 232 aa, Homo sapiens
  Payload ID: 348;
  Gene Symbol:;
  Gene Name: AC138969.4;
  ENSP ID: ENSP00000441983
MFCCLGYEWLSGGCKTWHSAWVINTLADHRHRGTDFGGSPWLLIITVFLRSYKFAISLCTSYLCVSFLKTIFPSQNGHDGSTDVQQRARRSNCRRQEGIKIVLEDIFTLWRQVETKVRAKIRKMKVTTKVNRHDKINGKRKTAKEHLRKLSMKEREHGEKERQVSEAEENGKLDMKEIHTYMEMFQRAQALRRRAEDYYRCKITPSARKPLCNRCTYNLVLPGSEKKYYSHA

SEQ ID NO: 1178 - protein, 96 aa, Homo sapiens
  Payload ID: 349;
  Gene Symbol:;
  Gene Name: AC141272.1;
  ENSP ID: ENSP00000478725
EVQLVESGGGLVQPGGSLRLSCAASGFTFSNHYTSWVRQAPGKGLEWVSYISGNSGYTNYADSVKGRFTISRDNAKNSLYLQMNSLRAEDTAVYYC

SEQ ID NO: 1179 - protein, 25 aa, Homo sapiens
  Payload ID: 350;
  Gene Symbol:;
  Gene Name: AC142525.1;
  ENSP ID: ENSP00000485802
QRSPRWEDSYPSAWEGFKENQTGSL

SEQ ID NO: 1180 - protein, 129 aa, Homo sapiens
  Payload ID: 351;
  Gene Symbol:;
  Gene Name: AC145212.2;
  ENSP ID: ENSP00000478910
MFPVSSGCFQEQQETNKSLPRSASTPETRTKFTQDNLCHAQRERLDSANLWVLVDCILRDTSEDLGLQCDAVNLAFGRRCEELEDARHKLQHHLHKMLREITDQEHNVVALKEAIKDKEEPLHIAQTRL

SEQ ID NO: 1181 - protein, 43 aa, Homo sapiens
  Payload ID: 352;
  Gene Symbol:;
  Gene Name: AC156455.2;
  ENSP ID: ENSP00000486263
MTALFPGLAPETEQPDIHTPRRQLEVPPGNQNHPQRRPPDTDI

SEQ ID NO: 1182 - protein, 316 aa, Homo sapiens
  Payload ID: 353;
  Gene Symbol:;
  Gene Name: AC171558.1;
  ENSP ID: ENSP00000480318
MKIANNTVVTEFILLGLTQSQDIQLLVFVLILIFYLIILPGNFLIIFTIRSDPGLTAPLYFFLGNLAFLDASYSFIVAPRMLVDFFSEKKVISYRGCITQLFFLHFLGGGEGLLLVVMAFDRYIAICRPLHCSTVMNPRACYAMMLALWLGGFVHSIIQVVLILRLPFCGPNQLDNFFCDVRQVIKLACTDMFVVELLMVFNSGLMTLLCFLGLLASYAVILCHVRRAASEGKNKAMSMCTTRVIIILLMFGPAIFIYMCPFRALPADKMVSLFHTVIFPLMNPMIYTLRNQEVKTSMKRLLSRHVVCQVDFIIRN

SEQ ID NO: 1183 - protein, 313 aa, Homo sapiens
  Payload ID: 354;
  Gene Symbol:;
  Gene Name: AC171558.2;
  ENSP ID: ENSP00000484075
METANYTKVTEFVLTGLSQTPEVQLVLFVIFLSFYLFILPGNILIICTISLDPHLTSPMYFLLANLAFLDIWYSSITAPEMLIDFFVERKIISFDGCIAQLFFLHFAGASEMFLLTVMAFDLYTAICRPLHYATIMNQRLCCILVALSWRGGFIHSIIQVALIVRLPFCGPNELDSYFCDITQVVRIACANTFPEELVMICSSGLISVVCLIALLMSYAFLLALLKKLSGSGENTNRAMSTCYSHITIVVLMFGPSIYIYARPFDSFSLDKVVSVFNTLIFPLRNPIIYTLRNKEVKAAMRKLVTKYILCKEK

SEQ ID NO: 1184 - protein, 497 aa, Homo sapiens
  Payload ID: 355;
  Gene Symbol: CYP2D6;
  Gene Name: AC208162.1;
  ENSP ID: ENSP00000486407
MGLEALVPLAVIVAIFLLLVDLMHRRQRWAARYSPGPLPLPGLGNLLHVDFQNTPYCFDQLRRRFGDVFSLQLAWTPVVVLNGLAAVREALVTHGEDTADRPPVPITQILGFGPRSQGVFLARYGPAWREQRRFSVSTLRNLGLGKKSLEQWVTEEAACLCAAFANHSGRPFRPNGLLDKAVSNVIASLTCGRRFEYDDPRFLRLLDLAQEGLKEESGFLREVLNAVPVLLHIPALAGKVLRFQKAFLTQLDELLTEHRMTWDPAQPPRDLTEAFLAEMEKAKGNPESSFNDENLRIVVADLFSAGMVTTSTTLAWGLLLMILHPDVQRRVQQEIDDVIGQVRRPEMGDQAHMPYTTAVIHEVQRFGDIVPLGVTHMTSRDIEVQGFRIPKGTTLITNLSSVLKDEAVWEKPFRFHPEHFLDAQGHFVKPEAFLPFSAGRRACLGEPLARMELFLFFTSLLQHFSFSVAAGQPRPSHSRVVSFLVTPSPYELCAVPR

SEQ ID NO: 1185 - protein, 446 aa, Homo sapiens
  Payload ID: 355;
  Gene Symbol: CYP2D6;
  Gene Name: AC208162.1;
  ENSP ID: ENSP00000487524
MGLEALVPLAVIVAIFLLLVDLMHRRQRWAARYSPGPLPLPGLGNLLHVDFQNTPYCFDQLRRRFGDVFSLQLAWTPVVVLNGLAAVREALVTHGEDTADRPPVPITQILGFGPRSQGRPFRPNGLLDKAVSNVIASLTCGRRFEYDDPRFLRLLDLAQEGLKEESGFLREVLNAVPVLLHIPALAGKVLRFQKAFLTQLDELLTEHRMTWDPAQPPRDLTEAFLAEMEKAKGNPESSFNDENLRIVVADLFSAGMVTTSTTLAWGLLLMILHPDVQRRVQQEIDDVIGQVRRPEMGDQAHMPYTTAVIHEVQRFGDIVPLGVTHMTSRDIEVQGFRIPKGTTLITNLSSVLKDEAVWEKPFRFHPEHFLDAQGHFVKPEAFLPFSAGRRACLGEPLARMELFLFFTSLLQHFSFSVAAGQPRPSHSRVVSFLVTPSPYELCAVPR

SEQ ID NO: 1186 - protein, 176 aa, Homo sapiens
  Payload ID: 356;
  Gene Symbol:;
  Gene Name: AC213203.1;
  ENSP ID: ENSP00000478882
MGNHELMTSWLLDVRKNLQSQRELSKFCPEQTEGWRCHRLRWENGRCHRLQGKVGDQLRAPEPSWKEFPIQPASVSASVLFLMTLRVLASGSFMMQRVPPSHPGRLRAPASSWQPGARLRIWRPTTGWSLAATSQRRISSPVVSCGRVAVTRSRTRDSWPWCPSRSPRCVACRLFF

SEQ ID NO: 1187 - protein, 84 aa, Homo sapiens
  Payload ID: 357;
  Gene Symbol:;
  Gene Name: AC231657.1;
  ENSP ID: ENSP00000485675
MEPRTGGAANPKGSRGRPGPLPPACPSALPLLARLDARPLAARAAVDVAALVHRAGATLRLRRKEAFIVLGCKDNNVMDSRLPH

SEQ ID NO: 1188 - protein, 117 aa, Homo sapiens
  Payload ID: 358;
  Gene Symbol:;
  Gene Name: AC233755.1;
  ENSP ID: ENSP00000478289
MKHLWFFLLLVAAPRWVLSQVQLQESGPGLVKPSETLSLTCTVSGYSISSGYYWGWIRQPPGKGLEWIGSIYHSGSTYYNPSLKSRVTISVDTSKNQFSLKLSSVTAADTAVYYCAR

SEQ ID NO: 1189 - protein, 98 aa, Homo sapiens
  Payload ID: 359;
  Gene Symbol:;
  Gene Name: AC233755.2;
  ENSP ID: ENSP00000481152
EVQLVESGGVVVQPGGSLRLSCAASGFTFDDYAMHWVRQAPGKGLEWVSLISWDGGSTYYADSVKGRFTISRDNSKNSLYLQMNSLRAEDTALYYCAK

SEQ ID NO: 1190 - protein, 101 aa, Homo sapiens
  Payload ID: 360;
  Gene Symbol:;
  Gene Name: AC234582.1;
  ENSP ID: ENSP00000485039
AGGAVEPGAGLLSGAEVTPWAAGAVEPGAGLLSGAEVTPWAGGAVEPGAGLVSGAEVTPWAGGAVEPGAGLVSGAEVTPWAWGAVEPGAGLVSGAEVTPWA

SEQ ID NO: 1191 - protein, 101 aa, Homo sapiens
  Payload ID: 361;
  Gene Symbol:;
  Gene Name: AC234582.2;
  ENSP ID: ENSP00000485187
AGGAVEPGAGLVSGAEVTPWAAGAVEPGDGLVSGAEVTPWAGGAVEPGAGLVSGAEVTPWAGGAVEPGAGLVSGAEVTPWAGGAVEPGAGLVSGAEVTPWA

SEQ ID NO: 1192 - protein, 446 aa, Homo sapiens
  Payload ID: 362;
  Gene Symbol:;
  Gene Name: AC236040.1;
  ENSP ID: ENSP00000475794
MGLEALVPLAVIVAIFLLLVDLMHRRQRWAARYSPGPLPLPGLGNLLHVDFQNTPYCFDQLRRRFGDVFSLQLAWTPVVVLNGLAAVREALVTHGEDTADRPPVPITQILGFGPRSQGRPFRPNGLLDKAVSNVIASLTCGRRFEYDDPRFLRLLDLAQEGLKEESGFLREVLNAVPVLLHIPALAGKVLRFQKAFLTQLDELLTEHRMTWDPAQPPRDLTEAFLAEMEKAKGNPESSFNDENLRIVVADLFSAGMVTTSTTLAWGLLLMILHPDVQRRVQQEIDDVIGQVRRPEMGDQAHMPYTTAVIHEVQRFGDIVPLGVTHMTSRDIEVQGFRIPKGTTLITNLSSVLKDEAVWEKPFRFHPEHFLDAQGHFVKPEAFLPFSAGRRACLGEPLARMELFLFFTSLLQHFSFSVPTGQPRPSHHGVFAFLVTPSPYELCAVPR

SEQ ID NO: 1193 - protein, 497 aa, Homo sapiens
  Payload ID: 362;
  Gene Symbol:;
  Gene Name: AC236040.1;
  ENSP ID: ENSP00000476060
MGLEALVPLAVIVAIFLLLVDLMHRRQRWAARYSPGPLPLPGLGNLLHVDFQNTPYCFDQLRRRFGDVFSLQLAWTPVVVLNGLAAVREALVTHGEDTADRPPVPITQILGFGPRSQGVFLARYGPAWREQRRFSVSTLRNLGLGKKSLEQWVTEEAACLCAAFANHSGRPFRPNGLLDKAVSNVIASLTCGRRFEYDDPRFLRLLDLAQEGLKEESGFLREVLNAVPVLLHIPALAGKVLRFQKAFLTQLDELLTEHRMTWDPAQPPRDLTEAFLAEMEKAKGNPESSFNDENLRIVVADLFSAGMVTTSTTLAWGLLLMILHPDVQRRVQQEIDDVIGQVRRPEMGDQAHMPYTTAVIHEVQRFGDIVPLGVTHMTSRDIEVQGFRIPKGTTLITNLSSVLKDEAVWEKPFRFHPEHFLDAQGHFVKPEAFLPFSAGRRACLGEPLARMELFLFFTSLLQHFSFSVPTGQPRPSHHGVFAFLVTPSPYELCAVPR

SEQ ID NO: 1194 - protein, 299 aa, Homo sapiens
  Payload ID: 363;
  Gene Symbol:;
  Gene Name: AC240274.1;
  ENSP ID: ENSP00000478612
MVVSAGPLSSEKAEMNILEMNEKLRPQLAEKKQQFRNLKEKCFVTQLACFLANQQNKYKYEECKDLIKSVLRNERQFKEEKLAEQLKQAEELRQYKVLVHSQERELTQLREKLREGRDASRSLNQHLQALLTPDEPDKSQGQDLQEQLAEGCRLAQQLFQKLSPENDNDHDEDVQVEVAEKVQKSSAPREMQKAEEKEVPEDSLEECAITCSNSHGPYDSNQPHRKTKITFEEDKVDSTLIGSSSHVEWEDAVHIIPENESDDEEEEEKGPVSPRTSVGSSEKGGPRGNRSQAQQGAAG

SEQ ID NO: 1195 - protein, 672 aa, Homo sapiens
  Payload ID: 363;
  Gene Symbol:;
  Gene Name: AC240274.1;
  ENSP ID: ENSP00000478665
MVVSAGPWSSEKAETNILEINEKLRPQLAENKQQFRNLKEKCFVTQLAGFLANRQKKYKYEECKDLIKFMLRNERQFKEEKLAEQLKQAEELRQYKVLVHSQERELTQLREKLREGRDASRSLNQHLQALLTPDEPDKSQGQDLQEQLAEGCRLAQHLVQKLSPENDNDHDEDVQVEVAEKVQKSSAPREMQKAEEKEVPEDSLEECAITCSNSHGPYDSNQPHRKTKITFEEDKVDSTLIGSSSHVEWEDAVHIIPENESDDEEEEEKGPVSPRNLQESEEEEVPQESWDEGYSTLSIPPEMLASYQSYSGTFHSLEEQQVCMAVDIGGHRWDQVKKEDQEATGPRLSRELLDEKGPEVLQDSLDRCYSTPSGYLELTDSCQPYRSAFYILEQQRVGWALDMDEIEKYQEVEEDQDPSCPRLSRELLDEKEPEVLQDSLDRCYSTPSGYLELPDLGQPYRSAVYSLEEQYLGLALDVDRIKKDQEEEEDQGPPCPRLSRELLEAVEPEVLQDSLDRCYSTPSSCLEQPDSCLPYGSSFYALEEKHVGFSLDVGEIEKKGKGKKRRGRRSTKKRRRRGRKEGEEDQNPPCPRLSGMLMEVEEPEVLQDSLDRCYSTPSMYFELPDSFQHYRSVFYSFEEQHISFALDVDNRFLTLMGTSLHLVFQMGVIFPQ

SEQ ID NO: 1196 - protein, 791 aa, Homo sapiens
  Payload ID: 363;
  Gene Symbol:;
  Gene Name: AC240274.1;
  ENSP ID: ENSP00000480818
MVVSAGPWSSEKAETNILEINEKLRPQLAENKQQFRNLKEMFCNSTGRLPGQPTEEIQQYKVLVHSQERELTQLREKLREGRDASRSLNQHLQALLTPDEPDKSQGQDLQEQLAEGCRLAQHLVQKLSPENDEDEDEDVQVEEAEKVLESSAPREVQKAEESKVPEDSLEECAITCSNSHGPCDSNQPHKNINITFEEDKVNSTLVVDRESSHDECQDAVNILPVPGPTSSATNVSMVVSAGPLSSEKAEMNILEMNEKLRPQLAEKKQQFRNLKEKCFVTQLACFLANQQNKYKYEECKDLIKSVLRNERQFKEEKLAEQLKQAEELRQYKVLVHSQERELTQLREKLREGRDASRSLNQHLQALLTPDEPDKSQGQDLQEQLAEGCRLAQQLFQKLSPENDNDHDEDVQVEVAEKVQKSSAPREMQKAEEKEVPEDSLEECAITCSNSHGPYDSNQPHRKTKITFEEDKVDSTLIGSSSHVEWEDAVHIIPENESDDEEEEEKGPVSPRNLQESEEEEVPQESWDEGYSTLSIPPEMLASYQSYSGTFHSLEEQQVCMAVDIGGHRWDQVKKEDQEATGPRLSRELLDEKGPEVLQDSLDRCYSTPSGYLELTDSCQPYRSAFYILEQQRVGWALDMDEIEKYQEVEEDQDPSCPRLSRELLDEKEPEVLQDSLDRCYSTPSGYLELPDLGQPYRSAVYSLEEQYLGLALDVDRIKKDQEEEEDQGPPCPRLSRELLEAVEPEVLQDSLDVIQLLPVVLNSLTPACPMEVPFMHWRKNMLAFLLTWEKL

SEQ ID NO: 1197 - protein, 603 aa, Homo sapiens
  Payload ID: 363;
  Gene Symbol:;
  Gene Name: AC240274.1;
  ENSP ID: ENSP00000484923
VLRNERQFKEEKLAEQLKQAEELRQYKVLVHSQERELTQLREKLREGRDASRSLNQHLQALLTPDEPDKSQGQDLQEQLAEGCRLAQQLFQKLSPENDNDHDEDVQVEVAEKVQKSSAPREMQKAEEKEVPEDSLEECAITCSNSHGPYDSNQPHRKTKITFEEDKVDSTLIGSSSHVEWEDAVHIIPENESDDEEEEEKGPVSPRNLQESEEEEVPQESWDEGYSTLSIPPEMLASYQSYSGTFHSLEEQQVCMAVDIGGHRWDQVKKEDQEATGPRLSRELLDEKGPEVLQDSLDRCYSTPSGYLELTDSCQPYRSAFYILEQQRVGWALDMDEIEKYQEVEEDQDPSCPRLSRELLDEKEPEVLQDSLDRCYSTPSGYLELPDLGQPYRSAVYSLEEQYLGLALDVDRIKKDQEEEEDQGPPCPRLSRELLEAVEPEVLQDSLDRCYSTPSSCLEQPDSCLPYGSSFYALEEKHVGFSLDVGEIEKKGKGKKRRGRRSTKKRRRRGRKEGEEDQNPPCPRLSGMLMEVEEPEVLQDSLDRCYSTPSMYFELPDSFQHYRSVFYSFEEQHISFALDVDNRFLTLMGTSLHLVFQMGVIFPQ

SEQ ID NO: 1198 - protein, 268 aa, Homo sapiens
  Payload ID: 364;
  Gene Symbol:;
  Gene Name: AC241377.2;
  ENSP ID: ENSP00000486219
MRRAPDWVQRQAAPGSKCRVPWQRREFPSRGGRKQPQPGSRQRKQNPISLPGEQNGRKATPQAGALGALGIRGIPSLCQSEGTRWSRRGRRWAERCPPGVLGAGRSLRAQRSRLHSRPPPLSPLRKPGGSNQPRSAAAAGTHEACLQASGTTRGWKYHALPLRLDPRSGHAGSALKAGSCPRLGGGGRGRGEAGAPSRFWLPRSLQQLLPNEPRNADVQTLHPTPSHTRRGQRTGKGALGPRFWKSKNSPANRQSSALDFWITTSISF

SEQ ID NO: 1199 - protein, 268 aa, Homo sapiens [sequence omitted]

SEQ ID NO: 1200 - protein, 25 aa, Homo sapiens
  Payload ID: 366;
  Gene Symbol:;
  Gene Name: AC242988.1;
  ENSP ID: ENSP00000485440
IYNVKSTRRLDLREYKNDRDPEKGC

SEQ ID NO: 1201 - protein, 267 aa, Homo sapiens
  Payload ID: 367;
  Gene Symbol:;
  Gene Name: AC243687.1;
  ENSP ID: ENSP00000482099
MWDQRLVKLALLQHLRAFYGIKVKGVRGQCDRRRHETAATEIGGKIFGVPFNALPHSAVPEYGHIPSFLVDACTSLEEHIHTEGLFRKSGSVIRLKALKNKVDHGEGCLSSAPPCDIAGLLKQFFRELPEPILPADLHEALLKAQQLGTEEKNKAILLLSCLLADHTVHVLRYFFNFLRNVSLRSSENKMDSSNLAVIFAPNLLQTSEGHEKMSSNAEKKGVYQTLSWKRYQPCWVLMVSVLLHHWKALKKVNMKLLVNIREREDNV

SEQ ID NO: 1202 - protein, 164 aa, Homo sapiens
  Payload ID: 368;
  Gene Symbol:;
  Gene Name: AC243756.1;
  ENSP ID: ENSP00000464619
MVNSVVFFDITVDGKPLGRISIKLFADKIPKTAENFRALSTGEKGFRYKGSCFHRIIPGFMCQGGDFTRPNGTDDKSIYGEKFDDENLIRKHTGSGILSMVNAGPNTNGSQLFICTAKTEWLDGKHVAFGKVKERVNIVEAMEHFGYRNSKTSKKITIADCGQF

SEQ ID NO: 1203 - protein, 132 aa, Homo sapiens
  Payload ID: 369;
  Gene Symbol:;
  Gene Name: AC243790.2;
  ENSP ID: ENSP00000481534
FTQTYRRSRQHEQLPGQRHMDLLTGYSKLIQSRLKLLLHLGSQPPVGKTFFFSCWCHPLFHGSKTTPNVWYKFSETALSILNSCQASQLGVRKMPGDMSSSPRVREFSALVAIKEKIHILPTNAKVGSKFGS

SEQ ID NO: 1204 - protein, 124 aa, Homo sapiens [sequence omitted]

SEQ ID NO: 1205 - protein, 96 aa, Homo sapiens
  Payload ID: 371;
  Gene Symbol:;
  Gene Name: AC245015.1;
  ENSP ID: ENSP00000489357
IPAQSLTSLLIRLQGRRLDIILTQTPRSLLTSFGKRHSIFYQATAQVHGEISWFQMKGQGFALVISHISNVPKNVPAWFRGRGSGSNYISISGLQP

SEQ ID NO: 1206 - protein, 102 aa, Homo sapiens [sequence omitted]

SEQ ID NO: 1207 - protein, 268 aa, Homo sapiens
  Payload ID: 372;
  Gene Symbol:;
  Gene Name: AC245100.1;
  ENSP ID: ENSP00000487212
MRRAPDWVQRQAAPGSKCRVPWQRREFPGRGGRKQPQPGSRQRKQNPISLPGEQNGRTATPQAGALGALGIRGIPSLCQSEGTRWSRRGRRWAERCPPGVLGAGRSLRAQGSRLHSRPPPLSPLRKPGGSNQPRSAAAAGTQEACLQASGTTRGWKYHALPLRLDPRSGHSGSAFKASSCPRLGGGGRGRGEAGAPSRFWLPRSLQQLSPNEPRNADVQTLHPTPSHTRRGRRTEKGALGPRFWKSKNSPANRQSSALDFWITTSISF

SEQ ID NO: 1208 - protein, 236 aa, Homo sapiens
  Payload ID: 373;
  Gene Symbol:;
  Gene Name: AC253572.1;
  ENSP ID: ENSP00000485259
MCVTYHSGTGYCKCPEGFLGEYCQHRDPCEKNRCQNGGTCVAQAMLGKATCRCASGFTGEDCQYSTPHPCFVSRPCLNGGTCHMLSRDTYECTCQVGFTGKECQWTDACLSHLCANGSTCTTVANQFSCKCLTGFTGQKCETDVNECDIPGHCQHGGTCLNLPGSYQCQCLQGFTGQYCDRLYVPCAHSPCVNGGTCRQTGDFTFECNCLPETVRRGTELWERDRQVWNGKEHDEN

SEQ ID NO: 1209 - protein, 497 aa, Homo sapiens
  Payload ID: 374;
  Gene Symbol:;
  Gene Name: AC254560.1;
  ENSP ID: ENSP00000486123
MGLEALVPLAMIVAIFLLLVDLMHRHQRWAARYPPGPLPLPGLGNLLHVDFQNTPYCFDQLRRRFGDVFSLQLAWTPVVVLNGLAAVREAMVTRGEDTADRPPAPIYQVLGFGPRSQGVILSRYGPAWREQRRFSVSTLRNLGLGKKSLEQWVTEEAACLCAAFADQAGRPFRPNGLLDKAVSNVIASLTCGRRFEYDDPRFLRLLDLAQEGSKEESGFLREVLNAVPVLLHIPALAGKVLRFQKAFLTQLDELLTEHRMTWDPAQPPRDLTEAFLAKKEKAKGSPESSFNDENLRIVVGNLFLAGMVTTLTTLAWGLLLMILHLDVQLRVQQEIDDVIGQVRRPEMGDQAHMPYTTAVIHEVQRFGDIIPLSVTHMTSHDIEVQGFRIPKGTTLITNLSSVLKDEAVWKKPFRFHPEHFLDAQGHFVKPEAFLPFSAGRRACLGEPLARMELFLFFTSLLQHFSFSVAAGQPRPSHSRVVSFLVTPSPYELCAVPR

SEQ ID NO: 1210 - protein, 444 aa, Homo sapiens
  Payload ID: 374;
  Gene Symbol:;
  Gene Name: AC254560.1;
  ENSP ID: ENSP00000486298
MGLEALVPLAMIVAIFLLLVDLMHRHQRWAARYPPGPLPLPGLGNLHVDFQNTPYCFDQLRRRFGDVFSLQLAWTPVVVLNGLAAVREAMVTRGEDTADRPPAPIYQVLGFGPRSQGRPFRPNGLLDKAVSNVIASLTCGRRFEYDDPRFLRLLDLAQGSKEESGFLREVLNAVPVLLHIPALAGKVLRFQKAFLTQLDELLTEHRMTWDPAQPPRDLTEAFLAKKEKAKGSPESSFNDENLRIVVGNLFLAGMVTTLTTLAWGLLLMILHLDVQLRVQQEIDDVIGQVRRPEMGDQAHMPYTTAVIHEVQRFGDIIPLSVTHMTSHDIEVQGFRIPKGTTLITNLSSVLKDEAVWKKPFRFHPEHFLDAQGHFVKPEAFLPFSAGRRACLGEPLARMELFLFFTSLLQHFSFSVAAGQPRPSHSRVVSFLVTPSPYELCAVPR

SEQ ID NO: 1211 - protein, 445 aa, Homo sapiens
  Payload ID: 375;
  Gene Symbol:;
  Gene Name: AC254788.1;
  ENSP ID: ENSP00000489211
MGLEALVPLAMIVAIFLLLVDLMHRHQRWAARYPPGPLPLPGLGNLHVDFQNTPYCFDQLRRRFGDVFSLQLAWTPVVVLNGLAAVREAMVTRGEDTADRPPAPIYQVLGFGPRSQGRPFRPNGLLDKAVSNVIASLTCGRRFEYDDPRFLRLLDLAQEGLKEESGFLREVLNAVPVLPHIPALAGKVLRFQKAFLTQLDELLTEHRMTWDPAQPPRDLTEAFLAKKEKAKGSPESSFNDENLRIVVGNLFLAGMVTTSTTLAWGLLLMILHLDVQLRVQQEIDDVIGQVRRPEMGDQAHMPCTTAVIHEVQRFGDIIPLSVTHMTSRDIEVQGFRIPKGTTLITNLSSVLKDEAVWKKPFRFHPEHFLDAQGHFVKPEAFLPFSAGRRACLGEPLARMELFLFFTSLLQHFSFSVAAGQPRPSHSRVVSFLVTPSPYELCAVPR

SEQ ID NO: 1212 - protein, 497 aa, Homo sapiens
  Payload ID: 375;
  Gene Symbol:;
  Gene Name: AC254788.1;
  ENSP ID: ENSP00000489366
MGLEALVPLAMIVAIFLLLVDLMHRHQRWAARYPPGPLPLPGLGNLLHVDFQNTPYCFDQLRRRFGDVFSLQLAWTPVVVLNGLAAVREAMVTRGEDTADRPPAPIYQVLGFGPRSQGVILSRYGPAWREQRRFSVSTLRNLGLGKKSLEQWVTEEAACLCAAFADQAGRPFRPNGLLDKAVSNVIASLTCGRRFEYDDPRFLRLLDLAQEGLKEESGFLREVLNAVPVLPHIPALAGKVLRFQKAFLTQLDELLTEHRMTWDPAQPPRDLTEAFLAKKEKAKGSPESSFNDENLRIVVGNLFLAGMVTTSTTLAWGLLLMILHLDVQLRVQQEIDDVIGQVRRPEMGDQAHMPCTTAVIHEVQRFGDIIPLSVTHMTSRDIEVQGFRIPKGTTLITNLSSVLKDEAVWKKPFRFHPEHFLDAQGHFVKPEAFLPFSAGRRACLGEPLARMELFLFFTSLLQHFSFSVAAGQPRPSHSRVVSFLVTPSPYELCAVPR

SEQ ID NO: 1213 - protein, 496 aa, Homo sapiens
  Payload ID: 375;
  Gene Symbol:;
  Gene Name: AC254788.1;
  ENSP ID: ENSP00000489470
MGLEALVPLAMIVAIFLLLVDLMHRHQRWAARYPPGPLPLPGLGNLHVDFQNTPYCFDQLRRRFGDVFSLQLAWTPVVVLNGLAAVREAMVTRGEDTADRPPAPIYQVLGFGPRSQGVILSRYGPAWREQRRFSVSTLRNLGLGKKSLEQWVTEEAACLCAAFADQAGRPFRPNGLLDKAVSNVIASLTCGRRFEYDDPRFLRLLDLAQEGLKEESGFLREVLNAVPVLPHIPALAGKVLRFQKAFLTQLDELLTEHRMTWDPAQPPRDLTEAFLAKKEKAKGSPESSFNDENLRIVVGNLFLAGMVTTSTTLAWGLLLMILHLDVQLRVQQEIDDVIGQVRRPEMGDQAHMPCTTAVIHEVQRFGDIIPLSVTHMTSRDIEVQGFRIPKGTTLITNLSSVLKDEAVWKKPFRFHPEHFLDAQGHFVKPEAFLPFSAGRRACLGEPLARMELFLFFTSLLQHFSFSVAAGQPRPSHSRVVSFLVTPSPYELCAVPR

SEQ ID NO: 1214 - protein, 497 aa, Homo sapiens; identical to SEQ ID NO: 1184
  Payload ID: 376;
  Gene Symbol:;
  Gene Name: AC254847.1;
  ENSP ID: ENSP00000488999

SEQ ID NO: 1215 - protein, 446 aa, Homo sapiens; identical to SEQ ID NO: 1185
  Payload ID: 376;
  Gene Symbol:;
  Gene Name: AC254847.1;
  ENSP ID: ENSP00000489410

SEQ ID NO: 1216 - protein, 267 aa, Homo sapiens; identical to SEQ ID NO: 1201
  Payload ID: 377;
  Gene Symbol:;
  Gene Name: AC254944.3;
  ENSP ID: ENSP00000488249

SEQ ID NO: 1217 - protein, 444 aa, Homo sapiens
  Payload ID: 378;
  Gene Symbol:;
  Gene Name: AC254995.1;
  ENSP ID: ENSP00000486942
MGLEALVPLAMIVAIFLLLVDLMHRHQRWAARYPPGPLPLPGLGNLHVDFQNTPYCFDQLRRRFGDVFSLQLAWTPVVVLNGLAAVREAMVTRGEDTADRPPAPIYQVLGFGPRSQGRPFRPNGLLDKAVSNVIASLTCGRRFEYDDPRFLRLLDLAQGSKEESGFLREVLNAVPVLPHIPALAGKVLRFQKAFLTQLDELLTEHRMTWDPAQPPRDLTEAFLAKKEKAKGSPESSFNDENLRIVVGNLFLAGMVTTLTTLAWGLLLMILHLDVQLRVQQEIDDVIGQVRRPEMGDQAHMPYTTAVIHEVQRFGDIVPLGVTHMTSRDIEVQGFRIPKGTTLITNLSSVLKDEAVWEKPFRFHPEHFLDAQGHFVKPEAFLPFSAGRRACLGEPLARMELFLFFTSLLQHFSFSVAAGQPRPSHSRVVSFLVTPSPYELCAVPR

SEQ ID NO: 1218 - protein, 497 aa, Homo sapiens
  Payload ID: 378;
  Gene Symbol:;
  Gene Name: AC254995.1;
  ENSP ID: ENSP00000487070
MGLEALVPLAMIVAIFLLLVDLMHRHQRWAARYPPGPLPLPGLGNLLHVDFQNTPYCFDQLRRRFGDVFSLQLAWTPVVVLNGLAAVREAMVTRGEDTADRPPAPIYQVLGFGPRSQGVILSRYGPAWREQRRFSVSTLRNLGLGKKSLEQWVTEEAACLCAAFADQAGRPFRPNGLLDKAVSNVIASLTCGRRFEYDDPRFLRLLDLAQEGSKEESGFLREVLNAVPVLPHIPALAGKVLRFQKAFLTQLDELLTEHRMTWDPAQPPRDLTEAFLAKKEKAKGSPESSFNDENLRIVVGNLFLAGMVTTLTTLAWGLLLMILHLDVQLRVQQEIDDVIGQVRRPEMGDQAHMPYTTAVIHEVQRFGDIVPLGVTHMTSRDIEVQGFRIPKGTTLITNLSSVLKDEAVWEKPFRFHPEHFLDAQGHFVKPEAFLPFSAGRRACLGEPLARMELFLFFTSLLQHFSFSVAAGQPRPSHSRVVSFLVTPSPYELCAVPR

SEQ ID NO: 1219 - protein, 672 aa, Homo sapiens
  Payload ID: 379;
  Gene Symbol: AACS;
  Gene Name: acetoacetyl-CoA synthetase;
  Uniprot ID:  Q86V21;
  ENSP ID: ENSP00000324842
MSKEERPGREEILECQVMWEPDSKKNTQMDRFRAAVGAACGLALESYDDLYHWSVESYSDFWAEFWKFSGIVFSRVYDEVVDTSKGIADVPEWFKGSRLNYAENLLRHKENDRVALYIAREGKEEIVKVTFEELRQEVALFAAAMRKMGVKKGDRVVGYLPNSEHAVEAMLAAASIGAIWSSTSPDFGVNGVLDRFSQIQPKLIFSVEAVVYNGKEHNHMEKLQQVVKGLPDLKKVVVIPYVSSRENIDLSKIPNSVFLDDFLATGTSEQAPQLEFEQLPFSHPLFIMFSSGTTGAPKCMVHSAGGTLIQHLKEHLLHGNMTSSDILLCYTTVGWMMWNWMVSLLATGAAMVLYDGSPLVPTPNVLWDLVDRIGITVLVTGAKWLSVLEEKAMKPVETHSLQMLHTILSTGSPLKAQSYEYVYRCIKSSILLGSISGGTDIISCFMGHNFSLPVYKGEIQARNLGMAVEAWNEEGKAVWGESGELVCTKPIPCQPTHFWNDENGNKYRKAYFSKFPGIWAHGDYCRINPKTGGIVMLGRSDGTLNPNGVRFGSSEIYNIVESFEEVEDSLCVPQYNKYREERVILFLKMASGHAFQPDLVKRIRDAIRMGLSARHVPSLILETKGIPYTLNGKKVEVAVKQIIAGKAVEQGGAFSNPETLDLYRDIPELQGF

SEQ ID NO: 1220 - protein, 218 aa, Homo sapiens
  Payload ID: 379;
  Gene Symbol: AACS;
  Gene Name: acetoacetyl-CoA synthetase;
  ENSP ID: ENSP00000416461
MSKEERPGREEILECQVMWEPDSKKNTQMDRFRAAVGAACGLALESYDDLYHWSVESYSDFWAEFWKFSGIVFSRVYDEVVDTSKGIADVPEWFKGSRLNYAENLLRHKENDRVALYIANQHKKPNHWKQAVSGPAQATEQGLPSAIVGRTSSPCAVGKDHGSPVPTETYWDTSSGAGAQASMYFQSPWALLMHIPGEEPWSNVSTYHMGLGKAKRKL

SEQ ID NO: 1221 - protein, 614 aa, Homo sapiens
  Payload ID: 380;
  Gene Symbol: ACHE;
  Gene Name: acetylcholinesterase (Yt blood group);
  Uniprot ID:  P22303;
  ENSP ID: ENSP00000241069
MRPPQCLLHTPSLASPLLLLLLWLLGGGVGAEGREDAELLVTVRGGRLRGIRLKTPGGPVSAFLGIPFAEPPMGPRRFLPPEPKQPWSGVVDATTFQSVCYQYVDTLYPGFEGTEMWNPNRELSEDCLYLNVWTPYPRPTSPTPVLVWIYGGGFYSGASSLDVYDGRFLVQAERTVLVSMNYRVGAFGFLALPGSREAPGNVGLLDQRLALQWVQENVAAFGGDPTSVTLFGESAGAASVGMHLLSPPSRGLFHRAVLQSGAPNGPWATVGMGEARRRATQLAHLVGCPPGGTGGNDTELVACLRTRPAQVLVNHEWHVLPQESVFRFSFVPVVDGDFLSDTPEALINAGDFHGLQVLVGVVKDEGSYFLVYGAPGFSKDNESLISRAEFLAGVRVGVPQVSDLAAEAVVLHYTDWLHPEDPARLREALSDVVGDHNVVCPVAQLAGRLAAQGARVYAYVFEHRASTLSWPLWMGVPHGYEIEFIFGIPLDPSRNYTAEEKIFAQRLMRYWANFARTGDPNEPRDPKAPQWPPYTAGAQQYVSLDLRPLEVRRGLRAQACAFWNRFLPKLLSATDTLDEAERQWKAEFHRWSSYMVHWKNQFDHYSKQDRCSDL

SEQ ID NO: 1222 - protein, 617 aa, Homo sapiens
  Payload ID: 380;
  Gene Symbol: ACHE;
  Gene Name: acetylcholinesterase (Yt blood group);
  Uniprot ID:  P22303;
  ENSP ID: ENSP00000303211
MRPPQCLLHTPSLASPLLLLLLWLLGGGVGAEGREDAELLVTVRGGRLRGIRLKTPGGPVSAFLGIPFAEPPMGPRRFLPPEPKQPWSGVVDATTFQSVCYQYVDTLYPGFEGTEMWNPNRELSEDCLYLNVWTPYPRPTSPTPVLVWIYGGGFYSGASSLDVYDGRFLVQAERTVLVSMNYRVGAFGFLALPGSREAPGNVGLLDQRLALQWVQENVAAFGGDPTSVTLFGESAGAASVGMHLLSPPSRGLFHRAVLQSGAPNGPWATVGMGEARRRATQLAHLVGCPPGGTGGNDTELVACLRTRPAQVLVNHEWHVLPQESVFRFSFVPVVDGDFLSDTPEALINAGDFHGLQVLVGVVKDEGSYFLVYGAPGFSKDNESLISRAEFLAGVRVGVPQVSDLAAEAVVLHYTDWLHPEDPARLREALSDVVGDHNVVCPVAQLAGRLAAQGARVYAYVFEHRASTLSWPLWMGVPHGYEIEFIFGIPLDPSRNYTAEEKIFAQRLMRYWANFARTGDPNEPRDPKAPQWPPYTAGAQQYVSLDLRPLEVRRGLRAQACAFWNRFLPKLLSATASEAPSTCPGFTHGEAAPRPGLPLPLLLLHQLLLLFLSHLRRL

SEQ ID NO: 1223 - protein, 403 aa, Homo sapiens
  Payload ID: 380;
  Gene Symbol: ACHE;
  Gene Name: acetylcholinesterase (Yt blood group);
  ENSP ID: ENSP00000390004
MRPPQCLLHTPSLASPLLLLLLWLLGGGVGAEGREDAELLVTVRGGRLRGIRLKTPGGPVSAFLGIPFAEPPMGPRRFLPPEPKQPWSGVVDATTFQSVCYQYVDTLYPGFEGTEMWNPNRELSEDCLYLNVWTPYPRPTSPTPVLVWIYGGGFYSGASSLDVYDGRFLVQAERTVLVSMNYRVGAFGFLALPGSREAPGNVGLLDQRLALQWVQENVAAFGGDPTSVTLFGESAGAASVGMHLLSPPSRGLFHRAVLQSGAPNGPWATVGMGEARRRATQLAHLVGCPPGGTGGNDTELVACLRTRPAQVLVNHEWHVLPQESVFRFSFVPVVDGDFLSDTPEALINAGDFHGLQVLVGVVKDEGSYFLVYGAPGFSKDNESLISRAEFLAGVRVGVPQGSQ

SEQ ID NO: 1224 - protein, 614 aa, Homo sapiens; identical to SEQ ID NO: 1221
  Payload ID: 380;
  Gene Symbol: ACHE;
  Gene Name: acetylcholinesterase (Yt blood group);
  Uniprot ID:  P22303;
  ENSP ID: ENSP00000394976

SEQ ID NO: 1225 - protein, 158 aa, Homo sapiens
  Payload ID: 380;
  Gene Symbol: ACHE;
  Gene Name: acetylcholinesterase (Yt blood group);
  ENSP ID: ENSP00000396360
MRPPQCLLHTPSLASPLLLLLLWLLGGGVGAEGREDAELLVTVRGGRLRGIRLKTPGGPVSAFLGIPFAEPPMGPRRFLPPEPKQPWSGVVDATTFQSVCYQYVDTLYPGFEGTEMWNPNRELSEDCLYLNVWTPYPRPTSPTPVLVWIYGGGFYSGA

SEQ ID NO: 1226 - protein, 397 aa, Homo sapiens
  Payload ID: 380;
  Gene Symbol: ACHE;
  Gene Name: acetylcholinesterase (Yt blood group);
  ENSP ID: ENSP00000397143
MRPPQCLLHTPSLASPLLLLLLWLLGGGVGAEGREDAELLVTVRGGRLRGIRLKTPGGPVSAFLGIPFAEPPMGPRRFLPPEPKQPWSGVVDATTFQSVCYQYVDTLYPGFEGTEMWNPNRELSEDCLYLNVWTPYPRPTSPTPVLVWIYGGGFYSGASSLDVYDGRFLVQAERTVLVSMNYRVGAFGFLALPGSREAPGNVGLLDQRLALQWVQENVAAFGGDPTSVTLFGESAGAASVGMHLLSPPSRGLFHRAVLQSGAPNGPWATVGMGEARRRATQLAHLVGCPPGGTGGNDTELVACLRTRPAQVLVNHEWHVLPQESVFRFSFVPVVDGDFLSDTPEALINAGDFHGLQTRSTRRSASGRPSSTAGAPTWCTGRTSSTTTASRIAAQTCD

SEQ ID NO: 1227 - protein, 434 aa, Homo sapiens
  Payload ID: 380;
  Gene Symbol: ACHE;
  Gene Name: acetylcholinesterase (Yt blood group);
  ENSP ID: ENSP00000399725
MRPPQCLLHTPSLASPLLLLLLWLLGGGVGAEGREDAELLVTVRGGRLRGIRLKTPGGPVSAFLGIPFAEPPMGPRRFLPPEPKQPWSGVVDATTFQSVCYQYVDTLYPGFEGTEMWNPNRELSEDCLYLNVWTPYPRPTSPTPVLVWIYGGGFYSGASSLDVYDGRFLVQAERTVLVSMNYRVGAFGFLALPGSREAPGNVGLLDQRLALQWVQENVAAFGGDPTSVTLFGESAGAASVGMHLLSPPSRGLFHRAVLQSGAPNGPWATVGMGEARRRATQLAHLVGCPPGGTGGNDTELVACLRTRPAQVLVNHEWHVLPQESVFRFSFVPVVDGDFLSDTPEALINAGDFHGLQVLVGVVKDEGSYFLVYGAPGFSKDNESLISRAEFLAGTRSTRRSASGRPSSTAGAPTWCTGRTSSTTTASRIAAQTCD

SEQ ID NO: 1228 - protein, 28 aa, Homo sapiens
  Payload ID: 380;
  Gene Symbol: ACHE;
  Gene Name: acetylcholinesterase (Yt blood group);
  ENSP ID: ENSP00000400933
MRPPQCLLHTPSLASPLLLLLLWLLGGG

SEQ ID NO: 1229 - protein, 526 aa, Homo sapiens
  Payload ID: 380;
  Gene Symbol: ACHE;
  Gene Name: acetylcholinesterase (Yt blood group);
  Uniprot ID:  P22303;
  ENSP ID: ENSP00000403474
MRPPQCLLHTPSLASPLLLLLLWLLGGGVGAEGREDAELLVTVRGGRLRGIRLKTPGGPVSAFLGIPFAEPPMGPRRFLPPEPKQPWSGVVDATTFQSVCYQYVDTLYPGFEGTEMWNPNRELSEDCLYLNVWTPYPRPTSPTPVLVWIYGGGFYSGASSLDVYDGRFLVQAERTVLVSMNYRVGAFGFLALPGSREAPGNVGLLDQRLALQWVQENVAAFGGDPTSVTLFGESAGAASVGMHLLSPPSRGLFHRAVLQSGAPNGPWATVGMGEARRRATQLAHLVGCPPGGTGGNDTELVACLRTRPAQVLVNHEWHVLPQESVFRFSFVPVVDGDFLSDTPEALINAGDFHGLQLAGRLAAQGARVYAYVFEHRASTLSWPLWMGVPHGYEIEFIFGIPLDPSRNYTAEEKIFAQRLMRYWANFARTGDPNEPRDPKAPQWPPYTAGAQQYVSLDLRPLEVRRGLRAQACAFWNRFLPKLLSATDTLDEAERQWKAEFHRWSSYMVHWKNQFDHYSKQDRCSDL

SEQ ID NO: 1230 - protein, 617 aa, Homo sapiens; identical to SEQ ID NO: 1222
  Payload ID: 380;
  Gene Symbol: ACHE;
  Gene Name: acetylcholinesterase (Yt blood group);
  Uniprot ID:  P22303;
  ENSP ID: ENSP00000404865

SEQ ID NO: 1231 - protein, 359 aa, Homo sapiens
  Payload ID: 380;
  Gene Symbol: ACHE;
  Gene Name: acetylcholinesterase (Yt blood group);
  ENSP ID: ENSP00000410380
MRPPQCLLHTPSLASPLLLLLLWLLGGGVGAEGREDAELLVTVRGGRLRGIRLKTPGGPVSAFLGIPFAEPPMGPRRFLPPEPKQPWSGVVDATTFQSVCYQYVDTLYPGFEGTEMWNPNRELSEDCLYLNVWTPYPRPTSPTPVLVWIYGGGFYSGASSLDVYDGRFLVQAERTVLVSMNYRVGAFGFLALPGSREAPGNVGLLDQRLALQWVQENVAAFGGDPTSVTLFGESAGAASVGMHLLSPPSRGLFHRAVLQSGAPNGPWATVGMGEARRRATQLAHLVGCPPGGTGGNDTELVACLRTRPAQVLVNHEWHVLPQESVFRFSFVPVVDGDFLSDTPEALINAGDFHGLQGSQ

SEQ ID NO: 1232 - protein, 614 aa, Homo sapiens; identical to SEQ ID NO: 1221
  Payload ID: 380;
  Gene Symbol: ACHE;
  Gene Name: acetylcholinesterase (Yt blood group);
  Uniprot ID:  P22303;
  ENSP ID: ENSP00000414858

SEQ ID NO: 1233 - protein, 55 aa, Homo sapiens
  Payload ID: 380;
  Gene Symbol: ACHE;
  Gene Name: acetylcholinesterase (Yt blood group);
  ENSP ID: ENSP00000415901
MRPPQCLLHTPSLASPLLLLLLWLLGGGVGAEGREDAELLVTVLRAPRCGTPTVS

SEQ ID NO: 1234 - protein, 427 aa, Homo sapiens
  Payload ID: 381;
  Gene Symbol: ACAT1;
  Gene Name: acetyl-CoA acetyltransferase 1;
  Uniprot ID:  P24752;
  ENSP ID: ENSP00000265838
MAVLAALLRSGARSRSPLLRRLVQEIRYVERSYVSKPTLKEVVIVSATRTPIGSFLGSLSLLPATKLGSIAIQGAIEKAGIPKEEVKEAYMGNVLQGGEGQAPTRQAVLGAGLPISTPCTTINKVCASGMKAIMMASQSLMCGHQDVMVAGGMESMSNVPYVMNRGSTPYGGVKLEDLIVKDGLTDVYNKIHMGSCAENTAKKLNIARNEQDAYAINSYTRSKAAWEAGKFGNEVIPVTVTVKGQPDVVVKEDEEYKRVDFSKVPKLKTVFQKENGTVTAANASTLNDGAAALVLMTADAAKRLNVTPLARIVAFADAAVEPIDFPIAPVYAASMVLKDVGLKKEDIAMWEVNEAFSLVVLANIKMLEIDPQKVNINGGAVSLGHPIGMSGARIVGHLTHALKQGEYGLASICNGGGGASAMLIQKL

SEQ ID NO: 1235 - protein, 162 aa, Homo sapiens
  Payload ID: 381;
  Gene Symbol: ACAT1;
  Gene Name: acetyl-CoA acetyltransferase 1;
  Uniprot ID:  P24752;
  ENSP ID: ENSP00000299355
MAVLAALLRSGARSRSPLLRRLVQEIRYVERSYVSKPTLKEVVIVSATRTPIGSFLGSLSLLPATKLGSIAIQGAIEKAGIPKEEVKEAYMGNVLQGGEGQAPTRQAVLGAGLPISTPCTTINKVCASGMKAIMMASQSLMCGHQIKQETGSLAKICCHVRR

SEQ ID NO: 1236 - protein, 54 aa, Homo sapiens
  Payload ID: 381;
  Gene Symbol: ACAT1;
  Gene Name: acetyl-CoA acetyltransferase 1;
  ENSP ID: ENSP00000433568
MGNVLQGGEGQAPTRQAVLGAGLPISTPCTTINKVCASGMKAIMMASQSLMCGH

SEQ ID NO: 1237 - protein, 141 aa, Homo sapiens
  Payload ID: 381;
  Gene Symbol: ACAT1;
  Gene Name: acetyl-CoA acetyltransferase 1;
  ENSP ID: ENSP00000435965
MAVLAALLRSGARSRSPLLRRLVQEIRYVERSYVSKPTLKEVVIVSATRTPIGSFLGSLSLLPATKLGSIAIQGAIEKAGIPKEEVKEAYMGNVLQGGEGQAPTRQAVLGAGCDGGRWDGEHVQCSICNEQRINTIWWGKA

SEQ ID NO: 1238 - protein, 136 aa, Homo sapiens
  Payload ID: 381;
  Gene Symbol: ACAT1;
  Gene Name: acetyl-CoA acetyltransferase 1;
  ENSP ID: ENSP00000436096
  MOD_RES (1)..(1): Any amino acid
XKLGSIAIQGAIEKAGIPKEEVKEAYMGNVLQGGEGQAPTRQAVLGAGLPISTPCTTINKVCASGMKAIMMASQSLMCGHQDVMVAGGMESMSNVPYVMNRGSTPYGGVKLEDLIVKDGLTDVYNKIHMVNVIFSG

SEQ ID NO: 1239 - protein, 397 aa, Homo sapiens
  Payload ID: 382;
  Gene Symbol: ACAT2;
  Gene Name: acetyl-CoA acetyltransferase 2;
  Uniprot ID:  Q9BWD1;
  ENSP ID: ENSP00000356015
MNAGSDPVVIVSAARTIIGSFNGALAAVPVQDLGSTVIKEVLKRATVAPEDVSEVIFGHVLAAGCGQNPVRQASVGAGIPYSVPAWSCQMICGSGLKAVCLAVQSIGIGDSSIVVAGGMENMSKAPHLAYLRTGVKIGEMPLTDSILCDGLTDAFHNCHMGITAENVAKKWQVSREDQDKVAVLSQNRTENAQKAGHFDKEIVPVLVSTRKGLIEVKTDEFPRHGSNIEAMSKLKPYFLTDGTGTVTPANASGINDGAAAVVLMKKSEADKRGLTPLARIVSWSQVGVEPSIMGIGPIPAIKQAVTKAGWSLEDVDIFEINEAFAAVSAAIVKELGLNPEKVNIEGGAIALGHPLGASGCRILVTLLHTLERMGRSRGVAALCIGGGMGIAMCVQRE

SEQ ID NO: 1240 - protein, 331 aa, Homo sapiens
  Payload ID: 383;
  Gene Symbol: ACAA1;
  Gene Name: acetyl-CoA acyltransferase 1;
  Uniprot ID:  P09110;
  ENSP ID: ENSP00000301810
MQRLQVVLGHLRGPADSGWMPQAAPCLSGAPQASAADVVVVHGRRTAICRAGRGGFKDTTPDELLSAVMTAVLKDVNLRPEQLGDICVGNVLQPGAGAIMARIAQFLSDIPETVPLSTVNRQCSSGLQAVASIAGGIRNGSYDIGMACGITSENVAERFGISREKQDTFALASQQKAARAQSKGCFQAEIVPVTTTVHDDKGTKRSITVTQDEGIRPSTTMEGLAKLKPAFKKDGSTTAGLTVSDVDIFEINEAFASQAAYCVEKLRLPPEKVNPLGGAVALGHPLGCTGARQVITLLNELKRRGKRAYGVVSMCIGTGMGAAAVFEYPGN

SEQ ID NO: 1241 - protein, 424 aa, Homo sapiens
  Payload ID: 383;
  Gene Symbol: ACAA1;
  Gene Name: acetyl-CoA acyltransferase 1;
  Uniprot ID:  P09110;
  ENSP ID: ENSP00000333664
MQRLQVVLGHLRGPADSGWMPQAAPCLSGAPQASAADVVVVHGRRTAICRAGRGGFKDTTPDELLSAVMTAVLKDVNLRPEQLGDICVGNVLQPGAGAIMARIAQFLSDIPETVPLSTVNRQCSSGLQAVASIAGGIRNGSYDIGMACGVESMSLADRGNPGNITSRLMEKEKARDCLIPMGITSENVAERFGISREKQDTFALASQQKAARAQSKGCFQAEIVPVTTTVHDDKGTKRSITVTQDEGIRPSTTMEGLAKLKPAFKKDGSTTAGNSSQVSDGAAAILLARRSKAEELGLPILGVLRSYAVVGVPPDIMGIGPAYAIPVALQKAGLTVSDVDIFEINEAFASQAAYCVEKLRLPPEKVNPLGGAVALGHPLGCTGARQVITLLNELKRRGKRAYGVVSMCIGTGMGAAAVFEYPGN

SEQ ID NO: 1242 - protein, 121 aa, Homo sapiens
  Payload ID: 383;
  Gene Symbol: ACAA1;
  Gene Name: acetyl-CoA acyltransferase 1;
  ENSP ID: ENSP00000389226
MQRLQVVLGHLRGPADSGWMPQAAPCLSGAPQASAADVVVVHGRRTAICRAGRGGFKDTTPDELLSAVMTAVLKDVNLRPEQLGDICVDQHGVSYVFLFYIHTEMCCSLGPGQSWPESPSF

SEQ ID NO: 1243 - protein, 237 aa, Homo sapiens
  Payload ID: 383;
  Gene Symbol: ACAA1;
  Gene Name: acetyl-CoA acyltransferase 1;
  ENSP ID: ENSP00000391078
  MOD_RES (1)..(1): Any amino acid
XAVASIAGGIRNGSYDIGMACGVESMSLADRGNPGNITSRLMEKEKARDCLIPMGITSENVAERFGISREKQDTFALASQQKAARAQSKGCFQAEIVPVTTTVHDDKGTKRSITVTQDEGIRPSTTMEGLAKLKPAFKKDGSTTAGLTVSDVDIFEINEAFASQAAYCVEKLRLPPEKVNPLGGAVALGHPLGCTGARQVITLLNELKRRGKRAYGVVSMCIGTGMGAAAVFEYPGN

SEQ ID NO: 1244 - protein, 383 aa, Homo sapiens
  Payload ID: 383;
  Gene Symbol: ACAA1;
  Gene Name: acetyl-CoA acyltransferase 1;
  ENSP ID: ENSP00000395183
MQRLQVVLGHLRGPADSGWMPQAAPCLSGAPQASAADVVVVHGRRTAICRAGRGGFKDTTPDELLSAVMTAVLKDVNLRPEQLGDICVGNVLQPGAGAIMARIAQFLRVESMSLADRGNPGNITSRLMEKEKARDCLIPMGITSENVAERFGISREKQDTFALASQQKAARAQSKGCFQAEIVPVTTTVHDDKGTKRSITVTQDEGIRPSTTMEGLAKLKPAFKKDGSTTAGNSSQVSDGAAAILLARRSKAEELGLPILGVLRSYAVVGVPPDIMGIGPAYAIPVALQKAGLTVSDVDIFEINEAFASQAAYCVEKLRLPPEKVNPLGGAVALGHPLGCTGARQVITLLNELKRRGKRAYGVVSMCIGTGMGAAAVFEYPGN

SEQ ID NO: 1245 - protein, 113 aa, Homo sapiens
  Payload ID: 383;
  Gene Symbol: ACAA1;
  Gene Name: acetyl-CoA acyltransferase 1;
  ENSP ID: ENSP00000396485
MQRLQVVLGHLRGPADSGWMPQAAPCLSGAPQASAADVVVVHGRRTAICRAGRGGFKDTTPDELLSAVMTAVLKDVNLRPEQLGDICVVTSRRLCLCPLSIDSVRRGYRQWPA

SEQ ID NO: 1246 - protein, 290 aa, Homo sapiens
  Payload ID: 383;
  Gene Symbol: ACAA1;
  Gene Name: acetyl-CoA acyltransferase 1;
  ENSP ID: ENSP00000398172
  MOD_RES (1)..(1): Any amino acid
XRPEQLGDICVGNVLQPGAGAIMARIAQFLSDIPETVPLSTVNRQCSSGLQAVASIAGGIRNGSYDIGMACGITSENVAERFGISREKQDTFALASQQKAARAQSKGCFQAEIVPVTTTVHDDKGTKRSITVTQDEGIRPSTTMEGLAKLKPAFKKDGSTTAGNSSQVSDGAAAILLARRSKAEELGLPILGVLRSYAVVGVPPDIMGIGPAYAIPVALQKAGLTVSDVDIFEINEAFASQAAYCVEKLRLPPEKVNPLGGAVALGHPLGCTGARQVITLLNELKRRGKR

SEQ ID NO: 1247 - protein, 113 aa, Homo sapiens; identical to SEQ ID NO: 1245
  Payload ID: 383;
  Gene Symbol: ACAA1;
  Gene Name: acetyl-CoA acyltransferase 1;
  ENSP ID: ENSP00000403124

SEQ ID NO: 1248 - protein, 121 aa, Homo sapiens; identical to SEQ ID NO: 1242
  Payload ID: 383;
  Gene Symbol: ACAA1;
  Gene Name: acetyl-CoA acyltransferase 1;
  ENSP ID: ENSP00000405785

SEQ ID NO: 1249 - protein, 153 aa, Homo sapiens
  Payload ID: 383;
  Gene Symbol: ACAA1;
  Gene Name: acetyl-CoA acyltransferase 1;
  ENSP ID: ENSP00000414021
MQRLQVVLGHLRGPADSGWMPQAAPCLSGAPQASAADVVVVHGRRTAICRAGRGGFKDTTPDELLSAVMTAVLKDVNLRPEQLGDICVGNVLQPGAGAIMARIAQFLSDIPETVPLSTVNRQCSSGLQAVASIAGWSPCPWLTEGTLEILLRA

SEQ ID NO: 1250 - protein, 113 aa, Homo sapiens; identical to SEQ ID NO: 1245
  Payload ID: 383;
  Gene Symbol: ACAA1;
  Gene Name: acetyl-CoA acyltransferase 1;
  ENSP ID: ENSP00000486456

SEQ ID NO: 1251 - protein, 121 aa, Homo sapiens; identical to SEQ ID NO: 1242
  Payload ID: 383;
  Gene Symbol: ACAA1;
  Gene Name: acetyl-CoA acyltransferase 1;
  ENSP ID: ENSP00000486920

SEQ ID NO: 1252 - protein, 397 aa, Homo sapiens
  Payload ID: 384;
  Gene Symbol: ACAA2;
  Gene Name: acetyl-CoA acyltransferase 2;
  Uniprot ID:  P42765;
  ENSP ID: ENSP00000285093
MALLRGVFVVAAKRTPFGAYGGLLKDFTATDLSEFAAKAALSAGKVSPETVDSVIMGNVLQSSSDAIYLARHVGLRVGIPKETPALTINRLCGSGFQSIVNGCQEICVKEAEVVLCGGTESMSQAPYCVRNVRFGTKLGSDIKLEDSLWVSLTDQHVQLPMAMTAENLAVKHKISREECDKYALQSQQRWKAANDAGYFNDEMAPIEVKTKKGKQTMQVDEHARPQTTLEQLQKLPPVFKKDGTVTAGNASGVADGAGAVIIASEDAVKKHNFTPLARIVGYFVSGCDPSIMGIGPVPAISGALKKAGLSLKDMDLVEVNEAFAPQYLAVERSLDLDISKTNVNGGAIALGHPLGGSGSRITAHLVHELRRRGGKYAVGSACIGGGQGIAVIIQSTA

SEQ ID NO: 1253 - protein, 124 aa, Homo sapiens
  Payload ID: 384;
  Gene Symbol: ACAA2;
  Gene Name: acetyl-CoA acyltransferase 2;
  ENSP ID: ENSP00000465045
MGNVLQSSSDAIYLARHVGLRVGIPKETPALTINRLCGSGFQSIVNGCQEICVKEAEVVLCGGTESMSQAPYCVRNVRFGTKLGSDIKLEDSLWVSLTDQHVQLPMAMTAENLAVKHKISREEC

SEQ ID NO: 1254 - protein, 84 aa, Homo sapiens
  Payload ID: 384;
  Gene Symbol: ACAA2;
  Gene Name: acetyl-CoA acyltransferase 2;
  ENSP ID: ENSP00000465095
MGNVLQSSSDAIYLARHVGLRVGIPKETPALTINRLCGSGFQSIVNGCQEICVKEAEVVLCGGTESMSQAPYCVRNVRFGTKLG

SEQ ID NO: 1255 - protein, 394 aa, Homo sapiens
  Payload ID: 384;
  Gene Symbol: ACAA2;
  Gene Name: acetyl-CoA acyltransferase 2;
  ENSP ID: ENSP00000466015
MMGVFVVAAKRTPFGAYGGLLKDFTATDLSEFAAKAALSAGKVSPETVDSVIMGNVLQSSSDAIYLARHVGLRVGIPKETPALTINRLCGSGFQSIVNGCQEICVKEAEVVLCGGTESMSQAPYCVRNVRFGTKLGSDIKLEDSLWVSLTDQHVQLPMAMTAENLAVKHKISREECDKYALQSQQRWKAANDAGYFNDEMAPIEVKTKKGKQTMQVDEHARPQTTLEQLQKLPPVFKKDGTVTAGNASGVADGAGAVIIASEDAVKKHNFTPLARIVGYFVSGCDPSIMGIGPVPAISGALKKAGLSLKDMDLVEVNEAFAPQYLAVERSLDLDISKTNVNGGAIALGHPLGGSGSRITAHLVHELRRRGGKYAVGSACIGGGQGIAVIIQSTA

SEQ ID NO: 1256 - protein, 342 aa, Homo sapiens
  Payload ID: 384;
  Gene Symbol: ACAA2;
  Gene Name: acetyl-CoA acyltransferase 2;
  ENSP ID: ENSP00000466466
MGNVLQSSSDAIYLARHVGLRVGIPKETPALTINRLCGSGFQSIVNGCQEICVKEAEVVLCGGTESMSQAPYCVRNVRFGTKLGSDIKLEDSLWVSLTDQHVQLPMAMTAENLAVKHKISREECDKYALQSQQRWKAANDAGYFNDEMAPIEVKTKKGKQTMQVDEHARPQTTLEQLQKLPPVFKKDGTVTAGNASGVADGAGAVIIASEDAVKKHNFTPLARIVGYFVSGCDPSIMGIGPVPAISGALKKAGLSLKDMDLVEVNEAFAPQYLAVERSLDLDISKTNVNGGAIALGHPLGGSGSRITAHLVHELRRRGGKYAVGSACIGGGQGIAVIIQSTA

SEQ ID NO: 1257 - protein, 72 aa, Homo sapiens
  Payload ID: 384;
  Gene Symbol: ACAA2;
  Gene Name: acetyl-CoA acyltransferase 2;
  ENSP ID: ENSP00000468157
MGNVLQSSSDAIYLARHVGLRVGIPKETPALTINRLCGSGFQSIVNGCQEICVKEAEVVLCGGTESMSQAPY

SEQ ID NO: 1258 - protein, 120 aa, Homo sapiens
  Payload ID: 385;
  Gene Symbol: ACACA;
  Gene Name: acetyl-CoA carboxylase alpha;
  ENSP ID: ENSP00000477912
MDEPSPLAQPLELNQHSRFIIGSVSEDNSEDEISNLVKLDLLEEKEGSLSPASVGSDTLSDLGISSLQDGLALHIRSSMSGLHLVKQGRDRKKIDSQRDFTVASPAEFVTRFGGNKVIEK

SEQ ID NO: 1259 - protein, 2346 aa, Homo sapiens
  Payload ID: 385;
  Gene Symbol: ACACA;
  Gene Name: acetyl-CoA carboxylase alpha;
  Uniprot ID:  Q13085;
  ENSP ID: ENSP00000478547
MDEPSPLAQPLELNQHSRFIIGSVSEDNSEDEISNLVKLDLLEEKEGSLSPASVGSDTLSDLGISSLQDGLALHIRSSMSGLHLVKQGRDRKKIDSQRDFTVASPAEFVTRFGGNKVIEKVLIANNGIAAVKCMRSIRRWSYEMFRNERAIRFVVMVTPEDLKANAEYIKMADHYVPVPGGPNNNNYANVELILDIAKRIPVQAVWAGWGHASENPKLPELLLKNGIAFMGPPSQAMWALGDKIASSIVAQTAGIPTLPWSGSGLRVDWQENDFSKRILNVPQELYEKGYVKDVDDGLQAAEEVGYPVMIKASEGGGGKGIRKVNNADDFPNLFRQVQAEVPGSPIFVMRLAKQSRHLEVQILADQYGNAISLFGRDCSVQRRHQKIIEEAPATIATPAVFEHMEQCAVKLAKMVGYVSAGTVEYLYSQDGSFYFLELNPRLQVEHPCTEMVADVNLPAAQLQIAMGIPLYRIKDIRMMYGVSPWGDSPIDFEDSAHVPCPRGHVIAARITSENPDEGFKPSSGTVQELNFRSNKNVWGYFSVAAAGGLHEFADSQFGHCFSWGENREEAISNMVVALKELSIRGDFRTTVEYLIKLLETESFQMNRIDTGWLDRLIAEKVQAERPDTMLGVVCGALHVADVSLRNSVSNFLHSLERGQVLPAHTLLNTVDVELIYEGVKYVLKVTRQSPNSYVVIMNGSCVEVDVHRLSDGGLLLSYDGSSYTTYMKEEVDRYRITIGNKTCVFEKENDPSVMRSPSAGKLIQYIVEDGGHVFAGQCYAEIEVMKMVMTLTAVESGCIHYVKRPGAALDPGCVLAKMQLDNPSKVQQAELHTGSLPRIQSTALRGEKLHRVFHYVLDNLVNVMNGYCLPDPFFSSKVKDWVERLMKTLRDPSLPLLELQDIMTSVSGRIPPNVEKSIKKEMAQYASNITSVLCQFPSQQIANILDSHAATLNRKSEREVFFMNTQSIVQLVQRYRSGIRGHMKAVVMDLLRQYLRVETQFQNGHYDKCVFALREENKSDMNTVLNYIFSHAQVTKKNLLVTMLIDQLCGRDPTLTDELLNILTELTQLSKTTNAKVALRARQVLIASHLPSYELRHNQVESIFLSAIDMYGHQFCIENLQKLILSETSIFDVLPNFFYHSNQVVRMAALEVYVRRAYIAYELNSVQHRQLKDNTCVVEFQFMLPTSHPNRGNIPTLNRMSFSSNLNHYGMTHVASVSDVLLDNSFTPPCQRMGGMVSFRTFEDFVRIFDEVMGCFSDSPPQSPTFPEAGHTSLYDEDKVPRDEPIHILNVAIKTDCDIEDDRLAAMFREFTQQNKATLVDHGIRRLTFLVAQKDFRKQVNYEVDRRFHREFPKFFTFRARDKFEEDRIYRHLEPALAFQLELNRMRNFDLTAIPCANHKMHLYLGAAKVEVGTEVTDYRFFVRAIIRHSDLVTKEASFEYLQNEGERLLLEAMDELEVAFNNTNVRTDCNHIFLNFVPTVIMDPSKIEESVRSMVMRYGSRLWKLRVLQAELKINIRLTPTGKAIPIRLFLTNESGYYLDISLYKEVTDSRTAQIMFQAYGDKQGPLHGMLINTPYVTKDLLQSKRFQAQSLGTTYIYDIPEMFRQSLIKLWESMSTQAFLPSPPLPSDMLTYTELVLDDQGQLVHMNRLPGGNEIGMVAWKMTFKSPEYPEGRDIIVIGNDITYRIGSFGPQEDLLFLRASELARAEGIPRIYVSANSGARIGLAEEIRHMFHVAWVDPEDPYKGYRYLYLTPQDYKRVSALNSVHCEHVEDEGESRYKITDIIGKEEGIGPENLRGSGMIAGESSLAYNEIITISLVTCRAIGIGAYLVRLGQRTIQVENSHLILTGAGALNKVLGREVYTSNNQLGGIQIMHNNGVTHCTVCDDFEGVFTVLHWLSYMPKSVHSSVPLLNSKDPIDRIIEFVPTKTPYDPRWMLAGRPHPTQKGQWLSGFFDYGSFSEIMQPWAQTVVVGRARLGGIPVGVVAVETRTVELSIPADPANLDSEAKIIQQAGQVWFPDSAFKTYQAIKDFNREGLPLMVFANWRGFSGGMKDMYDQVLKFGAYIVDGLRECCQPVLVYIPPQAELRGGSWVVIDSSINPRHMEMYADRESRGSVLEPEGTVEIKFRRKDLVKTMRRVDPVYIHLAERLGTPELSTAERKELENKLKEREEFLIPIYHQVAVQFADLHDTPGRMQEKGVISDILDWKTSRTFFYWRLRRLLLEDLVKKKIHNANPELTDGQIQAMLRRWFVEVEGTVKAYVWDNNKDLAEWLEKQLTEEDGVHSVIEENIKCISRDYVLKQIRSLVQANPEVAMDSIIHMTQHISPTQRAEVIRILSTMDSPST

SEQ ID NO: 1260 - protein, 2383 aa, Homo sapiens
  Payload ID: 385;
  Gene Symbol: ACACA;
  Gene Name: acetyl-CoA carboxylase alpha;
  Uniprot ID:  Q13085;
  ENSP ID: ENSP00000478577
MWWSTLMSILRARSFWKWISTQTVRIIRAVRAHFGGIMDEPSPLAQPLELNQHSRFIIGSVSEDNSEDEISNLVKLDLLEEKEGSLSPASVGSDTLSDLGISSLQDGLALHIRSSMSGLHLVKQGRDRKKIDSQRDFTVASPAEFVTRFGGNKVIEKVLIANNGIAAVKCMRSIRRWSYEMFRNERAIRFVVMVTPEDLKANAEYIKMADHYVPVPGGPNNNNYANVELILDIAKRIPVQAVWAGWGHASENPKLPELLLKNGIAFMGPPSQAMWALGDKIASSIVAQTAGIPTLPWSGSGLRVDWQENDFSKRILNVPQELYEKGYVKDVDDGLQAAEEVGYPVMIKASEGGGGKGIRKVNNADDFPNLFRQVQAEVPGSPIFVMRLAKQSRHLEVQILADQYGNAISLFGRDCSVQRRHQKIIEEAPATIATPAVFEHMEQCAVKLAKMVGYVSAGTVEYLYSQDGSFYFLELNPRLQVEHPCTEMVADVNLPAAQLQIAMGIPLYRIKDIRMMYGVSPWGDSPIDFEDSAHVPCPRGHVIAARITSENPDEGFKPSSGTVQELNFRSNKNVWGYFSVAAAGGLHEFADSQFGHCFSWGENREEAISNMVVALKELSIRGDFRTTVEYLIKLLETESFQMNRIDTGWLDRLIAEKVQAERPDTMLGVVCGALHVADVSLRNSVSNFLHSLERGQVLPAHTLLNTVDVELIYEGVKYVLKVTRQSPNSYVVIMNGSCVEVDVHRLSDGGLLLSYDGSSYTTYMKEEVDRYRITIGNKTCVFEKENDPSVMRSPSAGKLIQYIVEDGGHVFAGQCYAEIEVMKMVMTLTAVESGCIHYVKRPGAALDPGCVLAKMQLDNPSKVQQAELHTGSLPRIQSTALRGEKLHRVFHYVLDNLVNVMNGYCLPDPFFSSKVKDWVERLMKTLRDPSLPLLELQDIMTSVSGRIPPNVEKSIKKEMAQYASNITSVLCQFPSQQIANILDSHAATLNRKSEREVFFMNTQSIVQLVQRYRSGIRGHMKAVVMDLLRQYLRVETQFQNGHYDKCVFALREENKSDMNTVLNYIFSHAQVTKKNLLVTMLIDQLCGRDPTLTDELLNILTELTQLSKTTNAKVALRARQVLIASHLPSYELRHNQVESIFLSAIDMYGHQFCIENLQKLILSETSIFDVLPNFFYHSNQVVRMAALEVYVRRAYIAYELNSVQHRQLKDNTCVVEFQFMLPTSHPNRGNIPTLNRMSFSSNLNHYGMTHVASVSDVLLDNSFTPPCQRMGGMVSFRTFEDFVRIFDEVMGCFSDSPPQSPTFPEAGHTSLYDEDKVPRDEPIHILNVAIKTDCDIEDDRLAAMFREFTQQNKATLVDHGIRRLTFLVAQKDFRKQVNYEVDRRFHREFPKFFTFRARDKFEEDRIYRHLEPALAFQLELNRMRNFDLTAIPCANHKMHLYLGAAKVEVGTEVTDYRFFVRAIIRHSDLVTKEASFEYLQNEGERLLLEAMDELEVAFNNTNVRTDCNHIFLNFVPTVIMDPSKIEESVRSMVMRYGSRLWKLRVLQAELKINIRLTPTGKAIPIRLFLTNESGYYLDISLYKEVTDSRTAQIMFQAYGDKQGPLHGMLINTPYVTKDLLQSKRFQAQSLGTTYIYDIPEMFRQSLIKLWESMSTQAFLPSPPLPSDMLTYTELVLDDQGQLVHMNRLPGGNEIGMVAWKMTFKSPEYPEGRDIIVIGNDITYRIGSFGPQEDLLFLRASELARAEGIPRIYVSANSGARIGLAEEIRHMFHVAWVDPEDPYKGYRYLYLTPQDYKRVSALNSVHCEHVEDEGESRYKITDIIGKEEGIGPENLRGSGMIAGESSLAYNEIITISLVTCRAIGIGAYLVRLGQRTIQVENSHLILTGAGALNKVLGREVYTSNNQLGGIQIMHNNGVTHCTVCDDFEGVFTVLHWLSYMPKSVHSSVPLLNSKDPIDRIIEFVPTKTPYDPRWMLAGRPHPTQKGQWLSGFFDYGSFSEIMQPWAQTVVVGRARLGGIPVGVVAVETRTVELSIPADPANLDSEAKIIQQAGQVWFPDSAFKTYQAIKDFNREGLPLMVFANWRGFSGGMKDMYDQVLKFGAYIVDGLRECCQPVLVYIPPQAELRGGSWVVIDSSINPRHMEMYADRESRGSVLEPEGTVEIKFRRKDLVKTMRRVDPVYIHLAERLGTPELSTAERKELENKLKEREEFLIPIYHQVAVQFADLHDTPGRMQEKGVISDILDWKTSRTFFYWRLRRLLLEDLVKKKIHNANPELTDGQIQAMLRRWFVEVEGTVKAYVWDNNKDLAEWLEKQLTEEDGVHSVIEENIKCISRDYVLKQIRSLVQANPEVAMDSIIHMTQHISPTQRAEVIRILSTMDSPST

SEQ ID NO: 1261 - protein, 114 aa, Homo sapiens
  Payload ID: 385;
  Gene Symbol: ACACA;
  Gene Name: acetyl-CoA carboxylase alpha;
  ENSP ID: ENSP00000478588
MWWSTLMSILRARSFWKWISTQTVRIIRAVRAHFGGIMDEPSPLAQPLELNQHSRFIIGSVSEDNSEDEISNLVKLDLLEEKEGSLSPASVGSDTLSDLGISSLQDGLALHIRL

SEQ ID NO: 1262 - protein, 42 aa, Homo sapiens
  Payload ID: 385;
  Gene Symbol: ACACA;
  Gene Name: acetyl-CoA carboxylase alpha;
  ENSP ID: ENSP00000479621
MSGLHLVKQGRDRKKIDSQRDFTVASPAEFVTRFGGNKVIEK

SEQ ID NO: 1263 - protein, 2288 aa, Homo sapiens
  Payload ID: 385;
  Gene Symbol: ACACA;
  Gene Name: acetyl-CoA carboxylase alpha;
  Uniprot ID:  Q13085;
  ENSP ID: ENSP00000479901
MEGSPEENKEMRYYMLQRSSMSGLHLVKQGRDRKKIDSQRDFTVASPAEFVTRFGGNKVIEKVLIANNGIAAVKCMRSIRRWSYEMFRNERAIRFVVMVTPEDLKANAEYIKMADHYVPVPGGPNNNNYANVELILDIAKRIPVQAVWAGWGHASENPKLPELLLKNGIAFMGPPSQAMWALGDKIASSIVAQTAGIPTLPWSGSGLRVDWQENDFSKRILNVPQELYEKGYVKDVDDGLQAAEEVGYPVMIKASEGGGGKGIRKVNNADDFPNLFRQVQAEVPGSPIFVMRLAKQSRHLEVQILADQYGNAISLFGRDCSVQRRHQKIIEEAPATIATPAVFEHMEQCAVKLAKMVGYVSAGTVEYLYSQDGSFYFLELNPRLQVEHPCTEMVADVNLPAAQLQIAMGIPLYRIKDIRMMYGVSPWGDSPIDFEDSAHVPCPRGHVIAARITSENPDEGFKPSSGTVQELNFRSNKNVWGYFSVAAAGGLHEFADSQFGHCFSWGENREEAISNMVVALKELSIRGDFRTTVEYLIKLLETESFQMNRIDTGWLDRLIAEKVQAERPDTMLGVVCGALHVADVSLRNSVSNFLHSLERGQVLPAHTLLNTVDVELIYEGVKYVLKVTRQSPNSYVVIMNGSCVEVDVHRLSDGGLLLSYDGSSYTTYMKEEVDRYRITIGNKTCVFEKENDPSVMRSPSAGKLIQYIVEDGGHVFAGQCYAEIEVMKMVMTLTAVESGCIHYVKRPGAALDPGCVLAKMQLDNPSKVQQAELHTGSLPRIQSTALRGEKLHRVFHYVLDNLVNVMNGYCLPDPFFSSKVKDWVERLMKTLRDPSLPLLELQDIMTSVSGRIPPNVEKSIKKEMAQYASNITSVLCQFPSQQIANILDSHAATLNRKSEREVFFMNTQSIVQLVQRYRSGIRGHMKAVVMDLLRQYLRVETQFQNGHYDKCVFALREENKSDMNTVLNYIFSHAQVTKKNLLVTMLIDQLCGRDPTLTDELLNILTELTQLSKTTNAKVALRARQVLIASHLPSYELRHNQVESIFLSAIDMYGHQFCIENLQKLILSETSIFDVLPNFFYHSNQVVRMAALEVYVRRAYIAYELNSVQHRQLKDNTCVVEFQFMLPTSHPNRGNIPTLNRMSFSSNLNHYGMTHVASVSDVLLDNSFTPPCQRMGGMVSFRTFEDFVRIFDEVMGCFSDSPPQSPTFPEAGHTSLYDEDKVPRDEPIHILNVAIKTDCDIEDDRLAAMFREFTQQNKATLVDHGIRRLTFLVAQKDFRKQVNYEVDRRFHREFPKFFTFRARDKFEEDRIYRHLEPALAFQLELNRMRNFDLTAIPCANHKMHLYLGAAKVEVGTEVTDYRFFVRAIIRHSDLVTKEASFEYLQNEGERLLLEAMDELEVAFNNTNVRTDCNHIFLNFVPTVIMDPSKIEESVRSMVMRYGSRLWKLRVLQAELKINIRLTPTGKAIPIRLFLTNESGYYLDISLYKEVTDSRTAQIMFQAYGDKQGPLHGMLINTPYVTKDLLQSKRFQAQSLGTTYIYDIPEMFRQSLIKLWESMSTQAFLPSPPLPSDMLTYTELVLDDQGQLVHMNRLPGGNEIGMVAWKMTFKSPEYPEGRDIIVIGNDITYRIGSFGPQEDLLFLRASELARAEGIPRIYVSANSGARIGLAEEIRHMFHVAWVDPEDPYKGYRYLYLTPQDYKRVSALNSVHCEHVEDEGESRYKITDIIGKEEGIGPENLRGSGMIAGESSLAYNEIITISLVTCRAIGIGAYLVRLGQRTIQVENSHLILTGAGALNKVLGREVYTSNNQLGGIQIMHNNGVTHCTVCDDFEGVFTVLHWLSYMPKSVHSSVPLLNSKDPIDRIIEFVPTKTPYDPRWMLAGRPHPTQKGQWLSGFFDYGSFSEIMQPWAQTVVVGRARLGGIPVGVVAVETRTVELSIPADPANLDSEAKIIQQAGQVWFPDSAFKTYQAIKDFNREGLPLMVFANWRGFSGGMKDMYDQVLKFGAYIVDGLRECCQPVLVYIPPQAELRGGSWVVIDSSINPRHMEMYADRESRGSVLEPEGTVEIKFRRKDLVKTMRRVDPVYIHLAERLGTPELSTAERKELENKLKEREEFLIPIYHQVAVQFADLHDTPGRMQEKGVISDILDWKTSRTFFYWRLRRLLLEDLVKKKIHNANPELTDGQIQAMLRRWFVEVEGTVKAYVWDNNKDLAEWLEKQLTEEDGVHSVIEENIKCISRDYVLKQIRSLVQANPEVAMDSIIHMTQHISPTQRAEVIRILSTMDSPST

SEQ ID NO: 1264 - protein, 2268 aa, Homo sapiens
  Payload ID: 385;
  Gene Symbol: ACACA;
  Gene Name: acetyl-CoA carboxylase alpha;
  Uniprot ID:  Q13085;
  ENSP ID: ENSP00000480031
MSGLHLVKQGRDRKKIDSQRDFTVASPAEFVTRFGGNKVIEKVLIANNGIAAVKCMRSIRRWSYEMFRNERAIRFVVMVTPEDLKANAEYIKMADHYVPVPGGPNNNNYANVELILDIAKRIPVQAVWAGWGHASENPKLPELLLKNGIAFMGPPSQAMWALGDKIASSIVAQTAGIPTLPWSGSGLRVDWQENDFSKRILNVPQELYEKGYVKDVDDGLQAAEEVGYPVMIKASEGGGGKGIRKVNNADDFPNLFRQVQAEVPGSPIFVMRLAKQSRHLEVQILADQYGNAISLFGRDCSVQRRHQKIIEEAPATIATPAVFEHMEQCAVKLAKMVGYVSAGTVEYLYSQDGSFYFLELNPRLQVEHPCTEMVADVNLPAAQLQIAMGIPLYRIKDIRMMYGVSPWGDSPIDFEDSAHVPCPRGHVIAARITSENPDEGFKPSSGTVQELNFRSNKNVWGYFSVAAAGGLHEFADSQFGHCFSWGENREEAISNMVVALKELSIRGDFRTTVEYLIKLLETESFQMNRIDTGWLDRLIAEKVQAERPDTMLGVVCGALHVADVSLRNSVSNFLHSLERGQVLPAHTLLNTVDVELIYEGVKYVLKVTRQSPNSYVVIMNGSCVEVDVHRLSDGGLLLSYDGSSYTTYMKEEVDRYRITIGNKTCVFEKENDPSVMRSPSAGKLIQYIVEDGGHVFAGQCYAEIEVMKMVMTLTAVESGCIHYVKRPGAALDPGCVLAKMQLDNPSKVQQAELHTGSLPRIQSTALRGEKLHRVFHYVLDNLVNVMNGYCLPDPFFSSKVKDWVERLMKTLRDPSLPLLELQDIMTSVSGRIPPNVEKSIKKEMAQYASNITSVLCQFPSQQIANILDSHAATLNRKSEREVFFMNTQSIVQLVQRYRSGIRGHMKAVVMDLLRQYLRVETQFQNGHYDKCVFALREENKSDMNTVLNYIFSHAQVTKKNLLVTMLIDQLCGRDPTLTDELLNILTELTQLSKTTNAKVALRARQVLIASHLPSYELRHNQVESIFLSAIDMYGHQFCIENLQKLILSETSIFDVLPNFFYHSNQVVRMAALEVYVRRAYIAYELNSVQHRQLKDNTCVVEFQFMLPTSHPNRGNIPTLNRMSFSSNLNHYGMTHVASVSDVLLDNSFTPPCQRMGGMVSFRTFEDFVRIFDEVMGCFSDSPPQSPTFPEAGHTSLYDEDKVPRDEPIHILNVAIKTDCDIEDDRLAAMFREFTQQNKATLVDHGIRRLTFLVAQKDFRKQVNYEVDRRFHREFPKFFTFRARDKFEEDRIYRHLEPALAFQLELNRMRNFDLTAIPCANHKMHLYLGAAKVEVGTEVTDYRFFVRAIIRHSDLVTKEASFEYLQNEGERLLLEAMDELEVAFNNTNVRTDCNHIFLNFVPTVIMDPSKIEESVRSMVMRYGSRLWKLRVLQAELKINIRLTPTGKAIPIRLFLTNESGYYLDISLYKEVTDSRTAQIMFQAYGDKQGPLHGMLINTPYVTKDLLQSKRFQAQSLGTTYIYDIPEMFRQSLIKLWESMSTQAFLPSPPLPSDMLTYTELVLDDQGQLVHMNRLPGGNEIGMVAWKMTFKSPEYPEGRDIIVIGNDITYRIGSFGPQEDLLFLRASELARAEGIPRIYVSANSGARIGLAEEIRHMFHVAWVDPEDPYKGYRYLYLTPQDYKRVSALNSVHCEHVEDEGESRYKITDIIGKEEGIGPENLRGSGMIAGESSLAYNEIITISLVTCRAIGIGAYLVRLGQRTIQVENSHLILTGAGALNKVLGREVYTSNNQLGGIQIMHNNGVTHCTVCDDFEGVFTVLHWLSYMPKSVHSSVPLLNSKDPIDRIIEFVPTKTPYDPRWMLAGRPHPTQKGQWLSGFFDYGSFSEIMQPWAQTVVVGRARLGGIPVGVVAVETRTVELSIPADPANLDSEAKIIQQAGQVWFPDSAFKTYQAIKDFNREGLPLMVFANWRGFSGGMKDMYDQVLKFGAYIVDGLRECCQPVLVYIPPQAELRGGSWVVIDSSINPRHMEMYADRESRGSVLEPEGTVEIKFRRKDLVKTMRRVDPVYIHLAERLGTPELSTAERKELENKLKEREEFLIPIYHQVAVQFADLHDTPGRMQEKGVISDILDWKTSRTFFYWRLRRLLLEDLVKKKIHNANPELTDGQIQAMLRRWFVEVEGTVKAYVWDNNKDLAEWLEKQLTEEDGVHSVIEENIKCISRDYVLKQIRSLVQANPEVAMDSIIHMTQHISPTQRAEVIRILSTMDSPST

SEQ ID NO: 1265 - protein, 52 aa, Homo sapiens
  Payload ID: 385;
  Gene Symbol: ACACA;
  Gene Name: acetyl-CoA carboxylase alpha;
  ENSP ID: ENSP00000480371
  MOD_RES (1)..(1): Any amino acid
XEIRHMFHVAWVDPEDPYKGYRYLYLTPQDYKRVSALNSVHCEHVEDEGESR

SEQ ID NO: 1266 - protein, 114 aa, Homo sapiens; identical to SEQ ID NO: 1261
  Payload ID: 385;
  Gene Symbol: ACACA;
  Gene Name: acetyl-CoA carboxylase alpha;
  ENSP ID: ENSP00000481900

SEQ ID NO: 1267 - protein, 96 aa, Homo sapiens
  Payload ID: 385;
  Gene Symbol: ACACA;
  Gene Name: acetyl-CoA carboxylase alpha;
  ENSP ID: ENSP00000482064
  MOD_RES (1)..(1): Any amino acid
XIKCISRDYVLKQIRSLVQANPEVAMDSIIHMTQHISPTQRAEVIRILSTMDSPSTLCMTSWDVRSQNPPPAHQSHLPHSVFITLARPSPPLPAQD

SEQ ID NO: 1268 - protein, 2288 aa, Homo sapiens; identical to SEQ ID NO: 1263
  Payload ID: 385;
  Gene Symbol: ACACA;
  Gene Name: acetyl-CoA carboxylase alpha;
  Uniprot ID:  Q13085;
  ENSP ID: ENSP00000482269

SEQ ID NO: 1269 - protein, 2268 aa, Homo sapiens; identical to SEQ ID NO: 1264
  Payload ID: 385;
  Gene Symbol: ACACA;
  Gene Name: acetyl-CoA carboxylase alpha;
  Uniprot ID:  Q13085;
  ENSP ID: ENSP00000482368

SEQ ID NO: 1270 - protein, 114 aa, Homo sapiens; identical to SEQ ID NO: 1261
  Payload ID: 385;
  Gene Symbol: ACACA;
  Gene Name: acetyl-CoA carboxylase alpha;
  ENSP ID: ENSP00000482498

SEQ ID NO: 1271 - protein, 2383 aa, Homo sapiens; identical to SEQ ID NO: 1260
  Payload ID: 385;
  Gene Symbol: ACACA;
  Gene Name: acetyl-CoA carboxylase alpha;
  Uniprot ID:  Q13085;
  ENSP ID: ENSP00000483300

SEQ ID NO: 1272 - protein, 2346 aa, Homo sapiens; identical to SEQ ID NO: 1259
  Payload ID: 385;
  Gene Symbol: ACACA;
  Gene Name: acetyl-CoA carboxylase alpha;
  Uniprot ID:  Q13085;
  ENSP ID: ENSP00000483674

SEQ ID NO: 1273 - protein, 94 aa, Homo sapiens
  Payload ID: 385;
  Gene Symbol: ACACA;
  Gene Name: acetyl-CoA carboxylase alpha;
  ENSP ID: ENSP00000483696
MSGLHLVKQGRDRKKIDSQRDFTVASPAEFVTRFGGNKVIEKVLIANNGIAAVKCMRSIRRWSYEMFRNERAIRFVVMVTPEDLKANAEYIKMA

SEQ ID NO: 1274 - protein, 112 aa, Homo sapiens
  Payload ID: 385;
  Gene Symbol: ACACA;
  Gene Name: acetyl-CoA carboxylase alpha;
  ENSP ID: ENSP00000483852
MDEPSPLAQPLELNQHSRFIIGSVSEDNSEDEISNLVKLDLLEEKEGSLSPASVGSDTLSDLGISSLQDGLALHISSWIKRSGSVVLGSHCSSESPRGALGDKPHPQRFRFI

SEQ ID NO: 1275 - protein, 998 aa, Homo sapiens
  Payload ID: 385;
  Gene Symbol: ACACA;
  Gene Name: acetyl-CoA carboxylase alpha;
  ENSP ID: ENSP00000483969
EDDRLAAMFREFTQQNKATLVDHGIRRLTFLVAQKDFRKQVNYEVDRRFHREFPKFFTFRARDKFEEDRIYRHLEPALAFQLELNRMRNFDLTAIPCANHKMHLYLGAAKVEVGTEVTDYRFFVRAIIRHSDLVTKEASFEYLQNEGERLLLEAMDELEVAFNNTNVRTDCNHIFLNFVPTVIMDPSKIEESVRSMVMRYGSRLWKLRVLQAELKINIRLTPTGKAIPIRLFLTNESGYYLDISLYKEVTDSRTAQIMFQAYGDKQGPLHGMLINTPYVTKDLLQSKRFQAQSLGTTYIYDIPEMFRQIGMVAWKMTFKSPEYPEGRDIIVIGNDITYRIGSFGPQEDLLFLRASELARAEGIPRIYVSANSGARIGLAEEIRHMFHVAWVDPEDPYKGYRYLYLTPQDYKRVSALNSVHCEHVEDEGESRYKITDIIGKEEGIGPENLRGSGMIAGESSLAYNEIITISLVTCRAIGIGAYLVRLGQRTIQVENSHLILTGAGALNKVLGREVYTSNNQLGGIQIMHNNGVTHCTVCDDFEGVFTVLHWLSYMPKSVHSSVPLLNSKDPIDRIIEFVPTKTPYDPRWMLAGRPHPTQKGQWLSGFFDYGSFSEIMQPWAQTVVVGRARLGGIPVGVVAVETRTVELSIPADPANLDSEAKIIQQAGQVWFPDSAFKTYQAIKDFNREGLPLMVFANWRGFSGGMKDMYDQVLKFGAYIVDGLRECCQPVLVYIPPQAELRGGSWVVIDSSINPRHMEMYADRESRGSVLEPEGTVEIKFRRKDLVKTMRRVDPVYIHLAERLGTPELSTAERKELENKLKEREEFLIPIYHQVAVQFADLHDTPGRMQEKGVISDILDWKTSRTFFYWRLRRLLLEDLVKKKIHNANPELTDGQIQAMLRRWFVEVEGTVKAYVWDNNKDLAEWLEKQLTEEDGVHSVIEENIKCISRDYVLKQIRSLVQANPEVAMDSIIHMTQHISPTQRAEVIRILSTMDSPST

SEQ ID NO: 1276 - protein, 84 aa, Homo sapiens
  Payload ID: 385;
  Gene Symbol: ACACA;
  Gene Name: acetyl-CoA carboxylase alpha;
  ENSP ID: ENSP00000484948
MDEPSPLAQPLELNQHSRFIIGSVSEDNSEDEISNLVKLDLLEEKEGSLSPASVGSDTLSDLGISSLQDGLALHISSWIKRSGS

SEQ ID NO: 1277 - protein, 120 aa, Homo sapiens; identical to SEQ ID NO: 1258
  Payload ID: 385;
  Gene Symbol: ACACA;
  Gene Name: acetyl-CoA carboxylase alpha;
  ENSP ID: ENSP00000487874

SEQ ID NO: 1278 - protein, 114 aa, Homo sapiens; identical to SEQ ID NO: 1261
  Payload ID: 385;
  Gene Symbol: ACACA;
  Gene Name: acetyl-CoA carboxylase alpha;
  ENSP ID: ENSP00000487997

SEQ ID NO: 1279 - protein, 94 aa, Homo sapiens; identical to SEQ ID NO: 1273
  Payload ID: 385;
  Gene Symbol: ACACA;
  Gene Name: acetyl-CoA carboxylase alpha;
  ENSP ID: ENSP00000488112

SEQ ID NO: 1280 - protein, 96 aa, Homo sapiens; identical to SEQ ID NO: 1267
  Payload ID: 385;
  Gene Symbol: ACACA;
  Gene Name: acetyl-CoA carboxylase alpha;
  ENSP ID: ENSP00000488139
  MOD_RES (1)..(1): Any amino acid

SEQ ID NO: 1281 - protein, 84 aa, Homo sapiens; identical to SEQ ID NO: 1276
  Payload ID: 385;
  Gene Symbol: ACACA;
  Gene Name: acetyl-CoA carboxylase alpha;
  ENSP ID: ENSP00000488145

SEQ ID NO: 1282 - protein, 42 aa, Homo sapiens; identical to SEQ ID NO: 1262
  Payload ID: 385;
  Gene Symbol: ACACA;
  Gene Name: acetyl-CoA carboxylase alpha;
  ENSP ID: ENSP00000488223

SEQ ID NO: 1283 - protein, 52 aa, Homo sapiens; identical to SEQ ID NO: 1265
  Payload ID: 385;
  Gene Symbol: ACACA;
  Gene Name: acetyl-CoA carboxylase alpha;
  ENSP ID: ENSP00000488724
  MOD_RES (1)..(1): Any amino acid

SEQ ID NO: 1284 - protein, 112 aa, Homo sapiens; identical to SEQ ID NO: 1274
  Payload ID: 385;
  Gene Symbol: ACACA;
  Gene Name: acetyl-CoA carboxylase alpha;
  ENSP ID: ENSP00000488774

SEQ ID NO: 1285 - protein, 998 aa, Homo sapiens; identical to SEQ ID NO: 1275
  Payload ID: 385;
  Gene Symbol: ACACA;
  Gene Name: acetyl-CoA carboxylase alpha;
  ENSP ID: ENSP00000488846

SEQ ID NO: 1286 - protein, 2458 aa, Homo sapiens
  Payload ID: 386;
  Gene Symbol: ACACB;
  Gene Name: acetyl-CoA carboxylase beta;
  Uniprot ID:  O00763;
  ENSP ID: ENSP00000341044
MVLLLCLSCLIFSCLTFSWLKIWGKMTDSKPITKSKSEANLIPSQEPFPASDNSGETPQRNGEGHTLPKTPSQAEPASHKGPKDAGRRRNSLPPSHQKPPRNPLSSSDAAPSPELQANGTGTQGLEATDTNGLSSSARPQGQQAGSPSKEDKKQANIKRQLMTNFILGSFDDYSSDEDSVAGSSRESTRKGSRASLGALSLEAYLTTGEAETRVPTMRPSMSGLHLVKRGREHKKLDLHRDFTVASPAEFVTRFGGDRVIEKVLIANNGIAAVKCMRSIRRWAYEMFRNERAIRFVVMVTPEDLKANAEYIKMADHYVPVPGGPNNNNYANVELIVDIAKRIPVQAVWAGWGHASENPKLPELLCKNGVAFLGPPSEAMWALGDKIASTVVAQTLQVPTLPWSGSGLTVEWTEDDLQQGKRISVPEDVYDKGCVKDVDEGLEAAERIGFPLMIKASEGGGGKGIRKAESAEDFPILFRQVQSEIPGSPIFLMKLAQHARHLEVQILADQYGNAVSLFGRDCSIQRRHQKIVEEAPATIAPLAIFEFMEQCAIRLAKTVGYVSAGTVEYLYSQDGSFHFLELNPRLQVEHPCTEMIADVNLPAAQLQIAMGVPLHRLKDIRLLYGESPWGVTPISFETPSNPPLARGHVIAARITSENPDEGFKPSSGTVQELNFRSSKNVWGYFSVAATGGLHEFADSQFGHCFSWGENREEAISNMVVALKELSIRGDFRTTVEYLINLLETESFQNNDIDTGWLDYLIAEKVQAEKPDIMLGVVCGALNVADAMFRTCMTDFLHSLERGQVLPADSLLNLVDVELIYGGVKYILKVARQSLTMFVLIMNGCHIEIDAHRLNDGGLLLSYNGNSYTTYMKEEVDSYRITIGNKTCVFEKENDPTVLRSPSAGKLTQYTVEDGGHVEAGSSYAEMEVMKMIMTLNVQERGRVKYIKRPGAVLEAGCVVARLELDDPSKVHPAEPFTGELPAQQTLPILGEKLHQVFHSVLENLTNVMSGFCLPEPVFSIKLKEWVQKLMMTLRHPSLPLLELQEIMTSVAGRIPAPVEKSVRRVMAQYASNITSVLCQFPSQQIATILDCHAATLQRKADREVFFINTQSIVQLVQRYRSGIRGYMKTVVLDLLRRYLRVEHHFQQAHYDKCVINLREQFKPDMSQVLDCIFSHAQVAKKNQLVIMLIDELCGPDPSLSDELISILNELTQLSKSEHCKVALRARQILIASHLPSYELRHNQVESIFLSAIDMYGHQFCPENLKKLILSETTIFDVLPTFFYHANKVVCMASLEVYVRRGYIAYELNSLQHRQLPDGTCVVEFQFMLPSSHPNRMTVPISITNPDLLRHSTELFMDSGFSPLCQRMGAMVAFRRFEDFTRNFDEVISCFANVPKDTPLFSEARTSLYSEDDCKSLREEPIHILNVSIQCADHLEDEALVPILRTFVQSKKNILVDYGLRRITFLIAQEKEFPKFFTFRARDEFAEDRIYRHLEPALAFQLELNRMRNFDLTAVPCANHKMHLYLGAAKVKEGVEVTDHRFFIRAIIRHSDLITKEASFEYLQNEGERLLLEAMDELEVAFNNTSVRTDCNHIFLNFVPTVIMDPFKIEESVRYMVMRYGSRLWKLRVLQAEVKINIRQTTTGSAVPIRLFITNESGYYLDISLYKEVTDSRSGNIMFHSFGNKQGPQHGMLINTPYVTKDLLQAKRFQAQTLGTTYIYDFPEMFRQALFKLWGSPDKYPKDILTYTELVLDSQGQLVEMNRLPGGNEVGMVAFKMRFKTQEYPEGRDVIVIGNDITFRIGSFGPGEDLLYLRASEMARAEGIPKIYVAANSGARIGMAEEIKHMFHVAWVDPEDPHKGFKYLYLTPQDYTRISSLNSVHCKHIEEGGESRYMITDIIGKDDGLGVENLRGSGMIAGESSLAYEEIVTISLVTCRAIGIGAYLVRLGQRVIQVENSHIILTGASALNKVLGREVYTSNNQLGGVQIMHYNGVSHITVPDDFEGVYTILEWLSYMPKDNHSPVPIITPTDPIDREIEFLPSRAPYDPRWMLAGRPHPTLKGTWQSGFFDHGSFKEIMAPWAQTVVTGRARLGGIPVGVIAVETRTVEVAVPADPANLDSEAKIIQQAGQVWFPDSAYKTAQAVKDFNREKLPLMIFANWRGFSGGMKDMYDQVLKFGAYIVDGLRQYKQPILIYIPPYAELRGGSWVVIDATINPLCIEMYADKESRGGVLEPEGTVEIKFRKKDLIKSMRRIDPAYKKLMEQLGEPDLSDKDRKDLEGRLKAREDLLLPIYHQVAVQFADFHDTPGRMLEKGVISDILEWKTARTFLYWRLRRLLLEDQVKQEILQASGELSHVHIQSMLRRWFVETEGAVKAYLWDNNQVVVQWLEQHWQAGDGPRSTIRENITYLKHDSVLKTIRGLVEENPEVAVDCVIYLSQHISPAERAQVVHLLSTMDSPAST

SEQ ID NO: 1287 - protein, 2458 aa, Homo sapiens; identical to SEQ ID NO: 1286
  Payload ID: 386;
  Gene Symbol: ACACB;
  Gene Name: acetyl-CoA carboxylase beta;
  Uniprot ID:  O00763;
  ENSP ID: ENSP00000367079

SEQ ID NO: 1288 - protein, 858 aa, Homo sapiens
  Payload ID: 386;
  Gene Symbol: ACACB;
  Gene Name: acetyl-CoA carboxylase beta;
  ENSP ID: ENSP00000367085
MTVPISITNPDLLRHSTELFMDSGFSPLCQRMGAMVAFRRFEDFTRNFDEVISCFANVPKDTPLFSEARTSLYSEDDCKSLREEPIHILNVSIQCADHLEDEALVPILRTFVQSKKNILVDYGLRRITFLIAQEKEFPKFFTFRARDEFAEDRIYRHLEPALAFQLELNRMRNFDLTAVPCANHKMHLYLGAAKVKEGVEVTDHRFFIRAIIRHSDLITKEASFEYLQNEGERLLLEAMDELEVAFNNTSVRTDCNHIFLNFVPTVIMDPFKIEESVRYMVMRYGSRLWKLRVLQAEVKINIRQTTTGSAVPIRLFITNESGYYLDISLYKEVTDSRSGNIMFHSFGNKQGPQHGMLINTPYVTKDLLQAKRFQAQTLGTTYIYDFPEMFRQALFKLWGSPDKYPKDILTYTELVLDSQGQLVEMNRLPGGNEVGMVAFKMRFKTQEYPEGRDVIVIGNDITFRIGSFGPGEDLLYLRASEMARAEGIPKIYVAANSGARIGMAEEIKHMFHVAWVDPEDPHKGFKYLYLTPQDYTRISSLNSVHCKHIEEGGESRYMITDIIGKDDGLGVENLRGSGMIAGESSLAYEEIVTISLVTCRAIGIGAYLVRLGQRVIQVENSHIILTGASALNKVLGREVYTSNNQLGGVQIMHYNGVSHITVPDDFEGVYTILEWLSYMPKDNHSPVPIITPTDPIDREIEFLPSRAPYDPRWMLAGRPHPTLKGTWQSGFFDHGSFKEIMAPWAQTVVTGRARLGGIPVGVIAVETRTVEVAVPADPANLDSEAKIIQQAGQVWFPDSAYKTAQAVKDFNREKLPLMIFANWRGFSGGMKGCLGTWRDVSWWKIRAMLPMHIGEGSV

SEQ ID NO: 1289 - protein, 859 aa, Homo sapiens
  Payload ID: 386;
  Gene Symbol: ACACB;
  Gene Name: acetyl-CoA carboxylase beta;
  ENSP ID: ENSP00000443281
  MOD_RES (1)..(1): Any amino acid
XMTVPISITNPDLLRHSTELFMDSGFSPLCQRMGAMVAFRRFEDFTRNFDEVISCFANVPKDTPLFSEARTSLYSEDDCKSLREEPIHILNVSIQCADHLEDEALVPILRTFVQSKKNILVDYGLRRITFLIAQEKEFPKFFTFRARDEFAEDRIYRHLEPALAFQLELNRMRNFDLTAVPCANHKMHLYLGAAKVKEGVEVTDHRFFIRAIIRHSDLITKEASFEYLQNEGERLLLEAMDELEVAFNNTSVRTDCNHIFLNFVPTVIMDPFKIEESVRYMVMRYGSRLWKLRVLQAEVKINIRQTTTGSAVPIRLFITNESGYYLDISLYKEVTDSRSGNIMFHSFGNKQGPQHGMLINTPYVTKDLLQAKRFQAQTLGTTYIYDFPEMFRQALFKLWGSPDKYPKDILTYTELVLDSQGQLVEMNRLPGGNEVGMVAFKMRFKTQEYPEGRDVIVIGNDITFRIGSFGPGEDLLYLRASEMARAEGIPKIYVAANSGARIGMAEEIKHMFHVAWVDPEDPHKGFKYLYLTPQDYTRISSLNSVHCKHIEEGGESRYMITDIIGKDDGLGVENLRGSGMIAGESSLAYEEIVTISLVTCRAIGIGAYLVRLGQRVIQVENSHIILTGASALNKVLGREVYTSNNQLGGVQIMHYNGVSHITVPDDFEGVYTILEWLSYMPKDNHSPVPIITPTDPIDREIEFLPSRAPYDPRWMLAGRPHPTLKGTWQSGFFDHGSFKEIMAPWAQTVVTGRARLGGIPVGVIAVETRTVEVAVPADPANLDSEAKIIQQAGQVWFPDSAYKTAQAVKDFNREKLPLMIFANWRGFSGGMKGCLGTWRDVSWWKIRAMLPMHIGEGSV

SEQ ID NO: 1290 - protein, 143 aa, Homo sapiens
  Payload ID: 386;
  Gene Symbol: ACACB;
  Gene Name: acetyl-CoA carboxylase beta;
  ENSP ID: ENSP00000443494
MTDSKPITKSKSEANLIPSQEPFPASDNSGETPQRNGEGHTLPKTPSQAEPASHKGPKDAGRRRNSLPPSHQKPPRNPLSSSDAAPSPELQANGTGTQGLEATDTNGLSSSARPQGQQAGSPSKEDKKQANIKRQLMTNFILG

SEQ ID NO: 1291 - protein, 155 aa, Homo sapiens
  Payload ID: 386;
  Gene Symbol: ACACB;
  Gene Name: acetyl-CoA carboxylase beta;
  ENSP ID: ENSP00000474680
MSPAKCKICFPDREVKPSMSGLHLVKRGREHKKLDLHRDFTVASPAEFVTRFGGDRVIEKVLIANNGIAAVKCMRSIRRWAYEMFRNERAIRFVVMVTPEDLKANAEYIKMADHYVPVPGGPNNNNYANVELIVDIAKRIPVQAVWAGWGHASEN

SEQ ID NO: 1292 - protein, 112 aa, Homo sapiens
  Payload ID: 386;
  Gene Symbol: ACACB;
  Gene Name: acetyl-CoA carboxylase beta;
  ENSP ID: ENSP00000478488
  MOD_RES (1)..(1): Any amino acid
XVEMNRLPGGNEVGMVAFKMRFKTQEYPEGRDVIVIGNDITFRIGSFGPGEDLLYLRASEMARAEGIPKIYVAANSGARIGMAEEIKHMFHVAWVDPEDPHKIHDHGYHREG

SEQ ID NO: 1293 - protein, 345 aa, Homo sapiens
  Payload ID: 387;
  Gene Symbol: ASMT;
  Gene Name: acetylserotonin O- methyltransferase;
  Uniprot ID:  P46597;
  ENSP ID: ENSP00000370627
MGSSEDQAYRLLNDYANGFMVSQVLFAACELGVFDLLAEAPGPLDVAAVAAGVRASAHGTELLLDICVSLKLLKVETRGGKAFYRNTELSSDYLTTVSPTSQCSMLKYMGRTSYRCWGHLADAVREGRNQYLETFGVPAEELFTAIYRSEGERLQFMQALQEVWSVNGRSVLTAFDLSVFPLMCDLGGGAGALAKECMSLYPGCKITVFDIPEVVWTAKQHFSFQEEEQIDFQEGDFFKDPLPEADLYILARVLHDWADGKCSHLLERIYHTCKPGGGILVIESLLDEDRRGPLLTQLYSLNMLVQTEGQERTPTHYHMLLSSAGFRDFQFKKTGAIYDAILARK

SEQ ID NO: 1294 - protein, 298 aa, Homo sapiens
  Payload ID: 387;
  Gene Symbol: ASMT;
  Gene Name: acetylserotonin O- methyltransferase;
  Uniprot ID:  P46597;
  ENSP ID: ENSP00000370631
MGSSEDQAYRLLNDYANGFMVSQVLFAACELGVFDLLAEAPGPLDVAAVAAGVRASAHGTELLLDICVSLKLLKVETRGGKAFYRNTELSSDYLTTVSPTSQCSMLKYMGRTSYRCWGHLADAVREGRNQYLETFGVPAEELFTAIYRSEGERLQFMQALQEVWSVNGRSVLTAFDLSVFPLMCDLGGDFFKDPLPEADLYILARVLHDWADGKCSHLLERIYHTCKPGGGILVIESLLDEDRRGPLLTQLYSLNMLVQTEGQERTPTHYHMLLSSAGFRDFQFKKTGAIYDAILARK

SEQ ID NO: 1295 - protein, 373 aa, Homo sapiens
  Payload ID: 387;
  Gene Symbol: ASMT;
  Gene Name: acetylserotonin O- methyltransferase;
  Uniprot ID:  P46597;
  ENSP ID: ENSP00000370639
MGSSEDQAYRLLNDYANGFMVSQVLFAACELGVFDLLAEAPGPLDVAAVAAGVRASAHGTELLLDICVSLKLLKVETRGGKAFYRNTELSSDYLTTVSPTSQCSMLKYMGRTSYRCWGHLADAVREGRNQYLETFGVPAEELFTAIYRSEGERLQFMQALQEVWSVNGRSVLTAFDLSVFPLMCDLGGTWIKLETIILSKLSQGQKTKHRVFSLIGGAGALAKECMSLYPGCKITVFDIPEVVWTAKQHFSFQEEEQIDFQEGDFFKDPLPEADLYILARVLHDWADGKCSHLLERIYHTCKPGGGILVIESLLDEDRRGPLLTQLYSLNMLVQTEGQERTPTHYHMLLSSAGFRDFQFKKTGAIYDAILARK

SEQ ID NO: 1296 - protein, 124 aa, Homo sapiens
  Payload ID: 387;
  Gene Symbol: ASMT;
  Gene Name: acetylserotonin O- methyltransferase;
  ENSP ID: ENSP00000392053
DCRLTSVCLPCVPGDFFKDPLPEADLYILARVLHDWADGKCSHLLERIYHTCKPGGGILVIESLLDEDRRGPLLTQLYSLNMLVQTEGQERTPTHYHMLLSSAGFRDFQFKKTGAIYDAILARK

SEQ ID NO: 1297 - protein, 621 aa, Homo sapiens
  Payload ID: 388;
  Gene Symbol: ASMTL;
  Gene Name: acetylserotonin O-methyltransferase-like;
  Uniprot ID:  O95671;
  ENSP ID: ENSP00000370718
MVLCPVIGKLLHKRVVLASASPRRQEILSNAGLRFEVVPSKFKEKLDKASFATPYGYAMETAKQKALEVANRLYQKDLRAPDVVIGADTIVTVGGLILEKPVDKQDAYRMLSRLSGREHSVFTGVAIVHCSSKDHQLDTRVSEFYEETKVKFSELSEELLWEYVHSGEPMDKAGGYGIQALGGMLVESVHGDFLNVVGFPLNHFCKQLVKLYYPPRPEDLRRSVKHDSIPAADTFEDLSDVEGGGSEPTQRDAGSRDEKAEAGEAGQATAEAECHRTRETLPPFPTRLLELIEGFMLSKGLLTACKLKVFDLLKDEAPQKAADIASKVDASACGMERLLDICAAMGLLEKTEQGYSNTETANVYLASDGEYSLHGFIMHNNDLTWNLFTYLEFAIREGTNQHHRALGKKAEDLFQDAYYQSPETRLRFMRAMHGMTKLTACQVATAFNLSRFSSACDVGGCTGALARELAREYPRMQVTVFDLPDIIELAAHFQPPGPQAVQIHFAAGDFFRDPLPSAELYVLCRILHDWPDDKVHKLLSRVAESCKPGAGLLLVETLLDEEKRVAQRALMQSLNMLVQTEGKERSLGEYQCLLELHGFHQVQVVHLGGVLDAILATKVAP

SEQ ID NO: 1298 - protein, 605 aa, Homo sapiens
  Payload ID: 388;
  Gene Symbol: ASMTL;
  Gene Name: acetylserotonin O-methyltransferase-like;
  Uniprot ID:  O95671;
  ENSP ID: ENSP00000370734
MVLCPVIGKLLHKRVVLASASPRRQEILSNAGLRFEVVPSKFKEKLDKASFATPYGYAMETAKQKALEVANRLYQTVGGLILEKPVDKQDAYRMLSRLSGREHSVFTGVAIVHCSSKDHQLDTRVSEFYEETKVKFSELSEELLWEYVHSGEPMDKAGGYGIQALGGMLVESVHGDFLNVVGFPLNHFCKQLVKLYYPPRPEDLRRSVKHDSIPAADTFEDLSDVEGGGSEPTQRDAGSRDEKAEAGEAGQATAEAECHRTRETLPPFPTRLLELIEGFMLSKGLLTACKLKVFDLLKDEAPQKAADIASKVDASACGMERLLDICAAMGLLEKTEQGYSNTETANVYLASDGEYSLHGFIMHNNDLTWNLFTYLEFAIREGTNQHHRALGKKAEDLFQDAYYQSPETRLRFMRAMHGMTKLTACQVATAFNLSRFSSACDVGGCTGALARELAREYPRMQVTVFDLPDIIELAAHFQPPGPQAVQIHFAAGDFFRDPLPSAELYVLCRILHDWPDDKVHKLLSRVAESCKPGAGLLLVETLLDEEKRVAQRALMQSLNMLVQTEGKERSLGEYQCLLELHGFHQVQVVHLGGVLDAILATKVAP

SEQ ID NO: 1299 - protein, 563 aa, Homo sapiens
  Payload ID: 388;
  Gene Symbol: ASMTL;
  Gene Name: acetylserotonin O-methyltransferase-like;
  Uniprot ID:  O95671;
  ENSP ID: ENSP00000446410
METAKQKALEVANRLYQKDLRAPDVVIGADTIVTVGGLILEKPVDKQDAYRMLSRLSGREHSVFTGVAIVHCSSKDHQLDTRVSEFYEETKVKFSELSEELLWEYVHSGEPMDKAGGYGIQALGGMLVESVHGDFLNVVGFPLNHFCKQLVKLYYPPRPEDLRRSVKHDSIPAADTFEDLSDVEGGGSEPTQRDAGSRDEKAEAGEAGQATAEAECHRTRETLPPFPTRLLELIEGFMLSKGLLTACKLKVFDLLKDEAPQKAADIASKVDASACGMERLLDICAAMGLLEKTEQGYSNTETANVYLASDGEYSLHGFIMHNNDLTWNLFTYLEFAIREGTNQHHRALGKKAEDLFQDAYYQSPETRLRFMRAMHGMTKLTACQVATAFNLSRFSSACDVGGCTGALARELAREYPRMQVTVFDLPDIIELAAHFQPPGPQAVQIHFAAGDFFRDPLPSAELYVLCRILHDWPDDKVHKLLSRVAESCKPGAGLLLVETLLDEEKRVAQRALMQSLNMLVQTEGKERSLGEYQCLLELHGFHQVQVVHLGGVLDAILATKVAP

SEQ ID NO: 1300 - protein, 236 aa, Homo sapiens
  Payload ID: 389;
  Gene Symbol: ASCL1;
  Gene Name: achaete-scute family bHLH transcription factor 1;
  Uniprot ID:  P50553;
  ENSP ID: ENSP00000266744
MESSAKMESGGAGQQPQPQPQQPFLPPAACFFATAAAAAAAAAAAAAQSAQQQQQQQQQQQQAPQLRPAADGQPSGGGHKSAPKQVKRQRSSSPELMRCKRRLNFSGFGYSLPQQQPAAVARRNERERNRVKLVNLGFATLREHVPNGAANKKMSKVETLRSAVEYIRALQQLLDEHDAVSAAFQAGVLSPTISPNYSNDLNSMAGSPVSSYSSDEGSYDPLSPEEQELLDFTNWF

SEQ ID NO: 1301 - protein, 193 aa, Homo sapiens
  Payload ID: 390;
  Gene Symbol: ASCL2;
  Gene Name: achaete-scute family bHLH transcription factor 2;
  Uniprot ID:  Q99929;
  ENSP ID: ENSP00000332293
MDGGTLPRSAPPAPPVPVGCAARRRPASPELLRCSRRRRPATAETGGGAAAVARRNERERNRVKLVNLGFQALRQHVPHGGASKKLSKVETLRSAVEYIRALQRLLAEHDAVRNALAGGLRPQAVRPSAPRGPPGTTPVAASPSRASSSPGRGGSSEPGSPRSAYSSDDSGCEGALSPAERELLDFSSWLGGY

SEQ ID NO: 1302 - protein, 181 aa, Homo sapiens
  Payload ID: 391;
  Gene Symbol: ASCL3;
  Gene Name: achaete-scute family bHLH transcription factor 3;
  Uniprot ID:  Q9NQ33;
  ENSP ID: ENSP00000435770
MMDNRGNSSLPDKLPIFPDSARLPLTRSFYLEPMVTFHVHPEAPVSSPYSEELPRLPFPSDSLILGNYSEPCPFSFPMPYPNYRGCEYSYGPAFTRKRNERERQRVKCVNEGYAQLRHHLPEEYLEKRLSKVETLRAAIKYINYLQSLLYPDKAETKNNPGKVSSMIATTSHHADPMFRIV

SEQ ID NO: 1303 - protein, 173 aa, Homo sapiens
  Payload ID: 392;
  Gene Symbol: ASCL4;
  Gene Name: achaete-scute family bHLH transcription factor 4;
  Uniprot ID:  Q6XD76;
  ENSP ID: ENSP00000345420
MMETRKPAERLALPYSLRTAPLGVPGTLPGLPRRDPLRVALRLDAACWEWARSGCARGWQYLPVPLDSAFEPAFLRKRNERERQRVRCVNEGYARLRDHLPRELADKRLSKVETLRAAIDYIKHLQELLERQAWGLEGAAGAVPQRRAECNSDGESKASSAPSPSSEPEEGGS

SEQ ID NO: 1304 - protein, 206 aa, Homo sapiens
  Payload ID: 393;
  Gene Symbol: ASCL5;
  Gene Name: achaete-scute family bHLH transcription factor 5;
  Uniprot ID:  Q7RTU5;
  ENSP ID: ENSP00000469019
MNNNFCRALVDRRPLGPPSCMQLGVMPPPRQAPLPPAEPLGNVPFLLYPGPAEPPYYDAYAGVFPYVPFPGAFGVYEYPFEPAFIQKRNERERQRVKCVNEGYARLRGHLPGALAEKRLSKVETLRAAIRYIKYLQELLSSAPDGSTPPASRGLPGTGPCPAPPATPRPDRPGDGEARAPSSLVPESSESSCFSPSPFLESEESWH

SEQ ID NO: 1305 - protein, 206 aa, Homo sapiens; identical to SEQ ID NO: 1304
  Payload ID: 393;
  Gene Symbol: ASCL5;
  Gene Name: achaete-scute family bHLH transcription factor 5;
  ENSP ID: ENSP00000472681

SEQ ID NO: 1306 - protein, 546 aa, Homo sapiens [sequence omitted]

SEQ ID NO: 1307 - protein, 513 aa, Homo sapiens
  Payload ID: 394;
  Gene Symbol: AAAS;
  Gene Name: achalasia, adrenocortical insufficiency, alacrimia;
  Uniprot ID:  Q9NRG9;
  ENSP ID: ENSP00000377908
MCSLGLFPPPPPRGQVTLYEHNNELVTGSSYESPPPDFRGQWINLPVLQLTKDPLKTPGRLDHGTRTAFIHHREQVWKRCINIWRDVGLFGVLNEIANSEEEVFEWVKTASGWALALCRWASSLHGSLFPHLSLRSEDLIAEFAQVTNCTIVPSLKHRLQRNVASLAWKPLSASVLAVACQSCILIWTLDPTSLSTRPSSGCAQVLSHPGHTPVTSLAWAPSGGRLLSASPVDAAIRVWDVSTETCVPLPWFRGGGVTNLLWSPDGSKILATTPSAVFRVWEAQMWTCERWPTLSGRCQTGCWSPDGSRLLFTVLGEPLIYSLSFPERCGEGKGCVGGAKSATIVADLSETTIQTPDGEERLGGEAHSMVWDPSGERLAVLMKGKPRVQDGKPVILLFRTRNSPVFELLPCGIIQGEPGAQPQLITFHPSFNKGALLSVGWSTGRIAHIPLYFVNAQFPRFSPVLGRAQEPPAGGGGSIHDLPLFTETSPTSAPWDPLPGPPPVLPHSPHSHL

SEQ ID NO: 1308 - protein, 422 aa, Homo sapiens
  Payload ID: 394;
  Gene Symbol: AAAS;
  Gene Name: achalasia, adrenocortical insufficiency, alacrimia;
  ENSP ID: ENSP00000446885
MKLQTQKKRLRSEDLIAEFAQVTNWSSCCLRVFAWHPHTNKFAVALLDDSVRVYNASSTIVPSLKHRLQRNVASLAWKPLSASVLAVACQSCILIWTLDPTSLSTRPSSGCAQVLSHPGHTPVTSLAWAPSGGRLLSASPVDAAIRVWDVSTETCVPLPWFRGGGVTNLLWSPDGSKILATTPSAVFRVWEAQMWTCERWPTLSGRCQTGCWSPDGSRLLFTVLGEPLIYSLSFPERCGEGKGCVGGAKSATIVADLSETTIQTPDGEERLGGEAHSMVWDPSGERLAVLMKGKPRVQDGKPVILLFRTRNSPVFELLPCGIIQGEPGAQPQLITFHPSFNKGALLSVGWSTGRIAHIPLYFVNAQFPRFSPVLGRAQEPPAGGGGSIHDLPLFTETSPTSAPWDPLPGPPPVLPHSPHSHL

SEQ ID NO: 1309 - protein, 277 aa, Homo sapiens
  Payload ID: 394;
  Gene Symbol: AAAS;
  Gene Name: achalasia, adrenocortical insufficiency, alacrimia;
  ENSP ID: ENSP00000448020
MCSLGLFPPPPPRGQVTLYEHNNELVTGSSYESPPPDFRGQWINLPVLQLTKDPLKTPGRLDHGTRTAFIHHREQVWKRCINIWRDVGLFGVLNEIANSEEEVFEWVKTASGWALALCRWASSLHGSLFPHLSLRSEDLIAEFAQVTNCTIVPSLKHRLQRNVASLAWKPLSASVLAVACQSCILIWTLDPTSLSTRPSSGCAQVLSHPGHTPVTSLAWAPSGGRLLSASPVDAAIRVWDVSTETCVPLPWFRGGGVTNLLWSPDGSKILATTPSAV

SEQ ID NO: 1310 - protein, 358 aa, Homo sapiens
  Payload ID: 394;
  Gene Symbol: AAAS;
  Gene Name: achalasia, adrenocortical insufficiency, alacrimia;
  ENSP ID: ENSP00000457518
PHTNKFAVALLDDSVRVYNASSTIVPSLKHRLQRNVASLAWKPLSASVLAVACQSCILIWTLDPTSLSTRPSSGCAQVLSHPGHTPVTSLAWAPSGGRLLSASPVDAAIRVWDVSTETCVPLPWFRGGGVTNLLWSPDGSKILATTPSAVFRVWEAQMWTCERWPTLSGRCQTGCWSPDGSRLLFTVLGEPLIYSLSFPERCGEGKGCVGGAKSATIVADLSETTIQTPDGEERLGGEAHSMVWDPSGERLAVLMKGKPRVQDGKPVILLFRTRNSPVFELLPWAGPQAELPTSRCTLSMPSFHVLAQCLGGPRNPLLGVEALFMTCPSLLRHPQPLPLGTLSQGHHLFCPTPHIPTS

SEQ ID NO: 1311 - protein, 158 aa, Homo sapiens
  Payload ID: 395;
  Gene Symbol: ACP1;
  Gene Name: acid phosphatase 1, soluble;
  Uniprot ID:  P24666;
  ENSP ID: ENSP00000272065
MAEQATKSVLFVCLGNICRSPIAEAVFRKLVTDQNISENWRVDSAATSGYEIGNPPDYRGQSCMKRHGIPMSHVARQITKEDFATFDYILCMDESNLRDLNRKSNQVKTCKAKIELLGSYDPQKQLIIEDPYYGNDSDFETVYQQCVRCCRAFLEKAH

SEQ ID NO: 1312 - protein, 158 aa, Homo sapiens
  Payload ID: 395;
  Gene Symbol: ACP1;
  Gene Name: acid phosphatase 1, soluble;
  Uniprot ID:  P24666;
  ENSP ID: ENSP00000272067
MAEQATKSVLFVCLGNICRSPIAEAVFRKLVTDQNISENWVIDSGAVSDWNVGRSPDPRAVSCLRNHGIHTAHKARQITKEDFATFDYILCMDESNLRDLNRKSNQVKTCKAKIELLGSYDPQKQLIIEDPYYGNDSDFETVYQQCVRCCRAFLEKAH

SEQ ID NO: 1313 - protein, 46 aa, Homo sapiens
  Payload ID: 395;
  Gene Symbol: ACP1;
  Gene Name: acid phosphatase 1, soluble;
  ENSP ID: ENSP00000384184
MAEQATKSVLFVCLGKIFYCCGNYSLCGKKVTFVDHPLQKQFSGNL

SEQ ID NO: 1314 - protein, 70 aa, Homo sapiens
  Payload ID: 395;
  Gene Symbol: ACP1;
  Gene Name: acid phosphatase 1, soluble;
  ENSP ID: ENSP00000384307
MAEQATKSVLFVCLGNICRSPIAEAVFRKLVTDQNISENWRVDSAATSGGSLTAVLFLTGTWAGPQTQEL

SEQ ID NO: 1315 - protein, 112 aa, Homo sapiens
  Payload ID: 395;
  Gene Symbol: ACP1;
  Gene Name: acid phosphatase 1, soluble;
  Uniprot ID:  P24666;
  ENSP ID: ENSP00000385404
MAEQATKSVLFVCLGNICRSPIAEAVFRKLVTDQNISENWRVDSAATSGYEIGNPPDYRGQSCMKRHGIPMSHVARQVPSLDLKLCVLCFSGSLTAVLFLTGTWAGPQTQEL

SEQ ID NO: 1316 - protein, 46 aa, Homo sapiens; identical to SEQ ID NO: 1313
  Payload ID: 395;
  Gene Symbol: ACP1;
  Gene Name: acid phosphatase 1, soluble;
  ENSP ID: ENSP00000389681

SEQ ID NO: 1317 - protein, 85 aa, Homo sapiens
  Payload ID: 395;
  Gene Symbol: ACP1;
  Gene Name: acid phosphatase 1, soluble;
  ENSP ID: ENSP00000408596
MAEQATKSVLFVCLGNICRSPIAEAVFRKLVTDQNISENWVIDSGAVSDWNVGRSPDPRAVSCLRNHGIHTAHKARQVDKLLFNF

SEQ ID NO: 1318 - protein, 80 aa, Homo sapiens
  Payload ID: 395;
  Gene Symbol: ACP1;
  Gene Name: acid phosphatase 1, soluble;
  ENSP ID: ENSP00000410331
MAEQATKSVLFVCLGNICRSPIAEAVFRKLVTDQNISENWRVDSAATSGYEIGNPPDYRGQSCMKRHGIPMSHVARQRFE

SEQ ID NO: 1319 - protein, 70 aa, Homo sapiens; identical to SEQ ID NO: 1314
  Payload ID: 395;
  Gene Symbol: ACP1;
  Gene Name: acid phosphatase 1, soluble;
  ENSP ID: ENSP00000411121

SEQ ID NO: 1320 - protein, 423 aa, Homo sapiens
  Payload ID: 396;
  Gene Symbol: ACP2;
  Gene Name: acid phosphatase 2, lysosomal;
  Uniprot ID:  P11117;
  ENSP ID: ENSP00000256997
MAGKRSGWSRAALLQLLLGVNLVVMPPTRARSLRFVTLLYRHGDRSPVKTYPKDPYQEEEWPQGFGQLTKEGMLQHWELGQALRQRYHGFLNTSYHRQEVYVRSTDFDRTLMSAEANLAGLFPPNGMQRFNPNISWQPIPVHTVPITEDRLLKFPLGPCPRYEQLQNETRQTPEYQNESSRNAQFLDMVANETGLTDLTLETVWNVYDTLFCEQTHGLRLPPWASPQTMQRLSRLKDFSFRFLFGIYQQAEKARLQGGVLLAQIRKNLTLMATTSQLPKLLVYSAHDTTLVALQMALDVYNGEQAPYASCHIFELYQEDSGNFSVEMYFRNESDKAPWPLSLPGCPHRCPLQDFLRLTEPVVPKDWQQECQLASGPADTEVIVALAVCGSILFLLIVLLLTVLFRMQAQPPGYRHVADGEDHA

SEQ ID NO: 1321 - protein, 391 aa, Homo sapiens
  Payload ID: 396;
  Gene Symbol: ACP2;
  Gene Name: acid phosphatase 2, lysosomal;
  ENSP ID: ENSP00000432205
MAGKRSGWSRAALLQLLLGVNLVVMPPTRARSLRFVTLEGMLQHWELGQALRQRYHGFLNTSYHRQEVYVRSTDFDRTLMSAEANLAGLFPPNGMQRFNPNISWQPIPVHTVPITEDRLLKFPLGPCPRYEQLQNETRQTPEYQNESSRNAQFLDMVANETGLTDLTLETVWNVYDTLFCEQTHGLRLPPWASPQTMQRLSRLKDFSFRFLFGIYQQAEKARLQGGVLLAQIRKNLTLMATTSQLPKLLVYSAHDTTLVALQMALDVYNGEQAPYASCHIFELYQEDSGNFSVEMYFRNESDKAPWPLSLPGCPHRCPLQDFLRLTEPVVPKDWQQECQLASGPADTEVIVALAVCGSILFLLIVLLLTVLFRMQAQPPGYRHVADGEDHA

SEQ ID NO: 1322 - protein, 395 aa, Homo sapiens
  Payload ID: 396;
  Gene Symbol: ACP2;
  Gene Name: acid phosphatase 2, lysosomal;
  ENSP ID: ENSP00000432439
MGVRMTEYVGLYRHGDRSPVKTYPKDPYQEEEWPQGFGQLTKEGMLQHWELGQALRQRYHGFLNTSYHRQEVYVRSTDFDRTLMSAEANLAGLFPPNGMQRFNPNISWQPIPVHTVPITEDRLLKFPLGPCPRYEQLQNETRQTPEYQNESSRNAQFLDMVANETGLTDLTLETVWNVYDTLFCEQTHGLRLPPWASPQTMQRLSRLKDFSFRFLFGIYQQAEKARLQGGVLLAQIRKNLTLMATTSQLPKLLVYSAHDTTLVALQMALDVYNGEQAPYASCHIFELYQEDSGNFSVEMYFRNESDKAPWPLSLPGCPHRCPLQDFLRLTEPVVPKDWQQECQLASGPADTEVIVALAVCGSILFLLIVLLLTVLFRMQAQPPGYRHVADGEDHA

SEQ ID NO: 1323 - protein, 160 aa, Homo sapiens
  Payload ID: 396;
  Gene Symbol: ACP2;
  Gene Name: acid phosphatase 2, lysosomal;
  ENSP ID: ENSP00000432466
MAGKRSGWSRAALLQLLLGVNLVVMPPTRARSLRFVTLLYRHGDRSPVKTYPKDPYQEEEWPQGFGQLTKEGMLQHWELGQALRQRYHGFLNTSYHRQEVYVRSTDFDRTLMSAEANLAGLFPPNGMQRFNPNISWQPIPVHTVPITEDRSRTETLIHFS

SEQ ID NO: 1324 - protein, 162 aa, Homo sapiens
  Payload ID: 396;
  Gene Symbol: ACP2;
  Gene Name: acid phosphatase 2, lysosomal;
  ENSP ID: ENSP00000434205
MAGKRSGWSRAALLQLLLGVNLVVMPPTRARSLRFVTLLYRHGDRSPVKTYPKDPYQEEEWPQGFGQLTKEGMLQHWELGQALRQRYHGFLNTSYHRQEVYVRSTDFDRTLMSAEANLAGLFPPNGMQRFNPNISWQPIPVHTVPITEDRQAQVTRTVEHSA

SEQ ID NO: 1325 - protein, 151 aa, Homo sapiens
  Payload ID: 396;
  Gene Symbol: ACP2;
  Gene Name: acid phosphatase 2, lysosomal;
  ENSP ID: ENSP00000435261
MAGKRSGWSRAALLQLLLGVNLVVMPPTRARSLRFVTLLYRHGDRSPVKTYPKDPYQEEEWPQGFGQLTKEGMLQHWELGQALRQRYHGFLNTSYHRQEVYVRSTDFDRTLMSAEANLAGLFPPNGMQRFNPNISWQPIPVHTVPITEDRD

SEQ ID NO: 1326 - protein, 305 aa, Homo sapiens
  Payload ID: 396;
  Gene Symbol: ACP2;
  Gene Name: acid phosphatase 2, lysosomal;
  ENSP ID: ENSP00000436487
MAGKRSGWSRAALLQLLLGVNLVVMPPTRARSLRFVTLLYRHGDRSPVKTYPKDPYQEEEWPQGFGQLTKEGMLQHWELGQALRQRYHGFLNTSYHRQEVYVRSTDFDRTLMSAEANLAGLFPPNGMQRFNPNISWQPIPVHTVPITEDRQFLDMVANETGLTDLTLETVWNVYDTLFCEQTHGLRLPPWASPQTMQRLSRLKDFSFRFLFGIYQQAEKARLQGGVLLAQIRKNLTLMATTSQLPKLLVYSAHDTTLVALQMALDVYNGEQAPYASCHIFELYQEDSGNFSVEMYFRNESDKAPW

SEQ ID NO: 1327 - protein, 360 aa, Homo sapiens
  Payload ID: 396;
  Gene Symbol: ACP2;
  Gene Name: acid phosphatase 2, lysosomal;
  ENSP ID: ENSP00000436658
MAGKRSGWSRAALLQLLLGVNLVVMPPTRARSLRFVTLLYRHGDRSPVKTYPKDPYQEEEWPQGFGQLTKEGMLQHWELGQALRQRYHGFLNTSYHRQEVYVRSTDFDRTLMSAEANLAGLFPPNGMQRFNPNISWQPIPVHTVPITEDRQTHGLRLPPWASPQTMQRLSRLKDFSFRFLFGIYQQAEKARLQGGVLLAQIRKNLTLMATTSQLPKLLVYSAHDTTLVALQMALDVYNGEQAPYASCHIFELYQEDSGNFSVEMYFRNESDKAPWPLSLPGCPHRCPLQDFLRLTEPVVPKDWQQECQLASGPADTEVIVALAVCGSILFLLIVLLLTVLFRMQAQPPGYRHVADGEDHA

SEQ ID NO: 1328 - protein, 325 aa, Homo sapiens
  Payload ID: 397;
  Gene Symbol: ACP5;
  Gene Name: acid phosphatase 5, tartrate resistant;
  Uniprot ID:  P13686;
  ENSP ID: ENSP00000218758
MDMWTALLILQALLLPSLADGATPALRFVAVGDWGGVPNAPFHTAREMANAKEIARTVQILGADFILSLGDNFYFTGVQDINDKRFQETFEDVFSDRSLRKVPWYVLAGNHDHLGNVSAQIAYSKISKRWNFPSPFYRLHFKIPQTNVSVAIFMLDTVTLCGNSDDFLSQQPERPRDVKLARTQLSWLKKQLAAAREDYVLVAGHYPVWSIAEHGPTHCLVKQLRPLLATYGVTAYLCGHDHNLQYLQDENGVGYVLSGAGNFMDPSKRHQRKVPNGYLRFHYGTEDSLGGFAYVEISSKEMTVTYIEASGKSLFKTRLPRRARP

SEQ ID NO: 1329 - protein, 325 aa, Homo sapiens; identical to SEQ ID NO: 1328
  Payload ID: 397;
  Gene Symbol: ACP5;
  Gene Name: acid phosphatase 5, tartrate resistant;
  Uniprot ID:  P13686;
  ENSP ID: ENSP00000392374

SEQ ID NO: 1330 - protein, 325 aa, Homo sapiens; identical to SEQ ID NO: 1328
  Payload ID: 397;
  Gene Symbol: ACP5;
  Gene Name: acid phosphatase 5, tartrate resistant;
  Uniprot ID:  P13686;
  ENSP ID: ENSP00000413456

SEQ ID NO: 1331 - protein, 52 aa, Homo sapiens
  Payload ID: 397;
  Gene Symbol: ACP5;
  Gene Name: acid phosphatase 5, tartrate resistant;
  ENSP ID: ENSP00000464831
MDMWTALLILQALLLPSLADGATPALRFVAVGDWGGVPNAPFHTAREMANAK

SEQ ID NO: 1332 - protein, 124 aa, Homo sapiens
  Payload ID: 397;
  Gene Symbol: ACP5;
  Gene Name: acid phosphatase 5, tartrate resistant;
  ENSP ID: ENSP00000465127
MDMWTALLILQALLLPSLADGATPALRFVAVGDWGGVPNAPFHTAREMANAKEIARTVQILGADFILSLGDNFYFTGVQDINDKRFQETFEDVFSDRSLRKVPWYVLAGNHDHLGNVSAQIAYS

SEQ ID NO: 1333 - protein, 5 aa, Homo sapiens
  Payload ID: 397;
  Gene Symbol: ACP5;
  Gene Name: acid phosphatase 5, tartrate resistant;
  ENSP ID: ENSP00000465498
MDMWT

SEQ ID NO: 1334 - protein, 59 aa, Homo sapiens
  Payload ID: 397;
  Gene Symbol: ACP5;
  Gene Name: acid phosphatase 5, tartrate resistant;
  ENSP ID: ENSP00000468509
MDMWTALLILQALLLPSLGISWTPQSGTSARSPTAICASTMGLKTHWVALPMWRSAPKR

SEQ ID NO: 1335 - protein, 74 aa, Homo sapiens
  Payload ID: 397;
  Gene Symbol: ACP5;
  Gene Name: acid phosphatase 5, tartrate resistant;
  ENSP ID: ENSP00000468685
MDMWTALLILQALLLPSLADGATPALRFVAVGDWGGVPNAPFHTAREMANAKEIARTVQILGADFILSLGDNFY

SEQ ID NO: 1336 - protein, 325 aa, Homo sapiens; identical to SEQ ID NO: 1328
  Payload ID: 397;
  Gene Symbol: ACP5;
  Gene Name: acid phosphatase 5, tartrate resistant;
  Uniprot ID:  P13686;
  ENSP ID: ENSP00000468767

SEQ ID NO: 1337 - protein, 228 aa, Homo sapiens
  Payload ID: 398;
  Gene Symbol: ACP6;
  Gene Name: acid phosphatase 6, lysophosphatidic;
  ENSP ID: ENSP00000376714
MITGVFSMRLWTPVGVLTSLAYCLHQRRVALAELQEADGQCPVDRSLLKLKMVQVVFRHGARSPLKPLPLEEQGGMFAGQLTKVGMQQMFALGERLRKNYVEDIPFLSPTFNPQEVFIRSTNIFRNLESTRCLLAGLFQCQKEGPIIIHTDEADSEVLYPNYQSCWSLRQRTRGRRQTASLQPGISEDLKKVKDRMGIDSSDKVDFFILLDNVAAEQEKMGSCRFHGS

SEQ ID NO: 1338 - protein, 428 aa, Homo sapiens
  Payload ID: 398;
  Gene Symbol: ACP6;
  Gene Name: acid phosphatase 6, lysophosphatidic;
  ENSP ID: ENSP00000463574
MITGVFSMRLWTPVGVLTSLAYCLHQRRVALAELQEADGQCPVDRSLLKLKMVQVVFRHGARSPLKPLPLEEQVEWNPQLLEVPPQTQFDYTVTNLAGGPKPYSPYDSQYHETTLKGGMFAGQLTKVGMQQMFALGERLRKNYVEDIPFLSPTFNPQEVFIRSTNIFRNLESTRCLLAGLFQCQKEGPIIIHTDEADSEVLYPNYQSCWSLRQRTRGRRQTASLQPGISEDLKKVKDRMGIDSSDKVDFFILLDNVAAEQAHNLPSCPMLKRFARMIEQRAVDTSLYILPKEDRESLQMAVGPFLHILESNLLKAMDSATAPDKIRKLYLYAAHDVTFIPLLMTLGIFDHKWPPFAVDLTMELYQHLESKEWFVQLYYHGKEQVPRGCPDGLCPLDMFLNAMSVYTLSPEKYHALCSQTQVMEVGNEE

SEQ ID NO: 1339 - protein, 157 aa, Homo sapiens
  Payload ID: 398;
  Gene Symbol: ACP6;
  Gene Name: acid phosphatase 6, lysophosphatidic;
  ENSP ID: ENSP00000477476
  MOD_RES (1)..(1): Any amino acid
XRCLLAGLFQCQKEGPIIIHTDEADSEVLYPNYQSCWSLRQRTRGRRQTASLQPGISEDLKKVKDRMGIDSSDKVDFFILLDNVAAEQAHNLPSCPMLKRFARMIEQRAVDTSLYILPKEDRESLQMAVGPFLHILESNLLKAMDSATAPDKIRTCR

SEQ ID NO: 1340 - protein, 143 aa, Homo sapiens
  Payload ID: 398;
  Gene Symbol: ACP6;
  Gene Name: acid phosphatase 6, lysophosphatidic;
  ENSP ID: ENSP00000479906
MVQVVFRHGARSPLKPLPLEEQVEWNPQLLEVPPQTQFDYTVTNLAGGPKPYSPYDSQYHETTLKGGMFAGQLTKVGMQQMFALGERLRKNYVEDIPFLSPTFNPQEVFIRSTNIFRNLESTRCLLAGLFQCQKEGPIIIHTD

SEQ ID NO: 1341 - protein, 77 aa, Homo sapiens
  Payload ID: 398;
  Gene Symbol: ACP6;
  Gene Name: acid phosphatase 6, lysophosphatidic;
  ENSP ID: ENSP00000480100
MITGVFSMRLWTPVGVLTSLAYCLHQRRVALAELQEADGQCPVDRSLLKLKMVQVVFRHGARSPLKPLPLEEQYSFH

SEQ ID NO: 1342 - protein, 271 aa, Homo sapiens
  Payload ID: 398;
  Gene Symbol: ACP6;
  Gene Name: acid phosphatase 6, lysophosphatidic;
  Uniprot ID:  Q9NPH0;
  ENSP ID: ENSP00000481777
MITGVFSMRLWTPVGVLTSLAYCLHQRRVALAELQEADGQCPVDRSLLKLKMVQVVFRHGARSPLKPLPLEEQVEWNPQLLEVPPQTQFDYTVTNLAGGPKPYSPYDSQYHETTLKGGMFAGQLTKVGMQQMFALGERLRKNYVEDIPFLSPTFNPQEVFIRSTNIFRNLESTRCLLAGLFQCQKEGPIIIHTDEADSEVLYPNYQSCWSLRQRTRGRRQTASLQPGISEDLKKVKDRMGIDSSDKVDFFILLDNVAAEQEKMGSCRFHGS

SEQ ID NO: 1343 - protein, 166 aa, Homo sapiens
  Payload ID: 398;
  Gene Symbol: ACP6;
  Gene Name: acid phosphatase 6, lysophosphatidic;
  ENSP ID: ENSP00000482100
  MOD_RES (1)..(1): Any amino acid
XDSQYHETTLKGGMFAGQLTKVGMQQMFALGERLRKNYVEDIPFLSPTFNPQEVFIRSTNIFRNLESTRCLLAGLFQCQKEGPIIIHTDEADSEVLYPNYQSCWSLRQRTRGRRQTASLQPGISEDLKKVKDRMGIDSSDKVDFFILLDNVAAEQEKMGSCRFHGS

SEQ ID NO: 1344 - protein, 418 aa, Homo sapiens
  Payload ID: 399;
  Gene Symbol: ACPP;
  Gene Name: acid phosphatase, prostate;
  Uniprot ID:  P15309;
  ENSP ID: ENSP00000323036
MRAAPLLLARAASLSLGFLFLLFFWLDRSVLAKELKFVTLVFRHGDRSPIDTFPTDPIKESSWPQGFGQLTQLGMEQHYELGEYIRKRYRKFLNESYKHEQVYIRSTDVDRTLMSAMTNLAALFPPEGVSIWNPILLWQPIPVHTVPLSEDQLLYLPFRNCPRFQELESETLKSEEFQKRLHPYKDFIATLGKLSGLHGQDLFGIWSKVYDPLYCESVHNFTLPSWATEDTMTKLRELSELSLLSLYGIHKQKEKSRLQGGVLVNEILNHMKRATQIPSYKKLIMYSAHDTTVSGLQMALDVYNGLLPPYASCHLTELYFEKGEYFVEMYYRNETQHEPYPLMLPGCSPSCPLERFAELVGPVIPQDWSTECMTTNSHQVLKVIFAVAFCLISAVLMVLLFIHIRRGLCWQRESYGNI

SEQ ID NO: 1345 - protein, 386 aa, Homo sapiens
  Payload ID: 399;
  Gene Symbol: ACPP;
  Gene Name: acid phosphatase, prostate;
  Uniprot ID:  P15309;
  ENSP ID: ENSP00000337471
MRAAPLLLARAASLSLGFLFLLFFWLDRSVLAKELKFVTLVFRHGDRSPIDTFPTDPIKESSWPQGFGQLTQLGMEQHYELGEYIRKRYRKFLNESYKHEQVYIRSTDVDRTLMSAMTNLAALFPPEGVSIWNPILLWQPIPVHTVPLSEDQLLYLPFRNCPRFQELESETLKSEEFQKRLHPYKDFIATLGKLSGLHGQDLFGIWSKVYDPLYCESVHNFTLPSWATEDTMTKLRELSELSLLSLYGIHKQKEKSRLQGGVLVNEILNHMKRATQIPSYKKLIMYSAHDTTVSGLQMALDVYNGLLPPYASCHLTELYFEKGEYFVEMYYRNETQHEPYPLMLPGCSPSCPLERFAELVGPVIPQDWSTECMTTNSHQGTEDSTD

SEQ ID NO: 1346 - protein, 353 aa, Homo sapiens
  Payload ID: 399;
  Gene Symbol: ACPP;
  Gene Name: acid phosphatase, prostate;
  Uniprot ID:  P15309;
  ENSP ID: ENSP00000417744
MRAAPLLLARAASLSLGFLFLLFFWLDRSVLAKELKFVTLVFRHGDRSPIDTFPTDPIKESSWPQGFGQLTQLGMEQHYELGEYIRKRYRKFLNESYKHEQVYIRSTDVDRTLMSAMTNLAALFPPEGVSIWNPILLWQPIPVHTVPLSEDQDFIATLGKLSGLHGQDLFGIWSKVYDPLYCESVHNFTLPSWATEDTMTKLRELSELSLLSLYGIHKQKEKSRLQGGVLVNEILNHMKRATQIPSYKKLIMYSAHDTTVSGLQMALDVYNGLLPPYASCHLTELYFEKGEYFVEMYYRNETQHEPYPLMLPGCSPSCPLERFAELVGPVIPQDWSTECMTTNSHQGTEDSTD

SEQ ID NO: 1347 - protein, 165 aa, Homo sapiens
  Payload ID: 399;
  Gene Symbol: ACPP;
  Gene Name: acid phosphatase, prostate;
  ENSP ID: ENSP00000418366
MRAAPLLLARAASLSLGFLFLLFFWLDRSVLAKELKFVTLVFRHGDRSPIDTFPTDPIKESSWPQGFGQLTQVYIRSTDVDRTLMSAMTNLAALFPPEGVSIWNPILLWQPIPVHTVPLSEDQLLYLPFRNCPRFQELESETLKSEEFQKRLHPYKDFIATLGKL

SEQ ID NO: 1348 - protein, 99 aa, Homo sapiens
  Payload ID: 399;
  Gene Symbol: ACPP;
  Gene Name: acid phosphatase, prostate;
  ENSP ID: ENSP00000422036
  MOD_RES (1)..(1): Any amino acid
XELYFEKGEYFVEMYYRNETQHEPYPLMLPGCSPSCPLERFAELVGPVIPQDWSTECMTTNSHQGPAETAHSARRNHDIALPCGRSTCLENTVLYYHYG

SEQ ID NO: 1349 - protein, 426 aa, Homo sapiens
  Payload ID: 400;
  Gene Symbol: ACPT;
  Gene Name: acid phosphatase, testicular;
  Uniprot ID:  Q9BZG2;
  ENSP ID: ENSP00000270593
MAGLGFWGHPAGPLLLLLLLVLPPRALPEGPLVFVALVFRHGDRAPLASYPMDPHKEVASTLWPRGLGQLTTEGVRQQLELGRFLRSRYEAFLSPEYRREEVYIRSTDFDRTLESAQANLAGLFPEAAPGSPEARWRPIPVHTVPVAEDKLLRFPMRSCPRYHELLREATEAAEYQEALEGWTGFLSRLENFTGLSLVGEPLRRAWKVLDTLMCQQAHGLPLPAWASPDVLRTLAQISALDIGAHVGPPRAAEKAQLTGGILLNAILANFSRVQRLGLPLKMVMYSAHDSTLLALQGALGLYDGHTPPYAACLGFEFRKHLGNPAKDGGNVTVSLFYRNDSAHLPLPLSLPGCPAPCPLGRFYQLTAPARPPAHGVSCHGPYEAAIPPAPVVPLLAGAVAVLVALSLGLGLLAWRPGCLRALGGPV

SEQ ID NO: 1350 - protein, 574 aa, Homo sapiens
  Payload ID: 401;
  Gene Symbol: ASIC1;
  Gene Name: acid sensing (proton gated) ion channel 1;
  Uniprot ID:  P78348;
  ENSP ID: ENSP00000228468
MELKAEEEEVGGVQPVSIQAFASSSTLHGLAHIFSYERLSLKRALWALCFLGSLAVLLCVCTERVQYYFHYHHVTKLDEVAASQLTFPAVTLCNLNEFRFSQVSKNDLYHAGELLALLNNRYEIPDTQMADEKQLEILQDKANFRSFKPKPFNMREFYDRAGHDIRDMLLSCHFRGEVCSAEDFKVVFTRYGKCYTFNSGRDGRPRLKTMKGGTGNGLEIMLDIQQDEYLPVWGETDETSFEAGIKVQIHSQDEPPFIDQLGFGVAPGFQTFVACQEQRLIYLPPPWGTCKAVTMDSDLDFFDSYSITACRIDCETRYLVENCNCRMVHMPGDAPYCTPEQYKECADPALDFLVEKDQEYCVCEMPCNLTRYGKELSMVKIPSKASAKYLAKKFNKSEQYIGENILVLDIFFEVLNYETIEQKKAYEIAGLLGELLMTPVPFSCHGHGVAPYHPKAGCSLLSHEGPPPQRPFPKPCCLGDIGGQMGLFIGASILTVLELFDYAYEVIKHKLCRRGKCQKEAKRSSADKGVALSLDDVKRHNPCESLRGHPAGMTYAANILPHHPARGTFEDFTC

SEQ ID NO: 1351 - protein, 528 aa, Homo sapiens
  Payload ID: 401;
  Gene Symbol: ASIC1;
  Gene Name: acid sensing (proton gated) ion channel 1;
  Uniprot ID:  P78348;
  ENSP ID: ENSP00000400228
MELKAEEEEVGGVQPVSIQAFASSSTLHGLAHIFSYERLSLKRALWALCFLGSLAVLLCVCTERVQYYFHYHHVTKLDEVAASQLTFPAVTLCNLNEFRFSQVSKNDLYHAGELLALLNNRYEIPDTQMADEKQLEILQDKANFRSFKPKPFNMREFYDRAGHDIRDMLLSCHFRGEVCSAEDFKVVFTRYGKCYTFNSGRDGRPRLKTMKGGTGNGLEIMLDIQQDEYLPVWGETDETSFEAGIKVQIHSQDEPPFIDQLGFGVAPGFQTFVACQEQRLIYLPPPWGTCKAVTMDSDLDFFDSYSITACRIDCETRYLVENCNCRMVHMPGDAPYCTPEQYKECADPALDFLVEKDQEYCVCEMPCNLTRYGKELSMVKIPSKASAKYLAKKFNKSEQYIGENILVLDIFFEVLNYETIEQKKAYEIAGLLGDIGGQMGLFIGASILTVLELFDYAYEVIKHKLCRRGKCQKEAKRSSADKGVALSLDDVKRHNPCESLRGHPAGMTYAANILPHHPARGTFEDFTC

SEQ ID NO: 1352 - protein, 396 aa, Homo sapiens
  Payload ID: 401;
  Gene Symbol: ASIC1;
  Gene Name: acid sensing (proton gated) ion channel 1;
  ENSP ID: ENSP00000402896
  MOD_RES (1)..(1): Any amino acid
XIRDMLLSCHFRGEVCSAEDFKVKPMQVAKELRRCTLPGTVFQGTQRARKGEKQVFTRYGKCYTFNSGRDGRPRLKTMKGGTGNGLEIMLDIQQDEYLPVWGETDETSFEAGIKVQIHSQDEPPFIDQLGFGVAPGFQTFVACQEQRLIYLPPPWGTCKAVTMDSDLDFFDSYSITACRIDCETRYLVENCNCRMVHMPGDAPYCTPEQYKECADPALDFLVEKDQEYCVCEMPCNLTRYGKELSMVKIPSKASAKYLAKKFNKSEQYIGENILVLDIFFEVLNYETIEQKKAYEIAGLLGDIGGQMGLFIGASILTVLELFDYAYEVIKHKLCRRGKCQKEAKRSSADKGVALSLDDVKRHNPCESLRGHPAGMTYAANILPHHPARGTFEDFTC

SEQ ID NO: 1353 - protein, 127 aa, Homo sapiens
  Payload ID: 401;
  Gene Symbol: ASIC1;
  Gene Name: acid sensing (proton gated) ion channel 1;
  ENSP ID: ENSP00000446863
  MOD_RES (1)..(1): Any amino acid
XENILVLDIFFEVLNYETIEQKKAYEIAGLLGDIGGQMGLFIGASILTVLELFDYAYEVIKHKLCRRGKCQKEAKRSSADKGVALSLDDVKRHNPCESLRGHPAGMTYAANILPHHPARGTFEDFTC

SEQ ID NO: 1354 - protein, 263 aa, Homo sapiens
  Payload ID: 401;
  Gene Symbol: ASIC1;
  Gene Name: acid sensing (proton gated) ion channel 1;
  ENSP ID: ENSP00000448263
MELKAEEEEVGGVQPVSIQAFASSSTLHGLAHIFSYERLSLKRALWALCFLGSLAVLLCVCTERVQYYFHYHHVTKLDEVAASQLTFPAVTLCNLNEFRFSQVSKNDLYHAGELLALLNNRYEIPDTQMADEKQLEILQDKANFRSFKPKPFNMREFYDRAGHDIRDMLLSCHFRGEVCSAEDFKVKPMQVAKELRRCTLPGTVFQGTQRARKGLHTLWKVLHVQLGPRWAAAAEDHEGWDGQWAGNHAGHPAGRVPACVGGD

SEQ ID NO: 1355 - protein, 562 aa, Homo sapiens
  Payload ID: 401;
  Gene Symbol: ASIC1;
  Gene Name: acid sensing (proton gated) ion channel 1;
  Uniprot ID:  P78348;
  ENSP ID: ENSP00000450247
MPIQIFCSMSFSSGEEAPGPLGDIWGPHHHQQQQDISESEEEEEEKEKEAVRKEASEGHSPMDLVAFANSCTLHGTNHIFVEGGPGPRQVLWAVAFVLALGAFLCQVGDRVAYYLSYPHVTLLNEVATTELAFPAVTLCNTNAVRLSQLSYPDLLYLAPMLGLDESDDPGVPLAPPGPEAFSGEPFNLHRFYNRSCHRLEDMLLYCSYQGGPCGPHNFSVVFTRYGKCYTFNSGRDGRPRLKTMKGGTGNGLEIMLDIQQDEYLPVWGETDETSFEAGIKVQIHSQDEPPFIDQLGFGVAPGFQTFVACQEQRLIYLPPPWGTCKAVTMDSDLDFFDSYSITACRIDCETRYLVENCNCRMVHMPGDAPYCTPEQYKECADPALDFLVEKDQEYCVCEMPCNLTRYGKELSMVKIPSKASAKYLAKKFNKSEQYIGENILVLDIFFEVLNYETIEQKKAYEIAGLLGDIGGQMGLFIGASILTVLELFDYAYEVIKHKLCRRGKCQKEAKRSSADKGVALSLDDVKRHNPCESLRGHPAGMTYAANILPHHPARGTFEDFTC

SEQ ID NO: 1356 - protein, 563 aa, Homo sapiens
  Payload ID: 402;
  Gene Symbol: ASIC2;
  Gene Name: acid sensing (proton gated) ion channel 2;
  Uniprot ID:  Q16515;
  ENSP ID: ENSP00000225823
MSRIGGAGLPAAALTGPGRFRMAREEPAPAALAAAGQPGGGRGGERALQGPGVARRGRPSLSRAKLHGLRHMCAGRTAAGGSFQRRALWVLAFCTSFGLLLSWSSNRLLYWLSFPSHTRVHREWSRQLPFPAVTVCNNNPLRFPRLSKGDLYYAGHWLGLLLPNRTARPLVSELLRGDEPRRQWFRKLADFRLFLPPRHFEGISAAFMDRLGHQLEDMLLSCKYRGELCGPHNFSSVFTKYGKCYMFNSGEDGKPLLTTVKGGTGNGLEIMLDIQQDEYLPIWGETEETTFEAGVKVQIHSQSEPPFIQELGFGVAPGFQTFVATQEQRLTYLPPPWGECRSSEMGLDFFPVYSITACRIDCETRYIVENCNCRMVHMPGDAPFCTPEQHKECAEPALGLLAEKDSNYCLCRTPCNLTRYNKELSMVKIPSKTSAKYLEKKFNKSEKYISENILVLDIFFEALNYETIEQKKAYEVAALLGDIGGQMGLFIGASILTILELFDYIYELIKEKLLDLLGKEEDEGSHDENVSTCDTMPNHSETISHTVNVPLQTTLGTLEEIAC

SEQ ID NO: 1357 - protein, 512 aa, Homo sapiens
  Payload ID: 402;
  Gene Symbol: ASIC2;
  Gene Name: acid sensing (proton gated) ion channel 2;
  Uniprot ID:  Q16515;
  ENSP ID: ENSP00000352934
MDLKESPSEGSLQPSSIQIFANTSTLHGIRHIFVYGPLTIRRVLWAVAFVGSLGLLLVESSERVSYYFSYQHVTKVDEVVAQSLVFPAVTLCNLNGFRFSRLTTNDLYHAGELLALLDVNLQIPDPHLADPSVLEALRQKANFKHYKPKQFSMLEFLHRVGHDLKDMMLYCKFKGQECGHQDFTTVFTKYGKCYMFNSGEDGKPLLTTVKGGTGNGLEIMLDIQQDEYLPIWGETEETTFEAGVKVQIHSQSEPPFIQELGFGVAPGFQTFVATQEQRLTYLPPPWGECRSSEMGLDFFPVYSITACRIDCETRYIVENCNCRMVHMPGDAPFCTPEQHKECAEPALGLLAEKDSNYCLCRTPCNLTRYNKELSMVKIPSKTSAKYLEKKFNKSEKYISENILVLDIFFEALNYETIEQKKAYEVAALLGDIGGQMGLFIGASILTILELFDYIYELIKEKLLDLLGKEEDEGSHDENVSTCDTMPNHSETISHTVNVPLQTTLGTLEEIAC

SEQ ID NO: 1358 - protein, 549 aa, Homo sapiens
  Payload ID: 403;
  Gene Symbol: ASIC3;
  Gene Name: acid sensing (proton gated) ion channel 3;
  Uniprot ID:  Q9UHC3;
  ENSP ID: ENSP00000297512
MKPTSGPEEARRPASDIRVFASNCSMHGLGHVFGPGSLSLRRGMWAAAVVLSVATFLYQVAERVRYYREFHHQTALDERESHRLIFPAVTLCNINPLRRSRLTPNDLHWAGSALLGLDPAEHAAFLRALGRPPAPPGFMPSPTFDMAQLYARAGHSLDDMLLDCRFRGQPCGPENFTTIFTRMGKCYTFNSGADGAELLTTTRGGMGNGLDIMLDVQQEEYLPVWRDNEETPFEVGIRVQIHSQEEPPIIDQLGLGVSPGYQTFVSCQQQQLSFLPPPWGDCSSASLNPNYEPEPSDPLGSPSPSPSPPYTLMGCRLACETRYVARKCGCRMVYMPGDVPVCSPQQYKNCAHPAIDAMLRKDSCACPNPCASTRYAKELSMVRIPSRAAARFLARKLNRSEAYIAENVLALDIFFEALNYETVEQKKAYEMSELLGDIGGQMGLFIGASLLTILEILDYLCEVFRDKVLGYFWNRQHSQRHSSTNLLQEGLGSHRTQVPHLSLGPSTLLCSEDLPPLPVPSPRLSPPPTAPATLSHSSRPAVCVLGAPP

SEQ ID NO: 1359 - protein, 531 aa, Homo sapiens
  Payload ID: 403;
  Gene Symbol: ASIC3;
  Gene Name: acid sensing (proton gated) ion channel 3;
  Uniprot ID:  Q9UHC3;
  ENSP ID: ENSP00000344838
MKPTSGPEEARRPASDIRVFASNCSMHGLGHVFGPGSLSLRRGMWAAAVVLSVATFLYQVAERVRYYREFHHQTALDERESHRLIFPAVTLCNINPLRRSRLTPNDLHWAGSALLGLDPAEHAAFLRALGRPPAPPGFMPSPTFDMAQLYARAGHSLDDMLLDCRFRGQPCGPENFTTIFTRMGKCYTFNSGADGAELLTTTRGGMGNGLDIMLDVQQEEYLPVWRDNEETPFEVGIRVQIHSQEEPPIIDQLGLGVSPGYQTFVSCQQQQLSFLPPPWGDCSSASLNPNYEPEPSDPLGSPSPSPSPPYTLMGCRLACETRYVARKCGCRMVYMPGDVPVCSPQQYKNCAHPAIDAMLRKDSCACPNPCASTRYAKELSMVRIPSRAAARFLARKLNRSEAYIAENVLALDIFFEALNYETVEQKKAYEMSELLGDIGGQMGLFIGASLLTILEILDYLCEVFRDKVLGYFWNRQHSQRHSSTNLLQEGLGSHRTQVPHLSLGPRPPTPPCAVTKTLSASHRTCYLVTQL

SEQ ID NO: 1360 - protein, 543 aa, Homo sapiens
  Payload ID: 403;
  Gene Symbol: ASIC3;
  Gene Name: acid sensing (proton gated) ion channel 3;
  Uniprot ID:  Q9UHC3;
  ENSP ID: ENSP00000350600
MKPTSGPEEARRPASDIRVFASNCSMHGLGHVFGPGSLSLRRGMWAAAVVLSVATFLYQVAERVRYYREFHHQTALDERESHRLIFPAVTLCNINPLRRSRLTPNDLHWAGSALLGLDPAEHAAFLRALGRPPAPPGFMPSPTFDMAQLYARAGHSLDDMLLDCRFRGQPCGPENFTTIFTRMGKCYTFNSGADGAELLTTTRGGMGNGLDIMLDVQQEEYLPVWRDNEETPFEVGIRVQIHSQEEPPIIDQLGLGVSPGYQTFVSCQQQQLSFLPPPWGDCSSASLNPNYEPEPSDPLGSPSPSPSPPYTLMGCRLACETRYVARKCGCRMVYMPGDVPVCSPQQYKNCAHPAIDAMLRKDSCACPNPCASTRYAKELSMVRIPSRAAARFLARKLNRSEAYIAENVLALDIFFEALNYETVEQKKAYEMSELLGDIGGQMGLFIGASLLTILEILDYLCEVFRDKVLGYFWNRQHSQRHSSTNLTSHPSLCRHQDSLRLPPHLLPCHTALDLLSVSSEPRPDILDMPSLHVAFPSSPQIKS

SEQ ID NO: 1361 - protein, 407 aa, Homo sapiens
  Payload ID: 403;
  Gene Symbol: ASIC3;
  Gene Name: acid sensing (proton gated) ion channel 3;
  Uniprot ID:  Q9UHC3;
  ENSP ID: ENSP00000367136
MKPTSGPEEARRPASDIRVFASNCSMHGLGHVFGPGSLSLRRGMWAAAVVLSVATFLYQVAERVRYYREFHHQTALDERESHRLIFPAVTLCNINPLRRSRLTPNDLHWAGSALLGLDPAEHAAFLRALGRPPAPPGFMPSPTFDMAQLYARAGHSLDDMLLDCRFRGQPCGPENFTTIFTRMGKCYTFNSGADGAELLTTTRGGMGNGLDIMLDVQQEEYLPVWRDNEETPFEVGIRVQIHSQEEPPIIDQLGLGVSPGYQTFVSCQQQQLSFLPPPWGDCSSASLNPNYEPEPSDPLGSPSPSPSPPYTLMGCRLACETRYVARKCGCRMVYMPGDVPVCSPQQYKNCAHPAIGRTCWPWTSSLRPSTMRPWSRRRPMRCQSCLVTLGARWGCSSGPACSPSSRS

SEQ ID NO: 1362 - protein, 149 aa, Homo sapiens
  Payload ID: 403;
  Gene Symbol: ASIC3;
  Gene Name: acid sensing (proton gated) ion channel 3;
  ENSP ID: ENSP00000418361
CASTRYAKELSMVRIPSRAAARFLARKLNRSEAYIAENVLALDIFFEALNYETVEQKKAYEMSELLGDIGGQMGLFIGASLLTILEILDYLCEVFRDKVLGYFWNRQHSQRHSSTNLLQEGLGSHRTQVPHLSLGPSSRPAVCVLGAPP

SEQ ID NO: 1363 - protein, 407 aa, Homo sapiens; identical to SEQ ID NO: 1361
  Payload ID: 403;
  Gene Symbol: ASIC3;
  Gene Name: acid sensing (proton gated) ion channel 3;
  Uniprot ID:  Q9UHC3;
  ENSP ID: ENSP00000418605

SEQ ID NO: 1364 - protein, 144 aa, Homo sapiens
  Payload ID: 403;
  Gene Symbol: ASIC3;
  Gene Name: acid sensing (proton gated) ion channel 3;
  ENSP ID: ENSP00000420371
  MOD_RES (1)..(1): Any amino acid
XEVRLPNGVHARRRASVQPPAVQELCPPGHRENVLALDIFFEALNYETVEQKKAYEMSELLGDIGGQMGLFIGASLLTILEILDYLCEVFRDKVLGYFWNRQHSQRHSSTNLLQEGLGSHRTQVPHLSLGPSSRPAVCVLGAPP

SEQ ID NO: 1365 - protein, 647 aa, Homo sapiens
  Payload ID: 404;
  Gene Symbol: ASIC4;
  Gene Name: acid sensing (proton gated) ion channel family member 4;
  Uniprot ID:  Q96FT7;
  ENSP ID: ENSP00000326627
MLSGAAGAARRGGAALAPSLTRSLAGTHAGADSCAGADKGSHKETIEERDKRQQRQQRQRQHQGCGAAGSGSDSPTSGPHPVPVLFPLALSLEEQPLPPLPLGRAPGLLAREGQGREALASPSSRGQMPIEIVCKIKFAEEDAKPKEKEAGDEQSLLGAVAPGAAPRDLATFASTSTLHGLGRACGPGPHGLRRTLWALALLTSLAAFLYQAAGLARGYLTRPHLVAMDPAAPAPVAGFPAVTLCNINRFRHSALSDADIFHLANLTGLPPKDRDGHRAAGLRYPEPDMVDILNRTGHQLADMLKSCNFSGHHCSASNFSVVYTRYGKCYTFNADPRSSLPSRAGGMGSGLEIMLDIQQEEYLPIWRETNETSFEAGIRVQIHSQEEPPYIHQLGFGVSPGFQTFVSCQEQRLTYLPQPWGNCRAESELREPELQGYSAYSVSACRLRCEKEAVLQRCHCRMVHMPDSLGGGPEGPCFCPTPCNLTRYGKEISMVRIPNRGSARYLARKYNRNETYIRENFLVLDVFFEALTSEAMEQRAAYGLSALLGDLGGQMGLFIGASILTLLEILDYIYEVSWDRLKRVWRRPKTPLRTSTGGISTLGLQELKEQSPCPSRGRVEGGGVSSLLPNHHHPHGPPGGLFEDFAC

SEQ ID NO: 1366 - protein, 666 aa, Homo sapiens
  Payload ID: 404;
  Gene Symbol: ASIC4;
  Gene Name: acid sensing (proton gated) ion channel family member 4;
  Uniprot ID:  Q96FT7;
  ENSP ID: ENSP00000350786
MLSGAAGAARRGGAALAPSLTRSLAGTHAGADSCAGADKGSHKETIEERDKRQQRQQRQRQHQGCGAAGSGSDSPTSGPHPVPVLFPLALSLEEQPLPPLPLGRAPGLLAREGQGREALASPSSRGQMPIEIVCKIKFAEEDAKPKEKEAGDEQSLLGAVAPGAAPRDLATFASTSTLHGLGRACGPGPHGLRRTLWALALLTSLAAFLYQAAGLARGYLTRPHLVAMDPAAPAPVAGFPAVTLCNINRFRHSALSDADIFHLANLTGLPPKDRDGHRAAGLRYPEPDMVDILNRTGHQLADMLKSCNFSGHHCSASNFSVVYTRYGKCYTFNADPRSSLPSRAGGMGSGLEIMLDIQQEEYLPIWRETNETSFEAGIRVQIHSQEEPPYIHQLGFGVSPGFQTFVSCQEQRLTYLPQPWGNCRAESELREPELQGYSAYSVSACRLRCEKEAVLQRCHCRMVHMPGNETICPPNIYIECADHTLDSLGGGPEGPCFCPTPCNLTRYGKEISMVRIPNRGSARYLARKYNRNETYIRENFLVLDVFFEALTSEAMEQRAAYGLSALLGDLGGQMGLFIGASILTLLEILDYIYEVSWDRLKRVWRRPKTPLRTSTGGISTLGLQELKEQSPCPSRGRVEGGGVSSLLPNHHHPHGPPGGLFEDFAC

SEQ ID NO: 1367 - protein, 505 aa, Homo sapiens
  Payload ID: 405;
  Gene Symbol: ASIC5;
  Gene Name: acid sensing (proton gated) ion channel family member 5;
  Uniprot ID:  Q9NY37;
  ENSP ID: ENSP00000442477
MEQTEKSKVYAENGLLEKIKLCLSKKPLPSPTERKKFDHDFAISTSFHGIHNIVQNRSKIRRVLWLVVVLGSVSLVTWQIYIRLLNYFTWPTTTSIEVQYVEKMEFPAVTFCNLNRFQTDAVAKFGVIFFLWHIVSKVLHLQEITANSTGSREATDFAASHQNFSIVEFIRNKGFYLNNSTLLDCEFFGKPCSPKDFAHVFTEYGNCFTFNHGETLQAKRKVSVSGRGLSLLFNVNQEAFTDNPALGFVDAGIIFVIHSPKKVPQFDGLGLLSPVGMHARVTIRQVKTVHQEYPWGECNPNIKLQNFSSYSTSGCLKECKAQHIKKQCGCVPFLLPGYGIECDLQKYFSCVSPVLDHIEFKDLCTVGTHNSSCPVSCEEIEYPATISYSSFPSQKALKYLSKKLNQSRKYIRENLVKIEINYSDLNYKITQQQKAVSVSELLADLGGQLGLFCGASLITIIEIIEYLFTNFYWICIFFLLKISEMTQWTPPPQNHLGNKNRIEEC

SEQ ID NO: 1368 - protein, 411 aa, Homo sapiens
  Payload ID: 406;
  Gene Symbol: ASIC5;
  Gene Name: Acid sensing ion channel subunit family member 5;
  ENSP ID: ENSP00000461559
MEQTEKSKVYAENGLLEKIKLCLSKKPLPSPTERKKFDHDFAISTSFHGIHNIVQNRSKIRRVLWLVVVLGSVSLVTWQIYIRLLNYFTWPTTTSIEVQYVEKMEFPAVTFCNLNRFQTDAVAKFGVIFFLWHIVSKVLHLQEITANSTGSREATDFAASHQNFSIVEFIRNKGFYLNNSTLLDCEFFGKPCSPKDFAHVFTEYGNCFTFNHGETLQAKRKVSVSGRGLSLLFNVNQEAFTDNPALGFVDAGIIFVIHSPKKVPQFDGLGLLSPVGMHARVTIRQVKTVHQEYPWGECNPNIKLQNFSSYSTSGCLKECKAQHIKKQCGCVPFLLPGYGIECDLQKYFSCVSPVLDHIEFKDLCTVGTHNSSCPVSCEEIEYPATISYSSFPSQKALKYLSKKLNQSRKYI

SEQ ID NO: 1369 - protein, 79 aa, Homo sapiens
  Payload ID: 407;
  Gene Symbol: ANP32A;
  Gene Name: acidic (leu-rich) nuclear phosphoprt 32 family, member A;
  ENSP ID: ENSP00000386496
MEMGRRIHLELRNRTPSDVKELVLDNSRSNEGKLEGLTDEFEELEFLSTINVGLTSIANLPKLNKLKKYWQKSVRTSRI

SEQ ID NO: 1370 - protein, 249 aa, Homo sapiens
  Payload ID: 407;
  Gene Symbol: ANP32A;
  Gene Name: acidic (leu-rich) nuclear phosphoprt 32 family, member A;
  Uniprot ID:  P39687;
  ENSP ID: ENSP00000417864
MEMGRRIHLELRNRTPSDVKELVLDNSRSNEGKLEGLTDEFEELEFLSTINVGLTSIANLPKLNKLKKLELSDNRVSGGLEVLAEKCPNLTHLNLSGNKIKDLSTIEPLKKLENLKSLDLFNCEVTNLNDYRENVFKLLPQLTYLDGYDRDDKEAPDSDAEGYVEGLDDEEEDEDEEEYDEDAQVVEDEEDEDEEEEGEEEDVSGEEEEDEEGYNDGEVDDEEDEEELGEEERGQKRKREPEDEGEDDD

SEQ ID NO: 1371 - protein, 177 aa, Homo sapiens
  Payload ID: 407;
  Gene Symbol: ANP32A;
  Gene Name: acidic (leu-rich) nuclear phosphoprt 32 family, member A;
  ENSP ID: ENSP00000453838
MEMGRRIHLELRNRTPSDVKELVLDNSRSNEGKLEGLTDEFEELEFLSTINVGLTSIANLPKLNKLKKLELSDNRVSGGLEVLAEKCPNLTHLNLSGNKIKDLSTIEPLKKLENLKSLDLFNCEVTNLNDYRENVFKLLPQLTYLDGYDRDDKEAPDSDAEGYVEGLDDEEEDEDGG

SEQ ID NO: 1372 - protein, 251 aa, Homo sapiens
  Payload ID: 408;
  Gene Symbol: ANP32B;
  Gene Name: acidic (leu-rich) nuclear phosphoprt 32 family, member B;
  Uniprot ID:  Q92688;
  ENSP ID: ENSP00000345848
MDMKRRIHLELRNRTPAAVRELVLDNCKSNDGKIEGLTAEFVNLEFLSLINVGLISVSNLPKLPKLKKLELSENRIFGGLDMLAEKLPNLTHLNLSGNKLKDISTLEPLKKLECLKSLDLFNCEVTNLNDYRESVFKLLPQLTYLDGYDREDQEAPDSDAEVDGVDEEEEDEEGEDEEDEDDEDGEEEEFDEEDDEDEDVEGDEDDDEVSEEEEEFGLDEEDEDEDEDEEEEEGGKGEKRKRETDDEGEDD

SEQ ID NO: 1373 - protein, 131 aa, Homo sapiens
  Payload ID: 409;
  Gene Symbol: ANP32D;
  Gene Name: acidic (leu-rich) nuclear phosphoprt 32 family, member D;
  Uniprot ID:  O95626;
  ENSP ID: ENSP00000266594
MEMGKWIHLELRNRTPSDVKELFLDNSQSNEGKLEGLTDEFEELELLNTINIGLTSIANLPKLNKLKKLELSSNRASVGLEVLAEKCPNLIHLNLSGNKIKDLSTIEPLKKLENLESLDLFTCEVTNLNNY

SEQ ID NO: 1374 - protein, 149 aa, Homo sapiens
  Payload ID: 410;
  Gene Symbol: ANP32E;
  Gene Name: acidic (leu-rich) nuclear phosphoprt 32 family, member E;
  ENSP ID: ENSP00000358110
MEMKKKINLELRNRSPEEVTELVLDNCLCVNGEIEGLNDTFKELEFLSMANVELSSLARLPSLNKLRKLELSDNIISGGLEVLAEKCPNLTYLNLSGNKIKDLSTVEALDEEDDDDYVEEGEEEEEEEGGLRGEKRKRDAEDDGEEEDD

SEQ ID NO: 1375 - protein, 136 aa, Homo sapiens
  Payload ID: 410;
  Gene Symbol: ANP32E;
  Gene Name: acidic (leu-rich) nuclear phosphoprt 32 family, member E;
  ENSP ID: ENSP00000358111
MEMKKKINLELRNRSPEEEDNEAPDSEEEDDEDGDEDDEEEEENEAGPPEGYEEEEEEEEEEDEDEDEDEDEAGSELGEGEEEVGLSYLMKEEIQDEEDDDDYVEEGEEEEEEEEGGLRGEKRKRDAEDDGEEEDD

SEQ ID NO: 1376 - protein, 227 aa, Homo sapiens
  Payload ID: 410;
  Gene Symbol: ANP32E;
  Gene Name: acidic (leu-rich) nuclear phosphoprt 32 family, member E;
  Uniprot ID:  Q9BTT0;
  ENSP ID: ENSP00000393718
MEMKKKINLELRNRSPEEVTELVLDNCLCVNGEIEGLNDTFKELEFLSMANVELSSLARLPSLNKLRKQNLKNLKSLDLFNCEITNLEDYRESIFELLQQITYLDGFDQEDNEAPDSEEEDDEDGDEDDEEEEENEAGPPEGYEEEEEEEEEEDEDEDEDEDEAGSELGEGEEEVGLSYLMKEEIQDEEDDDDYVEEGEEEEEEEEGGLRGEKRKRDAEDDGEEEDD

SEQ ID NO: 1377 - protein, 100 aa, Homo sapiens
  Payload ID: 410;
  Gene Symbol: ANP32E;
  Gene Name: acidic (leu-rich) nuclear phosphoprt 32 family, member E;
  ENSP ID: ENSP00000431434
EEEEEEEEDEDEDEDEDEAGSELGEGEEEVGLSYLMKEEIQSEKSYGFFNLQTEYLNFKDEEDDDDYVEEGEEEEEEEEGGLRGEKRKRDAEDDGEEEDD

SEQ ID NO: 1378 - protein, 114 aa, Homo sapiens
  Payload ID: 410;
  Gene Symbol: ANP32E;
  Gene Name: acidic (leu-rich) nuclear phosphoprt 32 family, member E;
  ENSP ID: ENSP00000432684
MEMKKKINLELRNRSPEELELSDNIISGGLEVLAEKCPNLTYLNLSGNKIKDLSTVEALQNLKNLKSLDLFNCEITNLEDYRESIFELLQQITYLDGFDQEDNEAPDSEEEDDE

SEQ ID NO: 1379 - protein, 165 aa, Homo sapiens
  Payload ID: 410;
  Gene Symbol: ANP32E;
  Gene Name: acidic (leu-rich) nuclear phosphoprt 32 family, member E;
  ENSP ID: ENSP00000435215
MEMKKKINLELRNRSPEEVTELVLDNCLCVNGEIEGLNDTFKELEFLSMANVELSSLARLPSLNKLRKLELSDNIISGGLEVLAEKCPNLTYLNLSGNKIKDLSTVEALMAMKMMKRKRKMKLVHRKDMRKRRRKRKRRMRMRMKMKMKQVQSWEREKRKWASHT

SEQ ID NO: 1380 - protein, 105 aa, Homo sapiens
  Payload ID: 410;
  Gene Symbol: ANP32E;
  Gene Name: acidic (leu-rich) nuclear phosphoprt 32 family, member E;
  ENSP ID: ENSP00000436529
MEMKKKINLELRNRSPEEQITYLDGFDQEDNEAPDSEEEDDEDGDEDDEEEEENEAGPPEGYEEEEEEEEEEDEDEDEDEDEAGSELGEGEEEVGLSYLMKEEIQ

SEQ ID NO: 1381 - protein, 268 aa, Homo sapiens
  Payload ID: 410;
  Gene Symbol: ANP32E;
  Gene Name: acidic (leu-rich) nuclear phosphoprt 32 family, member E;
  Uniprot ID:  Q9BTT0;
  ENSP ID: ENSP00000463154
MEMKKKINLELRNRSPEEVTELVLDNCLCVNGEIEGLNDTFKELEFLSMANVELSSLARLPSLNKLRKLELSDNIISGGLEVLAEKCPNLTYLNLSGNKIKDLSTVEALQNLKNLKSLDLFNCEITNLEDYRESIFELLQQITYLDGFDQEDNEAPDSEEEDDEDGDEDDEEEEENEAGPPEGYEEEEEEEEEEDEDEDEDEDEAGSELGEGEEEVGLSYLMKEEIQDEEDDDDYVEEGEEEEEEEEGGLRGEKRKRDAEDDGEEEDD

SEQ ID NO: 1382 - protein, 220 aa, Homo sapiens
  Payload ID: 410;
  Gene Symbol: ANP32E;
  Gene Name: acidic (leu-rich) nuclear phosphoprt 32 family, member E;
  Uniprot ID:  Q9BTT0;
  ENSP ID: ENSP00000481415
MANVELSSLARLPSLNKLRKLELSDNIISGGLEVLAEKCPNLTYLNLSGNKIKDLSTVEALQNLKNLKSLDLFNCEITNLEDYRESIFELLQQITYLDGFDQEDNEAPDSEEEDDEDGDEDDEEEEENEAGPPEGYEEEEEEEEEEDEDEDEDEDEAGSELGEGEEEVGLSYLMKEEIQDEEDDDDYVEEGEEEEEEEEGGLRGEKRKRDAEDDGEEEDD

SEQ ID NO: 1383 - protein, 136 aa, Homo sapiens; identical to SEQ ID NO: 1375
  Payload ID: 410;
  Gene Symbol: ANP32E;
  Gene Name: acidic (leu-rich) nuclear phosphoprt 32 family, member E;
  ENSP ID: ENSP00000487027

SEQ ID NO: 1384 - protein, 691 aa, Homo sapiens
  Payload ID: 411;
  Gene Symbol: ACRC;
  Gene Name: acidic repeat containing;
  Uniprot ID:  Q96QF7;
  ENSP ID: ENSP00000362799
MDGCKKELPRLQEPEEDEDCYILNVQSSSDDTSGSSVARRAPKRQASCILNVQSRSGDTSGSSVARRAPKRQASSVVVIDSDSDEECHTHEEKKAKLLEINSDDESPECCHVKPAIQEPPIVISDDDNDDDNGNDLEVPDDNSDDSEAPDDNSDDSEAPDDNSDDSEAPDDNSDDSEAPDDNSDDSDVPDDNSDDSSDDNSDDSSDDNSDDSDVPDDKSDDSDVPDDSSDDSDVPDDSSDDSEAPDDSSDDSEAPDDSSDDSEAPDDSSDDSEAPDDSSDDSEASDDSSDDSEASDDSSDDSEAPDDKSDDSDVPEDKSDDSDVPDDNSDDLEVPVPAEDLCNEGQIASDEEELVEAAAAVSQHDSSDDAGEQDLGENLSKPPSDPEANPEVSERKLPTEEEPAPVVEQSGKRKSKTKTIVEPPRKRQTKTKNIVEPPRKRQTKTKNIVEPLRKRKAKTKNVSVTPGHKKRGPSKKKPGAAKVEKRKTRTPKCKVPGCFLQDLEKSKKYSGKNLKRNKDELVQRIYDLFNRSVCDKKLPEKLRIGWNNKMVKTAGLCSTGEMWYPKWRRFAKIQIGLKVCDSADRIRDTLIHEMCHAASWLIDGIHDSHGDAWKYYARKSNRIHPELPRVTRCHNYKINYKVHYECTGCKTRIGCYTKSLDTSRFICAKCKGSLVMVPLTQKDGTRIVPHV

SEQ ID NO: 1385 - protein, 691 aa, Homo sapiens; identical to SEQ ID NO: 1384
  Payload ID: 411;
  Gene Symbol: ACRC;
  Gene Name: acidic repeat containing;
  Uniprot ID:  Q96QF7;
  ENSP ID: ENSP00000362800

SEQ ID NO: 1386 - protein, 441 aa, Homo sapiens
  Payload ID: 412;
  Gene Symbol: ARMT1;
  Gene Name: acidic residue methyltransferase 1;
  Uniprot ID:  Q9H993;
  ENSP ID: ENSP00000356263
MAVVPASLSGQDVGSFAYLTIKDRIPQILTKVIDTLHRHKSEFFEKHGEEGVEAEKKAISLLSKLRNELQTDKPFIPLVEKFVDTDIWNQYLEYQQSLLNESDGKSRWFYSPWLLVECYMYRRIHEAIIQSPPIDYFDVFKESKEQNFYGSQESIIALCTHLQQLIRTIEDLDENQLKDEFFKLLQISLWGNKCDLSLSGGESSSQNTNVLNSLEDLKPFILLNDMEHLWSLLSNCKKTREKASATRVYIVLDNSGFELVTDLILADFLLSSELATEVHFYGKTIPWFVSDTTIHDFNWLIEQVKHSNHKWMSKCGADWEEYIKMGKWVYHNHIFWTLPHEYCAMPQVAPDLYAELQKAHLILFKGDLNYRKLTGDRKWEFSVPFHQALNGFHPAPLCTIRTLKAEIQVGLQPGQGEQLLASEPSWWTTGKYGIFQYDGPL

SEQ ID NO: 1387 - protein, 56 aa, Homo sapiens
  Payload ID: 412;
  Gene Symbol: ARMT1;
  Gene Name: acidic residue methyltransferase 1;
  ENSP ID: ENSP00000435882
MAVVPASLSGQDVGKAWKLKRKLSLSFLNYGMNCKQINHLSPWLRNLLILIYGIST

SEQ ID NO: 1388 - protein, 322 aa, Homo sapiens
  Payload ID: 412;
  Gene Symbol: ARMT1;
  Gene Name: acidic residue methyltransferase 1;
  ENSP ID: ENSP00000444121
MYRRIHEAIIQSPPIDYFDVFKESKEQNFYGSQESIIALCTHLQQLIRTIEDLDENQLKDEFFKLLQISLWGNKCDLSLSGGESSSQNTNVLNSLEDLKPFILLNDMEHLWSLLSNCKKTREKASATRVYIVLDNSGFELVTDLILADFLLSSELATEVHFYGKTIPWFVSDTTIHDFNWLIEQVKHSNHKWMSKCGADWEEYIKMGKWVYHNHIFWTLPHEYCAMPQVAPDLYAELQKAHLILFKGDLNYRKLTGDRKWEFSVPFHQALNGFHPAPLCTIRTLKAEIQVGLQPGQGEQLLASEPSWWTTGKYGIFQYDGPL

SEQ ID NO: 1389 - protein, 179 aa, Homo sapiens
  Payload ID: 413;
  Gene Symbol: ADI1;
  Gene Name: acireductone dioxygenase 1;
  Uniprot ID:  Q9BV57;
  ENSP ID: ENSP00000333666
MVQAWYMDDAPGDPRQPHRPDPGRPVGLEQLRRLGVLYWKLDADKYENDPELEKIRRERNYSWMDIITICKDKLPNYEEKIKMFYEEHLHLDDEIRYILDGSGYFDVRDKEDQWIRIFMEKGDMVTLPAGIYHRFTVDEKNYTKAMRLFVGEPVWTAYNRPADHFEARGQYVKFLAQTA

SEQ ID NO: 1390 - protein, 173 aa, Homo sapiens
  Payload ID: 413;
  Gene Symbol: ADI1;
  Gene Name: acireductone dioxygenase 1;
  Uniprot ID:  Q9BV57;
  ENSP ID: ENSP00000371525
MSVKSSKLMFLCHGSSRSLHSGSLTSCNTGVCCSLDADKYENDPELEKIRRERNYSWMDIITICKDKLPNYEEKIKMFYEEHLHLDDEIRYILDGSGYFDVRDKEDQWIRIFMEKGDMVTLPAGIYHRFTVDEKNYTKAMRLFVGEPVWTAYNRPADHFEARGQYVKFLAQTA

SEQ ID NO: 1391 - protein, 117 aa, Homo sapiens
  Payload ID: 413;
  Gene Symbol: ADI1;
  Gene Name: acireductone dioxygenase 1;
  ENSP ID: ENSP00000410178
  MOD_RES (1)..(1): Any amino acid
XRWECCAFSPGPACVVALAVASLPLNCAASADSKRGRWARDSSTCASRRVCGAAGDVRGDSCPSVAASVAPACDPGGQNYTKAMRLFVGEPVWTAYNRPADHFEARGQYVKFLAQTA

SEQ ID NO: 1392 - protein, 99 aa, Homo sapiens
  Payload ID: 413;
  Gene Symbol: ADI1;
  Gene Name: acireductone dioxygenase 1;
  ENSP ID: ENSP00000486013
IKMFYEEHLHLDDEIRYILDGSGYFDVRDKEDQWIRIFMEKGDMVTLPAGIYHRFTVDEKNYTKAMRLFVGEPVWTAYNRPADHFEARGQYVKFLAQTA

SEQ ID NO: 1393 - protein, 889 aa, Homo sapiens
  Payload ID: 414;
  Gene Symbol: ACO1;
  Gene Name: aconitase 1, soluble;
  Uniprot ID:  P21399;
  ENSP ID: ENSP00000309477
MSNPFAHLAEPLDPVQPGKKFFNLNKLEDSRYGRLPFSIRVLLEAAIRNCDEFLVKKQDIENILHWNVTQHKNIEVPFKPARVILQDFTGVPAVVDFAAMRDAVKKLGGDPEKINPVCPADLVIDHSIQVDFNRRADSLQKNQDLEFERNRERFEFLKWGSQAFHNMRIIPPGSGIIHQVNLEYLARVVFDQDGYYYPDSLVGTDSHTTMIDGLGILGWGVGGIEAEAVMLGQPISMVLPQVIGYRLMGKPHPLVTSTDIVLTITKHLRQVGVVGKFVEFFGPGVAQLSIADRATIANMCPEYGATAAFFPVDEVSITYLVQTGRDEEKLKYIKKYLQAVGMFRDFNDPSQDPDFTQVVELDLKTVVPCCSGPKRPQDKVAVSDMKKDFESCLGAKQGFKGFQVAPEHHNDHKTFIYDNTEFTLAHGSVVIAAITSCTNTSNPSVMLGAGLLAKKAVDAGLNVMPYIKTSLSPGSGVVTYYLQESGVMPYLSQLGFDVVGYGCMTCIGNSGPLPEPVVEAITQGDLVAVGVLSGNRNFEGRVHPNTRANYLASPPLVIAYAIAGTIRIDFEKEPLGVNAKGQQVFLKDIWPTRDEIQAVERQYVIPGMFKEVYQKIETVNESWNALATPSDKLFFWNSKSTYIKSPPFFENLTLDLQPPKSIVDAYVLLNLGDSVTTDHISPAGNIARNSPAARYLTNRGLTPREFNSYGSRRGNDAVMARGTFANIRLLNRFLNKQAPQTIHLPSGEILDVFDAAERYQQAGLPLIVLAGKEYGAGSSRDWAAKGPFLLGIKAVLAESYERIHRSNLVGMGVIPLEYLPGENADALGLTGQERYTIIIPENLKPQMKVQVKLDTGKTFQAVMRFDTDVELTYFLNGGILNYMIRKMAK

SEQ ID NO: 1394 - protein, 889 aa, Homo sapiens; identical to SEQ ID NO: 1393
  Payload ID: 414;
  Gene Symbol: ACO1;
  Gene Name: aconitase 1, soluble;
  Uniprot ID:  P21399;
  ENSP ID: ENSP00000369255

SEQ ID NO: 1395 - protein, 889 aa, Homo sapiens; identical to SEQ ID NO: 1393
  Payload ID: 414;
  Gene Symbol: ACO1;
  Gene Name: aconitase 1, soluble;
  Uniprot ID:  P21399;
  ENSP ID: ENSP00000438733

SEQ ID NO: 1396 - protein, 780 aa, Homo sapiens
  Payload ID: 415;
  Gene Symbol: ACO2;
  Gene Name: aconitase 2, mitochondrial;
  Uniprot ID:  Q99798;
  ENSP ID: ENSP00000216254
MAPYSLLVTRLQKALGVRQYHVASVLCQRAKVAMSHFEPNEYIHYDLLEKNINIVRKRLNRPLTLSEKIVYGHLDDPASQEIERGKSYLRLRPDRVAMQDATAQMAMLQFISSGLSKVAVPSTIHCDHLIEAQVGGEKDLRRAKDINQEVYNFLATAGAKYGVGFWKPGSGIIHQIILENYAYPGVLLIGTDSHTPNGGGLGGICIGVGGADAVDVMAGIPWELKCPKVIGVKLTGSLSGWSSPKDVILKVAGILTVKGGTGAIVEYHGPGVDSISCTGMATICNMGAEIGATTSVFPYNHRMKKYLSKTGREDIANLADEFKDHLVPDPGCHYDQLIEINLSELKPHINGPFTPDLAHPVAEVGKVAEKEGWPLDIRVGLIGSCTNSSYEDMGRSAAVAKQALAHGLKCKSQFTITPGSEQIRATIERDGYAQILRDLGGIVLANACGPCIGQWDRKDIKKGEKNTIVTSYNRNFTGRNDANPETHAFVTSPEIVTALAIAGTLKFNPETDYLTGTDGKKFRLEAPDADELPKGEFDPGQDTYQHPPKDSSGQHVDVSPTSQRLQLLEPFDKWDGKDLEDLQILIKVKGKCTTDHISAAGPWLKFRGHLDNISNNLLIGAINIENGKANSVRNAVTQEFGPVPDTARYYKKHGIRWVVIGDENYGEGSSREHAALEPRHLGGRAIITKSFARIHETNLKKQGLLPLTFADPADYNKIHPVDKLTIQGLKDFTPGKPLKCIIKHPNGTQETILLNHTFNETQIEWFRAGSALNRMKELQQ

SEQ ID NO: 1397 - protein, 805 aa, Homo sapiens
  Payload ID: 415;
  Gene Symbol: ACO2;
  Gene Name: aconitase 2, mitochondrial;
  ENSP ID: ENSP00000379769
MAPYSLLVTRLQKALGVRQYHVASVLCQRAKVAMSHFEPNEYIHYDLLEKNINIVRKRLNRPLTLSEKIVYGHLDDPASQEIERGKSYLRLRPDRVAMQDATAQMAMLQFISSGLSKVAVPSTIHCDHLIEAQVGGEKDLRRAKDINQEVYNFLATAGAKYGVGFWKPGSGIIHQIILENYAYPGVLLIGTDSHTPNGGGLGGICIGVGGADAVDVMAGIPWELKCPKVIGVKLTGSLSGWSSPKDVILKVAGILTVKGGTGAIVEYHGPGVDSISCTGEEGGQATWPLPCAGPDGSPVGSRSGMATICNMGAEIGATTSVFPYNHRMKKYLSKTGREDIANLADEFKDHLVPDPGCHYDQLIEINLSELKPHINGPFTPDLAHPVAEVGKVAEKEGWPLDIRVGLIGSCTNSSYEDMGRSAAVAKQALAHGLKCKSQFTITPGSEQIRATIERDGYAQILRDLGGIVLANACGPCIGQWDRKDIKKGEKNTIVTSYNRNFTGRNDANPETHAFVTSPEIVTALAIAGTLKFNPETDYLTGTDGKKFRLEAPDADELPKGEFDPGQDTYQHPPKDSSGQHVDVSPTSQRLQLLEPFDKWDGKDLEDLQILIKVKGKCTTDHISAAGPWLKFRGHLDNISNNLLIGAINIENGKANSVRNAVTQEFGPVPDTARYYKKHGIRWVVIGDENYGEGSSREHAALEPRHLGGRAIITKSFARIHETNLKKQGLLPLTFADPADYNKIHPVDKLTIQGLKDFTPGKPLKCIIKHPNGTQETILLNHTFNETQIEWFRAGSALNRMKELQQ

SEQ ID NO: 1398 - protein, 421 aa, Homo sapiens
  Payload ID: 416;
  Gene Symbol: ACR;
  Gene Name: acrosin;
  Uniprot ID:  P10323;
  ENSP ID: ENSP00000216139
MVEMLPTAILLVLAVSVVAKDNATCDGPCGLRFRQNPQGGVRIVGGKAAQHGAWPWMVSLQIFTYNSHRYHTCGGSLLNSRWVLTAAHCFVGKNNVHDWRLVFGAKEITYGNNKPVKAPLQERYVEKIIIHEKYNSATEGNDIALVEITPPISCGRFIGPGCLPHFKAGLPRGSQSCWVAGWGYIEEKAPRPSSILMEARVDLIDLDLCNSTQWYNGRVQPTNVCAGYPVGKIDTCQGDSGGPLMCKDSKESAYVVVGITSWGVGCARAKRPGIYTATWPYLNWIASKIGSNALRMIQSATPPPPTTRPPPIRPPFSHPISAHLPWYFQPPPRPLPPRPPAAQPRPPPSPPPPPPPPASPLPPPPPPPPPTPSSTTKLPQGLSFAKRLQQLIEVLKGKTYSDGKNHYDMETTELPELTSTS

SEQ ID NO: 1399 - protein, 212 aa, Homo sapiens
  Payload ID: 416;
  Gene Symbol: ACR;
  Gene Name: acrosin;
  ENSP ID: ENSP00000435120
MVEMLPTAILLVLAVSVVAKDNATCDGPCGLRFRQNPQGGVRIVGGKAAQHGAWPWMVSLQIFTYNSHRYHTCGGSLLNSRWVLTAAHCFVGKNNVHDWRLVFGAKEITYGNNKPVKAPLQERYVEKIIIHEKYNSATEGNDIALVEITPPISCGRFIGPGCLPHFKAGLPRGSQSCWVAGWGYIEEKGFLECPAGTSPFKTGVAVALELCP

SEQ ID NO: 1400 - protein, 543 aa, Homo sapiens
  Payload ID: 417;
  Gene Symbol: ACRBP;
  Gene Name: acrosin binding prt;
  Uniprot ID:  Q8NEB7;
  ENSP ID: ENSP00000229243
MRKPAAGFLPSLLKVLLLPLAPAAAQDSTQASTPGSPLSPTEYERFFALLTPTWKAETTCRLRATHGCRNPTLVQLDQYENHGLVPDGAVCSNLPYASWFESFCQFTHYRCSNHVYYAKRVLCSQPVSILSPNTLKEIEASAEVSPTTMTSPISPHFTVTERQTFQPWPERLSNNVEELLQSSLSLGGQEQAPEHKQEQGVEHRQEPTQEHKQEEGQKQEEQEEEQEEEGKQEEGQGTKEGREAVSQLQTDSEPKFHSESLSSNPSSFAPRVREVESTPMIMENIQELIRSAQEIDEMNEIYDENSYWRNQNPGSLLQLPHTEALLVLCYSIVENTCIITPTAKAWKYMEEEILGFGKSVCDSLGRRHMSTCALCDFCSLKLEQCHSEASLQRQQCDTSHKTPFVSPLLASQSLSIGNQVGSPESGRFYGLDLYGGLHMDFWCARLATKGCEDVRVSGWLQTEFLSFQDGDFPTKICDTDYIQYPNYCSFKSQQCLMRNRNRKVSRMRCLQNETYSALSPGKSEDVVLRWSQEFSTLTLGQFG

SEQ ID NO: 1401 - protein, 510 aa, Homo sapiens
  Payload ID: 417;
  Gene Symbol: ACRBP;
  Gene Name: acrosin binding prt;
  ENSP ID: ENSP00000402725
MRKPAAGFLPSLLKVLLLPLAPAAAQDSTQASTPGSPLSPTEYERFFALLTPTWKAETTCRLRATHGCRNPTLVQLDQYENHGLVPDGAVCSNLPYASWFESFCQFTHYRCSNHVYYAKRVLCSQPVSILSPNTLKEIEASAEVSPTTMTSPISPHFTAPEHKQEQGVEHRQEPTQEHKQEEGQKQEEQEEEQEEEGKQEEGQGTKEGREAVSQLQTDSEPKFHSESLSSNPSSFAPRVREVESTPMIMENIQELIRSAQEIDEMNEIYDENSYWRNQNPGSLLQLPHTEALLVLCYSIVENTCIITPTAKAWKYMEEEILGFGKSVCDSLGRRHMSTCALCDFCSLKLEQCHSEASLQRQQCDTSHKTPFVSPLLASQSLSIGNQVGSPESGRFYGLDLYGGLHMDFWCARLATKGCEDVRVSGWLQTEFLSFQDGDFPTKICDTDYIQYPNYCSFKSQQCLMRNRNRKVSRMRCLQNETYSALSPGKSEDVVLRWSQEFSTLTLGQFG

SEQ ID NO: 1402 - protein, 173 aa, Homo sapiens
  Payload ID: 417;
  Gene Symbol: ACRBP;
  Gene Name: acrosin binding prt;
  ENSP ID: ENSP00000438656
MRKPAAGFLPSLLKVLLLPLAPAAAQDSTQASTPGSPLSPTEYERFFALLTPTWKAETTCRLRATHGCRNPTLVQLDQYENHGLVPDGAVCSNLPYASWFESFCQFTHYRCSNHVYYAKRVLCSQPVSILSPNTLKEIEASAEVSPTTMTSPISPHFTERQTFQPWPERLSNN

SEQ ID NO: 1403 - protein, 319 aa, Homo sapiens
  Payload ID: 417;
  Gene Symbol: ACRBP;
  Gene Name: acrosin binding prt;
  ENSP ID: ENSP00000443153
MRKPAAGFLPSLLKVLLLPLAPAAAQDSTQASTPGSPLSPTEYERFFALLTPTWKAETTCRLRATHGCRNPTLVQLDQYENHGLVPDGAVCSNLPYASWFESFCQFTHYRCSNHVYYAKRVLCSQPVSILSPNTLKEIEASAEVSPTTMTSPISPHFTVTERQTFQPWPERLSNNVEELLQSSLSLGGQEQAPEHKQEQGVEHRQEPTQEHKQEEGQKQEEQEEEQEEEGKQEEGQGTKEGREAVSQLQTDSEPKFHSESLSSNPSSFAPRVREVESTPMIMENIQELIRSAQEIDEMNEIYDENSYWRNQNPGRYRKF

SEQ ID NO: 1404 - protein, 100 aa, Homo sapiens
  Payload ID: 417;
  Gene Symbol: ACRBP;
  Gene Name: acrosin binding prt;
  ENSP ID: ENSP00000445262
MRKPAAGFLPSLLKVLLLPLAPAAAQDSTQASTPGSPLSPTEYERFFALLTPTWKAETTCRLRATHGCRNPTLVQLDQYENHGLVPDESPVFPASLYSLT

SEQ ID NO: 1405 - protein, 246 aa, Homo sapiens
  Payload ID: 418;
  Gene Symbol: ACRV1;
  Gene Name: acrosomal vesicle prt 1;
  Uniprot ID:  P26436;
  ENSP ID: ENSP00000317684
MNRFLLLMSLYLLGSARGTSSQPNELSGSIDHQTSVQQLPGEFFSLENPSDAEALYETSSGLNTLSEHGSSEHGSSKHTVAEHTSGEHAESEHASGEPAATEHAEGEHTVGEQPSGEQPSGEHLSGEQPLSELESGEQPSDEQPSGEHGSGEQPSGEQASGEQPSGTILNCYTCAYMNDQGKCLRGEGTCITQNSQQCMLKKIFEGGKLQFMVQGCENMCPSMNLFSHGTRMQIICCRNQSFCNKI

SEQ ID NO: 1406 - protein, 265 aa, Homo sapiens
  Payload ID: 418;
  Gene Symbol: ACRV1;
  Gene Name: acrosomal vesicle prt 1;
  Uniprot ID:  P26436;
  ENSP ID: ENSP00000432816
MNRFLLLMSLYLLGSARGTSSQPNELSGSIDHQTSVQQLPGEFFSLENPSDAEALYETSSGLNTLSEHGSSEHGSSKHTVAEHTSGEHAESEHASGEPAATEHAEGEHTVGEQPSGEQPSGEHLSGEQPLSELESGEQPSDEQPSGEHGSGEQPSGEQASGEQPSGEHASGEQASGAPISSTSTGTILNCYTCAYMNDQGKCLRGEGTCITQNSQQCMLKKIFEGGKLQFMVQGCENMCPSMNLFSHGTRMQIICCRNQSFCNKI

SEQ ID NO: 1407 - protein, 210 aa, Homo sapiens
  Payload ID: 418;
  Gene Symbol: ACRV1;
  Gene Name: acrosomal vesicle prt 1;
  Uniprot ID:  P26436;
  ENSP ID: ENSP00000433720
MNRFLLLMSLYLLGSARGTSSQPNELSGSIDHQTSVQQLPGEPAATEHAEGEHTVGEQPSGEQPSGEHLSGEQPLSELESGEQPSDEQPSGEHGSGEQPSGEQASGEQPSGEHASGEQASGAPISSTSTGTILNCYTCAYMNDQGKCLRGEGTCITQNSQQCMLKKIFEGGKLQFMVQGCENMCPSMNLFSHGTRMQIICCRNQSFCNKI

SEQ ID NO: 1408 - protein, 195 aa, Homo sapiens
  Payload ID: 418;
  Gene Symbol: ACRV1;
  Gene Name: acrosomal vesicle prt 1;
  Uniprot ID:  P26436;
  ENSP ID: ENSP00000436819
MNRFLLLMSLYLLGSARGTSSQPNELSGSIDHQTSVQQLPGEQPSGEQPSGEHLSGEQPLSELESGEQPSDEQPSGEHGSGEQPSGEQASGEQPSGEHASGEQASGAPISSTSTGTILNCYTCAYMNDQGKCLRGEGTCITQNSQQCMLKKIFEGGKLQFMVQGCENMCPSMNLFSHGTRMQIICCRNQSFCNKI

SEQ ID NO: 1409 - protein, 778 aa, Homo sapiens
  Payload ID: 419;
  Gene Symbol: ABLIM1;
  Gene Name: actin binding LIM prt 1;
  Uniprot ID:  O14639;
  ENSP ID: ENSP00000277895
MPAFLGLKCLGKLCSSEKSKVTSSERTSARGSNRKRLIVEDRRVSGTSFTAHRRATITHLLYLCPKDYCPRGRVCNSVDPFVAHPQDPHHPSEKPVIHCHKCGEPCKGEVLRVQTKHFHIKCFTCKVCGCDLAQGGFFIKNGEYLCTLDYQRMYGTRCHGCGEFVEGEVVTALGKTYHPNCFACTICKRPFPPGDRVTFNGRDCLCQLCAQPMSSSPKETTFSSNCAGCGRDIKNGQALLALDKQWHLGCFKCKSCGKVLTGEYISKDGAPYCEKDYQGLFGVKCEACHQFITGKVLEAGDKHYHPSCARCSRCNQMFTEGEEMYLQGSTVWHPDCKQSTKTEEKLRPTRTSSESIYSRPGSSIPGSPGHTIYAKVDNEILDYKDLAAIPKVKAIYDIERPDLITYEPFYTSGYDDKQERQSLGESPRTLSPTPSAEGYQDVRDRMIHRSTSQGSINSPVYSRHSYTPTTSRSPQHFHRPGNEPSSGRNSPLPYRPDSRPLTPTYAQAPKHFHVPDQGINIYRKPPIYKQHAALAAQSKSSEDIIKFSKFPAAQAPDPSETPKIETDHWPGPPSFAVVGPDMKRRSSGREEDDEELLRRRQLQEEQLMKLNSGLGQLILKEEMEKESRERSSLLASRYDSPINSASHIPSSKTASLPGYGRNGLHRPVSTDFAQYNSYGDVSGGVRDYQTLPDGHMPAMRMDRGVSMPNMLEPKIFPYEMLMVTNRGRNKILREVDRTRLERHLAPEVFREIFGMSIQEFDRLPLWRRNDMKKKAKLF

SEQ ID NO: 1410 - protein, 746 aa, Homo sapiens
  Payload ID: 419;
  Gene Symbol: ABLIM1;
  Gene Name: actin binding LIM prt 1;
  ENSP ID: ENSP00000358256
MLMTLEMTELTDPHHTMGDYKVAHPQDPHHPSEKPVIHCHKCGEPCKGEVLRVQTKHFHIKCFTCKVCGCDLAQGGFFIKNGEYLCTLDYQRMYGTRCHGCGEFVEGEVVTALGKTYHPNCFACTICKRPFPPGDRVTFNGRDCLCQLCAQPMSSSPKETTFSSNCAGCGRDIKNGQALLALDKQWHLGCFKCKSCGKVLTGEYISKDGAPYCEKDYQGLFGVKCEACHQFITGKVLEAGDKHYHPSCARCSRCNQMFTEGEEMYLQGSTVWHPDCKQSTKTEEKLRLPNIRRSSSDFFYSKSLIRRTGRSPSLQPTRTSSESIYSRPGSSIPGSPGHTIYAKVDNEILDYKDLAAIPKVKAIYDIERPDLITYEPFYTSGYDDKQERQSLGESPRTLSPTPSAEGYQDVRDRMIHRSTSQGSINSPVYSRHSYTPTTSRSPQHFHRPGNEPSSGRNSPLPYRPDSRPLTPTYAQAPKHFHVPDQGINIYRKPPIYKQHAALAAQSKSSEDIIKFSKFPAAQAPDPSETPKIETDHWPGPPSFAVVGPDMKRRSSGREEDDEELLRRRQLQEEQLMKLNSGLGQLILKEEMEKESRERSSLLASRYDSPINSASHIPSSKTASLPGYGRNGLHRPVSTDFAQYNSYGDVSGGVRDFQTLPDGHMPAMRMDRGVSMPNMLEPKIFPYEMLMVTNRGRNKILREVDRTRLERHLAPEVFREIFGMSIQEFDRLPLWRRNDMKKKAKLF

SEQ ID NO: 1411 - protein, 401 aa, Homo sapiens
  Payload ID: 419;
  Gene Symbol: ABLIM1;
  Gene Name: actin binding LIM prt 1;
  Uniprot ID:  O14639;
  ENSP ID: ENSP00000358257
MFTEGEEMYLQGSTVWHPDCKQSTKTEEKLRAKVDNEILDYKDLAAIPKVKAIYDIERPDLITYEPFYTSGYDDKQERQSLGESPRTLSPTPSAEGYQDVRDRMIHRSTSQGSINSPVYSRHSYTPTTSRSPQHFHRPDQGINIYRKPPIYKQHAALAAQSKSSEDIIKFSKFPAAQAPDPSETPKIETDHWPGPPSFAVVGPDMKRRSSGREEDDEELLRRRQLQEEQLMKLNSGLGQLILKEEMEKESRERSSLLASRYDSPINSASHIPSSKTASLPGYGRNGLHRPVSTDFAQYNSYGDVSGGVRDYQTLPDGHMPAMRMDRGVSMPNMLEPKIFPYEMLMVTNRGRNKILREVDRTRLERHLAPEVFREIFGMSIQEFDRLPLWRRNDMKKKAKLF

SEQ ID NO: 1412 - protein, 748 aa, Homo sapiens
  Payload ID: 419;
  Gene Symbol: ABLIM1;
  Gene Name: actin binding LIM prt 1;
  Uniprot ID:  O14639;
  ENSP ID: ENSP00000358260
MLMTLEMTELTDPHHTMGDYKVAHPQDPHHPSEKPVIHCHKCGEPCKGEVLRVQTKHFHIKCFTCKVCGCDLAQGGFFIKNGEYLCTLDYQRMYGTRCHGCGEFVEGEVVTALGKTYHPNCFACTICKRPFPPGDRVTFNGRDCLCQLCAQPMSSSPKETTFSSNCAGCGRDIKNGQALLALDKQWHLGCFKCKSCGKVLTGEYISKDGAPYCEKDYQGLFGVKCEACHQFITGKVLEAGDKHYHPSCARCSRCNQMFTEGEEMYLQGSTVWHPDCKQSTKTEEKLRLPNIRRSSSDFFYSKSLIRRTGRSPSLQPTRTSSESIYSRPGSSIPGSPGHTIYAKVDNEILDYKDLAAIPKVKAIYDIERPDLITYEPFYTSGYDDKQERQSLGESPRTLSPTPSAEGYQDVRDRMIHRSTSQGSINSPVYSRHSYTPTTSRSPQHFHRPGNEPSSGRNSPLPYRPDSRPLTPTYAQAPKHFHVPDQGINIYRKPPIYKQHDAAALAAQSKSSEDIIKFSKFPAAQAPDPSETPKIETDHWPGPPSFAVVGPDMKRRSSGREEDDEELLRRRQLQEEQLMKLNSGLGQLILKEEMEKESRERSSLLASRYDSPINSASHIPSSKTASLPGYGRNGLHRPVSTDFAQYNSYGDVSGGVRDYQTLPDGHMPAMRMDRGVSMPNMLEPKIFPYEMLMVTNRGRNKILREVDRTRLERHLAPEVFREIFGMSIQEFDRLPLWRRNDMKKKAKLF

SEQ ID NO: 1413 - protein, 401 aa, Homo sapiens [sequence omitted]

SEQ ID NO: 1414 - protein, 455 aa, Homo sapiens
  Payload ID: 419;
  Gene Symbol: ABLIM1;
  Gene Name: actin binding LIM prt 1;
  Uniprot ID:  O14639;
  ENSP ID: ENSP00000376679
MFTEGEEMYLQGSTVWHPDCKQSTKTEEKLRLPNIRRSSSDFFYSKSLIRRTGRSPSLQPTRTSSESIYSRPGSSIPGSPGHTIYAKVDNEILDYKDLAAIPKVKAIYDIERPDLITYEPFYTSGYDDKQERQSLGESPRTLSPTPSAEGYQDVRDRMIHRSTSQGSINSPVYSRHSYTPTTSRSPQHFHRPDQGINIYRKPPIYKQHAALAAQSKSSEDIIKFSKFPAAQAPDPSETPKIETDHWPGPPSFAVVGPDMKRRSSGREEDDEELLRRRQLQEEQLMKLNSGLGQLILKEEMEKESRERSSLLASRYDSPINSASHIPSSKTASLPGYGRNGLHRPVSTDFAQYNSYGDVSGGVRDYQTLPDGHMPAMRMDRGVSMPNMLEPKIFPYEMLMVTNRGRNKILREVDRTRLERHLAPEVFREIFGMSIQEFDRLPLWRRNDMKKKAKLF

SEQ ID NO: 1415 - protein, 718 aa, Homo sapiens
  Payload ID: 419;
  Gene Symbol: ABLIM1;
  Gene Name: actin binding LIM prt 1;
  Uniprot ID:  O14639;
  ENSP ID: ENSP00000376682
MLMTLEMTELTDPHHTMGDYKVAHPQDPHHPSEKPVIHCHKCGEPCKGEVLRVQTKHFHIKCFTCKVCGCDLAQGGFFIKNGEYLCTLDYQRMYGTRCHGCGEFVEGEVVTALGKTYHPNCFACTICKRPFPPGDRVTFNGRDCLCQLCAQPMSSSPKETTFSSNCAGCGRDIKNGQALLALDKQWHLGCFKCKSCGKVLTGEYISKDGAPYCEKDYQGLFGVKCEACHQFITGKVLEAGDKHYHPSCARCSRCNQMFTEGEEMYLQGSTVWHPDCKQSTKTEEKLRPTRTSSESIYSRPGSSIPGSPGHTIYAKVDNEILDYKDLAAIPKVKAIYDIERPDLITYEPFYTSGYDDKQERQSLGESPRTLSPTPSAEGYQDVRDRMIHRSTSQGSINSPVYSRHSYTPTTSRSPQHFHRPGNEPSSGRNSPLPYRPDSRPLTPTYAQAPKHFHVPDQGINIYRKPPIYKQHAALAAQSKSSEDIIKFSKFPAAQAPDPSETPKIETDHWPGPPSFAVVGPDMKRRSSGREEDDEELLRRRQLQEEQLMKLNSGLGQLILKEEMEKESRERSSLLASRYDSPINSASHIPSSKTASLPGYGRNGLHRPVSTDFAQYNSYGDVSGGVRDYQTLPDGHMPAMRMDRGVSMPNMLEPKIFPYEMLMVTNRGRNKILREVDRTRLERHLAPEVFREIFGMSIQEFDRLPLWRRNDMKKKAKLF

SEQ ID NO: 1416 - protein, 173 aa, Homo sapiens
  Payload ID: 419;
  Gene Symbol: ABLIM1;
  Gene Name: actin binding LIM prt 1;
  ENSP ID: ENSP00000400934
MFTEGEEMYLQGSTVWHPDCKQSTKTEEKLRPTRTSSESIYSRPGSSIPGSPGHTIYAKVDNEILDYKDLAAIPKVKAIYDIERPDLITYEPFYTSGYDDKQERQSLGESPRTLSPTPSAEGYQDVRDRMIHRSTSQGSINSPVYSRHSYTPTTSRSPQHFHRPDQGINIYRK

SEQ ID NO: 1417 - protein, 172 aa, Homo sapiens
  Payload ID: 419;
  Gene Symbol: ABLIM1;
  Gene Name: actin binding LIM prt 1;
  ENSP ID: ENSP00000414154
CKQSTKTEEKLRPTRTSSESIYSRPGSSIPGSPGHTIYAKVDNEILDYKDLAAIPKVKAIYDIERPDLITYEPFYTSGYDDKQERQSLGESPRTLSPTPSAEGYQDVRDRMIHRSTSQGSINSPVYSRHSYTPTTSRSPQHFHRPDQGINIYRKPPIYKQHVLFEVILLLLI

SEQ ID NO: 1418 - protein, 718 aa, Homo sapiens
  Payload ID: 419;
  Gene Symbol: ABLIM1;
  Gene Name: actin binding LIM prt 1;
  ENSP ID: ENSP00000433629
MLMTLEMTELTDPHHTMGDYKVAHPQDPHHPSEKPVIHCHKCGEPCKGEVLRVQTKHFHIKCFTCKVCGCDLAQGGFFIKNGEYLCTLDYQRMYGTRCHGCGEFVEGEVVTALGKTYHPNCFACTICKRPFPPGDRVTFNGRDCLCQLCAQPMSSSPKETTFSSNCAGCGRDIKNGQALLALDKQWHLGCFKCKSCGKVLTGEYISKDGAPYCEKDYQGLFGVKCEACHQFITGKVLEAGDKHYHPSCARCSRCNQMFTEGEEMYLQGSTVWHPDCKQSTKTEEKLRPTRTSSESIYSRPGSSIPGSPGHTIYAKVDNEILDYKDLAAIPKVKAIYDIERPDLITYEPFYTSGYDDKQERQSLGESPRTLSPTPSAEGYQDVRDRMIHRSTSQGSINSPVYSRHSYTPTTSRSPQHFHRPGNEPSSGRNSPLPYRPDSRPLTPTYAQAPKHFHVPDQGINIYRKPPIYKQHAALAAQSKSSEDIIKFSKFPAAQAPDPSETPKIETDHWPGPPSFAVVGPDMKRRSSGREEDDEELLRRRQLQEEQLMKLNSGLGQLILKEEMEKESRERSSLLASRYDSPINSASHIPSSKTASLPGYGRNGLHRPVSTDFAQYNSYGDVSGGVRDFQTLPDGHMPAMRMDRGVSMPNMLEPKIFPYEMLMVTNRGRNKILREVDRTRLERHLAPEVFREIFGMSIQEFDRLPLWRRNDMKKKAKLF

SEQ ID NO: 1419 - protein, 644 aa, Homo sapiens
  Payload ID: 420;
  Gene Symbol: ABLIM2;
  Gene Name: actin binding LIM prt family, member 2;
  ENSP ID: ENSP00000317020
MSAVSQPQAAPSPLEKSPSTAILCNTCGNVCKGEVLRVQDKYFHIKCFVCKACGCDLAEGGFFVRQGEYICTLDYQRLYGTRCFSCDQFIEGEVVSALGKTYHPDCFVCAVCRLPFPPGDRVTFNGKECMCQKCSLPVSVGSSAHLSQGLRSCGGCGTEIKNGQALVALDKHWHLGCFKCKSCGKLLNAEYISKDGLPYCEADYHAKFGIRCDSCEKYITGRVLEAGEKHYHPSCALCVRCGQMFAEGEEMYLQGSSIWHPACRQAARTEDRNKETRTSSESIISVPASSTSGSPSRVIYAKLGGEILDYRDLAALPKSKAIYDIDRPDMISYSPYISHSAGDRQSYGEGDQDDRSYKQCRTSSPSSTGSVSLGRYTPTSRSPQHYSRPAGTVSVGTSSCLSLSQHPSPTSVFRHHYIPYFRGSESGRSTPSLSVLSDSKPPPPPTSRHLATHVPDTGVKDNIYRKPPIYRQHAARRSDGEDGSLDQDNRKQKSSWLMLKGDADTRTNSPDLDTQSLSHSSGTDRDPLQRMAGDSFHSRFPYSKSDPLPGHGKNGLDQRNANLAPCGADPDASWGMREYKIYPYDSLIVTNRIRVKLPKDVDRTRLERHLSPEEFQEVFGMSIEEFDRLALWKRNDLKKKALLF

SEQ ID NO: 1420 - protein, 611 aa, Homo sapiens
  Payload ID: 420;
  Gene Symbol: ABLIM2;
  Gene Name: actin binding LIM prt family, member 2;
  Uniprot ID:  Q6H8Q1;
  ENSP ID: ENSP00000342813
MSAVSQPQAAPSPLEKSPSTAILCNTCGNVCKGEVLRVQDKYFHIKCFVCKACGCDLAEGGFFVRQGEYICTLDYQRLYGTRCFSCDQFIEGEVVSALGKTYHPDCFVCAVCRLPFPPGDRVTFNGKECMCQKCSLPVSVGSSAHLSQGLRSCGGCGTEIKNGQALVALDKHWHLGCFKCKSCGKLLNAEYISKDGLPYCEADYHAKFGIRCDSCEKYITGRVLEAGEKHYHPSCALCVRCGQMFAEGEEMYLQGSSIWHPACRQAARTEDRNKETRTSSESIISVPASSTSGSPSRVIYAKLGGEILDYRDLAALPKSKAIYDIDRPDMISYSPYISHSAGDRQSYGEGDQDDRSYKQCRTSSPSSTGSVSLGRYTPTSRSPQHYSRPGSESGRSTPSLSVLSDSKPPPSTYQQAPRHFHVPDTGVKDNIYRKPPIYRQHAARRSDGEDGSLDQDNRKKSSWLMLKGDADTRTNSPDLDTQSLSHSSGTDRDPLQRMAGDSFHSRFPYSKSDPLPGHGKNGLDQRNANLAPCGADPDASWGMREYKIYPYDSLIVTNRIRVKLPKDVDRTRLERHLSPEEFQEVFGMSIEEFDRLALWKRNDLKKKALLF

SEQ ID NO: 1421 - protein, 531 aa, Homo sapiens
  Payload ID: 420;
  Gene Symbol: ABLIM2;
  Gene Name: actin binding LIM prt family, member 2;
  Uniprot ID:  Q6H8Q1;
  ENSP ID: ENSP00000354887
MSAVSQPQAAPSPLEKSPSTAILCNTCGNVCKGEVLRVQDKYFHIKCFVCKACGCDLAEGGFFVRQGEYICTLDYQRLYGTRCFSCDQFIEGEVVSALGKTYHPDCFVCAVCRLPFPPGDRVTFNGKECMCQKCSLPVSVGSSAHLSQGLRSCGGCGTEIKNGQALVALDKHWHLGCFKCKSCGKLLNAEYISKDGLPYCEADYHAKFGIRCDSCEKYITGRVLEAGEKHYHPSCALCVRCGQMFAEGEEMYLQGSSIWHPACRQAARTEDRNKETRTSSESIISVPASSTSGSPSRVIYAKLGGEILDYRDLAALPKSKAIYDIDRPDMISYSPYISHSAGDRQSYGESPQLLSPTPTEGDQDDRSYKQCRTSSPSSTGSVSLGRYTPTSRSPQHYSRPAARRSDGEDGSLDQDNRKKSSWLMLKGDADTRTNSPDLDTQSLSHSSGTDRDPLQRMAGDSFHSQYKIYPYDSLIVTNRIRVKLPKDVDRTRLERHLSPEEFQEVFGMSIEEFDRLALWKRNDLKKKALLF

SEQ ID NO: 1422 - protein, 572 aa, Homo sapiens
  Payload ID: 420;
  Gene Symbol: ABLIM2;
  Gene Name: actin binding LIM prt family, member 2;
  Uniprot ID:  Q6H8Q1;
  ENSP ID: ENSP00000355003
MSAVSQPQAAPSPLEKSPSTAILCNTCGNVCKGEVLRVQDKYFHIKCFVCKACGCDLAEGGFFVRQGEYICTLDYQRLYGTRCFSCDQFIEGEVVSALGKTYHPDCFVCAVCRLPFPPGDRVTFNGKECMCQKCSLPVSVGSSAHLSQGLRSCGGCGTEIKNGQALVALDKHWHLGCFKCKSCGKLLNAEYISKDGLPYCEADYHAKFGIRCDSCEKYITGRVLEAGEKHYHPSCALCVRCGQMFAEGEEMYLQGSSIWHPACRQAARTEDRNKETRTSSESIISVPASSTSGSPSRVIYAKLGGEILDYRDLAALPKSKAIYDIDRPDMISYSPYISHSAGDRQSYGEGDQDDRSYKQCRTSSPSSTGSVSLGRYTPTSRSPQHYSRPGSESGRSTPSLSVLSDSKPPPSTYQQAPRHFHVPDTGVKDNIYRKPPIYRQHAARRSDGEDGSLDQDNRKKSSWLMLKGDADTRTNSPDLDTQSLSHSSGTDRDPLQRMAGDSFHSQYKIYPYDSLIVTNRIRVKLPKDVDRTRLERHLSPEEFQEVFGMSIEEFDRLALWKRNDLKKKALLF

SEQ ID NO: 1423 - protein, 521 aa, Homo sapiens
  Payload ID: 420;
  Gene Symbol: ABLIM2;
  Gene Name: actin binding LIM prt family, member 2;
  Uniprot ID:  Q6H8Q1;
  ENSP ID: ENSP00000384658
MSAVSQPQAAPSPLEKSPSTAILCNTCGNVCKGEVLRVQDKYFHIKCFVCKACGCDLAEGGFFVRQGEYICTLDYQRLYGTRCFSCDQFIEGEVVSALGKTYHPDCFVCAVCRLPFPPGDRVTFNGKECMCQKCSLPVSVGSSAHLSQGLRSCGGCGTEIKNGQALVALDKHWHLGCFKCKSCGKLLNAEYISKDGLPYCEADYHAKFGIRCDSCEKYITGRVLEAGEKHYHPSCALCVRCGQMFAEGEEMYLQGSSIWHPACRQAARTEDRNKETRTSSESIISVPASSTSGSPSRVIYAKLGGEILDYRDLAALPKSKAIYDIDRPDMISYSPYISHSAGDRQSYGEGDQDDRSYKQCRTSSPSSTGSVSLGRYTPTSRSPQHYSRPAARRSDGEDGSLDQDNRKQKSSWLMLKGDADTRTNSPDLDTQSLSHSSGTDRDPLQRMAGDSFHSQYKIYPYDSLIVTNRIRVKLPKDVDRTRLERHLSPEEFQEVFGMSIEEFDRLALWKRNDLKKKALLF

SEQ ID NO: 1424 - protein, 470 aa, Homo sapiens
  Payload ID: 420;
  Gene Symbol: ABLIM2;
  Gene Name: actin binding LIM prt family, member 2;
  Uniprot ID:  Q6H8Q1;
  ENSP ID: ENSP00000389410
MSAVSQPQAAPSPLEKSPSTAILCNTCGNVCKGEVLRVQDKYFHIKCFVCKACGCDLAEGGFFVRQGEYICTLDYQRLYGTRCFSCDQFIEGEVVSALGKTYHPDCFVCAVCRLPFPPGDRVTFNGKECMCQKCSLPVSVGSSAHLSQGLRSCGGCGTEIKNGQALVALDKHWHLGCFKCKSCGKLLNAEYISKDGLPYCEADYHAKFGIRCDSCEKYITGRVLEAGEKHYHPSCALCVRCGQMFAEGEEMYLQGSSIWHPACRQAARTEDRNKETRTSSESIISVPASSTSGSPSRVIYAKLGGEILDYRDLAALPKSKAIYDIDRPDMISYSPYISHSAGDRQSYGESPQLLSPTPTEGDQDDRSYKQCRTSSPSSTGSVSLGRYTPTSRSPQHYSRPAARRSDGEDGSLDQDNRKQKSSWLMLKGDADTRTNSPDLDTQSLSHSSGTDRDPLQRMAGDSFHSREWFF

SEQ ID NO: 1425 - protein, 645 aa, Homo sapiens
  Payload ID: 420;
  Gene Symbol: ABLIM2;
  Gene Name: actin binding LIM prt family, member 2;
  Uniprot ID:  Q6H8Q1;
  ENSP ID: ENSP00000393511
MSAVSQPQAAPSPLEKSPSTAILCNTCGNVCKGEVLRVQDKYFHIKCFVCKACGCDLAEGGFFVRQGEYICTLDYQRLYGTRCFSCDQFIEGEVVSALGKTYHPDCFVCAVCRLPFPPGDRVTFNGKECMCQKCSLPVSVGSSAHLSQGLRSCGGCGTEIKNGQALVALDKHWHLGCFKCKSCGKLLNAEYISKDGLPYCEADYHAKFGIRCDSCEKYITGRVLEAGEKHYHPSCALCVRCGQMFAEGEEMYLQGSSIWHPACRQAARTEDRNKETRTSSESIISVPASSTSGSPSRVIYAKLGGEILDYRDLAALPKSKAIYDIDRPDMISYSPYISHSAGDRQSYGEGDQDDRSYKQCRTSSPSSTGSVSLGRYTPTSRSPQHYSRPAGTVSVGTSSCLSLSQHPSPTSVFRHHYIPYFRGSESGRSTPSLSVLSDSKPPPSTYQQAPRHFHVPDTGVKDNIYRKPPIYRQHAARRSDGEDGSLDQDNRKQKSSWLMLKGDADTRTNSPDLDTQSLSHSSGTDRDPLQRMAGDSFHSRFPYSKSDPLPGHGKNGLDQRNANLAPCGADPDASWGMREYKIYPYDSLIVTNRIRVKLPKDVDRTRLERHLSPEEFQEVFGMSIEEFDRLALWKRNDLKKKALLF

SEQ ID NO: 1426 - protein, 559 aa, Homo sapiens
  Payload ID: 420;
  Gene Symbol: ABLIM2;
  Gene Name: actin binding LIM prt family, member 2;
  Uniprot ID:  Q6H8Q1;
  ENSP ID: ENSP00000421283
MSAVSQPQAAPSPLEKSPSTAILCNTCGNVCKGEVLRVQDKYFHIKCFVCKACGCDLAEGGFFVRQGEYICTLDYQRLYGTRCFSCDQFIEGEVVSALGKTYHPDCFVCAVCRLPFPPGDRVTFNGKECMCQKCSLPVSVGSSAHLSQGLRSCGGCGTEIKNGQALVALDKHWHLGCFKCKSCGKLLNAEYISKDGLPYCEADYHAKFGIRCDSCEKYITGRVLEAGEKHYHPSCALCVRCGQMFAEGEEMYLQGSSIWHPACRQAARTEDRNKETRTSSESIISVPASSTSGSPSRVIYAKLGGEILDYRDLAALPKSKAIYDIDRPDMISYSPYISHSAGDRQSYGEGDQDDRSYKQCRTSSPSSTGSVSLGRYTPTSRSPQHYSRPAARRSDGEDGSLDQDNRKKSSWLMLKGDADTRTNSPDLDTQSLSHSSGTDRDPLQRMAGDSFHSRFPYSKSDPLPGHGKNGLDQRNANLAPCGADPDASWGMREYKIYPYDSLIVTNRIRVKLPKDVDRTRLERHLSPEEFQEVFGMSIEEFDRLALWKRNDLKKKALLF

SEQ ID NO: 1427 - protein, 305 aa, Homo sapiens
  Payload ID: 420;
  Gene Symbol: ABLIM2;
  Gene Name: actin binding LIM prt family, member 2;
  ENSP ID: ENSP00000421718
MFAEGEEMYLQGSSIWHPACRQAARTEDRNKETRTSSESIISVPASSTSGSPSRVIYAKLGGEILDYRDLAALPKSKAIYDIDRPDMISYSPYISHSAGDRQSYGESPQLLSPTPTEGDQDDRSYKQCRTSSPSSTGSVSLGRYTPTSRSPQHYSRPAGTVSVGTSSCLSLSQHPSPTSVFRHHYIPYFRGSESGRSTPSLSVLSDSKPPPSTYQQAPRHFHVPDTGVKDNIYRKPPIYRQHAARRSDGEDGSLDQDNRKKSSWLMLKGDADTRTNSPDLDTQSLSHSSGTDRDPLQRMAGDSFH

SEQ ID NO: 1428 - protein, 346 aa, Homo sapiens
  Payload ID: 420;
  Gene Symbol: ABLIM2;
  Gene Name: actin binding LIM prt family, member 2;
  Uniprot ID:  Q6H8Q1;
  ENSP ID: ENSP00000423661
MFAEGEEMYLQGSSIWHPACRQAARTEDRNKETRTSSESIISVPASSTSGSPSRVIYAKLGGEILDYRDLAALPKSKAIYDIDRPDMISYSPYISHSAGDRQSYGESPQLLSPTPTEGDQDDRSYKQCRTSSPSSTGSVSLGRYTPTSRSPQHYSRPDTGVKDNIYRKPPIYRQHAARRSDGEDGSLDQDNRKQKSSWLMLKGDADTRTNSPDLDTQSLSHSSGTDRDPLQRMAGDSFHSRFPYSKSDPLPGHGKNGLDQRNANLAPCGADPDASWGMREYKIYPYDSLIVTNRIRVKLPKDVDRTRLERHLSPEEFQEVFGMSIEEFDRLALWKRNDLKKKALLF

SEQ ID NO: 1429 - protein, 646 aa, Homo sapiens [sequence omitted]

SEQ ID NO: 1430 - protein, 683 aa, Homo sapiens
  Payload ID: 421;
  Gene Symbol: ABLIM3;
  Gene Name: actin binding LIM prt family, member 3;
  Uniprot ID:  O94929;
  ENSP ID: ENSP00000310309
MNTSIPYQQNPYNPRGSSNVIQCYRCGDTCKGEVVRVHNNHFHIRCFTCQVCGCGLAQSGFFFKNQEYICTQDYQQLYGTRCDSCRDFITGEVISALGRTYHPKCFVCSLCRKPFPIGDKVTFSGKECVCQTCSQSMASSKPIKIRGPSHCAGCKEEIKHGQSLLALDKQWHVSCFKCQTCSVILTGEYISKDGVPYCESDYHAQFGIKCETCDRYISGRVLEAGGKHYHPTCARCVRCHQMFTEGEEMYLTGSEVWHPICKQAARAEKKLKHRRTSETSISPPGSSIGSPNRVICAKVDNEILNYKDLAALPKVKSIYEVQRPDLISYEPHSRYMSDEMLERCGYGESLGTLSPYSQDIYENLDLRQRRASSPGYIDSPTYSRQGMSPTFSRSPHHYYRSGPESGRSSPYHSQLDVRSSTPTSYQAPKHFHIPAGDSNIYRKPPIYKRHGDLSTATKSKTSEDISQTSKYSPIYSPDPYYASESEYWTYHGSPKVPRARRFSSGGEEDDFDRSMHKLQSGIGRLILKEEMKARSSSYADPWTPPRSSTSSREALHTAGYEMSLNGSPRSHYLADSDPLISKSASLPAYRRNGLHRTPSADLFHYDSMNAVNWGMREYKIYPYELLLVTTRGRNRLPKDVDRTRLERHLSQEEFYQVFGMTISEFDRLALWKRNELKKQARLF

SEQ ID NO: 1431 - protein, 588 aa, Homo sapiens
  Payload ID: 421;
  Gene Symbol: ABLIM3;
  Gene Name: actin binding LIM prt family, member 3;
  Uniprot ID:  O94929;
  ENSP ID: ENSP00000315841
MNTSIPYQQNPYNPRGSSNVIQCYRCGDTCKGEVVRVHNNHFHIRCFTCQVCGCGLAQSGFFFKNQEYICTQDYQQLYGTRCDSCRDFITGEVISALGRTYHPKCFVCSLCRKPFPIGDKVTFSGKECVCQTCSQSMASSKPIKIRGPSHCAGCKEEIKHGQSLLALDKQWHVSCFKCQTCSVILTGEYISKDGVPYCESDYHAQFGIKCETCDRYISGRVLEAGGKHYHPTCARCVRCHQMFTEGEEMYLTGSEVWHPICKQAARAEKKLKHRRTSETSISPPGSSIGSPNRVICDIYENLDLRQRRASSPGYIDSPTYSRQGMSPTFSRSPHHYYRSAGDSNIYRKPPIYKRHGDLSTATKSKTSEDISQTSKYSPIYSPDPYYASESEYWTYHGSPKVPRARRFSSGGEEDDFDRSMHKLQSGIGRLILKEEMKARSSSYADPWTPPRSSTSSREALHTAGYEMSLNGSPRSHYLADSDPLISKSASLPAYRRNGLHRTPSADLFHYDSMNAVNWGMREYKIYPYELLLVTTRGRNRLPKDVDRTRLERHLSQEEFYQVFGMTISEFDRLALWKRNELKKQARLF

SEQ ID NO: 1432 - protein, 170 aa, Homo sapiens [sequence omitted]

SEQ ID NO: 1433 - protein, 650 aa, Homo sapiens
  Payload ID: 421;
  Gene Symbol: ABLIM3;
  Gene Name: actin binding LIM prt family, member 3;
  ENSP ID: ENSP00000420855
MNTSIPYQQNPYNPRGSSNVIQCYRCGDTCKGEVVRVHNNHFHIRCFTCQVCGCGLAQSGFFFKNQEYICTQDYQQLYGTRCDSCRDFITGEVISALGRTYHPKCFVCSLCRKPFPIGDKVTFSGKECVCQTCSQSMASSKPIKIRGPSHCAGCKEEIKHGQSLLALDKQWHVSCFKCQTCSVILTGEYISKDGVPYCESDYHAQFGIKCETCDRYISGRVLEAGGKHYHPTCARCVRCHQMFTEGEEMYLTGSEVWHPICKQAARAEKKLKHRRTSETSISPPGSSIGSPNRVICAKVDNEILNYKDLAALPKVKSIYEVQRPDLISYEPHSRYMSDEMLERCGYGESLGTLSPYSQDIYENLDLRQRRASSPGYIDSPTYSRQGMSPTFSRSPHHYYRSAGDSNIYRKPPIYKRHGDLSTATKSKTSEDISQTSKYSPIYSPDPYYASESEYWTYHGSPKVPRARRFSSGGEEDDFDRSMHKLQSGIGRLILKEEMKARSSSYADPWTPPRSSTSSREALHTAGYEMSLNGSPRSHYLADSDPLISKSASLPAYRRNGLHRTPSADLFHYDSMNAVNWGMREYKIYPYELLLVTTRGRNRLPKDVDRTRLERHLSQEEFYQVFGMTISEFDRLALWKRNELKKQARLF

SEQ ID NO: 1434 - protein, 151 aa, Homo sapiens
  Payload ID: 421;
  Gene Symbol: ABLIM3;
  Gene Name: actin binding LIM prt family, member 3;
  ENSP ID: ENSP00000421002
MNTSIPYQQNPYNPRGSSNVIQCYRCGDTCKGEVVRVHNNHFHIRCFTCQVCGCGLAQSGFFFKNQEYICTQDYQQLYGTRCDSCRDFITGEVISALGRTYHPKCFVCSLCRTSPGMESSSLPPALPSASPSLVNSASEAFPHWRQGDLQR

SEQ ID NO: 1435 - protein, 544 aa, Homo sapiens
  Payload ID: 421;
  Gene Symbol: ABLIM3;
  Gene Name: actin binding LIM prt family, member 3;
  Uniprot ID:  O94929;
  ENSP ID: ENSP00000421183
MNTSIPYQQNPYNPRGSSNVIQCYRCGDTCKGEVVRVHNNHFHIRCFTCQVCGCGLAQSGFFFKNQEYICTQDYQQLYGTRCDSCRDFITGEVISALGRTYHPKCFVCSLCRKPFPIGDKVTFSGKECVCQTCSQSMASSKPIKIRGPSHCAGCKEEIKHGQSLLALDKQWHVSCFKCQTCSVILTGEYISKDGVPYCESDYHAQFGIKCETCDRYISGRVLEAGGKHYHPTCARCVRCHQMFTEGEEMYLTGSEVWHPICKQAARAEKKLKHRRTSETSISPPGSSIGSPNRVICDIYENLDLRQRRASSPGYIDSPTYSRQGMSPTFSRSPHHYYRSGDLSTATKSKTSEDISQTSKYSPIYSPDPYYASESEYWTYHGSPKVPRARRFSSGGEEDDFDRSMHKLQSGIGRLILKEEMKARSSSYADPWTPPRSSTSSREALHTAGYEMSLNGSPRSHYLADSDPLISKSASLPAYRRNGLHRTPSADLFHYDSMNAVNWGMREYKIYPYELLLVTTRGRNRLPKDVDRTRLEGNFWKSGCL

SEQ ID NO: 1436 - protein, 683 aa, Homo sapiens; identical to SEQ ID NO: 1430
  Payload ID: 421;
  Gene Symbol: ABLIM3;
  Gene Name: actin binding LIM prt family, member 3;
  Uniprot ID:  O94929;
  ENSP ID: ENSP00000425394

SEQ ID NO: 1437 - protein, 169 aa, Homo sapiens
  Payload ID: 421;
  Gene Symbol: ABLIM3;
  Gene Name: actin binding LIM prt family, member 3;
  Uniprot ID:  O94929;
  ENSP ID: ENSP00000430150
MHKLQSGIGRLILKEEMKARSSSYADPWTPPRSSTSSREALHTAGYEMSLNGSPRSHYLADSDPLISKSASLPAYRRNGLHRTPSADLFHYDSMNAVNWGMREYKIYPYELLLVTTRGRNRLPKDVDRTRLERHLSQEEFYQVFGMTISEFDRLALWKRNELKKQARLF

SEQ ID NO: 1438 - protein, 381 aa, Homo sapiens
  Payload ID: 422;
  Gene Symbol: ABRA;
  Gene Name: actin binding Rho activating prt;
  Uniprot ID:  Q8N0Z2;
  ENSP ID: ENSP00000311436
MAPGEKESGEGPAKSALRKIRTATLVISLARGWQQWANENSIRQAQEPTGWLPGGTQDSPQAPKPITPPTSHQKAQSAPKSPPRLPEGHGDGQSSEKAPEVSHIKKKEVSKTVVSKTYERGGDVSHLSHRYERDAGVLEPGQPENDIDRILHSHGSPTRRRKCANLVSELTKGWRVMEQEEPTWRSDSVDTEDSGYGGEAEERPEQDGVQVAVVRIKRPLPSQVNRFTEKLNCKAQQKYSPVGNLKGRWQQWADEHIQSQKLNPFSEEFDYELAMSTRLHKGDEGYGRPKEGTKTAERAKRAEEHIYREMMDMCFIICTMARHRRDGKIQVTFGDLFDRYVRISDKVVGILMRARKHGLVDFEGEMLWQGRDDHVVITLLK

SEQ ID NO: 1439 - protein, 730 aa, Homo sapiens
  Payload ID: 423;
  Gene Symbol: AFAP1;
  Gene Name: actin filament associated prt 1;
  Uniprot ID:  Q8N556;
  ENSP ID: ENSP00000351245
MEELIVELRLFLELLDHEYLTSTVREKKAVITNILLRIQSSKGFDVKDHAQKQETANSLPAPPQMPLPEIPQPWLPPDSGPPPLPTSSLPEGYYEEAVPLSPGKAPEYITSNYDSDAMSSSYESYDEEEEDGKGKKTRHQWPSEEASMDLVKDAKICAFLLRKKRFGQWTKLLCVIKDTKLLCYKSSKDQQPQMELPLQGCNITYIPKDSKKKKHELKITQQGTDPLVLAVQSKEQAEQWLKVIKEAYSGCSGPVDSECPPPPSSPVHKAELEKKLSSERPSSDGEGVVENGITTCNGKEQVKRKKSSKSEAKGTVSKVTGKKITKIISLGKKKPSTDEQTSSAEEDVPTCGYLNVLSNSRWRERWCRVKDNKLIFHKDRTDLKTHIVSIPLRGCEVIPGLDSKHPLTFRLLRNGQEVAVLEASSSEDMGRWIGILLAETGSSTDPEALHYDYIDVEMSASVIQTAKQTFCFMNRRVISANPYLGGTSNGYAHPSGTALHYDDVPCINGSLKGKKPPVASNGVTGKGKTLSSQPKKADPAAVVKRTGSNAAQYKYGKNRVEADAKRLQTKEEELLKRKEALRNRLAQLRKERKDLRAAIEVNAGRKPQAILEEKLKQLEEECRQKEAERVSLELELTEVKESLKKALAGGVTLGLAIEPKSGTSSPQSPVFRHRTLENSPISSCDTSDTEGPVPVNSAAVLKKSQAAPGSSPCRGHVLRKAKEWELKNGT

SEQ ID NO: 1440 - protein, 730 aa, Homo sapiens; identical to SEQ ID NO: 1439
  Payload ID: 423;
  Gene Symbol: AFAP1;
  Gene Name: actin filament associated prt 1;
  Uniprot ID:  Q8N556;
  ENSP ID: ENSP00000353402

SEQ ID NO: 1441 - protein, 814 aa, Homo sapiens
  Payload ID: 423;
  Gene Symbol: AFAP1;
  Gene Name: actin filament associated prt 1;
  Uniprot ID:  Q8N556;
  ENSP ID: ENSP00000371983
MEELIVELRLFLELLDHEYLTSTVREKKAVITNILLRIQSSKGFDVKDHAQKQETANSLPAPPQMPLPEIPQPWLPPDSGPPPLPTSSLPEGYYEEAVPLSPGKAPEYITSNYDSDAMSSSYESYDEEEEDGKGKKTRHQWPSEEASMDLVKDAKICAFLLRKKRFGQWTKLLCVIKDTKLLCYKSSKDQQPQMELPLQGCNITYIPKDSKKKKHELKITQQGTDPLVLAVQSKEQAEQWLKVIKEAYSGCSGPVDSECPPPPSSPVHKAELEKKLSSERPSSDGEGVVENGITTCNGKEQVKRKKSSKSEAKGTVSKVTGKKITKIISLGKKKPSTDEQTSSAEEDVPTCGYLNVLSNSRWRERWCRVKDNKLIFHKDRTDLKTHIVSIPLRGCEVIPGLDSKHPLTFRLLRNGQEVAVLEASSSEDMGRWIGILLAETGSSTDPEALHYDYIDVEMSASVIQTAKQTFCFMNRRVISANPYLGGTSNGYAHPSGTALHYDDVPCINGSWEPEDGFPASCSRGLGEEVLYDNAGLYDNLPPPHIFARYSPADRKASRLSADKLSSNHYKYPASAQSVTNTSSVGRASLGLNSQLKGKKPPVASNGVTGKGKTLSSQPKKADPAAVVKRTGSNAAQYKYGKNRVEADAKRLQTKEEELLKRKEALRNRLAQLRKERKDLRAAIEVNAGRKPQAILEEKLKQLEEECRQKEAERVSLELELTEVKESLKKALAGGVTLGLAIEPKSGTSSPQSPVFRHRTLENSPISSCDTSDTEGPVPVNSAAVLKKSQAAPGSSPCRGHVLRKAKEWELKNGT

SEQ ID NO: 1442 - protein, 814 aa, Homo sapiens; identical to SEQ ID NO: 1441
  Payload ID: 423;
  Gene Symbol: AFAP1;
  Gene Name: actin filament associated prt 1;
  Uniprot ID:  Q8N556;
  ENSP ID: ENSP00000410689

SEQ ID NO: 1443 - protein, 92 aa, Homo sapiens
  Payload ID: 423;
  Gene Symbol: AFAP1;
  Gene Name: actin filament associated prt 1;
  ENSP ID: ENSP00000483962
GITTCNGKEQVKRKKSSKSEAKGTVSKVTGKKITKIISLGKKKPSTDEQTSSAEEDVPTCGKTALPGDEQRAPKWVSFSPAVVSVPSSSKAR

SEQ ID NO: 1444 - protein, 768 aa, Homo sapiens
  Payload ID: 424;
  Gene Symbol: AFAP1L1;
  Gene Name: actin filament associated prt 1-like 1;
  Uniprot ID:  Q8TED9;
  ENSP ID: ENSP00000296721
MDRGQVLEQLLPELTGLLSLLDHEYLSDTTLEKKMAVASILQSLQPLPAKEVSYLYVNTADLHSGPSFVESLFEEFDCDLSDLRDMPEDDGEPSKGASPELAKSPRLRNAADLPPPLPNKPPPEDYYEEALPLGPGKSPEYISSHNGCSPSHSIVDGYYEDADSSYPATRVNGELKSSYNDSDAMSSSYESYDEEEEEGKSPQPRHQWPSEEASMHLVRECRICAFLLRKKRFGQWAKQLTVIREDQLLCYKSSKDRQPHLRLALDTCSIIYVPKDSRHKRHELRFTQGATEVLVLALQSREQAEEWLKVIREVSKPVGGAEGVEVPRSPVLLCKLDLDKRLSQEKQTSDSDSVGVGDNCSTLGRRETCDHGKGKKSSLAELKGSMSRAAGRKITRIIGFSKKKTLADDLQTSSTEEEVPCCGYLNVLVNQGWKERWCRLKCNTLYFHKDHMDLRTHVNAIALQGCEVAPGFGPRHPFAFRILRNRQEVAILEASCSEDMGRWLGLLLVEMGSRVTPEALHYDYVDVETLTSIVSAGRNSFLYARSCQNQWPEPRVYDDVPYEKMQDEEPERPTGAQVKRHASSCSEKSHRVDPQVKVKRHASSANQYKYGKNRAEEDARRYLVEKEKLEKEKETIRTELIALRQEKRELKEAIRSSPGAKLKALEEAVATLEAQCRAKEERRIDLELKLVAVKERLQQSLAGGPALGLSVSSKPKSGETANKPQNSVPEQPLPVNCVSELRKRSPSIVASNQGRVLQKAKEWEMKKT

SEQ ID NO: 1445 - protein, 725 aa, Homo sapiens
  Payload ID: 424;
  Gene Symbol: AFAP1L1;
  Gene Name: actin filament associated prt 1-like 1;
  Uniprot ID:  Q8TED9;
  ENSP ID: ENSP00000424427
MDRGQVLEQLLPELTGLLSLLDHEYLSDTTLEKKMAVASILQSLQPLPAKEVSYLYVNTADLHSGPSFVESLFEEFDCDLSDLRDMPEDDGEPSKGASPELAKSPRLRNAADLPPPLPNKPPPEDYYEEALPLGPGKSPEYISSHNGCSPSHSIVDGYYEDADSSYPATRVNGELKSSYNDSDAMSSSYESYDEEEEEGKSPQPRHQWPSEEASMHLVRECRICAFLLRKKRFGQWAKQLTVIREDQLLCYKSSKDRQPHLRLALDTCSIIYVPKDSRHKRHELRFTQGATEVLVLALQSREQAEEWLKVIREVSKPVGGAEGVEVPRSPVLLCKLDLDKRLSQEKQTSDSDSVGVGDNCSTLGRRETCDHGKGKKSSLAELKGSMSRAAGRKITRIIGFSKKKTLADDLQTSSTEEEVPCCGYLNVLVNQGWKERWCRLKCNTLYFHKDHMDLRTHVNAIALQGCEVAPGFGPRHPFAFRILRNRQEVAILEASCSEDMGRWLGLLLVEMGSRVTPEALHYDYVDVETLTSIVSAGRNSFLYARSCQNQWPEPRVYDDVPYEKMQDEEPERPTGAQVKRHASSCSEKSHRVDPQVKVKRHASSANQYKYGKNRAEEDARRYLVEKEKLEKEKETIRTELIALRQEKRELKEAIRSSPGAKLKALEEAVATLEAQCRAKEERRIDLELKLVAVKERLQQSLAGGPALGLSVSSKPKSGEWEMKKT

SEQ ID NO: 1446 - protein, 818 aa, Homo sapiens
  Payload ID: 425;
  Gene Symbol: AFAP1L2;
  Gene Name: actin filament associated prt 1-like 2;
  Uniprot ID:  Q8N4X5;
  ENSP ID: ENSP00000303042
MERYKALEQLLTELDDFLKILDQENLSSTALVKKSCLAELLRLYTKSSSSDEEYIYMNKVTINKQQNAESQGKAPEEQGLLPNGEPSQHSSAPQKSLPDLPPPKMIPERKQLAIPKTESPEGYYEEAEPYDTSLNEDGEAVSSSYESYDEEDGSKGKSAPYQWPSPEAGIELMRDARICAFLWRKKWLGQWAKQLCVIKDNRLLCYKSSKDHSPQLDVNLLGSSVIHKEKQVRKKEHKLKITPMNADVIVLGLQSKDQAEQWLRVIQEVSGLPSEGASEGNQYTPDAQRFNCQKPDIAEKYLSASEYGSSVDGHPEVPETKDVKKKCSAGLKLSNLMNLGRKKSTSLEPVERSLETSSYLNVLVNSQWKSRWCSVRDNHLHFYQDRNRSKVAQQPLSLVGCEVVPDPSPDHLYSFRILHKGEELAKLEAKSSEEMGHWLGLLLSESGSKTDPEEFTYDYVDADRVSCIVSAAKNSLLLMQRKFSEPNTYIDGLPSQDRQEELYDDVDLSELTAAVEPTEEATPVADDPNERESDRVYLDLTPVKSFLHGPSSAQAQASSPTLSCLDNATEALPADSGPGPTPDEPCIKCPENLGEQQLESLEPEDPSLRITTVKIQTEQQRISFPPSCPDAVVATPPGASPPVKDRLRVTSAEIKLGKNRTEAEVKRYTEEKERLEKKKEEIRGHLAQLRKEKRELKETLLKCTDKEVLASLEQKLKEIDEECRGEESRRVDLELSIMEVKDNLKKAEAGPVTLGTTVDTTHLENVSPRPKAVTPASAPDCTPVNSATTLKNRPLSVVVTGKGTVLQKAKEWEKKGAS

SEQ ID NO: 1447 - protein, 814 aa, Homo sapiens
  Payload ID: 425;
  Gene Symbol: AFAP1L2;
  Gene Name: actin filament associated prt 1-like 2;
  Uniprot ID:  Q8N4X5;
  ENSP ID: ENSP00000358276
MERYKALEQLLTELDDFLKILDQENLSSTALVKKSCLAELLRLYTKSSSSDEEYIYMNKVTINKQQNAESQGKAPEEQGLLPNGEPSQHSSAPQKSLPDLPPPKMIPERKQLAIPKTESPEGYYEEAEPYDTSLNEDGEAVSSSYESYDEEDGSKGKSAPYQWPSPEAGIELMRDARICAFLWRKKWLGQWAKQLCVIKDNRLLCYKSSKDHSPQLDVNLLGSSVIHKEKQVRKKEHKLKITPMNADVIVLGLQSKDQAEQWLRVIQEVSGLPSEGASEGNQYTPDAQRFNCQKPDIAEKYLSASEYGSSVDGHPEVPETKDVKKKCSAGLKLSNLMNLGRKKSTSLEPVERSLETSSYLNVLVNSQWKSRWCSVRDNHLHFYQDRNRSKVAQQPLSLVGCEVVPDPSPDHLYSFRILHKGEELAKLEAKSSEEMGHWLGLLLSESGSKTDPEEFTYDYVDADRVSCIVSAAKNSLLLMQRKFSEPNTYIDGLPSQDRQEELYDDVDLSELTAAVEPTEEATPVADDPNERESDRVYLDLTPVKSFLHGPSSAQAQASSPTLSCLDNATEALPADSGPGPTPDEPCIKCPENLGEQQLESLEPEDPSLRITTVKIQTEQQRISFPPSCPDAVVATPPGASPPVKDRLRVTSAEIKLGKNRTEAEVKRYTEEKERLEKKKEEIRGHLAQLRKEKRELKETLLKCTDKEVLASLEQKLKEIDEECRGEESRRVDLELSIMEVKDNLKKAEAGPVTLGTTVDTTHLENPKAVTPASAPDCTPVNSATTLKNRPLSVVVTGKGTVLQKAKEWEKKGAS

SEQ ID NO: 1448 - protein, 312 aa, Homo sapiens
  Payload ID: 425;
  Gene Symbol: AFAP1L2;
  Gene Name: actin filament associated prt 1-like 2;
  ENSP ID: ENSP00000396781
MERYKAQGCCCLVVQRRIRQVSASLEQLLTELDDFLKILDQENLSSTALVKKSCLAELLRLYTKSSSSDEEYIYMNKVTINKQQNAESQGKAPEEQGLLPNGEPSQHSSAPQKSLPDLPPPKMIPERKQLAIPKTESPEGYYEEAEPYDTSLNEDGEAVSSSYESYDEEDGSKGKSAPYQWPSPEAGIELMRDARICAFLWRKKWLGQWAKQLCVIKDNRLLCYKSSKDHSPQLDVNLLGSSVIHKEKQVRKKEHKLKITPMNADVIVLGLQSKDQAEQWLRVIQEVSGLPSEGASEGNQYTPDAQRFNCQK

SEQ ID NO: 1449 - protein, 375 aa, Homo sapiens
  Payload ID: 426;
  Gene Symbol: ACTG1;
  Gene Name: actin gamma 1;
  Uniprot ID:  P63261;
  ENSP ID: ENSP00000331514
MEEEIAALVIDNGSGMCKAGFAGDDAPRAVFPSIVGRPRHQGVMVGMGQKDSYVGDEAQSKRGILTLKYPIEHGIVTNWDDMEKIWHHTFYNELRVAPEEHPVLLTEAPLNPKANREKMTQIMFETFNTPAMYVAIQAVLSLYASGRTTGIVMDSGDGVTHTVPIYEGYALPHAILRLDLAGRDLTDYLMKILTERGYSFTTTAEREIVRDIKEKLCYVALDFEQEMATAASSSSLEKSYELPDGQVITIGNERFRCPEALFQPSFLGMESCGIHETTFNSIMKCDVDIRKDLYANTVLSGGTTMYPGIADRMQKEITALAPSTMKIKIIAPPERKYSVWIGGSILASLSTFQQMWISKQEYDESGPSIVHRKCF

SEQ ID NO: 1450 - protein, 375 aa, Homo sapiens; identical to SEQ ID NO: 1449
  Payload ID: 426;
  Gene Symbol: ACTG1;
  Gene Name: actin gamma 1;
  Uniprot ID:  P63261;
  ENSP ID: ENSP00000458162

SEQ ID NO: 1451 - protein, 375 aa, Homo sapiens; identical to SEQ ID NO: 1449
  Payload ID: 426;
  Gene Symbol: ACTG1;
  Gene Name: actin gamma 1;
  Uniprot ID:  P63261;
  ENSP ID: ENSP00000458435

SEQ ID NO: 1452 - protein, 214 aa, Homo sapiens
  Payload ID: 426;
  Gene Symbol: ACTG1;
  Gene Name: actin gamma 1;
  ENSP ID: ENSP00000459119
MEEEIAALVIDNGSGMCKAGFAGDDAPRAVFPSIVGRPRHQGVMVGMGQKDSYVGDEAQSKRGILTLKYPIEHGIVTNWDDMEKIWHHTFYNELRVAPEEHPVLLTEAPLNPKANREKMTQIMFETFNTPAMYVAIQAVLSLYASGRTTGIVMDSGDGVTHTVPIYEGYALPHAILRLDLAGRDLTDYLMKILTERGYSFTTTAEREIVRDIKE

SEQ ID NO: 1453 - protein, 375 aa, Homo sapiens; identical to SEQ ID NO: 1449
  Payload ID: 426;
  Gene Symbol: ACTG1;
  Gene Name: actin gamma 1;
  Uniprot ID:  P63261;
  ENSP ID: ENSP00000459124

SEQ ID NO: 1454 - protein, 214 aa, Homo sapiens; identical to SEQ ID NO: 1452
  Payload ID: 426;
  Gene Symbol: ACTG1;
  Gene Name: actin gamma 1;
  ENSP ID: ENSP00000460464

SEQ ID NO: 1455 - protein, 164 aa, Homo sapiens
  Payload ID: 426;
  Gene Symbol: ACTG1;
  Gene Name: actin gamma 1;
  ENSP ID: ENSP00000460660
MEEEIAALVIDNGSGMCKAGFAGDDAPRAVFPSIVGRPRHQGVMVGMGQKDSYVGDEAQSKRGILTLKYPIEHGIVTNWDDMEKIWHHTFYNELRVAPEEHPVLLTEAPLNPKANREKMTQIMFETFNTPAMYVAIQAVLSLYASGRTTGIVMDSGDGVTHTVP

SEQ ID NO: 1456 - protein, 241 aa, Homo sapiens
  Payload ID: 426;
  Gene Symbol: ACTG1;
  Gene Name: actin gamma 1;
  ENSP ID: ENSP00000461407
MEEEIAALVIDNGSGMCKAGFAGDDAPRAVFPSIVGRPRHQDSYVGDEAQSKRGILTLKYPIEHGIVTNWDDMEKIWHHTFYNELRVAPEEHPVLLTEAPLNPKANREKMTQIMFETFNTPAMYVAIQAVLSLYASGRTTGIVMDSGDGVTHTVPIYEGYALPHAILRLDLAGRDLTDYLMKILTERGYSFTTTAEREIVRDIKEKLCYVALDFEQEMATAASSSSLEKSYELPDGQVITI

SEQ ID NO: 1457 - protein, 375 aa, Homo sapiens; identical to SEQ ID NO: 1449
  Payload ID: 426;
  Gene Symbol: ACTG1;
  Gene Name: actin gamma 1;
  Uniprot ID:  P63261;
  ENSP ID: ENSP00000461672

SEQ ID NO: 1458 - protein, 198 aa, Homo sapiens
  Payload ID: 426;
  Gene Symbol: ACTG1;
  Gene Name: actin gamma 1;
  ENSP ID: ENSP00000462823
MEEEIAALVIDNGSGMCKAGFAGDDAPRAVFPSIVGRPRHQGVMVGMGQKDSYVGDEAQSKRGILTLKYPIEHGIVTNWDDMEKIWHHTFYNELRVAPEEHPVLLTEAPLNPKANREKMTQALFLSRHFLPEASRLCLRPSTPRPCTWPSRPCCPSTPLGAPLALSWTLETGSPTRCPSTRATPSPTPSCVWTWLAGT

SEQ ID NO: 1459 - protein, 133 aa, Homo sapiens
  Payload ID: 426;
  Gene Symbol: ACTG1;
  Gene Name: actin gamma 1;
  ENSP ID: ENSP00000466346
MEEEIAALVIDNGSGMCKAGFAGDDAPRAVFPSIVGRPRHQGVMVGMGQKDSYVGDEAQSKRGILTLKYPIEHGIVTNWDDMEKIWHHTFYNELRVAPEEHPVLLTEAPLNPKAVLSLYASGRTTGIVMDSGD

SEQ ID NO: 1460 - protein, 375 aa, Homo sapiens; identical to SEQ ID NO: 1449
  Payload ID: 426;
  Gene Symbol: ACTG1;
  Gene Name: actin gamma 1;
  Uniprot ID:  P63261;
  ENSP ID: ENSP00000477968

SEQ ID NO: 1461 - protein, 370 aa, Homo sapiens
  Payload ID: 427;
  Gene Symbol: ARPC1A;
  Gene Name: actin related prt 2/3 complex, subunit 1A, 41kDa;
  Uniprot ID:  Q92747;
  ENSP ID: ENSP00000262942
MSLHQFLLEPITCHAWNRDRTQIALSPNNHEVHIYKKNGSQWVKAHELKEHNGHITGIDWAPKSDRIVTCGADRNAYVWSQKDGVWKPTLVILRINRAATFVKWSPLENKFAVGSGARLISVCYFESENDWWVSKHIKKPIRSTVLSLDWHPNNVLLAAGSCDFKCRVFSAYIKEVDEKPASTPWGSKMPFGQLMSEFGGSGTGGWVHGVSFSASGSRLAWVSHDSTVSVADASKSVQVSTLKTEFLPLLSVSFVSENSVVAAGHDCCPMLFNYDDRGCLTFVSKLDIPKQSIQRNMSAMERFRNMDKRATTEDRNTALETLHQNSITQVSIYEVDKQDCRKFCTTGIDGAMTIWDFKTLESSIQGLRIM

SEQ ID NO: 1462 - protein, 279 aa, Homo sapiens
  Payload ID: 427;
  Gene Symbol: ARPC1A;
  Gene Name: actin related prt 2/3 complex, subunit 1A, 41kDa;
  ENSP ID: ENSP00000408711
MSLHQFLLEPITCHAWNRDRTQIALSPNNHEVHIYKKNGSQWVKAHELKEHNGHITGIDWAPKSDRIVTCGADRNAYVWSQKDGVWKPTLVILRINRAATFVKWSPLENKFAVGSGARLISVCYFESENDWWVSKHIKKPIRSTVLSLDWHPNNVLLAAGSCDFKCRVFSAYIKEVDEKPASTPWGSKMPFGQLMSEFGGSGTGGWVHGVSFSASGSRLAWVSHDSTVSVADASKSVQVSTLKTEFLPLLSVSFVSENSSCFRAMTAAQCSLTTMTAAA

SEQ ID NO: 1463 - protein, 53 aa, Homo sapiens
  Payload ID: 427;
  Gene Symbol: ARPC1A;
  Gene Name: actin related prt 2/3 complex, subunit 1A, 41kDa;
  ENSP ID: ENSP00000412879
MSLHQFLLEPITCHAWNRDRTRPVCLDYYSLVRLPSVPIITKCTSIRRTGASG

SEQ ID NO: 1464 - protein, 372 aa, Homo sapiens
  Payload ID: 428;
  Gene Symbol: ARPC1B;
  Gene Name: actin related prt 2/3 complex, subunit 1B, 41kDa;
  Uniprot ID:  O15143;
  ENSP ID: ENSP00000252725
MAYHSFLVEPISCHAWNKDRTQIAICPNNHEVHIYEKSGAKWTKVHELKEHNGQVTGIDWAPESNRIVTCGTDRNAYVWTLKGRTWKPTLVILRINRAARCVRWAPNENKFAVGSGSRVISICYFEQENDWWVCKHIKKPIRSTVLSLDWHPNNVLLAAGSCDFKCRIFSAYIKEVEERPAPTPWGSKMPFGELMFESSSSCGWVHGVCFSASGSRVAWVSHDSTVCLADADKKMAVATLASETLPLLALTFITDNSLVAAGHDCFPVLFTYDAAAGMLSFGGRLDVPKQSSQRGLTARERFQNLDKKASSEGGTAAGAGLDSLHKNSVSQISVLSGGKAKCSQFCTTGMDGGMSIWDVKSLESALKDLKIK

SEQ ID NO: 1465 - protein, 132 aa, Homo sapiens
  Payload ID: 428;
  Gene Symbol: ARPC1B;
  Gene Name: actin related prt 2/3 complex, subunit 1B, 41kDa;
  ENSP ID: ENSP00000388802
MAYHSFLVEPISCHAWNKDRTQIAICPNNHEVHIYEKSGAKWTKVHELKEHNGQVTGIDWAPESNRIVTCGTDRNAYVWTLKGRTWKPTLVILRINRAARCVRWAPNENKFAVGSGSRVISICYFEQENDWW

SEQ ID NO: 1466 - protein, 372 aa, Homo sapiens; identical to SEQ ID NO: 1464
  Payload ID: 428;
  Gene Symbol: ARPC1B;
  Gene Name: actin related prt 2/3 complex, subunit 1B, 41kDa;
  Uniprot ID:  O15143;
  ENSP ID: ENSP00000389631

SEQ ID NO: 1467 - protein, 132 aa, Homo sapiens; identical to SEQ ID NO: 1465
  Payload ID: 428;
  Gene Symbol: ARPC1B;
  Gene Name: actin related prt 2/3 complex, subunit 1B, 41kDa;
  ENSP ID: ENSP00000398110

SEQ ID NO: 1468 - protein, 102 aa, Homo sapiens
  Payload ID: 428;
  Gene Symbol: ARPC1B;
  Gene Name: actin related prt 2/3 complex, subunit 1B, 41kDa;
  ENSP ID: ENSP00000398620
MAYHSFLVEPISCHAWNKDRTQIAICPNNHEVHIYEKSGAKWTKVHELKEHNGQVTGIDWAPESNRIVTCGTDRNAYVWTLKGRTWKPTLVILRINRAARCV

SEQ ID NO: 1469 - protein, 130 aa, Homo sapiens
  Payload ID: 428;
  Gene Symbol: ARPC1B;
  Gene Name: actin related prt 2/3 complex, subunit 1B, 41kDa;
  ENSP ID: ENSP00000399955
MAYHSFLVEPISCHAWNKDRTQIAICPNNHEVHIYEKSGAKWTKVHELKEHNGQVTGIDWAPESNRIVTCGTDRNAYVWTLKGRTWKPTLVILRINRAARCVRWAPNENKFAVGSGSRVISICYFEQEND

SEQ ID NO: 1470 - protein, 132 aa, Homo sapiens; identical to SEQ ID NO: 1465
  Payload ID: 428;
  Gene Symbol: ARPC1B;
  Gene Name: actin related prt 2/3 complex, subunit 1B, 41kDa;
  ENSP ID: ENSP00000403211

SEQ ID NO: 1471 - protein, 130 aa, Homo sapiens; identical to SEQ ID NO: 1469
  Payload ID: 428;
  Gene Symbol: ARPC1B;
  Gene Name: actin related prt 2/3 complex, subunit 1B, 41kDa;
  ENSP ID: ENSP00000403324

SEQ ID NO: 1472 - protein, 32 aa, Homo sapiens
  Payload ID: 428;
  Gene Symbol: ARPC1B;
  Gene Name: actin related prt 2/3 complex, subunit 1B, 41kDa;
  ENSP ID: ENSP00000408508
MAYHSFLVEPISCHAWNKDRTRQPVPGEDRVA

SEQ ID NO: 1473 - protein, 21 aa, Homo sapiens
  Payload ID: 428;
  Gene Symbol: ARPC1B;
  Gene Name: actin related prt 2/3 complex, subunit 1B, 41kDa;
  ENSP ID: ENSP00000408758
MAYHSFLVEPISCHAWNKDRT

SEQ ID NO: 1474 - protein, 128 aa, Homo sapiens
  Payload ID: 428;
  Gene Symbol: ARPC1B;
  Gene Name: actin related prt 2/3 complex, subunit 1B, 41kDa;
  ENSP ID: ENSP00000410238
MAYHSFLVEPISCHAWNKDRTQIAICPNNHEVHIYEKSGAKWTKVHELKEHNGQVTGIDWAPESNRIVTCGTDRNAYVWTLKGRTWKPTLVILRINRAARCVRWAPNENKFAVGSGSRVISICYFEQE

SEQ ID NO: 1475 - protein, 82 aa, Homo sapiens
  Payload ID: 428;
  Gene Symbol: ARPC1B;
  Gene Name: actin related prt 2/3 complex, subunit 1B, 41kDa;
  ENSP ID: ENSP00000413067
MAYHSFLVEPISCHAWNKDRTQIAICPNNHEVHIYEKSGAKWTKVHELKEHNGQVTGIDWAPESNRIVTCGTDRNAYVWTLK

SEQ ID NO: 1476 - protein, 108 aa, Homo sapiens
  Payload ID: 428;
  Gene Symbol: ARPC1B;
  Gene Name: actin related prt 2/3 complex, subunit 1B, 41kDa;
  ENSP ID: ENSP00000413173
MAYHSFLVEPISCHAWNKDRTQIAICPNNHEVHIYEKSGAKWTKVHELKEHNGQVTGIDWAPESNRIVTCGTDRNAYVWTLKGRTWKPTLVILRINRAARCVRWAPNE

SEQ ID NO: 1477 - protein, 300 aa, Homo sapiens
  Payload ID: 429;
  Gene Symbol: ARPC2;
  Gene Name: actin related prt 2/3 complex, subunit 2, 34kDa;
  Uniprot ID:  O15144;
  ENSP ID: ENSP00000295685
MILLEVNNRIIEETLALKFENAAAGNKPEAVEVTFADFDGVLYHISNPNGDKTKVMVSISLKFYKELQAHGADELLKRVYGSFLVNPESGYNVSLLYDLENLPASKDSIVHQAGMLKRNCFASVFEKYFQFQEEGKEGENRAVIHYRDDETMYVESKKDRVTVVFSTVFKDDDDVVIGKVFMQEFKEGRRASHTAPQVLFSHREPPLELKDTDAAVGDNIGYITFVLFPRHTNASARDNTINLIHTFRDYLHYHIKCSKAYIHTRMRAKTSDFLKVLNRARPDAEKKEMKTITGKTFSSR

SEQ ID NO: 1478 - protein, 300 aa, Homo sapiens; identical to SEQ ID NO: 1477
  Payload ID: 429;
  Gene Symbol: ARPC2;
  Gene Name: actin related prt 2/3 complex, subunit 2, 34kDa;
  Uniprot ID:  O15144;
  ENSP ID: ENSP00000327137

SEQ ID NO: 1479 - protein, 91 aa, Homo sapiens
  Payload ID: 429;
  Gene Symbol: ARPC2;
  Gene Name: actin related prt 2/3 complex, subunit 2, 34kDa;
  ENSP ID: ENSP00000396475
MILLEVNNRIIEETLALKFENAAAGNKPEAVEVTFADFDGVLYHISNPNGDKTKVMVSISLKFYKELQAHGADELLKRVYGSFLVNPESVF

SEQ ID NO: 1480 - protein, 89 aa, Homo sapiens
  Payload ID: 429;
  Gene Symbol: ARPC2;
  Gene Name: actin related prt 2/3 complex, subunit 2, 34kDa;
  ENSP ID: ENSP00000401070
MILLEVNNRIIEETLALKFENAAAGNKPEAVEVTFADFDGVLYHISNPNGDKTKVMVSISLKFYKELQAHGADELLKRVYGSFLVNPES

SEQ ID NO: 1481 - protein, 165 aa, Homo sapiens
  Payload ID: 429;
  Gene Symbol: ARPC2;
  Gene Name: actin related prt 2/3 complex, subunit 2, 34kDa;
  ENSP ID: ENSP00000411612
KEGRRASHTAPQVLFSHREPPLELKDTDAAVGDNIGYITFVLFPRHTNASARDNTINLIHTFRDYLHYHIKCSKAYIHTRMRAKTSDFLKVLNRARPDAEKKEMKTITFSLAELGPRKEKQETNSCIHPENQIMLLMGEDVFIPLILGIRGGSGWQLKAGTLATG

SEQ ID NO: 1482 - protein, 38 aa, Homo sapiens
  Payload ID: 429;
  Gene Symbol: ARPC2;
  Gene Name: actin related prt 2/3 complex, subunit 2, 34kDa;
  ENSP ID: ENSP00000412632
MILLEVNNRIIEETLALKFENAAAGNKPEAVEVTFAGE

SEQ ID NO: 1483 - protein, 178 aa, Homo sapiens [sequence omitted]

SEQ ID NO: 1484 - protein, 99 aa, Homo sapiens
  Payload ID: 430;
  Gene Symbol: ARPC3;
  Gene Name: actin related prt 2/3 complex, subunit 3, 21kDa;
  ENSP ID: ENSP00000413221
MPAYHSSLMDPDTKLIGNMALLPIRSQFKGPAPRETKDTDIVDEAIYYFKANVFFKNYEIKNEADRTLIYITLYISECLKKLQKCNSKSQEVMRAYLQQ

SEQ ID NO: 1485 - protein, 84 aa, Homo sapiens
  Payload ID: 430;
  Gene Symbol: ARPC3;
  Gene Name: actin related prt 2/3 complex, subunit 3, 21kDa;
  ENSP ID: ENSP00000446598
MDPDTKLIGNMALLPIRSQFKGPAPRETKDTDIVDEAIYYFKANVFFKNYEIKNEADRTLIYITLYISECLKKLQKCNSKSQGE

SEQ ID NO: 1486 - protein, 168 aa, Homo sapiens
  Payload ID: 431;
  Gene Symbol: ARPC4;
  Gene Name: actin related prt 2/3 complex, subunit 4, 20kDa;
  Uniprot ID:  P59998;
  ENSP ID: ENSP00000380431
MTATLRPYLSAVRATLQAALCLENFSSQVVERHNKPEVEVRSSKELLLQPVTISRNEKEKVLIEGSINSVRVSIAVKQADEIEKILCHKFMRFMMMRAENFFILRRKPVEGYDISFLITNFHTEQMYKHKLVDFVIHFMEEIDKEISEMKLSVNARARIVAEEFLKNF

SEQ ID NO: 1487 - protein, 187 aa, Homo sapiens
  Payload ID: 431;
  Gene Symbol: ARPC4;
  Gene Name: actin related prt 2/3 complex, subunit 4, 20kDa;
  Uniprot ID:  P59998;
  ENSP ID: ENSP00000388169
MVREPGPRPGTPGCSASGQWTATLRPYLSAVRATLQAALCLENFSSQVVERHNKPEVEVRSSKELLLQPVTISRNEKEKVLIEGSINSVRVSIAVKQADEIEKILCHKFMRFMMMRAENFFILRRKPVEGYDISFLITNFHTEQMYKHKLVDFVIHFMEEIDKEISEMKLSVNARARIVAEEFLKNF

SEQ ID NO: 1488 - protein, 113 aa, Homo sapiens
  Payload ID: 431;
  Gene Symbol: ARPC4;
  Gene Name: actin related prt 2/3 complex, subunit 4, 20kDa;
  ENSP ID: ENSP00000395085
MTATLRPYLSAVRATLQAALCLENFSSQVVERHNKPEVEVRSSKELLLQPVTISRNEKEKVLIEGSINSVRVSIAVKQADEIEKILCHKFMRFMMMRAENFFILRRKPVEIIL

SEQ ID NO: 1489 - protein, 44 aa, Homo sapiens
  Payload ID: 431;
  Gene Symbol: ARPC4;
  Gene Name: actin related prt 2/3 complex, subunit 4, 20kDa;
  ENSP ID: ENSP00000414751
MTATLRPYLSAVRATLQAALCLENFSSQVVERHNKPEVEVSPRQ

SEQ ID NO: 1490 - protein, 78 aa, Homo sapiens
  Payload ID: 431;
  Gene Symbol: ARPC4;
  Gene Name: actin related prt 2/3 complex, subunit 4, 20kDa;
  Uniprot ID:  P59998;
  ENSP ID: ENSP00000432235
MRFMMMRAENFFILRRKPVEGYDISFLITNFHTEQMYKHKLVDFVIHFMEEIDKEISEMKLSVNARARIVAEEFLKNF

SEQ ID NO: 1491 - protein, 77 aa, Homo sapiens
  Payload ID: 431;
  Gene Symbol: ARPC4;
  Gene Name: actin related prt 2/3 complex, subunit 4, 20kDa;
  ENSP ID: ENSP00000473435
MRFMMMRAENFFILRRKPVEGYDISFLITNFHTEQMYKHKLVDFVIHFMEEIDKEISEMKLSVNARARIVAEEFLKN

SEQ ID NO: 1492 - protein, 154 aa, Homo sapiens
  Payload ID: 432;
  Gene Symbol: ARPC5;
  Gene Name: actin related prt 2/3 complex, subunit 5, 16kDa;
  Uniprot ID:  O15511;
  ENSP ID: ENSP00000294742
MSKNTVSSARFRKVDVDEYDENKFVDEEDGGDGQAGPDEGEVDSCLRHSITGNMTAALQAALKNPPINTKSQAVKDRAGSIVLKVLISFKANDIEKAVQSLDKNGVDLLMKYIYKGFESPSDNSSAMLLQWHEKALAAGGVGSIVRVLTARKTV

SEQ ID NO: 1493 - protein, 151 aa, Homo sapiens
  Payload ID: 432;
  Gene Symbol: ARPC5;
  Gene Name: actin related prt 2/3 complex, subunit 5, 16kDa;
  Uniprot ID:  O15511;
  ENSP ID: ENSP00000352918
MSKNTVSSARFRKVDVDEYDENKFVDEEDGGDGQAGPDEGEVDSCLRQGNMTAALQAALKNPPINTKSQAVKDRAGSIVLKVLISFKANDIEKAVQSLDKNGVDLLMKYIYKGFESPSDNSSAMLLQWHEKALAAGGVGSIVRVLTARKTV

SEQ ID NO: 1494 - protein, 135 aa, Homo sapiens
  Payload ID: 432;
  Gene Symbol: ARPC5;
  Gene Name: actin related prt 2/3 complex, subunit 5, 16kDa;
  ENSP ID: ENSP00000356504
MSKNTVSSARFRKVDVDEYDENKFVDEEDGGDGQAGPDEGEVDSCLRQGNMTAALQAALKNPPINTKSQAVKDRAGSIVLKVLISFKANDIEKAVQSLDKNGVDLLMKYIYKGFESPSDNSSAMLLQWHEKVPLV

SEQ ID NO: 1495 - protein, 153 aa, Homo sapiens
  Payload ID: 433;
  Gene Symbol: ARPC5L;
  Gene Name: actin related prt 2/3 complex, subunit 5-like;
  Uniprot ID:  Q9BPX5;
  ENSP ID: ENSP00000259477
MARNTLSSRFRRVDIDEFDENKFVDEQEEAAAAAAEPGPDPSEVDGLLRQGDMLRAFHAALRNSPVNTKNQAVKERAQGVVLKVLTNFKSSEIEQAVQSLDRNGVDLLMKYIYKGFEKPTENSSAVLLQWHEKALAVGGLGSIIRVLTARKTV

SEQ ID NO: 1496 - protein, 153 aa, Homo sapiens; identical to SEQ ID NO: 1495
  Payload ID: 433;
  Gene Symbol: ARPC5L;
  Gene Name: actin related prt 2/3 complex, subunit 5-like;
  Uniprot ID:  Q9BPX5;
  ENSP ID: ENSP00000345361

SEQ ID NO: 1497 - protein, 254 aa, Homo sapiens
  Payload ID: 434;
  Gene Symbol: ACTA1;
  Gene Name: actin, alpha 1, skeletal muscle;
  ENSP ID: ENSP00000355644
MCDEDETTALVCDNGSGLVKAGFAGDDAPRAVFPSIVGRPRHQGVMVGMGQKDSYVGDEAQSKRGILTLKYPIEHGIITNWDDMEKIWHHTFYNELRVAPEEHPTLLTEAPLNPKANREKMTQIMFETFNVPAMYVAIQAVLSLYASGRTTGIVLDSGDGIMKCDIDIRKDLYANNVMSGGTTMYPGIADRMQKEITALAPSTMKIKIIAPPERKYSVWIGGSILASLSTFQQMWITKQEYDEAGPSIVHRKCF

SEQ ID NO: 1498 - protein, 377 aa, Homo sapiens
  Payload ID: 434;
  Gene Symbol: ACTA1;
  Gene Name: actin, alpha 1, skeletal muscle;
  Uniprot ID:  P68133;
  ENSP ID: ENSP00000355645
MCDEDETTALVCDNGSGLVKAGFAGDDAPRAVFPSIVGRPRHQGVMVGMGQKDSYVGDEAQSKRGILTLKYPIEHGIITNWDDMEKIWHHTFYNELRVAPEEHPTLLTEAPLNPKANREKMTQIMFETFNVPAMYVAIQAVLSLYASGRTTGIVLDSGDGVTHNVPIYEGYALPHAIMRLDLAGRDLTDYLMKILTERGYSFVTTAEREIVRDIKEKLCYVALDFENEMATAASSSSLEKSYELPDGQVITIGNERFRCPETLFQPSFIGMESAGIHETTYNSIMKCDIDIRKDLYANNVMSGGTTMYPGIADRMQKEITALAPSTMKIKIIAPPERKYSVWIGGSILASLSTFQQMWITKQEYDEAGPSIVHRKCF

SEQ ID NO: 1499 - protein, 377 aa, Homo sapiens
  Payload ID: 435;
  Gene Symbol: ACTA2;
  Gene Name: actin, alpha 2, smooth muscle, aorta;
  Uniprot ID:  P62736;
  ENSP ID: ENSP00000224784
MCEEEDSTALVCDNGSGLCKAGFAGDDAPRAVFPSIVGRPRHQGVMVGMGQKDSYVGDEAQSKRGILTLKYPIEHGIITNWDDMEKIWHHSFYNELRVAPEEHPTLLTEAPLNPKANREKMTQIMFETFNVPAMYVAIQAVLSLYASGRTTGIVLDSGDGVTHNVPIYEGYALPHAIMRLDLAGRDLTDYLMKILTERGYSFVTTAEREIVRDIKEKLCYVALDFENEMATAASSSSLEKSYELPDGQVITIGNERFRCPETLFQPSFIGMESAGIHETTYNSIMKCDIDIRKDLYANNVLSGGTTMYPGIADRMQKEITALAPSTMKIKIIAPPERKYSVWIGGSILASLSTFQQMWISKQEYDEAGPSIVHRKCF

SEQ ID NO: 1500 - protein, 151 aa, Homo sapiens
  Payload ID: 435;
  Gene Symbol: ACTA2;
  Gene Name: actin, alpha 2, smooth muscle, aorta;
  ENSP ID: ENSP00000396730
MCEEEDSTALVCDNGSGLCKAGFAGDDAPRAVFPSIVGRPRHQGVMVGMGQKDSYVGDEAQSKRGILTLKYPIEHGIITNWDDMEKIWHHSFYNELRVAPEEHPTLLTEAPLNPKANREKMTQIMFETFNVPAMYVAIQAVLSLYASGRTT

SEQ ID NO: 1501 - protein, 151 aa, Homo sapiens; identical to SEQ ID NO: 1500
  Payload ID: 435;
  Gene Symbol: ACTA2;
  Gene Name: actin, alpha 2, smooth muscle, aorta;
  ENSP ID: ENSP00000398239

SEQ ID NO: 1502 - protein, 377 aa, Homo sapiens; identical to SEQ ID NO: 1499
  Payload ID: 435;
  Gene Symbol: ACTA2;
  Gene Name: actin, alpha 2, smooth muscle, aorta;
  Uniprot ID:  P62736;
  ENSP ID: ENSP00000402373

SEQ ID NO: 1503 - protein, 377 aa, Homo sapiens
  Payload ID: 436;
  Gene Symbol: ACTC1;
  Gene Name: actin, alpha, cardiac muscle 1;
  Uniprot ID:  P68032;
  ENSP ID: ENSP00000290378
MCDDEETTALVCDNGSGLVKAGFAGDDAPRAVFPSIVGRPRHQGVMVGMGQKDSYVGDEAQSKRGILTLKYPIEHGIITNWDDMEKIWHHTFYNELRVAPEEHPTLLTEAPLNPKANREKMTQIMFETFNVPAMYVAIQAVLSLYASGRTTGIVLDSGDGVTHNVPIYEGYALPHAIMRLDLAGRDLTDYLMKILTERGYSFVTTAEREIVRDIKEKLCYVALDFENEMATAASSSSLEKSYELPDGQVITIGNERFRCPETLFQPSFIGMESAGIHETTYNSIMKCDIDIRKDLYANNVLSGGTTMYPGIADRMQKEITALAPSTMKIKIIAPPERKYSVWIGGSILASLSTFQQMWISKQEYDEAGPSIVHRKCF

SEQ ID NO: 1504 - protein, 375 aa, Homo sapiens
  Payload ID: 437;
  Gene Symbol: ACTB;
  Gene Name: actin, beta;
  Uniprot ID:  P60709;
  ENSP ID: ENSP00000349960
MDDDIAALVVDNGSGMCKAGFAGDDAPRAVFPSIVGRPRHQGVMVGMGQKDSYVGDEAQSKRGILTLKYPIEHGIVTNWDDMEKIWHHTFYNELRVAPEEHPVLLTEAPLNPKANREKMTQIMFETFNTPAMYVAIQAVLSLYASGRTTGIVMDSGDGVTHTVPIYEGYALPHAILRLDLAGRDLTDYLMKILTERGYSFTTTAEREIVRDIKEKLCYVALDFEQEMATAASSSSLEKSYELPDGQVITIGNERFRCPEALFQPSFLGMESCGIHETTFNSIMKCDVDIRKDLYANTVLSGGTTMYPGIADRMQKEITALAPSTMKIKIIAPPERKYSVWIGGSILASLSTFQQMWISKQEYDESGPSIVHRKCF

SEQ ID NO: 1505 - protein, 102 aa, Homo sapiens
  Payload ID: 437;
  Gene Symbol: ACTB;
  Gene Name: actin, beta;
  ENSP ID: ENSP00000393951
MDDDIAALVVDNGSGMCKAGFAGDDAPRAVFPSIVGRPRHQGVMVGMGQKDSYVGDEAQSKRGILTLKYPIEHGIVTNWDDMEKIWHHTFYNELRVAPEEHP

SEQ ID NO: 1506 - protein, 99 aa, Homo sapiens
  Payload ID: 437;
  Gene Symbol: ACTB;
  Gene Name: actin, beta;
  ENSP ID: ENSP00000399487
MLTMDDDIAALVVDNGSGMCKAGFAGDDAPRAVFPSIVGRPRHQGVMVGMGQKDSYVGDEAQSKRGILTLKYPIEHGIVTNWDDMEKIWHHTFYNELRV

SEQ ID NO: 1507 - protein, 80 aa, Homo sapiens
  Payload ID: 437;
  Gene Symbol: ACTB;
  Gene Name: actin, beta;
  ENSP ID: ENSP00000401032
MDDDIAALVVDNGSGMCKAGFAGDDAPRAVFPSIVGRPRHQGVMVGMGQKDSYVGDEAQSKRGILTLKYPIEHGIVTNWD

SEQ ID NO: 1508 - protein, 163 aa, Homo sapiens
  Payload ID: 437;
  Gene Symbol: ACTB;
  Gene Name: actin, beta;
  ENSP ID: ENSP00000407473
MDDDIAALVVDNGSGMCKAGFAGDDAPRAVFPSIVGRPRHQGVMVGMGQKDSYVGDEAQSKRGILTLKYPIEHGIVTNWDDMEKIWHHTFYNELRVAPEEHPVLLTEAPLNPKANREKMTQIMFETFNTPAMYVAIQAVLSLYASGRTTGIVMDSGDGVTHTV

SEQ ID NO: 1509 - protein, 125 aa, Homo sapiens
  Payload ID: 437;
  Gene Symbol: ACTB;
  Gene Name: actin, beta;
  ENSP ID: ENSP00000409264
MDDDIAALVVDNGSGMCKAGFAGDDAPRAVFPSIVGRPRHQGVMVGMGQKDSYVGDEAQSKRGILTLKYPIEHGIVTNWDDMEKIWHHTFYNELRVAPEEHPVLLTEAPLNPKANREKMTQDSLL

SEQ ID NO: 1510 - protein, 376 aa, Homo sapiens
  Payload ID: 438;
  Gene Symbol: ACTBL2;
  Gene Name: actin, beta-like 2;
  Uniprot ID:  Q562R1;
  ENSP ID: ENSP00000416706
MTDNELSALVVDNGSGMCKAGFGGDDAPRAVFPSMIGRPRHQGVMVGMGQKDCYVGDEAQSKRGVLTLKYPIEHGVVTNWDDMEKIWYHTFYNELRVAPDEHPILLTEAPLNPKINREKMTQIMFEAFNTPAMYVAIQAVLSLYASGRTTGIVMDSGDGVTHIVPIYEGYALPHAILRLDLAGRDLTDYLMKILTERGYNFTTTAEREIVRDVKEKLCYVALDFEQEMVRAAASSSPERSYELPDGQVITIGNERFRCPEAIFQPSFLGIESSGIHETTFNSIMKCDVDIRKDLYANTVLSGGSTMYPGIADRMQKEIITLAPSTMKIKIIAPPERKYSVWIGGSILASLSTFQQMWISKQEYDEAGPPIVHRKCF

SEQ ID NO: 1511 - protein, 376 aa, Homo sapiens
  Payload ID: 439;
  Gene Symbol: ACTG2;
  Gene Name: actin, gamma 2, smooth muscle, enteric;
  Uniprot ID:  P63267;
  ENSP ID: ENSP00000295137
MCEEETTALVCDNGSGLCKAGFAGDDAPRAVFPSIVGRPRHQGVMVGMGQKDSYVGDEAQSKRGILTLKYPIEHGIITNWDDMEKIWHHSFYNELRVAPEEHPTLLTEAPLNPKANREKMTQIMFETFNVPAMYVAIQAVLSLYASGRTTGIVLDSGDGVTHNVPIYEGYALPHAIMRLDLAGRDLTDYLMKILTERGYSFVTTAEREIVRDIKEKLCYVALDFENEMATAASSSSLEKSYELPDGQVITIGNERFRCPETLFQPSFIGMESAGIHETTYNSIMKCDIDIRKDLYANNVLSGGTTMYPGIADRMQKEITALAPSTMKIKIIAPPERKYSVWIGGSILASLSTFQQMWISKPEYDEAGPSIVHRKCF

SEQ ID NO: 1512 - protein, 376 aa, Homo sapiens; identical to SEQ ID NO: 1511
  Payload ID: 439;
  Gene Symbol: ACTG2;
  Gene Name: actin, gamma 2, smooth muscle, enteric;
  Uniprot ID:  P63267;
  ENSP ID: ENSP00000386857

SEQ ID NO: 1513 - protein, 333 aa, Homo sapiens
  Payload ID: 439;
  Gene Symbol: ACTG2;
  Gene Name: actin, gamma 2, smooth muscle, enteric;
  Uniprot ID:  P63267;
  ENSP ID: ENSP00000386929
MCEEETTALVCDNGSGLCKAGFAGDDAPRAVFPSIVGRPRHQIWHHSFYNELRVAPEEHPTLLTEAPLNPKANREKMTQIMFETFNVPAMYVAIQAVLSLYASGRTTGIVLDSGDGVTHNVPIYEGYALPHAIMRLDLAGRDLTDYLMKILTERGYSFVTTAEREIVRDIKEKLCYVALDFENEMATAASSSSLEKSYELPDGQVITIGNERFRCPETLFQPSFIGMESAGIHETTYNSIMKCDIDIRKDLYANNVLSGGTTMYPGIADRMQKEITALAPSTMKIKIIAPPERKYSVWIGGSILASLSTFQQMWISKPEYDEAGPSIVHRKCF

SEQ ID NO: 1514 - protein, 119 aa, Homo sapiens
  Payload ID: 439;
  Gene Symbol: ACTG2;
  Gene Name: actin, gamma 2, smooth muscle, enteric;
  ENSP ID: ENSP00000387182
MCEEETTALVCDNGSGLCKAGFAGDDAPRAVFPSIVGRPRHQGVMVGMGQKDSYVGDEAQSKRGILTLKYPIEHGIITNWDDMEKPHDHFSNLGCQHLSLDYCNGFLADFLVSCPHSPN

SEQ ID NO: 1515 - protein, 52 aa, Homo sapiens
  Payload ID: 439;
  Gene Symbol: ACTG2;
  Gene Name: actin, gamma 2, smooth muscle, enteric;
  ENSP ID: ENSP00000392894
MCEEETTALVCDNGSGLCKAGFAGDDAPRAVFPSIVGRPRHQVRAHLDTTRL

SEQ ID NO: 1516 - protein, 144 aa, Homo sapiens
  Payload ID: 439;
  Gene Symbol: ACTG2;
  Gene Name: actin, gamma 2, smooth muscle, enteric;
  ENSP ID: ENSP00000410020
MCEEETTALVCDNGSGLCKAGFAGDDAPRAVFPSIVGRPRHQGVMVGMGQKDSYVGDEAQSKRGILTLKYPIEHGIITNWDDMEKIWHHSFYNELRVAPEEHPTLLTEAPLNPKANREKMTQVRSQEDLNTGIRMQHGCLARYF

SEQ ID NO: 1517 - protein, 105 aa, Homo sapiens
  Payload ID: 439;
  Gene Symbol: ACTG2;
  Gene Name: actin, gamma 2, smooth muscle, enteric;
  ENSP ID: ENSP00000410706
MCEEETTALVCDNGSGLCKAGFAGDDAPRAVFPSIVGRPRHQGVMVGMGQKDSYVGDEAQSKRGILTLKYPIEHGIITNWDDMEKPLAGIFYQPNIARSQKAMNT

SEQ ID NO: 1518 - protein, 892 aa, Homo sapiens
  Payload ID: 440;
  Gene Symbol: ACTN1;
  Gene Name: actinin, alpha 1;
  Uniprot ID:  P12814;
  ENSP ID: ENSP00000193403
MDHYDSQQTNDYMQPEEDWDRDLLLDPAWEKQQRKTFTAWCNSHLRKAGTQIENIEEDFRDGLKLMLLLEVISGERLAKPERGKMRVHKISNVNKALDFIASKGVKLVSIGAEEIVDGNVKMTLGMIWTIILRFAIQDISVEETSAKEGLLLWCQRKTAPYKNVNIQNFHISWKDGLGFCALIHRHRPELIDYGKLRKDDPLTNLNTAFDVAEKYLDIPKMLDAEDIVGTARPDEKAIMTYVSSFYHAFSGAQKAETAANRICKVLAVNQENEQLMEDYEKLASDLLEWIRRTIPWLENRVPENTMHAMQQKLEDFRDYRRLHKPPKVQEKCQLEINFNTLQTKLRLSNRPAFMPSEGRMVSDINNAWGCLEQVEKGYEEWLLNEIRRLERLDHLAEKFRQKASIHEAWTDGKEAMLRQKDYETATLSEIKALLKKHEAFESDLAAHQDRVEQIAAIAQELNELDYYDSPSVNARCQKICDQWDNLGALTQKRREALERTEKLLETIDQLYLEYAKRAAPFNNWMEGAMEDLQDTFIVHTIEEIQGLTTAHEQFKATLPDADKERLAILGIHNEVSKIVQTYHVNMAGTNPYTTITPQEINGKWDHVRQLVPRRDQALTEEHARQQHNERLRKQFGAQANVIGPWIQTKMEEIGRISIEMHGTLEDQLSHLRQYEKSIVNYKPKIDQLEGDHQLIQEALIFDNKHTNYTMEHIRVGWEQLLTTIARTINEVENQILTRDAKGISQEQMNEFRASFNHFDRDHSGTLGPEEFKACLISLGYDIGNDPQGEAEFARIMSIVDPNRLGVVTFQAFIDFMSRETADTDTADQVMASFKILAGDKNYITMDELRRELPPDQAEYCIARMAPYTGPDSVPGALDYMSFSTALYGESDL

SEQ ID NO: 1519 - protein, 822 aa, Homo sapiens
  Payload ID: 440;
  Gene Symbol: ACTN1;
  Gene Name: actinin, alpha 1;
  ENSP ID: ENSP00000366035
MLLLEVISGERLAKPERGKMRVHKISNVNKALDFIASKGVKLVSIGAEEIVDGNVKMTLGMIWTIILRFAIQDISVEETSAKEGLLLWCQRKTAPYKNVNIQNFHISWKDGLGFCALIHRHRPELIDYGKLRKDDPLTNLNTAFDVAEKYLDIPKMLDAEDIVGTARPDEKAIMTYVSSFYHAFSGAQKAETAANRICKVLAVNQENEQLMEDYEKLASDLLEWIRRTIPWLENRVPENTMHAMQQKLEDFRDYRRLHKPPKVQEKCQLEINFNTLQTKLRLSNRPAFMPSEGRMVSDINNAWGCLEQVEKGYEEWLLNEIRRLERLDHLAEKFRQKASIHEAWTDGKEAMLRQKDYETATLSEIKALLKKHEAFESDLAAHQDRVEQIAAIAQELNELDYYDSPSVNARCQKICDQWDNLGALTQKRREALERTEKLLETIDQLYLEYAKRAAPFNNWMEGAMEDLQDTFIVHTIEEIQGLTTAHEQFKATLPDADKERLAILGIHNEVSKIVQTYHVNMAGTNPYTTITPQEINGKWDHVRQLVPRRDQALTEEHARQQHNERLRKQFGAQANVIGPWIQTKMEEIGRISIEMHGTLEDQLSHLRQYEKSIVNYKPKIDQLEGDHQLIQEALIFDNKHTNYTMEHIRVGWEQLLTTIARTINEVENQILTRDAKGISQEQMNEFRASFNHFDRKKTGMMDTDDFRACLISMGYNMGEAEFARIMSIVDPNRLGVVTFQAFIDFMSRETADTDTADQVMASFKILAGDKNYITMDELRRELPPDQAEYCIARMAPYTGPDSVPGALDYMSFSTALYGESDL

SEQ ID NO: 1520 - protein, 914 aa, Homo sapiens
  Payload ID: 440;
  Gene Symbol: ACTN1;
  Gene Name: actinin, alpha 1;
  Uniprot ID:  P12814;
  ENSP ID: ENSP00000377941
MDHYDSQQTNDYMQPEEDWDRDLLLDPAWEKQQRKTFTAWCNSHLRKAGTQIENIEEDFRDGLKLMLLLEVISGERLAKPERGKMRVHKISNVNKALDFIASKGVKLVSIGAEEIVDGNVKMTLGMIWTIILRFAIQDISVEETSAKEGLLLWCQRKTAPYKNVNIQNFHISWKDGLGFCALIHRHRPELIDYGKLRKDDPLTNLNTAFDVAEKYLDIPKMLDAEDIVGTARPDEKAIMTYVSSFYHAFSGAQKAETAANRICKVLAVNQENEQLMEDYEKLASDLLEWIRRTIPWLENRVPENTMHAMQQKLEDFRDYRRLHKPPKVQEKCQLEINFNTLQTKLRLSNRPAFMPSEGRMVSDINNAWGCLEQVEKGYEEWLLNEIRRLERLDHLAEKFRQKASIHEAWTDGKEAMLRQKDYETATLSEIKALLKKHEAFESDLAAHQDRVEQIAAIAQELNELDYYDSPSVNARCQKICDQWDNLGALTQKRREALERTEKLLETIDQLYLEYAKRAAPFNNWMEGAMEDLQDTFIVHTIEEIQGLTTAHEQFKATLPDADKERLAILGIHNEVSKIVQTYHVNMAGTNPYTTITPQEINGKWDHVRQLVPRRDQALTEEHARQQHNERLRKQFGAQANVIGPWIQTKMEEIGRISIEMHGTLEDQLSHLRQYEKSIVNYKPKIDQLEGDHQLIQEALIFDNKHTNYTMEHIRVGWEQLLTTIARTINEVENQILTRDAKGISQEQMNEFRASFNHFDRDHSGTLGPEEFKACLISLGYDIGNDPQKKTGMMDTDDFRACLISMGYNMGEAEFARIMSIVDPNRLGVVTFQAFIDFMSRETADTDTADQVMASFKILAGDKNYITMDELRRELPPDQAEYCIARMAPYTGPDSVPGALDYMSFSTALYGESDL

SEQ ID NO: 1521 - protein, 887 aa, Homo sapiens
  Payload ID: 440;
  Gene Symbol: ACTN1;
  Gene Name: actinin, alpha 1;
  Uniprot ID:  P12814;
  ENSP ID: ENSP00000414272
MDHYDSQQTNDYMQPEEDWDRDLLLDPAWEKQQRKTFTAWCNSHLRKAGTQIENIEEDFRDGLKLMLLLEVISGERLAKPERGKMRVHKISNVNKALDFIASKGVKLVSIGAEEIVDGNVKMTLGMIWTIILRFAIQDISVEETSAKEGLLLWCQRKTAPYKNVNIQNFHISWKDGLGFCALIHRHRPELIDYGKLRKDDPLTNLNTAFDVAEKYLDIPKMLDAEDIVGTARPDEKAIMTYVSSFYHAFSGAQKAETAANRICKVLAVNQENEQLMEDYEKLASDLLEWIRRTIPWLENRVPENTMHAMQQKLEDFRDYRRLHKPPKVQEKCQLEINFNTLQTKLRLSNRPAFMPSEGRMVSDINNAWGCLEQVEKGYEEWLLNEIRRLERLDHLAEKFRQKASIHEAWTDGKEAMLRQKDYETATLSEIKALLKKHEAFESDLAAHQDRVEQIAAIAQELNELDYYDSPSVNARCQKICDQWDNLGALTQKRREALERTEKLLETIDQLYLEYAKRAAPFNNWMEGAMEDLQDTFIVHTIEEIQGLTTAHEQFKATLPDADKERLAILGIHNEVSKIVQTYHVNMAGTNPYTTITPQEINGKWDHVRQLVPRRDQALTEEHARQQHNERLRKQFGAQANVIGPWIQTKMEEIGRISIEMHGTLEDQLSHLRQYEKSIVNYKPKIDQLEGDHQLIQEALIFDNKHTNYTMEHIRVGWEQLLTTIARTINEVENQILTRDAKGISQEQMNEFRASFNHFDRKKTGMMDTDDFRACLISMGYNMGEAEFARIMSIVDPNRLGVVTFQAFIDFMSRETADTDTADQVMASFKILAGDKNYITMDELRRELPPDQAEYCIARMAPYTGPDSVPGALDYMSFSTALYGESDL

SEQ ID NO: 1522 - protein, 930 aa, Homo sapiens
  Payload ID: 440;
  Gene Symbol: ACTN1;
  Gene Name: actinin, alpha 1;
  Uniprot ID:  P12814;
  ENSP ID: ENSP00000439828
MDHYDSQQTNDYMQPEEDWDRDLLLDPAWEKQQRKTFTAWCNSHLRKAGTQIENIEEDFRDGLKLMLLLEVISGERLAKPERGKMRVHKISNVNKALDFIASKGVKLVSIGAEEIVDGNVKMTLGMIWTIILRFAIQDISVEETSAKEGLLLWCQRKTAPYKNVNIQNFHISWKDGLGFCALIHRHRPELIDYGKLRKDDPLTNLNTAFDVAEKYLDIPKMLDAEDIVGTARPDEKAIMTYVSSFYHAFSGAQKAETAANRICKVLAVNQENEQLMEDYEKLASDLLEWIRRTIPWLENRVPENTMHAMQQKLEDFRDYRRLHKPPKVQEKCQLEINFNTLQTKLRLSNRPAFMPSEGRMVSDINNAWGCLEQVEKGYEEWLLNEIRRLERLDHLAEKFRQKASIHEAWTDGKEAMLRQKDYETATLSEIKALLKKHEAFESDLAAHQDRVEQIAAIAQELNELDYYDSPSVNARCQKICDQWDNLGALTQKRREALERTEKLLETIDQLYLEYAKRAAPFNNWMEGAMEDLQDTFIVHTIEEIQGLTTAHEQFKATLPDADKERLAILGIHNEVSKIVQTYHVNMAGTNPYTTITPQEINGKWDHVRQLVPRRDQALTEEHARQQHNERLRKQFGAQANVIGPWIQTKMEEIGRISIEMHGTLEDQLSHLRQYEKSIVNYKPKIDQLEGDHQLIQEALIFDNKHTNYTMEHIRVGWEQLLTTIARTINEVENQILTRDAKGISQEQMNEFRASFNHFDRKKTGMMDTDDFRACLISMGYNMGEAEFARIMSIVDPNRLGVVTFQAFIDFMSRETADTDTADQVMASFKILAGDKLQEGGKMQTAHAAFTPPGFAAVSGRAALRLLDFAAFLTTLSSQNYITMDELRRELPPDQAEYCIARMAPYTGPDSVPGALDYMSFSTALYGESDL

SEQ ID NO: 1523 - protein, 297 aa, Homo sapiens
  Payload ID: 440;
  Gene Symbol: ACTN1;
  Gene Name: actinin, alpha 1;
  ENSP ID: ENSP00000444422
DGKEAMLRQKDYETATLSEIKALLKKHEAFESDLAAHQDRVEQIAAIAQELNELDYYDSPSVNARCQKICDQWDNLGALTQKRREALERTEKLLETIDQLYLEYAKRAAPFNNWMEGAMEDLQDTFIVHTIEEIQGLTTAHEQFKATLPDADKERLAILGIHNEVSKIVQTYHVNMAGTNPYTTITPQEINGKWDHLSHLRQYEKSIVNYKPKIDQLEGDHQLIQEALIFDNKHTNYTMEHIRVGWEQLLTTIARTINEVENQILTRDAKGISQEQMNEFRASFNHFDRDHSGTLGP

SEQ ID NO: 1524 - protein, 85 aa, Homo sapiens
  Payload ID: 440;
  Gene Symbol: ACTN1;
  Gene Name: actinin, alpha 1;
  ENSP ID: ENSP00000450618
MLLLEVISGERLAKPERGKMRVHKISNVNKALDFIASKGVKLVSIGAEEIVDGNVKMTLGMIWTIILRFAIQDISVEETSAKEGL

SEQ ID NO: 1525 - protein, 207 aa, Homo sapiens
  Payload ID: 440;
  Gene Symbol: ACTN1;
  Gene Name: actinin, alpha 1;
  ENSP ID: ENSP00000450625
  MOD_RES (1)..(1): Any amino acid
XEKLLETIDQLYLEYAKRAAPFNNWMEGAMEDLQDTFIVHTIEEIQVRQLVPRRDQALTEEHARQQHNERLRKQFGAQANVIGPWIQTKMEEIGRISIEMHGTLEDQLSHLRQYEKSIVNYKPKIDQLEGDHQLIQEALIFDNKHTNYTMEHIRVGWEQLLTTIARTINEVENQILTRDAKGISQEQMNEFRASFNHFDRDHSGTLG

SEQ ID NO: 1526 - protein, 260 aa, Homo sapiens
  Payload ID: 440;
  Gene Symbol: ACTN1;
  Gene Name: actinin, alpha 1;
  ENSP ID: ENSP00000450764
MGLRYVLPLRPPGKTFTAWCNSHLRKAGTQIENIEEDFRDGLKLMLLLEVISGERLAKPERGKMRVHKISNVNKALDFIASKGVKLVSIGAEEIVDGNVKMTLGMIWTIILRFAIQDISVEETSAKEGLLLWCQRKTAPYKNVNIQNFHISWKDGLGFCALIHRHRPELIDYGKLRKDDPLTNLNTAFDVAEKYLDIPKMLDAEDIVGTARPDEKAIMTYVSSFYHAFSGAQKAETAANRICKVLAVNQENEQLMEDYEK

SEQ ID NO: 1527 - protein, 238 aa, Homo sapiens
  Payload ID: 440;
  Gene Symbol: ACTN1;
  Gene Name: actinin, alpha 1;
  ENSP ID: ENSP00000450903
MLLLEVISGERLAKPERGKMRVHKISNVNKALDFIASKGVKLVSIGAEEIVDGNVKMTLGMIWTIILRFAIQDISVEETSAKEGLLLWCQRKTAPYKNVNIQNFHISWKDGLGFCALIHRHRPELIDYGKLRKDDPLTNLNTAFDVAEKYLDIPKMLDAEDIVGTARPDEKAIMTYVSSFYHAFSGAQKAETAANRICKVLAVNQENEQLMEDYEKLASDLLEWIRRTIPWLENRVPE

SEQ ID NO: 1528 - protein, 144 aa, Homo sapiens
  Payload ID: 440;
  Gene Symbol: ACTN1;
  Gene Name: actinin, alpha 1;
  ENSP ID: ENSP00000450925
MLLLEVISGERLAKPERGKMRVHKISNVNKALDFIASKGVKLVSIGAEEIVDGNVKMTLGMIWTIILRFAIQDISVEETSAKEGLLLWCQRKTAPYKNVNIQNFHISWKDGLGFCALIHRHRPELIDYGKLRKDDPLTNLNTAF

SEQ ID NO: 1529 - protein, 72 aa, Homo sapiens
  Payload ID: 440;
  Gene Symbol: ACTN1;
  Gene Name: actinin, alpha 1;
  ENSP ID: ENSP00000451086
MGPGHSGQWQEEVRNHSWWWGEGASTLPLLPACATFTAWCNSHLRKAGTQIENIEEDFRDGLKLMLLLEVIS

SEQ ID NO: 1530 - protein, 251 aa, Homo sapiens
  Payload ID: 440;
  Gene Symbol: ACTN1;
  Gene Name: actinin, alpha 1;
  ENSP ID: ENSP00000452254
  MOD_RES (1)..(1): Any amino acid
XQALTEEHARQQHNERLRKQFGAQANVIGPWIQTKMEEIGRISIEMHGTLEDQLSHLRQYEKSIVNYKPKIDQLEGDHQLIQEALIFDNKHTNYTMEHIRVGWEQLLTTIARTINEVENQILTRDAKGISQEQMNEFRASFNHFDRGEAEFARIMSIVDPNRLGVVTFQAFIDFMSRETADTDTADQVMASFKILAGDKNYITMDELRRELPPDQAEYCIARMAPYTGPDSVPGALDYMSFSTALYGESDL

SEQ ID NO: 1531 - protein, 126 aa, Homo sapiens
  Payload ID: 440;
  Gene Symbol: ACTN1;
  Gene Name: actinin, alpha 1;
  ENSP ID: ENSP00000452423
MGPGHSGQWQEETFTAWCNSHLRKAGTQIENIEEDFRDGLKLMLLLEVISGERLAKPERGKMRVHKISNVNKALDFIASKGVKLVSIGAEEIVDGNVKMTLGMIWTIILRFAIQDISVEETSAKEG

SEQ ID NO: 1532 - protein, 894 aa, Homo sapiens
  Payload ID: 441;
  Gene Symbol: ACTN2;
  Gene Name: actinin, alpha 2;
  Uniprot ID:  P35609;
  ENSP ID: ENSP00000355537
MNQIEPGVQYNYVYDEDEYMIQEEEWDRDLLLDPAWEKQQRKTFTAWCNSHLRKAGTQIENIEEDFRNGLKLMLLLEVISGERLPKPDRGKMRFHKIANVNKALDYIASKGVKLVSIGAEEIVDGNVKMTLGMIWTIILRFAIQDISVEETSAKEGLLLWCQRKTAPYRNVNIQNFHTSWKDGLGLCALIHRHRPDLIDYSKLNKDDPIGNINLAMEIAEKHLDIPKMLDAEDIVNTPKPDERAIMTYVSCFYHAFAGAEQAETAANRICKVLAVNQENERLMEEYERLASELLEWIRRTIPWLENRTPEKTMQAMQKKLEDFRDYRRKHKPPKVQEKCQLEINFNTLQTKLRISNRPAFMPSEGKMVSDIAGAWQRLEQAEKGYEEWLLNEIRRLERLEHLAEKFRQKASTHETWAYGKEQILLQKDYESASLTEVRALLRKHEAFESDLAAHQDRVEQIAAIAQELNELDYHDAVNVNDRCQKICDQWDRLGTLTQKRREALERMEKLLETIDQLHLEFAKRAAPFNNWMEGAMEDLQDMFIVHSIEEIQSLITAHEQFKATLPEADGERQSIMAIQNEVEKVIQSYNIRISSSNPYSTVTMDELRTKWDKVKQLVPIRDQSLQEELARQHANERLRRQFAAQANAIGPWIQNKMEEIARSSIQITGALEDQMNQLKQYEHNIINYKNNIDKLEGDHQLIQEALVFDNKHTNYTMEHIRVGWELLLTTIARTINEVETQILTRDAKGITQEQMNEFRASFNHFDRRKNGLMDHEDFRACLISMGYDLGEAEFARIMTLVDPNGQGTVTFQSFIDFMTRETADTDTAEQVIASFRILASDKPYILAEELRRELPPDQAQYCIKRMPAYSGPGSVPGALDYAAFSSALYGESDL

SEQ ID NO: 1533 - protein, 686 aa, Homo sapiens
  Payload ID: 441;
  Gene Symbol: ACTN2;
  Gene Name: actinin, alpha 2;
  ENSP ID: ENSP00000438384
MTYVSCFYHAFAGAEQVRQSLKAHSALWKDPPPESSTCSYQEMRRSSVNSSAMAETAANRICKVLAVNQENERLMEEYERLASELLEWIRRTIPWLENRTPEKTMQAMQKKLEDFRDYRRKHKPPKVQEKCQLEINFNTLQTKLRISNRPAFMPSEGKMVSDIAGAWQRLEQAEKGYEEWLLNEIRRLERLEHLAEKFRQKASTHETWAYGKEQILLQKDYESASLTEVRALLRKHEAFESDLAAHQDRVEQIAAIAQELNELDYHDAVNVNDRCQKICDQWDRLGTLTQKRREALERMEKLLETIDQLHLEFAKRAAPFNNWMEGAMEDLQDMFIVHSIEEIQSLITAHEQFKATLPEADGERQSIMAIQNEVEKVIQSYNIRISSSNPYSTVTMDELRTKWDKVKQLVPIRDQSLQEELARQHANERLRRQFAAQANAIGPWIQNKMEEIARSSIQITGALEDQMNQLKQYEHNIINYKNNIDKLEGDHQLIQEALVFDNKHTNYTMEHIRVGWELLLTTIARTINEVETQILTRDAKGITQEQMNEFRASFNHFDRRKNGLMDHEDFRACLISMGYDLGEAEFARIMTLVDPNGQGTVTFQSFIDFMTRETADTDTAEQVIASFRILASDKPYILAEELRRELPPDQAQYCIKRMPAYSGPGSVPGALDYAAFSSALYGESDL

SEQ ID NO: 1534 - protein, 894 aa, Homo sapiens
  Payload ID: 441;
  Gene Symbol: ACTN2;
  Gene Name: actinin, alpha 2;
  Uniprot ID:  P35609;
  ENSP ID: ENSP00000443495
MNQIEPGVQYNYVYDEDEYMIQEEEWDRDLLLDPAWEKQQRKTFTAWCNSHLRKAGTQIENIEEDFRNGLKLMLLLEVISGERLPKPDRGKMRFHKIANVNKALDYIASKGVKLVSIGAEEIVDGNVKMTLGMIWTIILRFAIQDISVEETSAKEGLLLWCQRKTAPYRNVNIQNFHTSWKDGLGLCALIHRHRPDLIDYSKLNKDDPIGNINLAMEIAEKHLDIPKMLDAEDLVYTARPDERAIMTYVSCYYHAFAGAQKAETAANRICKVLAVNQENERLMEEYERLASELLEWIRRTIPWLENRTPEKTMQAMQKKLEDFRDYRRKHKPPKVQEKCQLEINFNTLQTKLRISNRPAFMPSEGKMVSDIAGAWQRLEQAEKGYEEWLLNEIRRLERLEHLAEKFRQKASTHETWAYGKEQILLQKDYESASLTEVRALLRKHEAFESDLAAHQDRVEQIAAIAQELNELDYHDAVNVNDRCQKICDQWDRLGTLTQKRREALERMEKLLETIDQLHLEFAKRAAPFNNWMEGAMEDLQDMFIVHSIEEIQSLITAHEQFKATLPEADGERQSIMAIQNEVEKVIQSYNIRISSSNPYSTVTMDELRTKWDKVKQLVPIRDQSLQEELARQHANERLRRQFAAQANAIGPWIQNKMEEIARSSIQITGALEDQMNQLKQYEHNIINYKNNIDKLEGDHQLIQEALVFDNKHTNYTMEHIRVGWELLLTTIARTINEVETQILTRDAKGITQEQMNEFRASFNHFDRRKNGLMDHEDFRACLISMGYDLGEAEFARIMTLVDPNGQGTVTFQSFIDFMTRETADTDTAEQVIASFRILASDKPYILAEELRRELPPDQAQYCIKRMPAYSGPGSVPGALDYAAFSSALYGESDL

SEQ ID NO: 1535 - protein, 944 aa, Homo sapiens
  Payload ID: 442;
  Gene Symbol: ACTN3;
  Gene Name: actinin, alpha 3 ( gene/pseudogene);
  ENSP ID: ENSP00000422007
MGIGLCVPPARCWKRLTRSSRGQPLERPAATIIIGLSIVERSKQTQRGPVDFSRSHSAPAAEQECKPRISAARSTPAPPSPAVPGFRTTPCQTFTAWCNSHLRKAGTQIENIEEDFRNGLKLMLLLEVISGERLPRPDKGKMRFHKIANVNKALDFIASKGVKLVSIGAEEIVDGNLKMTLGMIWTIILRFAIQDISVEETSAKEGLLLWCQRKTAPYRNVNVQNFHTSWKDGLALCALIHRHRPDLIDYAKLRKDDPIGNLNTAFEVAEKYLDIPKMLDAEDIVNTPKPDEKAIMTYVSCFYHAFAGAEQAETAANRICKVLAVNQENEKLMEEYEKLASELLEWIRRTVPWLENRVGEPSMSAMQRKLEDFRDYRRLHKPPRIQEKCQLEINFNTLQTKLRLSHRPAFMPSEGKLVSDIANAWRGLEQVEKGYEDWLLSEIRRLQRLQHLAEKFRQKASLHEAWTRGKEEMLSQRDYDSALLQEVRALLRRHEAFESDLAAHQDRVEHIAALAQELNELDYHEAASVNSRCQAICDQWDNLGTLTQKRRDALERMEKLLETIDRLQLEFARRAAPFNNWLDGAVEDLQDVWLVHSVEETQSLLTAHDQFKATLPEADRERGAIMGIQGEIQKICQTYGLRPCSTNPYITLSPQDINTKWDMVRKLVPSCDQTLQEELARQQVNERLRRQFAAQANAIGPWIQAKVEEVGRLAAGLAGSLEEQMAGLRQQEQNIINYKTNIDRLEGDHQLLQESLVFDNKHTVYSMEHIRVGWEQLLTSIARTINEVENQVLTRDAKGLSQEQLNEFRASFNHFDRKQNGMMEPDDFRACLISMGYDLGEVEFARIMTMVDPNAAGVVTFQAFIDFMTRETAETDTTEQVVASFKILAGDKNYITPEELRRELPAKQAEYCIRRMVPYKGSGAPAGALDYVAFSSALYGESDL

SEQ ID NO: 1536 - protein, 72 aa, Homo sapiens
  Payload ID: 442;
  Gene Symbol: ACTN3;
  Gene Name: actinin, alpha 3 ( gene/pseudogene);
  ENSP ID: ENSP00000426236
MMMVMQPEGLGAGEGRFAGGGGGGEYMEQEEDWDRDLLLDPAWEKQQRKENESSERERDWPRMHSKSVAELS

SEQ ID NO: 1537 - protein, 901 aa, Homo sapiens
  Payload ID: 442;
  Gene Symbol: ACTN3;
  Gene Name: actinin, alpha 3 ( gene/pseudogene);
  Uniprot ID:  Q08043;
  ENSP ID: ENSP00000426797
MMMVMQPEGLGAGEGRFAGGGGGGEYMEQEEDWDRDLLLDPAWEKQQRKTFTAWCNSHLRKAGTQIENIEEDFRNGLKLMLLLEVISGERLPRPDKGKMRFHKIANVNKALDFIASKGVKLVSIGAEEIVDGNLKMTLGMIWTIILRFAIQDISVEETSAKEGLLLWCQRKTAPYRNVNVQNFHTSWKDGLALCALIHRHRPDLIDYAKLRKDDPIGNLNTAFEVAEKYLDIPKMLDAEDIVNTPKPDEKAIMTYVSCFYHAFAGAEQAETAANRICKVLAVNQENEKLMEEYEKLASELLEWIRRTVPWLENRVGEPSMSAMQRKLEDFRDYRRLHKPPRIQEKCQLEINFNTLQTKLRLSHRPAFMPSEGKLVSDIANAWRGLEQVEKGYEDWLLSEIRRLQRLQHLAEKFRQKASLHEAWTRGKEEMLSQRDYDSALLQEVRALLRRHEAFESDLAAHQDRVEHIAALAQELNELDYHEAASVNSRCQAICDQWDNLGTLTQKRRDALERMEKLLETIDRLQLEFARRAAPFNNWLDGAVEDLQDVWLVHSVEETQSLLTAHDQFKATLPEADRERGAIMGIQGEIQKICQTYGLRPCSTNPYITLSPQDINTKWDMVRKLVPSCDQTLQEELARQQVNERLRRQFAAQANAIGPWIQAKVEEVGRLAAGLAGSLEEQMAGLRQQEQNIINYKTNIDRLEGDHQLLQESLVFDNKHTVYSMEHIRVGWEQLLTSIARTINEVENQVLTRDAKGLSQEQLNEFRASFNHFDRKQNGMMEPDDFRACLISMGYDLGEVEFARIMTMVDPNAAGVVTFQAFIDFMTRETAETDTTEQVVASFKILAGDKNYITPEELRRELPAKQAEYCIRRMVPYKGSGAPAGALDYVAFSSALYGESDL

SEQ ID NO: 1538 - protein, 911 aa, Homo sapiens
  Payload ID: 443;
  Gene Symbol: ACTN4;
  Gene Name: actinin, alpha 4;
  Uniprot ID:  O43707;
  ENSP ID: ENSP00000252699
MVDYHAANQSYQYGPSSAGNGAGGGGSMGDYMAQEDDWDRDLLLDPAWEKQQRKTFTAWCNSHLRKAGTQIENIDEDFRDGLKLMLLLEVISGERLPKPERGKMRVHKINNVNKALDFIASKGVKLVSIGAEEIVDGNAKMTLGMIWTIILRFAIQDISVEETSAKEGLLLWCQRKTAPYKNVNVQNFHISWKDGLAFNALIHRHRPELIEYDKLRKDDPVTNLNNAFEVAEKYLDIPKMLDAEDIVNTARPDEKAIMTYVSSFYHAFSGAQKAETAANRICKVLAVNQENEHLMEDYEKLASDLLEWIRRTIPWLEDRVPQKTIQEMQQKLEDFRDYRRVHKPPKVQEKCQLEINFNTLQTKLRLSNRPAFMPSEGKMVSDINNGWQHLEQAEKGYEEWLLNEIRRLERLDHLAEKFRQKASIHEAWTDGKEAMLKHRDYETATLSDIKALIRKHEAFESDLAAHQDRVEQIAAIAQELNELDYYDSHNVNTRCQKICDQWDALGSLTHSRREALEKTEKQLEAIDQLHLEYAKRAAPFNNWMESAMEDLQDMFIVHTIEEIEGLISAHDQFKSTLPDADREREAILAIHKEAQRIAESNHIKLSGSNPYTTVTPQIINSKWEKVQQLVPKRDHALLEEQSKQQSNEHLRRQFASQANVVGPWIQTKMEEIGRISIEMNGTLEDQLSHLKQYERSIVDYKPNLDLLEQQHQLIQEALIFDNKHTNYTMEHIRVGWEQLLTTIARTINEVENQILTRDAKGISQEQMQEFRASFNHFDKDHGGALGPEEFKACLISLGYDVENDRQGEAEFNRIMSLVDPNHSGLVTFQAFIDFMSRETTDTDTADQVIASFKVLAGDKNFITAEELRRELPPDQAEYCIARMAPYQGPDAVPGALDYKSFSTALYGESDL

SEQ ID NO: 1539 - protein, 342 aa, Homo sapiens
  Payload ID: 443;
  Gene Symbol: ACTN4;
  Gene Name: actinin, alpha 4;
  ENSP ID: ENSP00000398393
GLISAHDQFKSTLPDADREREAILAIHKEAQRIAESNHIKLSGSNPYTTVTPQIINSKWEKVQQLVPKRDHALLEEQSKQQSNEHLRRQFASQANVVGPWIQTKMEEIGRISIEMNGTLEDQLSHLKQYERSIVDYKPNLDLLEQQHQLIQEALIFDNKHTNYTMEHIRVGWEQLLTTIARTINEVENQILTRDAKGISQEQMQEFRASFNHFDKKQTGSMDSDDFRALLISTGYSLGEAEFNRIMSLVDPNHSGLVTFQAFIDFMSRETTDTDTADQVIASFKVLAGDKNFITAEELRRELPPDQAEYCIARMAPYQGPDAVPGALDYKSFSTALYGESDL

SEQ ID NO: 1540 - protein, 521 aa, Homo sapiens
  Payload ID: 443;
  Gene Symbol: ACTN4;
  Gene Name: actinin, alpha 4;
  ENSP ID: ENSP00000411187
MVDYHAANQSYQYGPSSAGNGAGGGGSMGDYMAQEDDWDRDLLLDPAWEKQQRKTFTAWCNSHLRKAGTQIENIDEDFRDGLKLMLLLEVIELDYYDSHNVNTRCQKICDQWDALGSLTHSRREALEKTEKQLEAIDQLHLEYAKRAAPFNNWMESAMEDLQDMFIVHTIEEIEGLISAHDQFKSTLPDADREREAILAIHKEAQRIAESNHIKLSGSNPYTTVTPQIINSKWEKVQQLVPKRDHALLEEQSKQQSNEHLRRQFASQANVVGPWIQTKMEEIGRISIEMNGTLEDQLSHLKQYERSIVDYKPNLDLLEQQHQLIQEALIFDNKHTNYTMEHIRVGWEQLLTTIARTINEVENQILTRDAKGISQEQMQEFRASFNHFDKDHGGALGPEEFKACLISLGYDVENDRQGEAEFNRIMSLVDPNHSGLVTFQAFIDFMSRETTDTDTADQVIASFKVLAGDKNFITAEELRRELPPDQAEYCIARMAPYQGPDAVPGALDYKSFSTALYGESDL

SEQ ID NO: 1541 - protein, 692 aa, Homo sapiens
  Payload ID: 443;
  Gene Symbol: ACTN4;
  Gene Name: actinin, alpha 4;
  Uniprot ID:  O43707;
  ENSP ID: ENSP00000439497
MVDYHAANQSYQYGPSSAGNGAGGGGSMGDYMAQEDDWDRDLLLDPAWEKQQRKAETAANRICKVLAVNQENEHLMEDYEKLASDLLEWIRRTIPWLEDRVPQKTIQEMQQKLEDFRDYRRVHKPPKVQEKCQLEINFNTLQTKLRLSNRPAFMPSEGKMVSDINNGWQHLEQAEKGYEEWLLNEIRRLERLDHLAEKFRQKASIHEAWTDGKEAMLKHRDYETATLSDIKALIRKHEAFESDLAAHQDRVEQIAAIAQELNELDYYDSHNVNTRCQKICDQWDALGSLTHSRREALEKTEKQLEAIDQLHLEYAKRAAPFNNWMESAMEDLQDMFIVHTIEEIEGLISAHDQFKSTLPDADREREAILAIHKEAQRIAESNHIKLSGSNPYTTVTPQIINSKWEKVQQLVPKRDHALLEEQSKQQSNEHLRRQFASQANVVGPWIQTKMEEIGRISIEMNGTLEDQLSHLKQYERSIVDYKPNLDLLEQQHQLIQEALIFDNKHTNYTMEHIRVGWEQLLTTIARTINEVENQILTRDAKGISQEQMQEFRASFNHFDKDHGGALGPEEFKACLISLGYDVENDRQGEAEFNRIMSLVDPNHSGLVTFQAFIDFMSRETTDTDTADQVIASFKVLAGDKNFITAEELRRELPPDQAEYCIARMAPYQGPDAVPGALDYKSFSTALYGESDL

SEQ ID NO: 1542 - protein, 182 aa, Homo sapiens
  Payload ID: 443;
  Gene Symbol: ACTN4;
  Gene Name: actinin, alpha 4;
  ENSP ID: ENSP00000465176
ALIHRHRPELIEYDKLRKDDPVTNLNNAFEVAEKYLDIPKMLDAEDIVGTLRPDEKAIMTYVSCFYHAFSGAQKAETAANRICKVLAVNQENEHLMEDYEKLASDLLEWIRRTIPWLEDRVPQKTIQEMQQKLEDFRDYRRVHKPPKVQEKCQLEINFNTLQTKLRLSNRPAFMPSEGKMVS

SEQ ID NO: 1543 - protein, 105 aa, Homo sapiens
  Payload ID: 443;
  Gene Symbol: ACTN4;
  Gene Name: actinin, alpha 4;
  ENSP ID: ENSP00000467190
  MOD_RES (1)..(1): Any amino acid
XGGMVDYHAANQSYQYGPSSAGNGAGGGGSMGDYMAQEDDWDRDLLLDPAWEKQQRKTFTAWCNSHLRKAGTQIENIDEDFRDGLKLMLLLEVISEELSWQTGPP

SEQ ID NO: 1544 - protein, 692 aa, Homo sapiens; identical to SEQ ID NO: 1541
  Payload ID: 443;
  Gene Symbol: ACTN4;
  Gene Name: actinin, alpha 4;
  ENSP ID: ENSP00000488962

SEQ ID NO: 1545 - protein, 105 aa, Homo sapiens; identical to SEQ ID NO: 1543
  Payload ID: 443;
  Gene Symbol: ACTN4;
  Gene Name: actinin, alpha 4;
  ENSP ID: ENSP00000489202
  MOD_RES (1)..(1): Any amino acid

SEQ ID NO: 1546 - protein, 911 aa, Homo sapiens; identical to SEQ ID NO: 1538
  Payload ID: 443;
  Gene Symbol: ACTN4;
  Gene Name: actinin, alpha 4;
  ENSP ID: ENSP00000489220

SEQ ID NO: 1547 - protein, 342 aa, Homo sapiens; identical to SEQ ID NO: 1539
  Payload ID: 443;
  Gene Symbol: ACTN4;
  Gene Name: actinin, alpha 4;
  ENSP ID: ENSP00000489448

SEQ ID NO: 1548 - protein, 521 aa, Homo sapiens; identical to SEQ ID NO: 1540
  Payload ID: 443;
  Gene Symbol: ACTN4;
  Gene Name: actinin, alpha 4;
  ENSP ID: ENSP00000489474

SEQ ID NO: 1549 - protein, 182 aa, Homo sapiens; identical to SEQ ID NO: 1542
  Payload ID: 443;
  Gene Symbol: ACTN4;
  Gene Name: actinin, alpha 4;
  ENSP ID: ENSP00000489516

SEQ ID NO: 1550 - protein, 245 aa, Homo sapiens
  Payload ID: 444;
  Gene Symbol: ACTL10;
  Gene Name: actin-like 10;
  Uniprot ID:  Q5JWF8;
  ENSP ID: ENSP00000329647
MASTALLALCSTGAFSGLAVEAGAGVCHATPIYAGHSWHQATFRLNVAGSTLSRYLRDLLVAANPDLLQQALPRKAITHLKKRSCYVSLDFEGDLRDPARHHPASFSVGNGCCVCLSSERFRCPEPIFQPGLLGQAEQGLPALAFRALQKMPKTLRTRLADTVVLAGGSTLFPGFAERLDKELEAQCRRHGYAALRPHLVAKHGRGMAVWTGGSMVASLHSFQRRWITRAMYQECGSRLLYDVFN

SEQ ID NO: 1551 - protein, 387 aa, Homo sapiens
  Payload ID: 445;
  Gene Symbol: ACTL6A;
  Gene Name: actin-like 6A;
  Uniprot ID:  O96019;
  ENSP ID: ENSP00000376430
MVVERDDGSTLMEIDGDKGKQGGPTYYIDTNALRVPRENMEAISPLKNGMVEDWDSFQAILDHTYKMHVKSEASLHPVLMSEAPWNTRAKREKLTELMFEHYNIPAFFLCKTAVLTAFANGRSTGLILDSGATHTTAIPVHDGYVLQQGIVKSPLAGDFITMQCRELFQEMNIELVPPYMIASKEAVREGSPANWKRKEKLPQVTRSWHNYMCNCVIQDFQASVLQVSDSTYDEQVAAQMPTVHYEFPNGYNCDFGAERLKIPEGLFDPSNVKGLSGNTMLGVSHVVTTSVGMCDIDIRPGLYGSVIVAGGNTLIQSFTDRLNRELSQKTPPSMRLKLIANNTTVERRFSSWIGGSILASLGTFQQMWISKQEYEEGGKQCVERKCP

SEQ ID NO: 1552 - protein, 387 aa, Homo sapiens; identical to SEQ ID NO: 1551
  Payload ID: 445;
  Gene Symbol: ACTL6A;
  Gene Name: actin-like 6A;
  Uniprot ID:  O96019;
  ENSP ID: ENSP00000394014

SEQ ID NO: 1553 - protein, 429 aa, Homo sapiens
  Payload ID: 445;
  Gene Symbol: ACTL6A;
  Gene Name: actin-like 6A;
  Uniprot ID:  O96019;
  ENSP ID: ENSP00000397552
MSGGVYGGDEVGALVFDIGSYTVRAGYAGEDCPKVDFPTAIGMVVERDDGSTLMEIDGDKGKQGGPTYYIDTNALRVPRENMEAISPLKNGMVEDWDSFQAILDHTYKMHVKSEASLHPVLMSEAPWNTRAKREKLTELMFEHYNIPAFFLCKTAVLTAFANGRSTGLILDSGATHTTAIPVHDGYVLQQGIVKSPLAGDFITMQCRELFQEMNIELVPPYMIASKEAVREGSPANWKRKEKLPQVTRSWHNYMCNCVIQDFQASVLQVSDSTYDEQVAAQMPTVHYEFPNGYNCDFGAERLKIPEGLFDPSNVKGLSGNTMLGVSHVVTTSVGMCDIDIRPGLYGSVIVAGGNTLIQSFTDRLNRELSQKTPPSMRLKLIANNTTVERRFSSWIGGSILASLGTFQQMWISKQEYEEGGKQCVERKCP

SEQ ID NO: 1554 - protein, 50 aa, Homo sapiens
  Payload ID: 445;
  Gene Symbol: ACTL6A;
  Gene Name: actin-like 6A;
  ENSP ID: ENSP00000420153
MVVERDDGSTLMEIDGDKGKQGGPTYYIDTNALRVPRENMEAISPLKNGM

SEQ ID NO: 1555 - protein, 161 aa, Homo sapiens
  Payload ID: 445;
  Gene Symbol: ACTL6A;
  Gene Name: actin-like 6A;
  ENSP ID: ENSP00000420694
  MOD_RES (1)..(1): Any amino acid
XFSDEVGALVFDIGSYTVRAGYAGEDCPKVDFPTAIGMVVERDDGSTLMEIDGDKGKQGGPTYYIDTNALRVPRENMEAISPLKNGMVEDWDSFQAILDHTYKMHVKSEASLHPVLMSEAPWNTRAKREKLTELMFEHYNIPAFFLCKTAVLTAFIHHLLH

SEQ ID NO: 1556 - protein, 426 aa, Homo sapiens
  Payload ID: 446;
  Gene Symbol: ACTL6B;
  Gene Name: actin-like 6B;
  Uniprot ID:  O94805;
  ENSP ID: ENSP00000160382
MSGGVYGGDEVGALVFDIGSFSVRAGYAGEDCPKADFPTTVGLLAAEEGGGLELEGDKEKKGKIFHIDTNALHVPRDGAEVMSPLKNGMIEDWECFRAILDHTYSKHVKSEPNLHPVLMSEAPWNTRAKREKLTELMFEQYNIPAFFLCKTAVLTAFANGRSTGLVLDSGATHTTAIPVHDGYVLQQGIVKSPLAGDFISMQCRELFQEMAIDIIPPYMIAAKEPVREGAPPNWKKKEKLPQVSKSWHNYMCNEVIQDFQASVLQVSDSPYDEQVAAQMPTVHYEMPNGYNTDYGAERLRIPEGLFDPSNVKGLSGNTMLGVGHVVTTSIGMCDIDIRPGLYGSVIVTGGNTLLQGFTDRLNRELSQKTPPSMRLKLIASNSTMERKFSPWIGGSILASLGTFQQMWISKQEYEEGGKQCVERKCP

SEQ ID NO: 1557 - protein, 66 aa, Homo sapiens
  Payload ID: 446;
  Gene Symbol: ACTL6B;
  Gene Name: actin-like 6B;
  ENSP ID: ENSP00000420151
MSPLKNGMIEDWECFRAILDHTYSKHVKSEPNLHPVLMSEAPWNTRAKREKLTELMFEQYNIPAFF

SEQ ID NO: 1558 - protein, 435 aa, Homo sapiens
  Payload ID: 447;
  Gene Symbol: ACTL7A;
  Gene Name: actin-like 7A;
  Uniprot ID:  Q9Y615;
  ENSP ID: ENSP00000334300
MWAPPAAIMGDGPTKKVGNQAPLQTQALQTASLRDGPAKRAVWVRHTSSEPQEPTESKAAKERPKQEVTKAVVVDLGTGYCKCGFAGLPRPTHKISTTVGKPYMETAKTGDNRKETFVGQELNNTNVHLKLVNPLRHGIIVDWDTVQDIWEYLFRQEMKIAPEEHAVLVSDPPLSPHTNREKYAEMLFEAFNTPAMHIAYQSRLSMYSYGRTSGLVVEVGHGVSYVVPIYEGYPLPSITGRLDYAGSDLTAYLLGLLNSAGNEFTQDQMGIVEDIKKKCCFVALDPIEEKKVPLSEHTIRYVLPDGKEIQLCQERFLCSEMFFKPSLIKSMQLGLHTQTVSCLNKCDIALKRDLMGNILLCGGSTMLSGFPNRLQKELSSMCPNDTPQVNVLPERDSAVWTGGSILASLQGFQPLWVHRFEYEEHGPFFLYRRCF

SEQ ID NO: 1559 - protein, 415 aa, Homo sapiens
  Payload ID: 448;
  Gene Symbol: ACTL7B;
  Gene Name: actin-like 7B;
  Uniprot ID:  Q9Y614;
  ENSP ID: ENSP00000363799
MATRNSPMPLGTAQGDPGEAGTRPGPDASLRDTGAATQLKMKPRKVHKIKAVIIDLGSQYCKCGYAGEPRPTYFISSTVGKRCPEAADAGDTRKWTLVGHELLNTEAPLKLVNPLKHGIVVDWDCVQDIWEYIFRTAMKILPEEHAVLVSDPPLSPSSNREKYAELMFETFGIPAMHVTSQSLLSIYSYGKTSGLVVESGHGVSHVVPISEGDVLPGLTSRADYAGGDLTNYLMQLLNEAGHAFTDDHLHIIEHIKKKCCYAAFLPEEELGLVPEELRVDYELPDGKLITIGQERFRCSEMLFQPSLAGSTQPGLPELTAACLGRCQDTGFKEEMAANVLLCGGCTMLDGFPERFQRELSLLCPGDSPAVAAAPERKTSVWTGGSILASLQAFQQLWVSKEEFEERGSVAIYSKC

SEQ ID NO: 1560 - protein, 366 aa, Homo sapiens
  Payload ID: 449;
  Gene Symbol: ACTL8;
  Gene Name: actin-like 8;
  Uniprot ID:  Q9H568;
  ENSP ID: ENSP00000364555
MAARTVIIDHGSGFLKAGTAGWNEPQMVFPNIVNYLPCKENPGPSYARRRVSLGIDICHPDTFSYPIERGRILNWEGVQYLWSFVLENHRREQEVPPVIITETPLREPADRKKMLEILFELLHVPSVLLADQLQMSLYASGLLTGVVVDSGYGLTRVQPFHQGRPLPASGKTLEFAGQDLSAYLLKSLFKEDCDRRCLFQLETVAVTQMNKCYVPQNLGEALDFRERQQSALDESNTYQLPDGSRVELTPMQRVAPEMFFSPQVFEQPGPSIPRAIVESVESCEISLRPLLVSHVMACGGNTLYPGFTKRLFRELMGDHVSSTKATVWEGSNRNFSVWLGASVVAHLSTYQSEWMSREEYGEHMRM

SEQ ID NO: 1561 - protein, 366 aa, Homo sapiens; identical to SEQ ID NO: 1560
  Payload ID: 449;
  Gene Symbol: ACTL8;
  Gene Name: actin-like 8;
  Uniprot ID:  Q9H568;
  ENSP ID: ENSP00000481590

SEQ ID NO: 1562 - protein, 416 aa, Homo sapiens
  Payload ID: 450;
  Gene Symbol: ACTL9;
  Gene Name: actin-like 9;
  Uniprot ID:  Q8TC94;
  ENSP ID: ENSP00000316674
MDASRPKSSESQSSLEAPRPGPNPSPNVVNKPLQRDSPGMVADRLPPKTGAVVIDMGTGTCKVGFAGQASPTYTVATILGCQPKKPATSGQSGLQTFIGEAARVLPELTLVQPLRSGIVVDWDAAELIWRHLLEHDLRVATHDHPLLFSDPPFSPATNREKLVEVAFESLRSPAMYVASQSVLSVYAHGRVSGLVVDTGHGVTYTVPVFQGYNLLHATERLDLAGNNLTAFLAEMLLQAGLPLGQQDLDLVENIKHHYCYVASDFQKEQARPEQEYKRTLKLPDGRTVTLGKELFQCPELLFNPPEVPGLSPVGLSTMAKQSLRKLSLEMRADLAQNVLLCGGSSLFTGFEGRFRAELLRALPAETHVVVAAQPTRNFSVWIGGSILASLRAFQSCWVLREQYEEQGPYIVYRKCY

SEQ ID NO: 1563 - protein, 416 aa, Homo sapiens; identical to SEQ ID NO: 1562
  Payload ID: 450;
  Gene Symbol: ACTL9;
  Gene Name: actin-like 9;
  Uniprot ID:  Q8TC94;
  ENSP ID: ENSP00000482603

SEQ ID NO: 1564 - protein, 417 aa, Homo sapiens
  Payload ID: 451;
  Gene Symbol: ACTR10;
  Gene Name: actin-related prt 10 homolog (S. cerevisiae);
  Uniprot ID:  Q9NZ32;
  ENSP ID: ENSP00000254286
MPLYEGLGSGGEKTAVVIDLGEAFTKCGFAGETGPRCIIPSVIKRAGMPKPVRVVQYNINTEELYSYLKEFIHILYFRHLLVNPRDRRVVIIESVLCPSHFRETLTRVLFKYFEVPSVLLAPSHLMALLTLGINSAMVLDCGYRESLVLPIYEGIPVLNCWGALPLGGKALHKELETQLLEQCTVDTSVAKEQSLPSVMGSVPEGVLEDIKARTCFVSDLKRGLKIQAAKFNIDGNNERPSPPPNVDYPLDGEKILHILGSIRDSVVEILFEQDNEEQSVATLILDSLIQCPIDTRKQLAENLVVIGGTSMLPGFLHRLLAEIRYLVEKPKYKKALGTKTFRIHTPPAKANCVAWLGGAIFGALQDILGSRSVSKEYYNQTGRIPDWCSLNNPPLEMMFDVGKTQPPLMKRAFSTEK

SEQ ID NO: 1565 - protein, 185 aa, Homo sapiens
  Payload ID: 451;
  Gene Symbol: ACTR10;
  Gene Name: actin-related prt 10 homolog (S. cerevisiae);
  ENSP ID: ENSP00000438183
MPLYEGLGSGGEKTAVVIDLGEAFTKCGFAGETGPRCIIPSVIKRAGMPKPVRVVQYNINTEELYSYLKEFIHILYFRHLLVNPRDRRVVIIESVLCPSHFRETLTRVLFKYFEVPSVLLAPSHLMALLTLGINSAMVLDCGYRESLVLPISFLNPSSKLLGSTTPRRKSSSQRVGNSTIGTMYC

SEQ ID NO: 1566 - protein, 126 aa, Homo sapiens
  Payload ID: 451;
  Gene Symbol: ACTR10;
  Gene Name: actin-related prt 10 homolog (S. cerevisiae);
  ENSP ID: ENSP00000450796
MPLYEGLGSGGEKTAVVIDLGEAFTKCGFAGETGPRCIIPSVIKRAGMPKPVRVVQYNINTEELYSYLKEFIHILYFRHLLVNPRDRRVVIIESVLCPSHFRETLTRVLFKYFERVGNSTIGTMYC

SEQ ID NO: 1567 - protein, 149 aa, Homo sapiens
  Payload ID: 451;
  Gene Symbol: ACTR10;
  Gene Name: actin-related prt 10 homolog (S. cerevisiae);
  ENSP ID: ENSP00000451289
  MOD_RES (1)..(1): Any amino acid
XSDLKRGLKIQAAKFNIDGNNECPIDTRKQLAENLVVIGGTSMLPGFLHRLLAEIRYLVEKPKYKKALGTKTFRIHTPPAKANCVAWLGGAIFGALQDILGSRSVSKEYYNQTGRIPDWCSLNNPPLEMMFDVGKTQPPLMKRAFSTEK

SEQ ID NO: 1568 - protein, 35 aa, Homo sapiens
  Payload ID: 451;
  Gene Symbol: ACTR10;
  Gene Name: actin-related prt 10 homolog (S. cerevisiae);
  ENSP ID: ENSP00000451336
  MOD_RES (1)..(1): Any amino acid
XRTCFVSDLKRGLKIQAAKFNIDGNNERFSCGNSF

SEQ ID NO: 1569 - protein, 43 aa, Homo sapiens
  Payload ID: 451;
  Gene Symbol: ACTR10;
  Gene Name: actin-related prt 10 homolog (S. cerevisiae);
  ENSP ID: ENSP00000451863
MPLYEGLGSGGEKTAVVIDLGEAFTNLSELFSIISIQKNYIPT

SEQ ID NO: 1570 - protein, 90 aa, Homo sapiens
  Payload ID: 451;
  Gene Symbol: ACTR10;
  Gene Name: actin-related prt 10 homolog (S. cerevisiae);
  ENSP ID: ENSP00000452135
MPLYEGLGSGGEKTAVVIDLGEAFTKCGFAGETGPRCIIPSVIKRAGMPKVLTLSPRLECSGTILAHCNLCLPATSTSWVQAVLPLQPPE

SEQ ID NO: 1571 - protein, 179 aa, Homo sapiens
  Payload ID: 451;
  Gene Symbol: ACTR10;
  Gene Name: actin-related prt 10 homolog (S. cerevisiae);
  ENSP ID: ENSP00000452586
MPLYEGLGSGGEKTAVVIDLGEAFTKCGFAGETGPRCIIPSVIKRAGMPKPVRVVQYNINTEELYSYLKEFIHILYFRHLLVNPRDRRVVIIESVLCPSHFRETLTRVLFKYFEVPSVLLAPSHLMALLTLGINSAMVLDCGYRESLVNPSSKLLGSTTPRRKSSSQRVGNSTIGTMYC

SEQ ID NO: 1572 - protein, 302 aa, Homo sapiens
  Payload ID: 451;
  Gene Symbol: ACTR10;
  Gene Name: actin-related prt 10 homolog (S. cerevisiae);
  ENSP ID: ENSP00000477173
  MOD_RES (1)..(1): Any amino acid
XPLYEGLGSGGEKTAVVIDLGEAFTKCGFAGETGPRCIIPSVIKRAGMPKPVRVVQYNINTEELYSYLKEFIHILYFRHLLVNPRDRRVVIIESVLCPSHFRETLTRVLFKYFEVPSVLLAPSHLMALLTLGINSAMVLDCGYRESLVLPIYEGIPVLNCWGALPLGGKALHKELETQLLEQCTVDTSVAKEQSLPSVMGSVPEGVLEDIKARTCFVSDLKRGLKIQAAKFNIDGNNERPSPPPNVDYPLDGEKILHILGSIRDSVVEILFEQDNEEQSVATLILDSLIQCCSCCPGWSAMA

SEQ ID NO: 1573 - protein, 226 aa, Homo sapiens
  Payload ID: 452;
  Gene Symbol: ARPIN;
  Gene Name: actin-related prt 2/3 complex inhibitor;
  Uniprot ID:  Q7Z6K5;
  ENSP ID: ENSP00000350075
MSRIYHDGALRNKAVQSVRLPGAWDPAAHQGGNGVLLEGELIDVSRHSILDTHGRKERYYVLYIRPSHIHRRKFDAKGNEIEPNFSATRKVNTGFLMSSYKVEAKGDTDRLTPEALKGLVNKPELLALTESLTPDHTVAFWMPESEMEVMELELGAGVRLKTRGDGPFLDSLAKLEAGTVTKCNFTGDGKTGASWTDNIMAQKCSKGAAAEIREQGDGAEDEEWDD

SEQ ID NO: 1574 - protein, 136 aa, Homo sapiens
  Payload ID: 452;
  Gene Symbol: ARPIN;
  Gene Name: actin-related prt 2/3 complex inhibitor;
  ENSP ID: ENSP00000453006
  MOD_RES (1)..(1): Any amino acid
XALKGLVNKPELLALTESLTPDHTVAFWMPESEMEVMELELGAGVRLKTRGDGPFLDSLAKLEAGTVTKCNFTGDGKTGASWTDNIMAQKCSKGAAAEIREQGDGAEDEEWVGTWCWCSCISWQEHGTYWLRLWVG

SEQ ID NO: 1575 - protein, 130 aa, Homo sapiens
  Payload ID: 452;
  Gene Symbol: ARPIN;
  Gene Name: actin-related prt 2/3 complex inhibitor;
  ENSP ID: ENSP00000453687
MSSYKVEAKGDTDRLTPEALKGLVNKPELLALTESLTPDHTVAFWMPESEMEVMELELGAGVRLKTRGDGPFLDSLAKLEAGTVTKCNFTGDGKTGASWTDNIMAQKCSKGAAAEIREQGDGAEDEEWDD

SEQ ID NO: 1576 - protein, 376 aa, Homo sapiens
  Payload ID: 453;
  Gene Symbol: ACTRT1;
  Gene Name: actin-related prt T1;
  Uniprot ID:  Q8TDG2;
  ENSP ID: ENSP00000360165
MFNPHALDVPAVIFDNGSGLCKAGLSGEIGPRHVISSVLGHCKFNVPLARLNQKYFVGQEALYKYEALHLHYPIERGLVTGWDDMEKLWKHLFERELGVKPSQQPVLMTEPSLNPREIREKLAEMMFETFSVPGFYLSNHAVAALYASACVTGLVVDSGDGVTCTVPIFEGYSLPHAVTKLCMAGRDITEHLTRLLFASGFNFPCILNKAVVNNIKEKLCYIALEPEKELRKSRGEVLGAYRLPDGHVIHFGDELYQVPEVLFAPDQLGIHSPGLSKMVSSSIMKCDTDIQNKLYADIVLSGGTTLLPGLEERLMKEVEQLASKGTPIKITASPDRCFSAWIGASIMTSMSSFKQMWVTSADFKEYGTSVVQRRCF

SEQ ID NO: 1577 - protein, 377 aa, Homo sapiens
  Payload ID: 454;
  Gene Symbol: ACTRT2;
  Gene Name: actin-related prt T2;
  Uniprot ID:  Q8TDY3;
  ENSP ID: ENSP00000367658
MFNPHALDSPAVIFDNGSGFCKAGLSGEFGPRHMVSSIVGHLKFQAPSAEANQKKYFVGEEALYKQEALQLHSPFERGLITGWDDVERLWKHLFEWELGVKPSDQPLLATEPSLNPRENREKMAEVMFENFGVPAFYLSDQAVLALYASACVTGLVVDSGDAVTCTVPIFEGYSLPHAVTKLHVAGRDITELLMQLLLASGHTFPCQLDKGLVDDIKKKLCYVALEPEKELSRRPEEVLREYKLPDGNIISLGDPLHQAPEALFVPQQLGSQSPGLSNMVSSSITKCDTDIQKILFGEIVLSGGTTLFHGLDDRLLKELEQLASKDTPIKITAPPDRWFSTWIGASIVTSLSSFKQMWVTAADFKEFGTSVVQRRCF

SEQ ID NO: 1578 - protein, 372 aa, Homo sapiens
  Payload ID: 455;
  Gene Symbol: ACTRT3;
  Gene Name: actin-related prt T3;
  Uniprot ID:  Q9BYD9;
  ENSP ID: ENSP00000333037
MNHCQLPVVIDNGSGMIKAGVAGCREPQFIYPNIIGRAKGQSRAAQGGLELCVGDQAQDWRSSLFISYPVERGLITSWEDMEIMWKHIYDYNLKLKPCDGPVLITEPALNPLANRQQITEMFFEHLGVPAFYMSIQAVLALFAAGFTTGLVLNSGAGVTQSVPIFEGYCLPHGVQQLDLAGLDLTNYLMVLMKNHGIMLLSASDRKIVEDIKESFCYVAMNYEEEMAKKPDCLEKVYQLPDGKVIQLHDQLFSCPEALFSPCHMNLEAPGIDKICFSSIMKCDTGLRNSFFSNIILAGGSTSFPGLDKRLVKDIAKVAPANTAVQVIAPPERKISVWMGGSILASLSAFQDMWITAAEFKEVGPNIVHQRCF

SEQ ID NO: 1579 - protein, 583 aa, Homo sapiens
  Payload ID: 456;
  Gene Symbol: ALCAM;
  Gene Name: activated leukocyte cell adhesion molecule;
  Uniprot ID:  Q13740;
  ENSP ID: ENSP00000305988
MESKGASSCRLLFCLLISATVFRPGLGWYTVNSAYGDTIIIPCRLDVPQNLMFGKWKYEKPDGSPVFIAFRSSTKKSVQYDDVPEYKDRLNLSENYTLSISNARISDEKRFVCMLVTEDNVFEAPTIVKVFKQPSKPEIVSKALFLETEQLKKLGDCISEDSYPDGNITWYRNGKVLHPLEGAVVIIFKKEMDPVTQLYTMTSTLEYKTTKADIQMPFTCSVTYYGPSGQKTIHSEQAVFDIYYPTEQVTIQVLPPKNAIKEGDNITLKCLGNGNPPPEEFLFYLPGQPEGIRSSNTYTLTDVRRNATGDYKCSLIDKKSMIASTAITVHYLDLSLNPSGEVTRQIGDALPVSCTISASRNATVVWMKDNIRLRSSPSFSSLHYQDAGNYVCETALQEVEGLKKRESLTLIVEGKPQIKMTKKTDPSGLSKTIICHVEGFPKPAIQWTITGSGSVINQTEESPYINGRYYSKIIISPEENVTLTCTAENQLERTVNSLNVSAISIPEHDEADEISDENREKVNDQAKLIVGIVVGLLLAALVAGVVYWLYMKKSKTASKHVNKDLGNMEENKKLEENNHKTEA

SEQ ID NO: 1580 - protein, 532 aa, Homo sapiens
  Payload ID: 456;
  Gene Symbol: ALCAM;
  Gene Name: activated leukocyte cell adhesion molecule;
  ENSP ID: ENSP00000418213
MFGKWKYEKPDGSPVFIAFRSSTKKSVQYDDVPEYKDRLNLSENYTLSISNARISDEKRFVCMLVTEDNVFEAPTIVKVFKQPSKPEIVSKALFLETEQLKKLGDCISEDSYPDGNITWYRNGKVLHPLEGAVVIIFKKEMDPVTQLYTMTSTLEYKTTKADIQMPFTCSVTYYGPSGQKTIHSEQAVFDIYYPTEQVTIQVLPPKNAIKEGDNITLKCLGNGNPPPEEFLFYLPGQPEGIRSSNTYTLTDVRRNATGDYKCSLIDKKSMIASTAITVHYLDLSLNPSGEVTRQIGDALPVSCTISASRNATVVWMKDNIRLRSSPSFSSLHYQDAGNYVCETALQEVEGLKKRESLTLIVEGKPQIKMTKKTDPSGLSKTIICHVEGFPKPAIQWTITGSGSVINQTEESPYINGRYYSKIIISPEENVTLTCTAENQLERTVNSLNVSAISIPEHDEADEISDENREKVNDQAKLIVGIVVGLLLAALVAGVVYWLYMKKSKTASKHVNKDLGNMEENKKLEENNHKTEA

SEQ ID NO: 1581 - protein, 344 aa, Homo sapiens
  Payload ID: 456;
  Gene Symbol: ALCAM;
  Gene Name: activated leukocyte cell adhesion molecule;
  ENSP ID: ENSP00000418937
  MOD_RES (1)..(1): Any amino acid
XLGDCISEDSYPDGNITWYRNGKVLHPLEGAVVIIFKKEMDPVTQLYTMTSTLEYKTTKADIQMPFTCSVTYYGPSGQKTIHSEQAVFDIYYLDLSLNPSGEVTRQIGDALPVSCTISASRNATVVWMKDNIRLRSSPSFSSLHYQDAGNYVCETALQEVEGLKKRESLTLIVEGKPQIKMTKKTDPSGLSKTIICHVEGFPKPAIQWTITGSGSVINQTEESPYINGRYYSKIIISPEENVTLTCTAENQLERTVNSLNVSAISIPEHDEADEISDENREKVNDQAKLIVGIVVGLLLAALVAGVVYWLYMKKSKTASKHVNKDLGNMEENKKLEENNHKTEA

SEQ ID NO: 1582 - protein, 570 aa, Homo sapiens
  Payload ID: 456;
  Gene Symbol: ALCAM;
  Gene Name: activated leukocyte cell adhesion molecule;
  Uniprot ID:  Q13740;
  ENSP ID: ENSP00000419236
MESKGASSCRLLFCLLISATVFRPGLGWYTVNSAYGDTIIIPCRLDVPQNLMFGKWKYEKPDGSPVFIAFRSSTKKSVQYDDVPEYKDRLNLSENYTLSISNARISDEKRFVCMLVTEDNVFEAPTIVKVFKQPSKPEIVSKALFLETEQLKKLGDCISEDSYPDGNITWYRNGKVLHPLEGAVVIIFKKEMDPVTQLYTMTSTLEYKTTKADIQMPFTCSVTYYGPSGQKTIHSEQAVFDIYYPTEQVTIQVLPPKNAIKEGDNITLKCLGNGNPPPEEFLFYLPGQPEGIRSSNTYTLTDVRRNATGDYKCSLIDKKSMIASTAITVHYLDLSLNPSGEVTRQIGDALPVSCTISASRNATVVWMKDNIRLRSSPSFSSLHYQDAGNYVCETALQEVEGLKKRESLTLIVEGKPQIKMTKKTDPSGLSKTIICHVEGFPKPAIQWTITGSGSVINQTEESPYINGRYYSKIIISPEENVTLTCTAENQLERTVNSLNVSANENREKVNDQAKLIVGIVVGLLLAALVAGVVYWLYMKKSKTASKHVNKDLGNMEENKKLEENNHKTEA

SEQ ID NO: 1583 - protein, 357 aa, Homo sapiens
  Payload ID: 457;
  Gene Symbol: ASCC1;
  Gene Name: activating signal cointegrator 1 complex subunit 1;
  Uniprot ID:  Q8N9N2;
  ENSP ID: ENSP00000320461
MEVLRPQLIRIDGRNYRKNPVQEQTYQHEEDEEDFYQGSMECADEPCDAYEVEQTPQGFRSTLRAPSLLYKHIVGKRGDTRKKIEMETKTSISIPKPGQDGEIVITGQHRNGVISARTRIDVLLDTFRRKQPFTHFLAFFLNEVEVQEGFLRFQEEVLAKCSMDHGVDSSIFQNPKKLHLTIGMLVLLSEEEIQQTCEMLQQCKEEFINDISGGKPLEVEMAGIEYMNDDPGMVDVLYAKVHMKDGSNRLQELVDRVLERFQASGLIVKEWNSVKLHATVMNTLFRKDPNAEGRYNLYTAEGKYIFKERESFDGRNILKLFENFYFGSLKLNSIHISQRFTVDSFGNYASCGQIDFS

SEQ ID NO: 1584 - protein, 357 aa, Homo sapiens; identical to SEQ ID NO: 1583
  Payload ID: 457;
  Gene Symbol: ASCC1;
  Gene Name: activating signal cointegrator 1 complex subunit 1;
  Uniprot ID:  Q8N9N2;
  ENSP ID: ENSP00000320810

SEQ ID NO: 1585 - protein, 400 aa, Homo sapiens
  Payload ID: 457;
  Gene Symbol: ASCC1;
  Gene Name: activating signal cointegrator 1 complex subunit 1;
  Uniprot ID:  Q8N9N2;
  ENSP ID: ENSP00000339404
MEVLRPQLIRIDGRNYRKNPVQEQTYQHEEDEEDFYQGSMECADEPCDAYEVEQTPQGFRSTLRAPSLLYNLIHLNTSNDCGFQKITLDCQNIYTWKSRHIVGKRGDTRKKIEMETKTSISIPKPGQDGEIVITGQHRNGVISARTRIDVLLDTFRRKQPFTHFLAFFLNEVEVQEGFLRFQEEVLAKCSMDHGVDSSIFQNPKKLHLTIGMLVLLSEEEIQQTCEMLQQCKEEFINDISGGKPLEVEMAGIEYMNDDPGMVDVLYAKVHMKDGSNRLQELVDRVLERFQASGLIVKEWNSVKLHATVMNTLFRKDPNAEGRYNLYTAEGKYIFKERESFDGRNILKSFALLPRLEYNDAISAHCNLCLPGSSDSPASASQVAGITGVSDAYSQSLPGKS

SEQ ID NO: 1586 - protein, 400 aa, Homo sapiens; identical to SEQ ID NO: 1585
  Payload ID: 457;
  Gene Symbol: ASCC1;
  Gene Name: activating signal cointegrator 1 complex subunit 1;
  Uniprot ID:  Q8N9N2;
  ENSP ID: ENSP00000378373

SEQ ID NO: 1587 - protein, 357 aa, Homo sapiens; identical to SEQ ID NO: 1583
  Payload ID: 457;
  Gene Symbol: ASCC1;
  Gene Name: activating signal cointegrator 1 complex subunit 1;
  Uniprot ID:  Q8N9N2;
  ENSP ID: ENSP00000378377

SEQ ID NO: 1588 - protein, 124 aa, Homo sapiens
  Payload ID: 457;
  Gene Symbol: ASCC1;
  Gene Name: activating signal cointegrator 1 complex subunit 1;
  ENSP ID: ENSP00000431255
MECADEPCDAYEVEQTPQGFRSTLRAPSLLYKHIVGKRGDTRKKIEMETKTSISIPKPGQDGEIVITGQHRNGVISARTRIDVLLDTFRRKQPFTHFLAFFLNEVEVQEGFLRFQEEVLAKCSM

SEQ ID NO: 1589 - protein, 292 aa, Homo sapiens
  Payload ID: 457;
  Gene Symbol: ASCC1;
  Gene Name: activating signal cointegrator 1 complex subunit 1;
  ENSP ID: ENSP00000431299
  MOD_RES (1)..(1): Any amino acid
XYKHIVGKRGDTRKKIEMETKTSISIPKPGQDGEIVITGQHRNGVISARTRIDVLLDTFRRKQPFTHFLAFFLNEVEVQEGFLRFQEEVLAKCSMDHGVDSSIFQNPKKLHLTIGMLVLLSEEEIQQTCEMLQQCKEEFINDISGGKPLEVEMAGIEYMNDDPGMVDVLYAKVHMKDGSNRLQELVDRVLERFQASGLIVKEWNSVKLHATVMNTLFRKDPNAEGRYNLYTAEGKYIFKERESFDGRNILKSFALLPRLEYNDAISAHCNLCLPGSSDSPASASQVAGITVV

SEQ ID NO: 1590 - protein, 103 aa, Homo sapiens
  Payload ID: 457;
  Gene Symbol: ASCC1;
  Gene Name: activating signal cointegrator 1 complex subunit 1;
  ENSP ID: ENSP00000431419
MEVLRPQLIRIDGRNYRKNPVQEQTYQHEEDEEDFYQGSMECADEPCDAYEVEQTPQGFRSTLRAPSLLYKHIVGKRGDTRKKIEMETKTSISIPKPGQDGEI

SEQ ID NO: 1591 - protein, 123 aa, Homo sapiens
  Payload ID: 457;
  Gene Symbol: ASCC1;
  Gene Name: activating signal cointegrator 1 complex subunit 1;
  ENSP ID: ENSP00000431573
MEVLRPQLIRIDGRNYRKNPVQEQTYQHEEDEEDFYQGSMECADEPCDAYEVEQTPQGFRSTLRAPSLLYKHIVGKRGDTRKKIEMETKTSISIPKPGQDGEIVITGQHRNGVISARTRIDVL

SEQ ID NO: 1592 - protein, 56 aa, Homo sapiens
  Payload ID: 457;
  Gene Symbol: ASCC1;
  Gene Name: activating signal cointegrator 1 complex subunit 1;
  ENSP ID: ENSP00000431746
MEVLRPQLIRIDGRNYRKNPVQEQTYQHEEDEEDFYQGSMECADEPCDAYEVEQTP

SEQ ID NO: 1593 - protein, 152 aa, Homo sapiens
  Payload ID: 457;
  Gene Symbol: ASCC1;
  Gene Name: activating signal cointegrator 1 complex subunit 1;
  ENSP ID: ENSP00000432418
MEVLRPQLIRIDGRNYRKNPVQEQTYQHEEDEEDFYQGSMECADEPCDAYEVEQTPQGFRSTLRAPSLLYKHIVGKRGDTRKKIEMETKTSISIPKPGQDGEIVITGQHRNGVISARTRIDVLLDTFRRKQPFTHFLAFFLNEVEVQEGFLR

SEQ ID NO: 1594 - protein, 43 aa, Homo sapiens
  Payload ID: 457;
  Gene Symbol: ASCC1;
  Gene Name: activating signal cointegrator 1 complex subunit 1;
  ENSP ID: ENSP00000434468
MEVLRPQLIRIDGRNYRKNPVQEQTYQHEEDEEDFYQGWSAVA

SEQ ID NO: 1595 - protein, 176 aa, Homo sapiens
  Payload ID: 457;
  Gene Symbol: ASCC1;
  Gene Name: activating signal cointegrator 1 complex subunit 1;
  ENSP ID: ENSP00000435147
  MOD_RES (1)..(1): Any amino acid
XITGQHRNGVISARTRIDVLLDTFRRKQPFTHFLAFFLNEVEVQEGFLRFQEEVLAKCSMDHGVDSSIFQNPKKLHLTIGMLVLLSEEEIQQTCEMLQQCKEEFIKLQELVDRVLERFQASGLIVKEWNSVKLHATVMNTLFRKDPNAEGRYNLYTAEGKYIFKERESFDGRNILK

SEQ ID NO: 1596 - protein, 70 aa, Homo sapiens
  Payload ID: 457;
  Gene Symbol: ASCC1;
  Gene Name: activating signal cointegrator 1 complex subunit 1;
  ENSP ID: ENSP00000435191
  MOD_RES (1)..(1): Any amino acid
XLIHLNTSNDCGFQKITLDCQNIYTWKSRHIVGKRGDTRKKIEMETKTSISIPKPGQDGEIEKSEKEMIW

SEQ ID NO: 1597 - protein, 139 aa, Homo sapiens
  Payload ID: 457;
  Gene Symbol: ASCC1;
  Gene Name: activating signal cointegrator 1 complex subunit 1;
  ENSP ID: ENSP00000436098
MEVLRPQLIRIDGRNYRKNPVQEQTYQHEEDEEDFYQVITGQHRNGVISARTRIDVLLDTFRRKQPFTHFLAFFLNEVEVQEGFLRFQEEVLAKCSMDHGVDSSIFQNPKKLHLTIGMLVLLSEEEIQQTCEMLQQCKE

SEQ ID NO: 1598 - protein, 145 aa, Homo sapiens
  Payload ID: 457;
  Gene Symbol: ASCC1;
  Gene Name: activating signal cointegrator 1 complex subunit 1;
  ENSP ID: ENSP00000436409
  MOD_RES (1)..(1): Any amino acid
XKEEFINDISGGKPLEVEMAGIEYMNDDPGMVDVLYAKVHMKDGSNRLQELVDRVLERFQASGLIVKEWNSVKLHATVMNTLFRKDPNAEGRYNLYTAEGKYIFKERESFDGRNILKVSLMHILRAYQENPRIEKGLGHRELVVV

SEQ ID NO: 1599 - protein, 757 aa, Homo sapiens
  Payload ID: 458;
  Gene Symbol: ASCC2;
  Gene Name: activating signal cointegrator 1 complex subunit 2;
  Uniprot ID:  Q9H1I8;
  ENSP ID: ENSP00000305502
MPALPLDQLQITHKDPKTGKLRTSPALHPEQKADRYFVLYKPPPKDNIPALVEEYLERATFVANDLDWLLALPHDKFWCQVIFDETLQKCLDSYLRYVPRKFDEGVASAPEVVDMQKRLHRSVFLTFLRMSTHKESKDHFISPSAFGEILYNNFLFDIPKILDLCVLFGKGNSPLLQKMIGNIFTQQPSYYSDLDETLPTILQVFSNILQHCGLQGDGANTTPQKLEERGRLTPSDMPLLELKDIVLYLCDTCTTLWAFLDIFPLACQTFQKHDFCYRLASFYEAAIPEMESAIKKRRLEDSKLLGDLWQRLSHSRKKLMEIFHIILNQICLLPILESSCDNIQGFIEEFLQIFSSLLQEKRFLRDYDALFPVAEDISLLQQASSVLDETRTAYILQAVESAWEGVDRRKATDAKDPSVIEEPNGEPNGVTVTAEAVSQASSHPENSEEEECMGAAAAVGPAMCGVELDSLISQVKDLLPDLGEGFILACLEYYHYDPEQVINNILEERLAPTLSQLDRNLDREMKPDPTPLLTSRHNVFQNDEFDVFSRDSVDLSRVHKGKSTRKEENTRSLLNDKRAVAAQRQRYEQYSVVVEEVPLQPGESLPYHSVYYEDEYDDTYDGNQVGANDADSDDELISRRPFTIPQVLRTKVPREGQEEDDDDEEDDADEEAPKPDHFVQDPAVLREKAEARRMAFLAKKGYRHDSSTAVAGSPRGHGQSRETTQERRKKEANKATRANHNRRTMADRKRSKGMIPS

SEQ ID NO: 1600 - protein, 757 aa, Homo sapiens; identical to SEQ ID NO: 1599
  Payload ID: 458;
  Gene Symbol: ASCC2;
  Gene Name: activating signal cointegrator 1 complex subunit 2;
  Uniprot ID:  Q9H1I8;
  ENSP ID: ENSP00000380877

SEQ ID NO: 1601 - protein, 78 aa, Homo sapiens
  Payload ID: 458;
  Gene Symbol: ASCC2;
  Gene Name: activating signal cointegrator 1 complex subunit 2;
  ENSP ID: ENSP00000397077
MPALPLDQLQITHKDPKTGKLRTSPALETSLHSSQVTTVTWMKPCLPSFRSSAISSSTVVCKGTGPIPHPRSLRRGAD

SEQ ID NO: 1602 - protein, 37 aa, Homo sapiens
  Payload ID: 458;
  Gene Symbol: ASCC2;
  Gene Name: activating signal cointegrator 1 complex subunit 2;
  ENSP ID: ENSP00000403031
MPALPLDQLQITHKDPKTGKLRTSPALICTCNSMIQI

SEQ ID NO: 1603 - protein, 37 aa, Homo sapiens; identical to SEQ ID NO: 1602
  Payload ID: 458;
  Gene Symbol: ASCC2;
  Gene Name: activating signal cointegrator 1 complex subunit 2;
  ENSP ID: ENSP00000408930

SEQ ID NO: 1604 - protein, 54 aa, Homo sapiens
  Payload ID: 458;
  Gene Symbol: ASCC2;
  Gene Name: activating signal cointegrator 1 complex subunit 2;
  ENSP ID: ENSP00000410531
  MOD_RES (1)..(1): Any amino acid
XSAGAQGAVTVVGGGGGGGGTEPVVEPPRPPRVCRDHVCLICWDPRAGTGQVIL

SEQ ID NO: 1605 - protein, 240 aa, Homo sapiens
  Payload ID: 458;
  Gene Symbol: ASCC2;
  Gene Name: activating signal cointegrator 1 complex subunit 2;
  ENSP ID: ENSP00000412382
MPALPLDQLQITHKDPKTGKLRTSPALHPEQKADRYFVLYKPPPKDNIPALVEEYLERATFVANDLDWLLALPHDKFWCQVIFDETLQKCLDSYLRYVPRKFDEGVASAPEVVDMQKRLHRSVFLTFLRMSTHKESKDHFISPSAFGEILYNNFLFDIPKILDLCVLFGKGNSPLLQKMIGNIFTQQPSYYSDLDETLPTILQVFSNILQHCGLQGDGANTTPQKLEERGRLTPSDMPLL

SEQ ID NO: 1606 - protein, 87 aa, Homo sapiens
  Payload ID: 458;
  Gene Symbol: ASCC2;
  Gene Name: activating signal cointegrator 1 complex subunit 2;
  ENSP ID: ENSP00000414545
SWPAWSTTTTTQSREMKPDPTPLLTSRHNVFQNDEFDVFSRDSVDLSRVHKGKSTRKEENTRSLLNDKRAVAAQRQRYEQYSVVVEE

SEQ ID NO: 1607 - protein, 681 aa, Homo sapiens
  Payload ID: 458;
  Gene Symbol: ASCC2;
  Gene Name: activating signal cointegrator 1 complex subunit 2;
  Uniprot ID:  Q9H1I8;
  ENSP ID: ENSP00000437570
MPALPLDQLQITHKDPKTGKLRTSPALVIFDETLQKCLDSYLRYVPRKFDEGVASAPEVVDMQKRLHRSVFLTFLRMSTHKESKILDLCVLFGKGNSPLLQKMIGNIFTQQPSYYSDLDETLPTILQVFSNILQHCGLQGDGANTTPQKLEERGRLTPSDMPLLELKDIVLYLCDTCTTLWAFLDIFPLACQTFQKHDFCYRLASFYEAAIPEMESAIKKRRLEDSKLLGDLWQRLSHSRKKLMEIFHIILNQICLLPILESSCDNIQGFIEEFLQIFSSLLQEKRFLRDYDALFPVAEDISLLQQASSVLDETRTAYILQAVESAWEGVDRRKATDAKDPSVIEEPNGEPNGVTVTAEAVSQASSHPENSEEEECMGAAAAVGPAMCGVELDSLISQVKDLLPDLGEGFILACLEYYHYDPEQVINNILEERLAPTLSQLDRNLDREMKPDPTPLLTSRHNVFQNDEFDVFSRDSVDLSRVHKGKSTRKEENTRSLLNDKRAVAAQRQRYEQYSVVVEEVPLQPGESLPYHSVYYEDEYDDTYDGNQVGANDADSDDELISRRPFTIPQVLRTKVPREGQEEDDDDEEDDADEEAPKPDHFVQDPAVLREKAEARRMAFLAKKGYRHDSSTAVAGSPRGHGQSRETTQERRKKEANKATRANHNRRTMADRKRSKGMIPS

SEQ ID NO: 1608 - protein, 48 aa, Homo sapiens
  Payload ID: 459;
  Gene Symbol: ASCC3;
  Gene Name: activating signal cointegrator 1 complex subunit 3;
  ENSP ID: ENSP00000320252
MALPRLTGALRSFSNVTKQDNYNEEVADLKLELIMGEKQLKVGLHFSS

SEQ ID NO: 1609 - protein, 176 aa, Homo sapiens
  Payload ID: 459;
  Gene Symbol: ASCC3;
  Gene Name: activating signal cointegrator 1 complex subunit 3;
  ENSP ID: ENSP00000320777
MALPRLTGALRSFSNVTKQDNYNEEVADLKIKRSKLHEQVLDLGLTWKKIIKFLNEKLEKSKMQSINEDLKDILHAAKQIVGTDNGREAIESGAAFLFMTFHLKDSVGHKETKAIKQMFGPFPSSSATAACNATNRIISHFSQDDLTALVQMTEKEHGDRVFFGKNLAFSFDMHDL

SEQ ID NO: 1610 - protein, 111 aa, Homo sapiens
  Payload ID: 459;
  Gene Symbol: ASCC3;
  Gene Name: activating signal cointegrator 1 complex subunit 3;
  Uniprot ID:  Q8N3C0;
  ENSP ID: ENSP00000358139
MALPRLTGALRSFSNVTKQDNYNEEVADLKIKRSKLHEQVLDLGLTWKKIIKFLNEKLEKSKMQSINEDLKDILHAAKQIEVNCPFQKRRLDGKEEDEKMSRASDRFRGLR

SEQ ID NO: 1611 - protein, 2202 aa, Homo sapiens
  Payload ID: 459;
  Gene Symbol: ASCC3;
  Gene Name: activating signal cointegrator 1 complex subunit 3;
  Uniprot ID:  Q8N3C0;
  ENSP ID: ENSP00000358159
MALPRLTGALRSFSNVTKQDNYNEEVADLKIKRSKLHEQVLDLGLTWKKIIKFLNEKLEKSKMQSINEDLKDILHAAKQIVGTDNGREAIESGAAFLFMTFHLKDSVGHKETKAIKQMFGPFPSSSATAACNATNRIISHFSQDDLTALVQMTEKEHGDRVFFGKNLAFSFDMHDLDHFDELPINGETQKTISLDYKKFLNEHLQEACTPELKPVEKTNGSFLWCEVEKYLNSTLKEMTEVPRVEDLCCTLYDMLASIKSGDELQDELFELLGPEGLELIEKLLQNRITIVDRFLNSSNDHRFQALQDNCKKILGENAKPNYGCQVTIQSEQEKQLMKQYRREEKRIARREKKAGEDLEVSEGLMCFDPKELRIQREQALLNARSVPILSRQRDADVEKIHYPHVYDSQAEAMKTSAFIAGAKMILPEGIQRENNKLYEEVRIPYSEPMPLSFEEKPVYIQDLDEIGQLAFKGMKRLNRIQSIVFETAYNTNENMLICAPTGAGKTNIAMLTVLHEIRQHFQQGVIKKNEFKIVYVAPMKALAAEMTDYFSRRLEPLGIIVKELTGDMQLSKSEILRTQMLVTTPEKWDVVTRKSVGDVALSQIVRLLILDEVHLLHEDRGPVLESIVARTLRQVESTQSMIRILGLSATLPNYLDVATFLHVNPYIGLFFFDGRFRPVPLGQTFLGIKCANKMQQLNNMDEVCYENVLKQVKAGHQVMVFVHARNATVRTAMSLIERAKNCGHIPFFFPTQGHDYVLAEKQVQRSRNKQVRELFPDGFSIHHAGMLRQDRNLVENLFSNGHIKVLVCTATLAWGVNLPAHAVIIKGTQIYAAKRGSFVDLGILDVMQIFGRAGRPQFDKFGEGIIITTHDKLSHYLTLLTQRNPIESQFLESLADNLNAEIALGTVTNVEEAVKWISYTYLYVRMRANPLAYGISHKAYQIDPTLRKHREQLVIEVGRKLDKAQMIRFEERTGYFSSTDLGRTASHYYIKYNTIETFNELFDAHKTEGDIFAIVSKAEEFDQIKVREEEIEELDTLLSNFCELSTPGGVENSYGKINILLQTYISRGEMDSFSLISDSAYVAQNAARIVRALFEIALRKRWPTMTYRLLNLSKVIDKRLWGWASPLRQFSILPPHILTRLEEKKLTVDKLKDMRKDEIGHILHHVNIGLKVKQCVHQIPSVMMEASIQPITRTVLRVTLSIYADFTWNDQVHGTVGEPWWIWVEDPTNDHIYHSEYFLALKKQVISKEAQLLVFTIPIFEPLPSQYYIRAVSDRWLGAEAVCIINFQHLILPERHPPHTELLDLQPLPITALGCKAYEALYNFSHFNPVQTQIFHTLYHTDCNVLLGAPTGSGKTVAAELAIFRVFNKYPTSKAVYIAPLKALVRERMDDWKVRIEEKLGKKVIELTGDVTPDMKSIAKADLIVTTPEKWDGVSRSWQNRNYVQQVTILIIDEIHLLGEERGPVLEVIVSRTNFISSHTEKPVRIVGLSTALANARDLADWLNIKQMGLFNFRPSVRPVPLEVHIQGFPGQHYCPRMASMNKPAFQAIRSHSPAKPVLIFVSSRRQTRLTALELIAFLATEEDPKQWLNMDEREMENIIATVRDSNLKLTLAFGIGMHHAGLHERDRKTVEELFVNCKVQVLIATSTLAWGVNFPAHLVIIKGTEYYDGKTRRYVDFPITDVLQMMGRAGRPQFDDQGKAVILVHDIKKDFYKKFLYEPFPVESSLLGVLSDHLNAEIAGGTITSKQDALDYITWTYFFRRLIMNPSYYNLGDVSHDSVNKFLSHLIEKSLIELELSYCIEIGEDNRSIEPLTYGRIASYYYLKHQTVKMFKDRLKPECSTEELLSILSDAEEYTDLPVRHNEDHMNSELAKCLPIESNPHSFDSPHTKAHLLLQAHLSRAMLPCPDYDTDTKTVLDQALRVCQAMLDVAANQGWLVTVLNITNLIQMVIQGRWLKDSSLLTLPNIENHHLHLFKKWKPIMKGPHARGRTSIESLPELIHACGGKDHVFSSMVESELHAAKTKQAWNFLSHLPVINVGISVKGSWDDLVEGHNELSVSTLTADKRDDNKWIKLHADQEYVLQVSLQRVHFGFHKGKPESCAVTPRFPKSKDEGWFLILGEVDKRELIALKRVGYIRNHHVASLSFYTPEIPGRYIYTLYFMSDCYLGLDQQYDIYLNVTQASLSAQVNTKVSDSLTDLALK

SEQ ID NO: 1612 - protein, 731 aa, Homo sapiens
  Payload ID: 459;
  Gene Symbol: ASCC3;
  Gene Name: activating signal cointegrator 1 complex subunit 3;
  Uniprot ID:  Q8N3C0;
  ENSP ID: ENSP00000430769
MALPRLTGALRSFSNVTKQDNYNEEVADLKIKRSKLHEQVLDLGLTWKKIIKFLNEKLEKSKMQSINEDLKDILHAAKQIVGTDNGREAIESGAAFLFMTFHLKDSVGHKETKAIKQMFGPFPSSSATAACNATNRIISHFSQDDLTALVQMTEKEHGDRVFFGKNLAFSFDMHDLDHFDELPINGETQKTISLDYKKFLNEHLQEACTPELKPVEKTNGSFLWCEVEKYLNSTLKEMTEVPRVEDLCCTLYDMLASIKSGDELQDELFELLGPEGLELIEKLLQNRITIVDRFLNSSNDHRFQALQDNCKKILGENAKPNYGCQVTIQSEQEKQLMKQYRREEKRIARREKKAGEDLEVSEGLMCFDPKELRIQREQALLNARSVPILSRQRDADVEKIHYPHVYDSQAEAMKTSAFIAGAKMILPEGIQRENNKLYEEVRIPYSEPMPLSFEEKPVYIQDLDEIGQLAFKGMKRLNRIQSIVFETAYNTNENMLICAPTGAGKTNIAMLTVLHEIRQHFQQGVIKKNEFKIVYVAPMKALAAEMTDYFSRRLEPLGIIVKELTGDMQLSKSEILRTQMLVTTPEKWDVVTRKSVGDVALSQIVRLLILDEVHLLHEDRGPVLESIVARTLRQVESTQSMIRILGLSATLPNYLDVATFLHVNPYIGLFFFDGRFRPVPLGQTFLGIKCANKMQQLNNMDEVCYENVLKQVKAGHQVHLFYLLLHLFICF

SEQ ID NO: 1613 - protein, 271 aa, Homo sapiens
  Payload ID: 460;
  Gene Symbol: ATF1;
  Gene Name: activating transcription factor 1;
  Uniprot ID:  P18846;
  ENSP ID: ENSP00000262053
MEDSHKSTTSETAPQPGSAVQGAHISHIAQQVSSLSESEESQDSSDSIGSSQKAHGILARRPSYRKILKDLSSEDTRGRKGDGENSGVSAAVTSMSVPTPIYQTSSGQYIAIAPNGALQLASPGTDGVQGLQTLTMTNSGSTQQGTTILQYAQTSDGQQILVPSNQVVVQTASGDMQTYQIRTTPSATSLPQTVVMTSPVTLTSQTTKTDDPQLKREIRLMKNREAARECRRKKKEYVKCLENRVAVLENQNKTLIEELKTLKDLYSNKSV

SEQ ID NO: 1614 - protein, 77 aa, Homo sapiens
  Payload ID: 460;
  Gene Symbol: ATF1;
  Gene Name: activating transcription factor 1;
  ENSP ID: ENSP00000448421
MEDSHKSTTSETAPQPGSAVQGAHISHIAQQGLTLSPRLVCSSVNIAHCSLDLLCSSNPPASAPQVAGTTGIIFIRK

SEQ ID NO: 1615 - protein, 170 aa, Homo sapiens
  Payload ID: 460;
  Gene Symbol: ATF1;
  Gene Name: activating transcription factor 1;
  ENSP ID: ENSP00000448592
MEDSHKSTTSETAPQPGSAVQGAHISHIAQQVSSLSESEESQDSSDSIGSSQKAHGILARRPSYRKILKDLSSEDTRGRKGDGENSGVSAAVTSMSVPTPIYQTSSGQYIAIAPNGALQLASPGTDGVQGLQTLTMTNSGSTQQGTTILQYAQTSDGQQILVPSNQVVVQ

SEQ ID NO: 1616 - protein, 200 aa, Homo sapiens
  Payload ID: 460;
  Gene Symbol: ATF1;
  Gene Name: activating transcription factor 1;
  ENSP ID: ENSP00000448921
MEDSHKSTTSETAPQPGSAVQGAHISHIAQQVSSLSESEESQDSSDSIGSSQKAHGILARRPSYRKILKDLSSEDTRGRKGDGENSGVSAAVTSMSVPTPIYQTSSGQYIAIAPNGALQLASPGTDGVQGLQTLTMTNSGSTQQGTTILQYAQTSDGQQILVPSNQVVVQTASGDMQTYQIRTTPSATSLPQTVVMTSPV

SEQ ID NO: 1617 - protein, 55 aa, Homo sapiens
  Payload ID: 460;
  Gene Symbol: ATF1;
  Gene Name: activating transcription factor 1;
  ENSP ID: ENSP00000448987
MEDSHKSTTSETAPQPGSAVQGAHISHIAQQLPLPQMEPYSWQVQAQMEYRDFRH

SEQ ID NO: 1618 - protein, 505 aa, Homo sapiens
  Payload ID: 461;
  Gene Symbol: ATF2;
  Gene Name: activating transcription factor 2;
  Uniprot ID:  P15336;
  ENSP ID: ENSP00000264110
MKFKLHVNSARQYKDLWNMSDDKPFLCTAPGCGQRFTNEDHLAVHKHKHEMTLKFGPARNDSVIVADQTPTPTRFLKNCEEVGLFNELASPFENEFKKASEDDIKKMPLDLSPLATPIIRSKIEEPSVVETTHQDSPLPHPESTTSDEKEVPLAQTAQPTSAIVRPASLQVPNVLLTSSDSSVIIQQAVPSPTSSTVITQAPSSNRPIVPVPGPFPLLLHLPNGQTMPVAIPASITSSNVHVPAAVPLVRPVTMVPSVPGIPGPSSPQPVQSEAKMRLKAALTQQHPPVTNGDTVKGHGSGLVRTQSEESRPQSLQQPATSTTETPASPAHTTPQTQSTSGRRRRAANEDPDEKRRKFLERNRAAASRCRQKRKVWVQSLEKKAEDLSSLNGQLQSEVTLLRNEVAQLKQLLLAHKDCPVTAMQKKSGYHTADKDDSSEDISVPSSPHTEAIQHSSVSTSNGVSSTSKAEAVATSVLTQMADQSTEPALSQIVMAPSSQSQPSGS

SEQ ID NO: 1619 - protein, 447 aa, Homo sapiens
  Payload ID: 461;
  Gene Symbol: ATF2;
  Gene Name: activating transcription factor 2;
  Uniprot ID:  P15336;
  ENSP ID: ENSP00000340576
MYCAWMWPDQTPTPTRFLKNCEEVGLFNELASPFENEFKKASEDDIKKMPLDLSPLATPIIRSKIEEPSVVETTHQDSPLPHPESTTSDEKEVPLAQTAQPTSAIVRPASLQVPNVLLTSSDSSVIIQQAVPSPTSSTVITQAPSSNRPIVPVPGPFPLLLHLPNGQTMPVAIPASITSSNVHVPAAVPLVRPVTMVPSVPGIPGPSSPQPVQSEAKMRLKAALTQQHPPVTNGDTVKGHGSGLVRTQSEESRPQSLQQPATSTTETPASPAHTTPQTQSTSGRRRRAANEDPDEKRRKFLERNRAAASRCRQKRKVWVQSLEKKAEDLSSLNGQLQSEVTLLRNEVAQLKQLLLAHKDCPVTAMQKKSGYHTADKDDSSEDISVPSSPHTEAIQHSSVSTSNGVSSTSKAEAVATSVLTQMADQSTEPALSQIVMAPSSQSQPSGS

SEQ ID NO: 1620 - protein, 505 aa, Homo sapiens; identical to SEQ ID NO: 1618
  Payload ID: 461;
  Gene Symbol: ATF2;
  Gene Name: activating transcription factor 2;
  Uniprot ID:  P15336;
  ENSP ID: ENSP00000376327

SEQ ID NO: 1621 - protein, 144 aa, Homo sapiens
  Payload ID: 461;
  Gene Symbol: ATF2;
  Gene Name: activating transcription factor 2;
  Uniprot ID:  P15336;
  ENSP ID: ENSP00000386282
MKFKLHVNSARQYKDLWNMSDDKPFLCTAPGCGQSEVTLLRNEVAQLKQLLLAHKDCPVTAMQKKSGYHTADKDDSSEDISVPSSPHTEAIQHSSVSTSNGVSSTSKAEAVATSVLTQMADQSTEPALSQIVMAPSSQSQPSGS

SEQ ID NO: 1622 - protein, 389 aa, Homo sapiens
  Payload ID: 461;
  Gene Symbol: ATF2;
  Gene Name: activating transcription factor 2;
  ENSP ID: ENSP00000386326
MSDDKPFLCTAPGCGQRFTNEDHLAVHKHKHEMTLKFGPARNDSVIVADQTPTPTRFLKNCEEVGLFNELASPFENEFKKASEDDIKKMPLDLSPLATPIIRSKIEEPSVVETTHQDSPLPHPESTTSDEKLVRPVTMVPSVPGIPGPSSPQPVQSEAKMRLKAALTQQHPPVTNGDTVKGHGSGLVRTQSEESRPQSLQQPATSTTETPASPAHTTPQTQSTSGRRRRAANEDPDEKRRKFLERNRAAASRCRQKRKVWVQSLEKKAEDLSSLNGQLQSEVTLLRNEVAQLKQLLLAHKDCPVTAMQKKSGYHTADKDDSSEDISVPSSPHTEAIQHSSVSTSNGVSSTSKAEAVATSVLTQMADQSTEPALSQIVMAPSSQSQPSGS

SEQ ID NO: 1623 - protein, 209 aa, Homo sapiens
  Payload ID: 461;
  Gene Symbol: ATF2;
  Gene Name: activating transcription factor 2;
  Uniprot ID:  P15336;
  ENSP ID: ENSP00000386526
MKFKLHVNSARQYKDLWNMSDDKPFLCTAPGCGQRFTNEDHLAVHKHKHEMTLKFGPARNDSVIVADQTPTPTRFLKNCEEVGLFNELASPFENEFKKASEDDIKKMPLDLSPLATPIIRSKIEEPSVVETTHQDSPLPHPESTTSDEKEVPLAQTAQPTSAIVRPASLQVPNVLLTSSDSSVIIQQAVPSPTSSTVITQAPSSNRPIV

SEQ ID NO: 1624 - protein, 447 aa, Homo sapiens; identical to SEQ ID NO: 1619
  Payload ID: 461;
  Gene Symbol: ATF2;
  Gene Name: activating transcription factor 2;
  Uniprot ID:  P15336;
  ENSP ID: ENSP00000387093

SEQ ID NO: 1625 - protein, 395 aa, Homo sapiens
  Payload ID: 461;
  Gene Symbol: ATF2;
  Gene Name: activating transcription factor 2;
  ENSP ID: ENSP00000389504
MKFKLHVNSARQYKDLWNMSDDKPFLCTAPGCGQRFTNEDHLAVHKHKHEMTLKFGPARNDSVIVADQTPTPTRFLKNCEEVGLFNELASPFENEFKKASEDDIKKMPLDLSPLATPIIRSKIEEPSVVETTHQDSPLPHPESTTSDEKEVPLAQTAQPTSAIVRPASLQVPNVLLTSSDSSVIIQQAVPSPTSSTVITQAPSSNRPIVPVPGPFPLLLHLPNGQTMPVAIPASITSSNVHVPAAVPLVRPVTMVPSVPGIPGPSSPQPVQSEAKMRLKAALTQQHPPVTNGDTVKGHGSGLVRTQSEESRPQSLQQPATSTTETPASPAHTTPQTQSTSGRRRRAANEDPDEKRRKFLERNRAAASRCRQKRKVWVQSLEKKAEDLSSLNGQLQ

SEQ ID NO: 1626 - protein, 43 aa, Homo sapiens
  Payload ID: 461;
  Gene Symbol: ATF2;
  Gene Name: activating transcription factor 2;
  ENSP ID: ENSP00000402190
MKFKLHVNSARQYKDLWNMSDDKPFLCTAPGCGQIRPQHQQDS

SEQ ID NO: 1627 - protein, 395 aa, Homo sapiens; identical to SEQ ID NO: 1625
  Payload ID: 461;
  Gene Symbol: ATF2;
  Gene Name: activating transcription factor 2;
  ENSP ID: ENSP00000402229

SEQ ID NO: 1628 - protein, 265 aa, Homo sapiens
  Payload ID: 461;
  Gene Symbol: ATF2;
  Gene Name: activating transcription factor 2;
  ENSP ID: ENSP00000406995
  MOD_RES (1)..(1): Any amino acid
XYKDLWNMSDDKPFLCTAPGCGQRFTNEDHLAVHKHKHEMTLKFGPARNDSVIVADQTPTPTRFLKNCEEVGLFNELASPFENEFKKASEDDIKKMPLDLSPLATPIIRSKIEEPSVVETTHQDSPLPHPESTTSDEKEVPLAQTAQPTSAIVRPASPAHTTPQTQSTSGRRRRAANEDPDEKRRKFLERNRAAASRCRQKRKVWVQSLEKKAEDLSSLNGQLQLLIKMIVQKTFQCRVVHIQKLYSIVRSAHPMESVQPPRQKL

SEQ ID NO: 1629 - protein, 487 aa, Homo sapiens
  Payload ID: 461;
  Gene Symbol: ATF2;
  Gene Name: activating transcription factor 2;
  Uniprot ID:  P15336;
  ENSP ID: ENSP00000407911
MSDDKPFLCTAPGCGQRFTNEDHLAVHKHKHEMTLKFGPARNDSVIVADQTPTPTRFLKNCEEVGLFNELASPFENEFKKASEDDIKKMPLDLSPLATPIIRSKIEEPSVVETTHQDSPLPHPESTTSDEKEVPLAQTAQPTSAIVRPASLQVPNVLLTSSDSSVIIQQAVPSPTSSTVITQAPSSNRPIVPVPGPFPLLLHLPNGQTMPVAIPASITSSNVHVPAAVPLVRPVTMVPSVPGIPGPSSPQPVQSEAKMRLKAALTQQHPPVTNGDTVKGHGSGLVRTQSEESRPQSLQQPATSTTETPASPAHTTPQTQSTSGRRRRAANEDPDEKRRKFLERNRAAASRCRQKRKVWVQSLEKKAEDLSSLNGQLQSEVTLLRNEVAQLKQLLLAHKDCPVTAMQKKSGYHTADKDDSSEDISVPSSPHTEAIQHSSVSTSNGVSSTSKAEAVATSVLTQMADQSTEPALSQIVMAPSSQSQPSGS

SEQ ID NO: 1630 - protein, 43 aa, Homo sapiens; identical to SEQ ID NO: 1626
  Payload ID: 461;
  Gene Symbol: ATF2;
  Gene Name: activating transcription factor 2;
  ENSP ID: ENSP00000410086

SEQ ID NO: 1631 - protein, 237 aa, Homo sapiens
  Payload ID: 461;
  Gene Symbol: ATF2;
  Gene Name: activating transcription factor 2;
  ENSP ID: ENSP00000410224
MKFKLHVNSARQYKDLWNMSDDKPFLCTAPGCGQRFTNEDHLAVHKHKHEMTLKFGPARNDSVIVADQTPTPTRFLKNCEEVGLFNELASPFENEFKKASEDDIKKMPLDLSPLATPIIRSKIEEPSVVETTHQDSPLPHPESTTSDEKEVPLAQTAQPTSAIVRPASLQVPNVLLTSSDSSVIIQQAVPSPTSSTVITQAPSSNRPIVSFDQSPWCLVFQESQVLPLPNQYSQKQK

SEQ ID NO: 1632 - protein, 395 aa, Homo sapiens; identical to SEQ ID NO: 1625
  Payload ID: 461;
  Gene Symbol: ATF2;
  Gene Name: activating transcription factor 2;
  ENSP ID: ENSP00000412293

SEQ ID NO: 1633 - protein, 43 aa, Homo sapiens; identical to SEQ ID NO: 1626
  Payload ID: 461;
  Gene Symbol: ATF2;
  Gene Name: activating transcription factor 2;
  ENSP ID: ENSP00000414171

SEQ ID NO: 1634 - protein, 189 aa, Homo sapiens
  Payload ID: 461;
  Gene Symbol: ATF2;
  Gene Name: activating transcription factor 2;
  ENSP ID: ENSP00000416854
MYCAWMWPDQTPTPTRFLKNCEEVGLFNELASPFENEFKKASEDDIKKMPLDLSPLATPIIRSKIEEPSVVETTHQDSPLPHPESTTSDEKEVPLAQTAQPTSAIVRPASLQVPNVLLTSSDSSVIIQQAVPSPTSSTVITQAPSSNRPIVPVPGPFPLLLHLPNGQTMPVAIPASITSSNVHVPAAVP

SEQ ID NO: 1635 - protein, 329 aa, Homo sapiens [sequence omitted]

SEQ ID NO: 1636 - protein, 106 aa, Homo sapiens
  Payload ID: 462;
  Gene Symbol: ATF3;
  Gene Name: activating transcription factor 3;
  Uniprot ID:  P18847;
  ENSP ID: ENSP00000336908
MMLQHPGQVSASEEELRFAIQNKHLCHRMSSALESVTVSDRPLGVSITKAEVAPEEDERKKRRRERNKIAAAKCRNKKKEKTECLQKLPRPFWVQKTCIWAVDSCK

SEQ ID NO: 1637 - protein, 181 aa, Homo sapiens
  Payload ID: 462;
  Gene Symbol: ATF3;
  Gene Name: activating transcription factor 3;
  Uniprot ID:  P18847;
  ENSP ID: ENSP00000344352
MMLQHPGQVSASEVSASAIVPCLSPPGSLVFEDFANLTPFVKEELRFAIQNKHLCHRMSSALESVTVSDRPLGVSITKAEVAPEEDERKKRRRERNKIAAAKCRNKKKEKTECLQKESEKLESVNAELKAQIEELKNEKQHLIYMLNLHRPTCIVRAQNGRTPEDERNLFIQQIKEGTLQS

SEQ ID NO: 1638 - protein, 175 aa, Homo sapiens
  Payload ID: 462;
  Gene Symbol: ATF3;
  Gene Name: activating transcription factor 3;
  ENSP ID: ENSP00000355948
MMLQHPGQVSASEVSASAIVPCLSPPGSLVFEDFANLTPFVKEELRFAIQNKHLCHRMSSALESVTVSDRPLGVSITKAEVAPEEDERKKRRRERNKIAAAKCRNKKKEKTECLQKESEKLESVNAELKAQIEELKNEKQHLIYMLNLHRPTCIVRAQNGRTPEDERNLFIQQIK

SEQ ID NO: 1639 - protein, 135 aa, Homo sapiens
  Payload ID: 462;
  Gene Symbol: ATF3;
  Gene Name: activating transcription factor 3;
  Uniprot ID:  P18847;
  ENSP ID: ENSP00000355950
MMLQHPGQVSASEVSASAIVPCLSPPGSLVFEDFANLTPFVKEELRFAIQNKHLCHRMSSALESVTVSDRPLGVSITKAEVAPEEDERKKRRRERNKIAAAKCRNKKKEKTECLQKLPRPFWVQKTCIWAVDSCK

SEQ ID NO: 1640 - protein, 153 aa, Homo sapiens
  Payload ID: 462;
  Gene Symbol: ATF3;
  Gene Name: activating transcription factor 3;
  ENSP ID: ENSP00000355952
  MOD_RES (1)..(1): Any amino acid
XERSLEQNDASTPRPELRFAIQNKHLCHRMSSALESVTVSDRPLGVSITKAEVAPEEDERKKRRRERNKIAAAKCRNKKKEKTECLQKESEKLESVNAELKAQIEELKNEKQHLIYMLNLHRPTCIVRAQNGRTPEDERNLFIQQIKEGTLQS

SEQ ID NO: 1641 - protein, 181 aa, Homo sapiens; identical to SEQ ID NO: 1637
  Payload ID: 462;
  Gene Symbol: ATF3;
  Gene Name: activating transcription factor 3;
  Uniprot ID:  P18847;
  ENSP ID: ENSP00000355954

SEQ ID NO: 1642 - protein, 135 aa, Homo sapiens; identical to SEQ ID NO: 1639
  Payload ID: 462;
  Gene Symbol: ATF3;
  Gene Name: activating transcription factor 3;
  Uniprot ID:  P18847;
  ENSP ID: ENSP00000432208

SEQ ID NO: 1643 - protein, 124 aa, Homo sapiens
  Payload ID: 462;
  Gene Symbol: ATF3;
  Gene Name: activating transcription factor 3;
  Uniprot ID:  P18847;
  ENSP ID: ENSP00000480606
MSSALESVTVSDRPLGVSITKAEVAPEEDERKKRRRERNKIAAAKCRNKKKEKTECLQKESEKLESVNAELKAQIEELKNEKQHLIYMLNLHRPTCIVRAQNGRTPEDERNLFIQQIKEGTLQS

SEQ ID NO: 1644 - protein, 124 aa, Homo sapiens; identical to SEQ ID NO: 1643
  Payload ID: 462;
  Gene Symbol: ATF3;
  Gene Name: activating transcription factor 3;
  Uniprot ID:  P18847;
  ENSP ID: ENSP00000483576

SEQ ID NO: 1645 - protein, 351 aa, Homo sapiens
  Payload ID: 463;
  Gene Symbol: ATF4;
  Gene Name: activating transcription factor 4;
  Uniprot ID:  P18848;
  ENSP ID: ENSP00000336790
MTEMSFLSSEVLVGDLMSPFDQSGLGAEESLGLLDDYLEVAKHFKPHGFSSDKAKAGSSEWLAVDGLVSPSNNSKEDAFSGTDWMLEKMDLKEFDLDALLGIDDLETMPDDLLTTLDDTCDLFAPLVQETNKQPPQTVNPIGHLPESLTKPDQVAPFTFLQPLPLSPGVLSSTPDHSFSLELGSEVDITEGDRKPDYTAYVAMIPQCIKEEDTPSDNDSGICMSPESYLGSPQHSPSTRGSPNRSLPSPGVLCGSARPKPYDPPGEKMVAAKVKGEKLDKKLKKMEQNKTAATRYRQKKRAEQEALTGECKELEKKNEALKERADSLAKEIQYLKDLIEEVRKARGKKRVP

SEQ ID NO: 1646 - protein, 351 aa, Homo sapiens; identical to SEQ ID NO: 1645
  Payload ID: 463;
  Gene Symbol: ATF4;
  Gene Name: activating transcription factor 4;
  Uniprot ID:  P18848;
  ENSP ID: ENSP00000379912

SEQ ID NO: 1647 - protein, 351 aa, Homo sapiens; identical to SEQ ID NO: 1645
  Payload ID: 463;
  Gene Symbol: ATF4;
  Gene Name: activating transcription factor 4;
  Uniprot ID:  P18848;
  ENSP ID: ENSP00000384587

SEQ ID NO: 1648 - protein, 282 aa, Homo sapiens
  Payload ID: 464;
  Gene Symbol: ATF5;
  Gene Name: activating transcription factor 5;
  Uniprot ID:  Q9Y2D1;
  ENSP ID: ENSP00000396954
MSLLATLGLELDRALLPASGLGWLVDYGKLPPAPAPLAPYEVLGGALEGGLPVGGEPLAGDGFSDWMTERVDFTALLPLEPPLPPGTLPQPSPTPPDLEAMASLLKKELEQMEDFFLDAPPLPPPSPPPLPPPPLPPAPSLPLSLPSFDLPQPPVLDTLDLLAIYCRNEAGQEEVGMPPLPPPQQPPPPSPPQPSRLAPYPHPATTRGDRKQKKRDQNKSAALRYRQRKRAEGEALEGECQGLEARNRELKERAESVEREIQYVKDLLIEVYKARSQRTRSC

SEQ ID NO: 1649 - protein, 129 aa, Homo sapiens
  Payload ID: 464;
  Gene Symbol: ATF5;
  Gene Name: activating transcription factor 5;
  ENSP ID: ENSP00000470464
MSLLATLGLELDRALLPASGLGWLVDYGKLPPAPAPLAPYEVLGGALEGGLPVGGEPLAGDGFSDWMTERVDFTALLPLEPPLPPGTLPQPSPTPPDLEAMASLLKKELEQMEDFFLDAPPLPPPSPPP

SEQ ID NO: 1650 - protein, 282 aa, Homo sapiens; identical to SEQ ID NO: 1648
  Payload ID: 464;
  Gene Symbol: ATF5;
  Gene Name: activating transcription factor 5;
  Uniprot ID:  Q9Y2D1;
  ENSP ID: ENSP00000470633

SEQ ID NO: 1651 - protein, 121 aa, Homo sapiens
  Payload ID: 464;
  Gene Symbol: ATF5;
  Gene Name: activating transcription factor 5;
  ENSP ID: ENSP00000470978
MSLLATLGLELDRALLPASGLGWLVDYGKLPPAPAPLAPYEVLGGALEGGLPVGGEPLAGDGFSDWMTERVDFTALLPLEPPLPPGTLPQPSPTPPDLEAMASLLKKELEQMEDFFLDAPP

SEQ ID NO: 1652 - protein, 88 aa, Homo sapiens
  Payload ID: 464;
  Gene Symbol: ATF5;
  Gene Name: activating transcription factor 5;
  ENSP ID: ENSP00000471162
MSLLATLGLELDRALLPASGLGWLVDYGKLPPAPAPLAPYEVLGGALEGGLPVGGEPLAGKGRWKVELGSGGQGKMGEEELIHVFNKY

SEQ ID NO: 1653 - protein, 670 aa, Homo sapiens
  Payload ID: 465;
  Gene Symbol: ATF6;
  Gene Name: activating transcription factor 6;
  Uniprot ID:  P18850;
  ENSP ID: ENSP00000356919
MGEPAGVAGTMESPFSPGLFHRLDEDWDSALFAELGYFTDTDELQLEAANETYENNFDNLDFDLDLMPWESDIWDINNQICTVKDIKAEPQPLSPASSSYSVSSPRSVDSYSSTQHVPEELDLSSSSQMSPLSLYGENSNSLSSAEPLKEDKPVTGPRNKTENGLTPKKKIQVNSKPSIQPKPLLLPAAPKTQTNSSVPAKTIIIQTVPTLMPLAKQQPIISLQPAPTKGQTVLLSQPTVVQLQAPGVLPSAQPVLAVAGGVTQLPNHVVNVVPAPSANSPVNGKLSVTKPVLQSTMRNVGSDIAVLRRQQRMIKNRESACQSRKKKKEYMLGLEARLKAALSENEQLKKENGTLKRQLDEVVSENQRLKVPSPKRRVVCVMIVLAFIILNYGPMSMLEQDSRRMNPSVSPANQRRHLLGFSAKEAQDTSDGIIQKNSYRYDHSVSNDKALMVLTEEPLLYIPPPPCQPLINTTESLRLNHELRGWVHRHEVERTKSRRMTNNQQKTRILQGALEQGSNSQLMAVQYTETTSSISRNSGSELQVYYASPRSYQDFFEAIRRRGDTFYVVSFRRDHLLLPATTHNKTTRPKMSIVLPAININENVINGQDYEVMMQIDCQVMDTRILHIKSSSVPPYLRDQQRNQTNTFFGSPPAATEATHVVSTIPESLQ

SEQ ID NO: 1654 - protein, 703 aa, Homo sapiens
  Payload ID: 466;
  Gene Symbol: ATF6B;
  Gene Name: activating transcription factor 6 beta;
  Uniprot ID:  Q99941;
  ENSP ID: ENSP00000293709
MAELMLLSEIADPTRFFTDNLLSPEDWGLQNSTLYSGLDEVAEEQTQLFRCPEQDVPFDGSSLDVGMDVSPSEPPWELLPIFPDLQVKSEPSSPCSSSSLSSESSRLSTEPSSEALGVGEVLHVKTESLAPPLCLLGDDPTSSFETVQINVIPTSDDSSDVQTKIEPVSPCSSVNSEASLLSADSSSQAFIGEEVLEVKTESLSPSGCLLWDVPAPSLGAVQISMGPSLDGSSGKALPTRKPPLQPKPVVLTTVPMPSRAVPPSTTVLLQSLVQPPPVSPVVLIQGAIRVQPEGPAPSLPRPERKSIVPAPMPGNSCPPEVDAKLLKRQQRMIKNRESACQSRRKKKEYLQGLEARLQAVLADNQQLRRENAALRRRLEALLAENSELKLGSGNRKVVCIMVFLLFIAFNFGPVSISEPPSAPISPRMNKGEPQPRRHLLGFSEQEPVQGVEPLQGSSQGPKEPQPSPTDQPSFSNLTAFPGGAKELLLRDLDQLFLSSDCRHFNRTESLRLADELSGWVQRHQRGRRKIPQRAQERQKSQPRKKSPPVKAVPIQPPGPPERDSVGQLQLYRHPDRSQPAFLDAIDRREDTFYVVSFRRDHLLLPAISHNKTSRPKMSLVMPAMAPNETLSGRGAPGDYEEMMQIECEVMDTRVIHIKTSTVPPSLRKQPSPTPGNATGGPLPVSAASQAHQASHQPLYLNHP

SEQ ID NO: 1655 - protein, 700 aa, Homo sapiens
  Payload ID: 466;
  Gene Symbol: ATF6B;
  Gene Name: activating transcription factor 6 beta;
  Uniprot ID:  Q99941;
  ENSP ID: ENSP00000364347
MAELMLLSEIADPTRFFTDNLLSPEDWDSTLYSGLDEVAEEQTQLFRCPEQDVPFDGSSLDVGMDVSPSEPPWELLPIFPDLQVKSEPSSPCSSSSLSSESSRLSTEPSSEALGVGEVLHVKTESLAPPLCLLGDDPTSSFETVQINVIPTSDDSSDVQTKIEPVSPCSSVNSEASLLSADSSSQAFIGEEVLEVKTESLSPSGCLLWDVPAPSLGAVQISMGPSLDGSSGKALPTRKPPLQPKPVVLTTVPMPSRAVPPSTTVLLQSLVQPPPVSPVVLIQGAIRVQPEGPAPSLPRPERKSIVPAPMPGNSCPPEVDAKLLKRQQRMIKNRESACQSRRKKKEYLQGLEARLQAVLADNQQLRRENAALRRRLEALLAENSELKLGSGNRKVVCIMVFLLFIAFNFGPVSISEPPSAPISPRMNKGEPQPRRHLLGFSEQEPVQGVEPLQGSSQGPKEPQPSPTDQPSFSNLTAFPGGAKELLLRDLDQLFLSSDCRHFNRTESLRLADELSGWVQRHQRGRRKIPQRAQERQKSQPRKKSPPVKAVPIQPPGPPERDSVGQLQLYRHPDRSQPAFLDAIDRREDTFYVVSFRRDHLLLPAISHNKTSRPKMSLVMPAMAPNETLSGRGAPGDYEEMMQIECEVMDTRVIHIKTSTVPPSLRKQPSPTPGNATGGPLPVSAASQAHQASHQPLYLNHP

SEQ ID NO: 1656 - protein, 703 aa, Homo sapiens; identical to SEQ ID NO: 1654
  Payload ID: 466;
  Gene Symbol: ATF6B;
  Gene Name: activating transcription factor 6 beta;
  Uniprot ID:  Q99941;
  ENSP ID: ENSP00000364349

SEQ ID NO: 1657 - protein, 700 aa, Homo sapiens; identical to SEQ ID NO: 1655
  Payload ID: 466;
  Gene Symbol: ATF6B;
  Gene Name: activating transcription factor 6 beta;
  Uniprot ID:  Q99941;
  ENSP ID: ENSP00000372642

SEQ ID NO: 1658 - protein, 142 aa, Homo sapiens
  Payload ID: 466;
  Gene Symbol: ATF6B;
  Gene Name: activating transcription factor 6 beta;
  ENSP ID: ENSP00000389467
  MOD_RES (1)..(1): Any amino acid
XQPSPTDQPSFSNLTAFPGGAKELLLRDLDQLFLSSDCRHFNRTESLRLADELSGWVQRHQRGRRKIPQRAQERQSLDTSPSRSLSHGRSHLQLRQSPSNPLDPQKGILWASCNYIATQTVRSQHSWMQLTDGKTHFMLSLS

SEQ ID NO: 1659 - protein, 700 aa, Homo sapiens; identical to SEQ ID NO: 1655
  Payload ID: 466;
  Gene Symbol: ATF6B;
  Gene Name: activating transcription factor 6 beta;
  Uniprot ID:  Q99941;
  ENSP ID: ENSP00000391131

SEQ ID NO: 1660 - protein, 142 aa, Homo sapiens; identical to SEQ ID NO: 1658
  Payload ID: 466;
  Gene Symbol: ATF6B;
  Gene Name: activating transcription factor 6 beta;
  ENSP ID: ENSP00000393419
  MOD_RES (1)..(1): Any amino acid

SEQ ID NO: 1661 - protein, 700 aa, Homo sapiens; identical to SEQ ID NO: 1655
  Payload ID: 466;
  Gene Symbol: ATF6B;
  Gene Name: activating transcription factor 6 beta;
  Uniprot ID:  Q99941;
  ENSP ID: ENSP00000399764

SEQ ID NO: 1662 - protein, 142 aa, Homo sapiens; identical to SEQ ID NO: 1658
  Payload ID: 466;
  Gene Symbol: ATF6B;
  Gene Name: activating transcription factor 6 beta;
  ENSP ID: ENSP00000399944
  MOD_RES (1)..(1): Any amino acid

SEQ ID NO: 1663 - protein, 703 aa, Homo sapiens; identical to SEQ ID NO: 1654
  Payload ID: 466;
  Gene Symbol: ATF6B;
  Gene Name: activating transcription factor 6 beta;
  Uniprot ID:  Q99941;
  ENSP ID: ENSP00000404725

SEQ ID NO: 1664 - protein, 703 aa, Homo sapiens; identical to SEQ ID NO: 1654
  Payload ID: 466;
  Gene Symbol: ATF6B;
  Gene Name: activating transcription factor 6 beta;
  Uniprot ID:  Q99941;
  ENSP ID: ENSP00000404814

SEQ ID NO: 1665 - protein, 142 aa, Homo sapiens; identical to SEQ ID NO: 1658
  Payload ID: 466;
  Gene Symbol: ATF6B;
  Gene Name: activating transcription factor 6 beta;
  ENSP ID: ENSP00000412066
  MOD_RES (1)..(1): Any amino acid

SEQ ID NO: 1666 - protein, 483 aa, Homo sapiens
  Payload ID: 467;
  Gene Symbol: ATF7;
  Gene Name: activating transcription factor 7;
  Uniprot ID:  P17544;
  ENSP ID: ENSP00000387406
MGDDRPFVCNAPGCGQRFTNEDHLAVHKHKHEMTLKFGPARTDSVIIADQTPTPTRFLKNCEEVGLFNELASSFEHEFKKAADEDEKKAAAGPLDMSLPSTPDIKIKEEEPVEVDSSPPDSPASSPCSPPLKEKEVTPKPVLISTPTPTIVRPGSLPLHLGYDPLHPTLPSPTSVITQAPPSNRQMGSPTGSLPLVMHLANGQTMPVLPGPPVQMPSVISLARPVSMVPNIPGIPGPPVNSSGSISPSGHPIPSEAKMRLKATLTHQVSSINGGCGMVVGTASTMVTARPEQSQILIQHPDAPSPAQPQVSPAQPTPSTGGRRRRTVDEDPDERRQRFLERNRAAASRCRQKRKLWVSSLEKKAEELTSQNIQLSNEVTLLRNEVAQLKQLLLAHKDCPVTALQKKTQGYLESPKESSEPTGSPAPVIQHSSATAPSNGLSVRSAAEAVATSVLTQMASQRTELSMPIQSHVIMTPQSQSAGR

SEQ ID NO: 1667 - protein, 483 aa, Homo sapiens; identical to SEQ ID NO: 1666
  Payload ID: 467;
  Gene Symbol: ATF7;
  Gene Name: activating transcription factor 7;
  Uniprot ID:  P17544;
  ENSP ID: ENSP00000399465

SEQ ID NO: 1668 - protein, 78 aa, Homo sapiens
  Payload ID: 467;
  Gene Symbol: ATF7;
  Gene Name: activating transcription factor 7;
  ENSP ID: ENSP00000449817
MSLPSTPDIKIKEEEPVEVDSSPPDSPASSPCSPPLKEKEVTPKPVLISTPTPTIVRPGSLPLHLGYDPLHPTLPSPT

SEQ ID NO: 1669 - protein, 494 aa, Homo sapiens
  Payload ID: 467;
  Gene Symbol: ATF7;
  Gene Name: activating transcription factor 7;
  Uniprot ID:  P17544;
  ENSP ID: ENSP00000449938
MGDDRPFVCNAPGCGQRFTNEDHLAVHKHKHEMTLKFGPARTDSVIIADQTPTPTRFLKNCEEVGLFNELASSFEHEFKKAADEDEKKARSRTVAKKLVAAAGPLDMSLPSTPDIKIKEEEPVEVDSSPPDSPASSPCSPPLKEKEVTPKPVLISTPTPTIVRPGSLPLHLGYDPLHPTLPSPTSVITQAPPSNRQMGSPTGSLPLVMHLANGQTMPVLPGPPVQMPSVISLARPVSMVPNIPGIPGPPVNSSGSISPSGHPIPSEAKMRLKATLTHQVSSINGGCGMVVGTASTMVTARPEQSQILIQHPDAPSPAQPQVSPAQPTPSTGGRRRRTVDEDPDERRQRFLERNRAAASRCRQKRKLWVSSLEKKAEELTSQNIQLSNEVTLLRNEVAQLKQLLLAHKDCPVTALQKKTQGYLESPKESSEPTGSPAPVIQHSSATAPSNGLSVRSAAEAVATSVLTQMASQRTELSMPIQSHVIMTPQSQSAGR

SEQ ID NO: 1670 - protein, 117 aa, Homo sapiens
  Payload ID: 467;
  Gene Symbol: ATF7;
  Gene Name: activating transcription factor 7;
  Uniprot ID:  P17544;
  ENSP ID: ENSP00000456858
MGDDRPFVCNAPGCGQRFTNEDHLAVHKHKHEMTLKFGPARTDSVIIADQTPTPTRFLKNCEEVGLFNELASSFEHEFKKAADEDEKKARSRTVAKKLVVFRPRLFLLCFGIIFLIG

SEQ ID NO: 1671 - protein, 117 aa, Homo sapiens; identical to SEQ ID NO: 1670
  Payload ID: 467;
  Gene Symbol: ATF7;
  Gene Name: activating transcription factor 7;
  Uniprot ID:  P17544;
  ENSP ID: ENSP00000465192

SEQ ID NO: 1672 - protein, 79 aa, Homo sapiens
  Payload ID: 467;
  Gene Symbol: ATF7;
  Gene Name: activating transcription factor 7;
  ENSP ID: ENSP00000465850
MSLPSTPDIKIKEEEPVEVDSSPPDSPASSPCSPPLKEKEVTPKPVLISTPTPTIVRPGSLPLHLGYDPLHPTLPSPTS

SEQ ID NO: 1673 - protein, 163 aa, Homo sapiens
  Payload ID: 467;
  Gene Symbol: ATF7;
  Gene Name: activating transcription factor 7;
  ENSP ID: ENSP00000468623
MGDDRPFVCNAPGCGQRFTNEDHLAVHKHKHEMTLKFGPARTDSVIIADQTPTPTRFLKNCEEVGLFNELASSFEHEFKKAADEDEKKARSRTVAKKLVAAAGPLDMSLPSTPDIKIKEEEPVEVDSSPPDSPASSPCSPPLKEKEVTPKPVLISTPTPTIVR

SEQ ID NO: 1674 - protein, 1270 aa, Homo sapiens
  Payload ID: 468;
  Gene Symbol: ATF7IP;
  Gene Name: activating transcription factor 7 interacting prt;
  Uniprot ID:  Q6VMQ6;
  ENSP ID: ENSP00000261168
MDSLEEPQKKVFKARKTMRVSDRQQLEAVYKVKEELLKTDVKLLNGNHENGDLDPTSPLENMDYIKDKEEVNGIEEICFDPEGSKAEWKETPCILSVNVKNKQDDDLNCEPLSPHNITPEPVSKLPAEPVSGDPAPGDLDAGDPASGVLASGDSTSGDPTSSEPSSSDAASGDATSGDAPSGDVSPGDATSGDATADDLSSGDPTSSDPIPGEPVPVEPISGDCAADDIASSEITSVDLASGAPASTDPASDDLASGDLSSSELASDDLATGELASDELTSESTFDRTFEPKSVPVCEPVPEIDNIEPSSNKDDDFLEKNGADEKLEQIQSKDSLDEKNKADNNIDANEETLETDDTTICSDRPPENEKKVEEDIITELALGEDAISSSMEIDQGEKNEDETSADLVETINENVIEDNKSENILENTDSMETDEIIPILEKLAPSEDELTCFSKTSLLPIDETNPDLEEKMESSFGSPSKQESSESLPKEAFLVLSDEEDISGEKDESEVISQNETCSPAEVESNEKDNKPEEEEQVIHEDDERPSEKNEFSRRKRSKSEDMDNVQSKRRRYMEEEYEAEFQVKITAKGDINQKLQKVIQWLLEEKLCALQCAVFDKTLAELKTRVEKIECNKRHKTVLTELQAKIARLTKRFEAAKEDLKKRHEHPPNPPVSPGKTVNDVNSNNNMSYRNAGTVRQMLESKRNVSESAPPSFQTPVNTVSSTNLVTPPAVVSSQPKLQTPVTSGSLTATSVLPAPNTATVVATTQVPSGNPQPTISLQPLPVILHVPVAVSSQPQLLQSHPGTLVTNQPSGNVEFISVQSPPTVSGLTKNPVSLPSLPNPTKPNNVPSVPSPSIQRNPTASAAPLGTTLAVQAVPTAHSIVQATRTSLPTVGPSGLYSPSTNRGPIQMKIPISAFSTSSAAEQNSNTTPRIENQTNKTIDASVSKKAADSTSQCGKATGSDSSGVIDLTMDDEESGASQDPKKLNHTPVSTMSSSQPVSRPLQPIQPAPPLQPSGVPTSGPSQTTIHLLPTAPTTVNVTHRPVTQVTTRLPVPRAPANHQVVYTTLPAPPAQAPLRGTVMQAPAVRQVNPQNSVTVRVPQTTTYVVNNGLTLGSTGPQLTVHHRPPQVHTEPPRPVHPAPLPEAPQPQRLPPEAASTSLPQKPHLKLARVQSQNGIVLSWSVLEVDRSCATVDSYHLYAYHEEPSATVPSQWKKIGEVKALPLPMACTLTQFVSGSKYYFAVRAKDIYGRFGPFCDPQSTDVISSTQSS

SEQ ID NO: 1675 - protein, 515 aa, Homo sapiens
  Payload ID: 468;
  Gene Symbol: ATF7IP;
  Gene Name: activating transcription factor 7 interacting prt;
  ENSP ID: ENSP00000379575
MDSLEEPQKKVFKARKTMRVSDRQQLEAVYKVKEELLKTDVKLLNGNHENGDLDPTSPLENMDYIKDKEEVNGIEEICFDPEGSKAEWKETPCILSVNVKNKQDDDLNCEPLSPHNITPEPVSKLPAEPVSGDPAPGDLDAGDPASGVLASGDSTSGDPTSSEPSSSDAASGDATSGDAPSGDVSPGDATSGDATADDLSSGDPTSSDPIPGEPVPVEPISGDCAADDIASSEITSVDLASGAPASTDPASDDLASGDLSSSELASDDLATGELASDELTSESTFDRTFEPKSVPVCEPVPEIDNIEPSSNKDDDFLEKNGADEKLEQIQSKDSLDEKNKADNNIDANEETLETDDTTICSDRPPENEKKVEEDIITELALGEDAISSSMEIDQGEKNEDETSADLVETINENVIEDNKSENILENTDSMETDEIIPILEKLAPSEDELTCFSKTSLLPIDETNPDLEEKMESSFGSPSKQESSESLPKEAFLVLSDEEDISGEKDESEVISQNE

SEQ ID NO: 1676 - protein, 125 aa, Homo sapiens
  Payload ID: 468;
  Gene Symbol: ATF7IP;
  Gene Name: activating transcription factor 7 interacting prt;
  ENSP ID: ENSP00000414158
MDSLEEPQKKVFKARKTMRVSDRQQLEAVYKVKEELLKTDVKLLNGNHENGDLDPTSPLENMDYIKDKEEVNGIEEICFDPEGSKAEWKETPCILSVNVKNKQDDDLNCEPLSPHNITPEPVSKL

SEQ ID NO: 1677 - protein, 115 aa, Homo sapiens
  Payload ID: 468;
  Gene Symbol: ATF7IP;
  Gene Name: activating transcription factor 7 interacting prt;
  ENSP ID: ENSP00000437711
  MOD_RES (1)..(1): Any amino acid
XTPVSTMSSSQPVSRPLQPIQPAPPLQPSGVPTSGPSQTTIHLLPTAPTTVNVTHRPVTQVTTRLPVPRAPANHQVVYTTLPAPPAQAPLRGTVMQAPAVRQVNPQNRELNRENC

SEQ ID NO: 1678 - protein, 32 aa, Homo sapiens
  Payload ID: 468;
  Gene Symbol: ATF7IP;
  Gene Name: activating transcription factor 7 interacting prt;
  ENSP ID: ENSP00000439192
MDSLEEPQKKVFKARKTMRVSDRQQLEAVYKV

SEQ ID NO: 1679 - protein, 152 aa, Homo sapiens
  Payload ID: 468;
  Gene Symbol: ATF7IP;
  Gene Name: activating transcription factor 7 interacting prt;
  ENSP ID: ENSP00000439279
MDSLEEPQKKVFKARKTMRVSDRQQLEAVYKVKEELLKTDVKLLNGNHENGDLDPTSPLENMDYIKDKEEVNGIEEICFDPEGSKAEWKETPCILSVNVKNKQDDDLNCEPLSPHNITPEPVSKLPAEPVSGDPAPGDLDAGDPASGVLASG

SEQ ID NO: 1680 - protein, 176 aa, Homo sapiens
  Payload ID: 468;
  Gene Symbol: ATF7IP;
  Gene Name: activating transcription factor 7 interacting prt;
  ENSP ID: ENSP00000439578
MDSLEEPQKKVFKARKTMRVSDRQQLEAVYKVKEELLKTDVKLLNGNHENGDLDPTSPLENMDYIKDKEEVNGIEEICFDPEGSKAEWKETPCILSVNVKNKQDDDLNCEPLSPHNITPEPVSKLPAEPVSGDPAPGDLDAGDPASGVLASGDSTSGDPTSSEPSSSDAASGDATS

SEQ ID NO: 1681 - protein, 1278 aa, Homo sapiens
  Payload ID: 468;
  Gene Symbol: ATF7IP;
  Gene Name: activating transcription factor 7 interacting prt;
  Uniprot ID:  Q6VMQ6;
  ENSP ID: ENSP00000440440
MHQDQRFRMDSLEEPQKKVFKARKTMRVSDRQQLEAVYKVKEELLKTDVKLLNGNHENGDLDPTSPLENMDYIKDKEEVNGIEEICFDPEGSKAEWKETPCILSVNVKNKQDDDLNCEPLSPHNITPEPVSKLPAEPVSGDPAPGDLDAGDPASGVLASGDSTSGDPTSSEPSSSDAASGDATSGDAPSGDVSPGDATSGDATADDLSSGDPTSSDPIPGEPVPVEPISGDCAADDIASSEITSVDLASGAPASTDPASDDLASGDLSSSELASDDLATGELASDELTSESTFDRTFEPKSVPVCEPVPEIDNIEPSSNKDDDFLEKNGADEKLEQIQSKDSLDEKNKADNNIDANEETLETDDTTICSDRPPENEKKVEEDIITELALGEDAISSSMEIDQGEKNEDETSADLVETINENVIEDNKSENILENTDSMETDEIIPILEKLAPSEDELTCFSKTSLLPIDETNPDLEEKMESSFGSPSKQESSESLPKEAFLVLSDEEDISGEKDESEVISQNETCSPAEVESNEKDNKPEEEEQVIHEDDERPSEKNEFSRRKRSKSEDMDNVQSKRRRYMEEEYEAEFQVKITAKGDINQKLQKVIQWLLEEKLCALQCAVFDKTLAELKTRVEKIECNKRHKTVLTELQAKIARLTKRFEAAKEDLKKRHEHPPNPPVSPGKTVNDVNSNNNMSYRNAGTVRQMLESKRNVSESAPPSFQTPVNTVSSTNLVTPPAVVSSQPKLQTPVTSGSLTATSVLPAPNTATVVATTQVPSGNPQPTISLQPLPVILHVPVAVSSQPQLLQSHPGTLVTNQPSGNVEFISVQSPPTVSGLTKNPVSLPSLPNPTKPNNVPSVPSPSIQRNPTASAAPLGTTLAVQAVPTAHSIVQATRTSLPTVGPSGLYSPSTNRGPIQMKIPISAFSTSSAAEQNSNTTPRIENQTNKTIDASVSKKAADSTSQCGKATGSDSSGVIDLTMDDEESGASQDPKKLNHTPVSTMSSSQPVSRPLQPIQPAPPLQPSGVPTSGPSQTTIHLLPTAPTTVNVTHRPVTQVTTRLPVPRAPANHQVVYTTLPAPPAQAPLRGTVMQAPAVRQVNPQNSVTVRVPQTTTYVVNNGLTLGSTGPQLTVHHRPPQVHTEPPRPVHPAPLPEAPQPQRLPPEAASTSLPQKPHLKLARVQSQNGIVLSWSVLEVDRSCATVDSYHLYAYHEEPSATVPSQWKKIGEVKALPLPMACTLTQFVSGSKYYFAVRAKDIYGRFGPFCDPQSTDVISSTQSS

SEQ ID NO: 1682 - protein, 96 aa, Homo sapiens
  Payload ID: 468;
  Gene Symbol: ATF7IP;
  Gene Name: activating transcription factor 7 interacting prt;
  ENSP ID: ENSP00000440587
MDNVQSKRRRYMEEEYEAEFQVKITAKGDINQKLQKVIQWLLEEKLCALQCAVFDKTLAELKTRVEKIECNKRHKTVLTELQAKIARLTKRFEAAK

SEQ ID NO: 1683 - protein, 169 aa, Homo sapiens
  Payload ID: 468;
  Gene Symbol: ATF7IP;
  Gene Name: activating transcription factor 7 interacting prt;
  ENSP ID: ENSP00000441483
MDSLEEPQKKVFKARKTMRVSDRQQLEAVYKVKEELLKTDVKLLNGNHENGDLDPTSPLENMDYIKDKEEVNGIEEICFDPEGSKAEWKETPCILSVNVKNKQDDDLNCEPLSPHNITPEPVSKLPAEPVSGDPAPGDLDAGDPASGVLASGDSTSGDPTSSEPSSSDA

SEQ ID NO: 1684 - protein, 89 aa, Homo sapiens
  Payload ID: 468;
  Gene Symbol: ATF7IP;
  Gene Name: activating transcription factor 7 interacting prt;
  ENSP ID: ENSP00000442958
MDSLEEPQKKVFKARKTMRVSDRQQLEAVYKVKEELLKTDVKLLNGNHENGDLDPTSPLENMDYIKDKEEVNGIEEICFDPEGSKAEWK

SEQ ID NO: 1685 - protein, 1105 aa, Homo sapiens
  Payload ID: 468;
  Gene Symbol: ATF7IP;
  Gene Name: activating transcription factor 7 interacting prt;
  Uniprot ID:  Q6VMQ6;
  ENSP ID: ENSP00000443179
MDSLEEPQKKVFKARKTMRVSDRQQLEAVYKVKEELLKTDVKLLNGNHENGDLDPTSPLENMDYIKDKEEVNGIEEICFDPEGSKAEWKETPCILSVNVKNKQDDDLNCEPLSPHNITPEPVSKLPAEPVSGDPAPGDLDAGDPASGVLASGDSTSGDPTSSEPSSSDAASGDATSGDAPSGDVSPGDATSGDATADDLSSGDPTSSDPIPGEPVPVEPISGDCAADDIASSEITSVDLASGAPASTDPASDDLASGDLSSSELASDDLATGELASDELTSESTFDRTFEPKSVPVCEPVPEIDNIEPSSNKDDDFLEKNGADEKLEQIQSKDSLDEKNKADNNIDANEETLETDDTTICSDRPPENEKKVEEDIITELALGEDAISSSMEIDQGEKNEDETSADLVETINENVIEDNKSENILENTDSMETDEIIPILEKLAPSEDELTCFSKTSLLPIDETNPDLEEKMESSFGSPSKQESSESLPKEAFLVLSDEEDISGEKDESEVISQNETCSPEVESNEKDNKPEEEEQVIHEDDERPSEKNEFSRRKRSKSEDMDNVQSKRRRYMEEEYEAEFQVKITAKGDINQKLQKVIQWLLEEKLCALQCAVFDKTLAELKTRVEKIECNKRHKTVLTELQAKIARLTKRFEAAKEDLKKRHEHPPNPPVSPGKTVNDVNSNNNMSYRNAGTVRQMLESKRNVSESAPPSFQTPVNTVSSTNLVTPPAVVSSQPKLQTPVTSGSLTATSVLPAPNTATVVATTQVPSGNPQPTISLQPLPVILHVPVAVSSQPQLLQSHPGTLVTNQPSGNVEFISVQSPPTVSGLTKNPVSLPSLPNPTKPNNVPSVPSPSIQRNPTASAAPLGTTLAVQAVPTAHSIVQATRTSLPTVGPSGLYSPSTNRGPIQMKIPISAFSTSSAAEQNSNTTPRIENQTNKTIDASVSKKAADSTSQCGKATGSDSSGVIDLTMDDEESGASQDPKKLNHTPVSTMSSSQPVSRPLQPIQPAPPLQPSGVPTSGPSQTTIHLLPTAPTTVNVTHRPVTQVTTRLPVPRAPANHQVVYTTLPAPPAQAPLRGTVMQAPAVRQVNPQNSKRFFLYMAPRYM

SEQ ID NO: 1686 - protein, 132 aa, Homo sapiens
  Payload ID: 468;
  Gene Symbol: ATF7IP;
  Gene Name: activating transcription factor 7 interacting prt;
  ENSP ID: ENSP00000443540
MDSLEEPQKKVFKARKTMRVSDRQQLEAVYKVKEELLKTDVKLLNGNHENGDLDPTSPLENMDYIKDKEEVNGIEEICFDPEGSKAEWKETPCILSVNVKNKQDDDLNCEPLSPHNITPEPVSKLPAEPVSG

SEQ ID NO: 1687 - protein, 59 aa, Homo sapiens
  Payload ID: 468;
  Gene Symbol: ATF7IP;
  Gene Name: activating transcription factor 7 interacting prt;
  ENSP ID: ENSP00000443855
MDSLEEPQKKVFKARKTMRVSDRQQLEAVYKVKEELLKTDVKLLNGNHENGDLDPTSPL

SEQ ID NO: 1688 - protein, 1270 aa, Homo sapiens; identical to SEQ ID NO: 1674
  Payload ID: 468;
  Gene Symbol: ATF7IP;
  Gene Name: activating transcription factor 7 interacting prt;
  Uniprot ID:  Q6VMQ6;
  ENSP ID: ENSP00000444589

SEQ ID NO: 1689 - protein, 143 aa, Homo sapiens
  Payload ID: 468;
  Gene Symbol: ATF7IP;
  Gene Name: activating transcription factor 7 interacting prt;
  ENSP ID: ENSP00000444620
MDSLEEPQKKVFKARKTMRVSDRQQLEAVYKVKEELLKTDVKLLNGNHENGDLDPTSPLENMDYIKDKEEVNGIEEICFDPEGSKAEFQVKITAKGDINQKLQKVIQWLLEEKLCALQCAVFDKTLAELKTRVEKIECNKRHK

SEQ ID NO: 1690 - protein, 176 aa, Homo sapiens; identical to SEQ ID NO: 1680
  Payload ID: 468;
  Gene Symbol: ATF7IP;
  Gene Name: activating transcription factor 7 interacting prt;
  ENSP ID: ENSP00000444784

SEQ ID NO: 1691 - protein, 103 aa, Homo sapiens
  Payload ID: 468;
  Gene Symbol: ATF7IP;
  Gene Name: activating transcription factor 7 interacting prt;
  ENSP ID: ENSP00000445604
MDSLEEPQKKVFKARKTMRVSDRQQLEAVYKVKEELLKTDVKLLNGNHENGDLDPTSPLENMDYIKDKEEVNGIEEICFDPEGSKAEWKETPCILSVNVKNKQ

SEQ ID NO: 1692 - protein, 1269 aa, Homo sapiens
  Payload ID: 468;
  Gene Symbol: ATF7IP;
  Gene Name: activating transcription factor 7 interacting prt;
  Uniprot ID:  Q6VMQ6;
  ENSP ID: ENSP00000445955
MDSLEEPQKKVFKARKTMRVSDRQQLEAVYKVKEELLKTDVKLLNGNHENGDLDPTSPLENMDYIKDKEEVNGIEEICFDPEGSKAEWKETPCILSVNVKNKQDDDLNCEPLSPHNITPEPVSKLPAEPVSGDPAPGDLDAGDPASGVLASGDSTSGDPTSSEPSSSDAASGDATSGDAPSGDVSPGDATSGDATADDLSSGDPTSSDPIPGEPVPVEPISGDCAADDIASSEITSVDLASGAPASTDPASDDLASGDLSSSELASDDLATGELASDELTSESTFDRTFEPKSVPVCEPVPEIDNIEPSSNKDDDFLEKNGADEKLEQIQSKDSLDEKNKADNNIDANEETLETDDTTICSDRPPENEKKVEEDIITELALGEDAISSSMEIDQGEKNEDETSADLVETINENVIEDNKSENILENTDSMETDEIIPILEKLAPSEDELTCFSKTSLLPIDETNPDLEEKMESSFGSPSKQESSESLPKEAFLVLSDEEDISGEKDESEVISQNETCSPEVESNEKDNKPEEEEQVIHEDDERPSEKNEFSRRKRSKSEDMDNVQSKRRRYMEEEYEAEFQVKITAKGDINQKLQKVIQWLLEEKLCALQCAVFDKTLAELKTRVEKIECNKRHKTVLTELQAKIARLTKRFEAAKEDLKKRHEHPPNPPVSPGKTVNDVNSNNNMSYRNAGTVRQMLESKRNVSESAPPSFQTPVNTVSSTNLVTPPAVVSSQPKLQTPVTSGSLTATSVLPAPNTATVVATTQVPSGNPQPTISLQPLPVILHVPVAVSSQPQLLQSHPGTLVTNQPSGNVEFISVQSPPTVSGLTKNPVSLPSLPNPTKPNNVPSVPSPSIQRNPTASAAPLGTTLAVQAVPTAHSIVQATRTSLPTVGPSGLYSPSTNRGPIQMKIPISAFSTSSAAEQNSNTTPRIENQTNKTIDASVSKKAADSTSQCGKATGSDSSGVIDLTMDDEESGASQDPKKLNHTPVSTMSSSQPVSRPLQPIQPAPPLQPSGVPTSGPSQTTIHLLPTAPTTVNVTHRPVTQVTTRLPVPRAPANHQVVYTTLPAPPAQAPLRGTVMQAPAVRQVNPQNSVTVRVPQTTTYVVNNGLTLGSTGPQLTVHHRPPQVHTEPPRPVHPAPLPEAPQPQRLPPEAASTSLPQKPHLKLARVQSQNGIVLSWSVLEVDRSCATVDSYHLYAYHEEPSATVPSQWKKIGEVKALPLPMACTLTQFVSGSKYYFAVRAKDIYGRFGPFCDPQSTDVISSTQSS

SEQ ID NO: 1693 - protein, 168 aa, Homo sapiens
  Payload ID: 468;
  Gene Symbol: ATF7IP;
  Gene Name: activating transcription factor 7 interacting prt;
  ENSP ID: ENSP00000446260
MDSLEEPQKKVFKARKTMRVSDRQQLEAVYKVKEELLKTDVKLLNGNHENGDLDPTSPLENMDYIKDKEEVNGIEEICFDPEGSKAEWKETPCILSVNVKNKQDDDLNCEPLSPHNITPEPVSKLPAEPVSGDPAPGDLDAGDPASGVLASGDSTSGDPTSSEPSSSD

SEQ ID NO: 1694 - protein, 543 aa, Homo sapiens
  Payload ID: 469;
  Gene Symbol: ATF7IP2;
  Gene Name: activating transcription factor 7 interacting prt 2;
  Uniprot ID:  Q5U623;
  ENSP ID: ENSP00000322811
MASPDRSKRKILKAKKTMPLSCRKQVEMLNKSRNVEALKTAIGSNVPSGNQSFSPSVITRTTEITKCSPSENGASSLDSNKNSISEKSKVFSQNCIKPVEEIVHSETKLEQVVCSYQKPSRTTESPSRVFTEEAKDSLNTSENDSEHQTNVTRSLFEHEGACSLKSSCCPPSVLSGVVQMPESTVTSTVGDKKTDQMVFHLETNSNSESHDKRQSDNILCSEDSGFVPVEKTPNLVNSVTSNNCADDILKTDECSRTSISNCESADSTWQSSLDTNNNSHYQKKRMFSENEENVKRMKTSEQINENICVSLERQTAFLEQVRHLIQQEIYSINYELFDKKLKELNQRIGKTECRNKHEGIADKLLAKIAKLQRRIKTVLLFQRNCLKPNMLSSNGASKVANSEAMILDKNLESVNSPIEKSSVNYEPSNPSEKGSKKINLSSDQNKSVSESNNDDVMLISVESPNLTTPITSNPTDTRKITSGNSSNSPNAEVMKVQYPPWSHIRKLLQTQRKQPHWHKMQSRFLSPLSTCHLSQNHQHHYLN

SEQ ID NO: 1695 - protein, 682 aa, Homo sapiens
  Payload ID: 469;
  Gene Symbol: ATF7IP2;
  Gene Name: activating transcription factor 7 interacting prt 2;
  Uniprot ID:  Q5U623;
  ENSP ID: ENSP00000348799
MASPDRSKRKILKAKKTMPLSCRKQVEMLNKSRNVEALKTAIGSNVPSGNQSFSPSVITRTTEITKCSPSENGASSLDSNKNSISEKSKVFSQNCIKPVEEIVHSETKLEQVVCSYQKPSRTTESPSRVFTEEAKDSLNTSENDSEHQTNVTRSLFEHEGACSLKSSCCPPSVLSGVVQMPESTVTSTVGDKKTDQMVFHLETNSNSESHDKRQSDNILCSEDSGFVPVEKTPNLVNSVTSNNCADDILKTDECSRTSISNCESADSTWQSSLDTNNNSHYQKKRMFSENEENVKRMKTSEQINENICVSLERQTAFLEQVRHLIQQEIYSINYELFDKKLKELNQRIGKTECRNKHEGIADKLLAKIAKLQRRIKTVLLFQRNCLKPNMLSSNGASKVANSEAMILDKNLESVNSPIEKSSVNYEPSNPSEKGSKKINLSSDQNKSVSESNNDDVMLISVESPNLTTPITSNPTDTRKITSGNSSNSPNAEVMAVQKKLDSIIDLTKEGLSNCNTESPVSPLESHSKAASNSKETTPLAQNAVQVPESFEHLPPLPEPPAPLPELVDKTRDTLPPQKPELKVKRVFRPNGIALTWNITKINPKCAPVESYHLFLCHENSNNKLIWKKIGEIKALPLPMACTLSQFLASNRYYFTVQSKDIFGRYGPFCDIKSIPGFSENLT

SEQ ID NO: 1696 - protein, 543 aa, Homo sapiens; identical to SEQ ID NO: 1694
  Payload ID: 469;
  Gene Symbol: ATF7IP2;
  Gene Name: activating transcription factor 7 interacting prt 2;
  Uniprot ID:  Q5U623;
  ENSP ID: ENSP00000379807

SEQ ID NO: 1697 - protein, 682 aa, Homo sapiens; identical to SEQ ID NO: 1695
  Payload ID: 469;
  Gene Symbol: ATF7IP2;
  Gene Name: activating transcription factor 7 interacting prt 2;
  Uniprot ID:  Q5U623;
  ENSP ID: ENSP00000379808

SEQ ID NO: 1698 - protein, 425 aa, Homo sapiens
  Payload ID: 469;
  Gene Symbol: ATF7IP2;
  Gene Name: activating transcription factor 7 interacting prt 2;
  ENSP ID: ENSP00000440791
MASPDRSKRKILKAKKTMPLSCRKQVEMLNKSRNVEALKTAIGSNVPSGNQSFSPSVITRTTEITKCSPSENGASSLDSNKNSISEKSKVFSQNCIKPVEEIVHSETKLEQVVCSYQKPSRTTESPSRVFTEEAKDSLNTSENDSEHQTNVTRSLFEHEGACSLKSSCCPPSVLSGVVQMPESTVTSTVGDKKTDQMVFHLETNSNSESHDKRQSDNILCSEDSGFVPVEKTPNLVNSVTSNNCADDILKTDECSRTSISNCESADSTWQSSLDTNNNSHYQKKRMFSENEENVKRMKTSEQINENICVSLERQTAFLEQVRHLIQQEIYSINYELFDKKLKELNQRIGKTECRNKHEGIADKLLAKIAKLQRRIKTVLLFQRNCLKPNMLSSNGASKIPEKLHQEILAILPMLKLWLYRRNLIL

SEQ ID NO: 1699 - protein, 226 aa, Homo sapiens
  Payload ID: 469;
  Gene Symbol: ATF7IP2;
  Gene Name: activating transcription factor 7 interacting prt 2;
  ENSP ID: ENSP00000446119
MLISVESPNLTTPITSNPTDTRKITSGNSSNSPNAEVMAVQKKLDSIIDLTKEGLSNCNTESPVSPLESHSKAASNSKETTPLAQNAVQVPESFEHLPPLPEPPAPLPELVDKTRDTLPPQKPELKVKRVFRPNGIALTWNITKINPKCAPVESYHLFLCHENSNNKLIWKKIGEIKALPLPMACTLSQFLASNRYYFTVQSKDIFGRYGPFCDIKSIPGFSENLT

SEQ ID NO: 1700 - protein, 26 aa, Homo sapiens
  Payload ID: 469;
  Gene Symbol: ATF7IP2;
  Gene Name: activating transcription factor 7 interacting prt 2;
  ENSP ID: ENSP00000454809
MASPDRSKRKILKAKKTMPLSCRKQV

SEQ ID NO: 1701 - protein, 398 aa, Homo sapiens
  Payload ID: 469;
  Gene Symbol: ATF7IP2;
  Gene Name: activating transcription factor 7 interacting prt 2;
  ENSP ID: ENSP00000455259
MASPDRSKRKILKAKKTMPLSCRKQVEMLNKSRNVEALKTAIGSNVPSGNQSFSPSVITRTTEITKCSPSENGASSLDSNKNSISEKSKVFSQNCIKPVEEIVHSETKLEQVVCSYQKPSRTTESPSRVFTEEAKDSLNTSENDSEHQTNVTRSLFEHEGACSLKSSCCPPSVLSGVVQMPESTVTSTVGDKKTDQMVFHLETNSNSESHDKRQSDNILCSEDSGFVPVEKTPNLVNSVTSNNCADDILKTDECSRTSISNCESADSTWQSSLDTNNNSHYQKKRMFSENEENVKRMKTSEQINENICVSLERQTAFLEQVRHLIQQEIYSINYELFDKKLKELNQRIGKTECRNKHEGIADKLLAKIAKLQRRIKTVLLFQRNCLKPNMLSSNGASK

SEQ ID NO: 1702 - protein, 74 aa, Homo sapiens
  Payload ID: 469;
  Gene Symbol: ATF7IP2;
  Gene Name: activating transcription factor 7 interacting prt 2;
  ENSP ID: ENSP00000456023
MASPDRSKRKILKAKKTMPLSCRKQVEMLNKSRNVEALKTAIGSNVPSGNQSFSPSVITRTTEITKCSPSENGA

SEQ ID NO: 1703 - protein, 84 aa, Homo sapiens
  Payload ID: 469;
  Gene Symbol: ATF7IP2;
  Gene Name: activating transcription factor 7 interacting prt 2;
  ENSP ID: ENSP00000457731
MASPDRSKRKILKAKKTMPLSCRKQVEMLNKSRNVEALKTAIGSNVPSGNQSFSPSVITRTTEITKCSPSENGASSLDSNKNSI

SEQ ID NO: 1704 - protein, 17 aa, Homo sapiens
  Payload ID: 469;
  Gene Symbol: ATF7IP2;
  Gene Name: activating transcription factor 7 interacting prt 2;
  ENSP ID: ENSP00000461383
MASPDRSKRKILKAKKT

SEQ ID NO: 1705 - protein, 198 aa, Homo sapiens [sequence omitted]

SEQ ID NO: 1706 - protein, 144 aa, Homo sapiens
  Payload ID: 470;
  Gene Symbol: AICDA;
  Gene Name: activation-induced cytidine deaminase;
  ENSP ID: ENSP00000439103
  MOD_RES (1)..(1): Any amino acid
XSLLMNRRKFLYQFKNVRWAKGRRETYLCYVVKRRDSATSFSLDFGYLRNKNGCHVELLFLRYISDWDLDPGRCYRVTWFTSWSPCYDCARHVADFLRGNPNLSLRIFTARLYFCEDRKAEPEGLRRLHRAGVQIAIMTFKAPV

SEQ ID NO: 1707 - protein, 68 aa, Homo sapiens
  Payload ID: 470;
  Gene Symbol: AICDA;
  Gene Name: activation-induced cytidine deaminase;
  ENSP ID: ENSP00000439538
  MOD_RES (1)..(1): Any amino acid
XSLLMNRRKFLYQFKNVRWAKGRRETYLCYVVKRRDSATSFSLDFGYLRNKPLYEVDDLRDAFRTLGL

SEQ ID NO: 1708 - protein, 197 aa, Homo sapiens
  Payload ID: 470;
  Gene Symbol: AICDA;
  Gene Name: activation-induced cytidine deaminase;
  ENSP ID: ENSP00000443060
  MOD_RES (1)..(1): Any amino acid
XSLLMNRRKFLYQFKNVRWAKGRRETYLCYVVKRRDSATSFSLDFGYLRNKNGCHVELLFLRYISDWDLDPGRCYRVTWFTSWSPCYDCARHVADFLRGNPNLSLRIFTARLYFCEDRKAEPEGLRRLHRAGVQIAIMTFKDYFYCWNTFVENHERTFKAWEGLHENSVRLSRQLRRILLPLYEVDDLRDAFRTLGL

SEQ ID NO: 1709 - protein, 188 aa, Homo sapiens
  Payload ID: 470;
  Gene Symbol: AICDA;
  Gene Name: activation-induced cytidine deaminase;
  Uniprot ID:  Q9GZX7;
  ENSP ID: ENSP00000445691
MDSLLMNRRKFLYQFKNVRWAKGRRETYLCYVVKRRDSATSFSLDFGYLRNKNGCHVELLFLRYISDWDLDPGRCYRVTWFTSWSPCYDCARHVADFLRGNPNLSLRIFTARLYFCEDRKAEPEGLRRLHRAGVQIAIMTFKENHERTFKAWEGLHENSVRLSRQLRRILLPLYEVDDLRDAFRTLGL

SEQ ID NO: 1710 - protein, 272 aa, Homo sapiens
  Payload ID: 471;
  Gene Symbol: ABT1;
  Gene Name: activator of basal transcription 1;
  Uniprot ID:  Q9ULW3;
  ENSP ID: ENSP00000274849
MEAEESEKAATEQEPLEGTEQTLDAEEEQEESEEAACGSKKRVVPGIVYLGHIPPRFRPLHVRNLLSAYGEVGRVFFQAEDRFVRRKKKAAAAAGGKKRSYTKDYTEGWVEFRDKRIAKRVAASLHNTPMGARRRSPFRYDLWNLKYLHRFTWSHLSEHLAFERQVRRQRLRAEVAQAKRETDFYLQSVERGQRFLAADGDPARPDGSWTFAQRPTEQELRARKAARPGGRERARLATAQDKARSNKGLLARIFGAPPPSESMEGPSLVRDS

SEQ ID NO: 1711 - protein, 822 aa, Homo sapiens
  Payload ID: 472;
  Gene Symbol: ABR;
  Gene Name: active BCR-related;
  Uniprot ID:  Q12979;
  ENSP ID: ENSP00000291107
MEEEEEAIGLLDKVLEDEDVFLLEECELGTPTSPGSGSPFLVAVKVEAGKGLEMRKLVLSGFLASEEIYINQLEALLLPMKPLKATATTSQPVLTIQQIETIFYKIQDIYEIHKEFYDNLCPKVQQWDSQVTMGHLFQKLASQLGVYKAFVDNYKVALETAEKCSQSNNQFQKISEELKVKGPKDSKDSHTSVTMEALLYKPIDRVTRSTLVLHDLLKHTPVDHPDYPLLQDALRISQNFLSSINEDIDPRRTAVTTPKGETRQLVKDGFLVEVSESSRKLRHVFLFTDVLLCAKLKKTSAGKHQQYDCKWYIPLADLVFPSPEESEASPQVHPFPDHELEDMKMKISALKSEIQKEKANKGQSRAIERLKKKMFENEFLLLLNSPTIPFRIHNRNGKSYLFLLSSDYERSEWREAIQKLQKKDLQAFVLSSVELQVLTGSCFKLRTVHNIPVTSNKDDDESPGLYGFLHVIVHSAKGFKQSANLYCTLEVDSFGYFVSKAKTRVFRDTAEPKWDEEFEIELEGSQSLRILCYEKCYDKTKVNKDNNEIVDKIMGKGQIQLDPQTVETKNWHTDVIEMNGIKVEFSMKFTSRDMSLKRTPSKKQTGVFGVKISVVTKRERSKVPYIVRQCVEEVEKRGIEEVGIYRISGVATDIQALKAVFDANNKDILLMLSDMDINAIAGTLKLYFRELPEPLLTDRLYPAFMEGIALSDPAAKENCMMHLLRSLPDPNLITFLFLLEHLKRVAEKEPINKMSLHNLATVFGPTLLRPSEVESKAHLTSAADIWSHDVMAQVQVLLYYLQHPPISFAELKRNTLYFSTDV

SEQ ID NO: 1712 - protein, 859 aa, Homo sapiens
  Payload ID: 472;
  Gene Symbol: ABR;
  Gene Name: active BCR-related;
  Uniprot ID:  Q12979;
  ENSP ID: ENSP00000303909
MEPLSHRGLPRLSWIDTLYSNFSYGTDEYDGEGNEEQKGPPEGSETMPYIDESPTMSPQLSARSQGGGDGVSPTPPEGLAPGVEAGKGLEMRKLVLSGFLASEEIYINQLEALLLPMKPLKATATTSQPVLTIQQIETIFYKIQDIYEIHKEFYDNLCPKVQQWDSQVTMGHLFQKLASQLGVYKAFVDNYKVALETAEKCSQSNNQFQKISEELKVKGPKDSKDSHTSVTMEALLYKPIDRVTRSTLVLHDLLKHTPVDHPDYPLLQDALRISQNFLSSINEDIDPRRTAVTTPKGETRQLVKDGFLVEVSESSRKLRHVFLFTDVLLCAKLKKTSAGKHQQYDCKWYIPLADLVFPSPEESEASPQVHPFPDHELEDMKMKISALKSEIQKEKANKGQSRAIERLKKKMFENEFLLLLNSPTIPFRIHNRNGKSYLFLLSSDYERSEWREAIQKLQKKDLQAFVLSSVELQVLTGSCFKLRTVHNIPVTSNKDDDESPGLYGFLHVIVHSAKGFKQSANLYCTLEVDSFGYFVSKAKTRVFRDTAEPKWDEEFEIELEGSQSLRILCYEKCYDKTKVNKDNNEIVDKIMGKGQIQLDPQTVETKNWHTDVIEMNGIKVEFSMKFTSRDMSLKRTPSKKQTGVFGVKISVVTKRERSKVPYIVRQCVEEVEKRGIEEVGIYRISGVATDIQALKAVFDANNKDILLMLSDMDINAIAGTLKLYFRELPEPLLTDRLYPAFMEGIALSDPAAKENCMMHLLRSLPDPNLITFLFLLEHLKRVAEKEPINKMSLHNLATVFGPTLLRPSEVESKAHLTSAADIWSHDVMAQVQVLLYYLQHPPISFAELKRNTLYFSTDV

SEQ ID NO: 1713 - protein, 641 aa, Homo sapiens
  Payload ID: 472;
  Gene Symbol: ABR;
  Gene Name: active BCR-related;
  ENSP ID: ENSP00000437429
MEILLIIRFCCNCTYALLYKPIDRVTRSTLVLHDLLKHTPVDHPDYPLLQDALRISQNFLSSINEDIDPRRTAVTTPKGETRQLVKDGFLVEVSESSRKLRHVFLFTDVLLCAKLKKTSAGKHQQYDCKWYIPLADLVFPSPEESEASPQVHPFPDHELEDMKMKISALKSEIQKEKANKGQSRAIERLKKKMFENEFLLLLNSPTIPFRIHNRNGKSYLFLLSSDYERSEWREAIQKLQKKDLQAFVLSSVELQVLTGSCFKLRTVHNIPVTSNKDDDESPGLYGFLHVIVHSAKGFKQSANLYCTLEVDSFGYFVSKAKTRVFRDTAEPKWDEEFEIELEGSQSLRILCYEKCYDKTKVNKDNNEIVDKIMGKGQIQLDPQTVETKNWHTDVIEMNGIKVEFSMKFTSRDMSLKRTPSKKQTGVFGVKISVVTKRERSKVPYIVRQCVEEVEKRGIEEVGIYRISGVATDIQALKAVFDANNKDILLMLSDMDINAIAGTLKLYFRELPEPLLTDRLYPAFMEGIALSDPAAKENCMMHLLRSLPDPNLITFLFLLEHLKRVAEKEPINKMSLHNLATVFGPTLLRPSEVESKAHLTSAADIWSHDVMAQVQVLLYYLQHPPISFAELKRNTLYFSTDV

SEQ ID NO: 1714 - protein, 813 aa, Homo sapiens
  Payload ID: 472;
  Gene Symbol: ABR;
  Gene Name: active BCR-related;
  Uniprot ID:  Q12979;
  ENSP ID: ENSP00000442048
MPYIDESPTMSPQLSARSQGGGDGVSPTPPEGLAPGVEAGKGLEMRKLVLSGFLASEEIYINQLEALLLPMKPLKATATTSQPVLTIQQIETIFYKIQDIYEIHKEFYDNLCPKVQQWDSQVTMGHLFQKLASQLGVYKAFVDNYKVALETAEKCSQSNNQFQKISEELKVKGPKDSKDSHTSVTMEALLYKPIDRVTRSTLVLHDLLKHTPVDHPDYPLLQDALRISQNFLSSINEDIDPRRTAVTTPKGETRQLVKDGFLVEVSESSRKLRHVFLFTDVLLCAKLKKTSAGKHQQYDCKWYIPLADLVFPSPEESEASPQVHPFPDHELEDMKMKISALKSEIQKEKANKGQSRAIERLKKKMFENEFLLLLNSPTIPFRIHNRNGKSYLFLLSSDYERSEWREAIQKLQKKDLQAFVLSSVELQVLTGSCFKLRTVHNIPVTSNKDDDESPGLYGFLHVIVHSAKGFKQSANLYCTLEVDSFGYFVSKAKTRVFRDTAEPKWDEEFEIELEGSQSLRILCYEKCYDKTKVNKDNNEIVDKIMGKGQIQLDPQTVETKNWHTDVIEMNGIKVEFSMKFTSRDMSLKRTPSKKQTGVFGVKISVVTKRERSKVPYIVRQCVEEVEKRGIEEVGIYRISGVATDIQALKAVFDANNKDILLMLSDMDINAIAGTLKLYFRELPEPLLTDRLYPAFMEGIALSDPAAKENCMMHLLRSLPDPNLITFLFLLEHLKRVAEKEPINKMSLHNLATVFGPTLLRPSEVESKAHLTSAADIWSHDVMAQVQVLLYYLQHPPISFAELKRNTLYFSTDV

SEQ ID NO: 1715 - protein, 310 aa, Homo sapiens
  Payload ID: 472;
  Gene Symbol: ABR;
  Gene Name: active BCR-related;
  Uniprot ID:  Q12979;
  ENSP ID: ENSP00000445198
MTDVLPQPDCSPKAGREPLALEESGSKRPPNTGARLWGRVRNKLLRNKLDPQTVETKNWHTDVIEMNGIKVEFSMKFTSRDMSLKRTPSKKQTGVFGVKISVVTKRERSKVPYIVRQCVEEVEKRGIEEVGIYRISGVATDIQALKAVFDANNKDILLMLSDMDINAIAGTLKLYFRELPEPLLTDRLYPAFMEGIALSDPAAKENCMMHLLRSLPDPNLITFLFLLEHLKRVAEKEPINKMSLHNLATVFGPTLLRPSEVESKAHLTSAADIWSHDVMAQVQVLLYYLQHPPISFAELKRNTLYFSTDV

SEQ ID NO: 1716 - protein, 189 aa, Homo sapiens
  Payload ID: 472;
  Gene Symbol: ABR;
  Gene Name: active BCR-related;
  ENSP ID: ENSP00000458294
  MOD_RES (1)..(1): Any amino acid
XKTSAGKHQQYDCKWYIPLADLVFPSPEESEASPQVHPFPDHELEDMKMKISALKSEIQKEKANKGQSRAIERLKKKMFENEFLLLLNSPTIPFRIHNRNGKSYLFLLSSDYERSEWREAIQKLQKKDLQAFVLSSVELQVLTGSCFKLRTVHNIPVTSNKDDLYCTLEVDSFGYFVSKAKTRVFRDTA

SEQ ID NO: 1717 - protein, 165 aa, Homo sapiens
  Payload ID: 472;
  Gene Symbol: ABR;
  Gene Name: active BCR-related;
  ENSP ID: ENSP00000459118
MEILLIIRFCCNCTYGNPALLYKPIDRVTRSTLVLHDLLKHTPVDHPDYPLLQDALRISQNFLSSINEDIDPRRTAVTTPKGETRQLVKDGFLVEVSESSRKLRHVFLFTDVLLCAKLKKTSAGKHQQYDCKWYIPLADLVFPSPEESEASPQVHPFPDHELEDM

SEQ ID NO: 1718 - protein, 86 aa, Homo sapiens
  Payload ID: 472;
  Gene Symbol: ABR;
  Gene Name: active BCR-related;
  ENSP ID: ENSP00000459406
MPYIDESPTMSPQLSARSQGGGDGVSPTPPEGLAPGVEAGKGLEMRKLVLSGFLASEEIYINQLEALLLPMKPLKATATTSQPVLT

SEQ ID NO: 1719 - protein, 153 aa, Homo sapiens
  Payload ID: 472;
  Gene Symbol: ABR;
  Gene Name: active BCR-related;
  ENSP ID: ENSP00000459553
MTDVLPQPDCSPKAGREPLALEESGSKRPPNTGARLWGRVRNKLLRNKLDPQTVETKNWHTDVIEMNGIKVEFSMKFTSRDMSLKRTPSKKQTGVFGVKISVVTKRERSKVPYIVRQCVEEAVRLLRKHHRLNGGGMHMPRWVSRVAGRQLSS

SEQ ID NO: 1720 - protein, 88 aa, Homo sapiens
  Payload ID: 472;
  Gene Symbol: ABR;
  Gene Name: active BCR-related;
  ENSP ID: ENSP00000459761
MPYIDESPTMSPQLSARSQGGGDGVSPTPPEGLAPGVEAGKGLEMRKLVLSGFLASEEIYINQLEALLLPMKPLKATATTSQPVLTIQ

SEQ ID NO: 1721 - protein, 168 aa, Homo sapiens
  Payload ID: 472;
  Gene Symbol: ABR;
  Gene Name: active BCR-related;
  ENSP ID: ENSP00000459820
MRKLVLSGFLASEEIYINQLEALLLPMKPLKATATTSQPVLTIQQIETIFYKIQDIYEIHKEFYDNLCPKVQQWDSQVTMGHLFQKLASQLGVYKAFVDNYKVALETAEKCSQSNNQFQKISEELKVKGPKDSKDSHTSVTMEALLYKPIDRVTRSTLVLHDLLKHTP

SEQ ID NO: 1722 - protein, 117 aa, Homo sapiens
  Payload ID: 472;
  Gene Symbol: ABR;
  Gene Name: active BCR-related;
  ENSP ID: ENSP00000460248
  MOD_RES (1)..(1): Any amino acid
XRDTAEPKWDEEFEIELEGSQSLRILCYEKCYDKTKVNKDNNEIVDKIMGKGQIQLDPQTVETKNWHTDVIEMNGIKVEFSMKFTSRDMSLKRTPSKKQTGVFGVKISVVTKWPVWI

SEQ ID NO: 1723 - protein, 133 aa, Homo sapiens
  Payload ID: 472;
  Gene Symbol: ABR;
  Gene Name: active BCR-related;
  ENSP ID: ENSP00000460770
MPYIDESPTMSPQLSARSQGGGDGVSPTPPEGLAPGPMKPLKATATTSQPVLTIQQIETIFYKIQDIYEIHKEFYDNLCPKVQQWDSQVTMGHLFQKLASQLGVYKAFVDNYKVALETAEKCSQSNNQFQKIS

SEQ ID NO: 1724 - protein, 813 aa, Homo sapiens; identical to SEQ ID NO: 1714
  Payload ID: 472;
  Gene Symbol: ABR;
  Gene Name: active BCR-related;
  Uniprot ID:  Q12979;
  ENSP ID: ENSP00000461565

SEQ ID NO: 1725 - protein, 129 aa, Homo sapiens
  Payload ID: 472;
  Gene Symbol: ABR;
  Gene Name: active BCR-related;
  ENSP ID: ENSP00000461629
MPYIDESPTMSPQLSARSQGGGDGVSPTPPEGLAPGVEAGKGLEMRKLVLSGFLASEEIYINQLEALLLPMKPLKATATTSQPVLTIQQIETIFYKIQDIYEIHKEFYDNLCPKVQQWDSQVTMGHLFQ

SEQ ID NO: 1726 - protein, 191 aa, Homo sapiens
  Payload ID: 472;
  Gene Symbol: ABR;
  Gene Name: active BCR-related;
  ENSP ID: ENSP00000461795
  MOD_RES (1)..(1): Any amino acid
XEEVGIYRISGVATDIQALKAVFDANNKDILLMLSDMDINAIAGTLKLYFRELPEPLLTDRLYPAFMEGIALSDPAAKENCMMHLLRSLPDPNLITFLFLLEHLKRVAEKEPINKMSLHNLATVFGPTLLRPSEVESKAHLTSAADIWSHDVMAQNSSGTHCTSPPTCSPRQGGCGRVVEPAPPAWGPTQT

SEQ ID NO: 1727 - protein, 813 aa, Homo sapiens; identical to SEQ ID NO: 1714
  Payload ID: 472;
  Gene Symbol: ABR;
  Gene Name: active BCR-related;
  Uniprot ID:  Q12979;
  ENSP ID: ENSP00000478880

SEQ ID NO: 1728 - protein, 310 aa, Homo sapiens; identical to SEQ ID NO: 1715
  Payload ID: 472;
  Gene Symbol: ABR;
  Gene Name: active BCR-related;
  Uniprot ID:  Q12979;
  ENSP ID: ENSP00000479455

SEQ ID NO: 1729 - protein, 641 aa, Homo sapiens; identical to SEQ ID NO: 1713
  Payload ID: 472;
  Gene Symbol: ABR;
  Gene Name: active BCR-related;
  ENSP ID: ENSP00000480343

SEQ ID NO: 1730 - protein, 777 aa, Homo sapiens
  Payload ID: 472;
  Gene Symbol: ABR;
  Gene Name: active BCR-related;
  ENSP ID: ENSP00000480982
VEAGKGLEMRKLVLSGFLASEEIYINQLEALLLPMKPLKATATTSQPVLTIQQIETIFYKIQDIYEIHKEFYDNLCPKVQQWDSQVTMGHLFQKLASQLGVYKAFVDNYKVALETAEKCSQSNNQFQKISEELKVKGPKDSKDSHTSVTMEALLYKPIDRVTRSTLVLHDLLKHTPVDHPDYPLLQDALRISQNFLSSINEDIDPRRTAVTTPKGETRQLVKDGFLVEVSESSRKLRHVFLFTDVLLCAKLKKTSAGKHQQYDCKWYIPLADLVFPSPEESEASPQVHPFPDHELEDMKMKISALKSEIQKEKANKGQSRAIERLKKKMFENEFLLLLNSPTIPFRIHNRNGKSYLFLLSSDYERSEWREAIQKLQKKDLQAFVLSSVELQVLTGSCFKLRTVHNIPVTSNKDDDESPGLYGFLHVIVHSAKGFKQSANLYCTLEVDSFGYFVSKAKTRVFRDTAEPKWDEEFEIELEGSQSLRILCYEKCYDKTKVNKDNNEIVDKIMGKGQIQLDPQTVETKNWHTDVIEMNGIKVEFSMKFTSRDMSLKRTPSKKQTGVFGVKISVVTKRERSKVPYIVRQCVEEVEKRGIEEVGIYRISGVATDIQALKAVFDANNKDILLMLSDMDINAIAGTLKLYFRELPEPLLTDRLYPAFMEGIALSDPAAKENCMMHLLRSLPDPNLITFLFLLEHLKRVAEKEPINKMSLHNLATVFGPTLLRPSEVESKAHLTSAADIWSHDVMAQVQVLLYYLQHPPISFAELKRNTLYFSTDV

SEQ ID NO: 1731 - protein, 859 aa, Homo sapiens; identical to SEQ ID NO: 1712
  Payload ID: 472;
  Gene Symbol: ABR;
  Gene Name: active BCR-related;
  Uniprot ID:  Q12979;
  ENSP ID: ENSP00000481740

SEQ ID NO: 1732 - protein, 822 aa, Homo sapiens; identical to SEQ ID NO: 1711
  Payload ID: 472;
  Gene Symbol: ABR;
  Gene Name: active BCR-related;
  Uniprot ID:  Q12979;
  ENSP ID: ENSP00000483168

SEQ ID NO: 1733 - protein, 310 aa, Homo sapiens; identical to SEQ ID NO: 1715
  Payload ID: 472;
  Gene Symbol: ABR;
  Gene Name: active BCR-related;
  Uniprot ID:  Q12979;
  ENSP ID: ENSP00000484030

SEQ ID NO: 1734 - protein, 777 aa, Homo sapiens; identical to SEQ ID NO: 1730
  Payload ID: 472;
  Gene Symbol: ABR;
  Gene Name: active BCR-related;
  ENSP ID: ENSP00000484899

SEQ ID NO: 1735 - protein, 129 aa, Homo sapiens; identical to SEQ ID NO: 1725
  Payload ID: 472;
  Gene Symbol: ABR;
  Gene Name: active BCR-related;
  ENSP ID: ENSP00000485727

SEQ ID NO: 1736 - protein, 165 aa, Homo sapiens; identical to SEQ ID NO: 1717
  Payload ID: 472;
  Gene Symbol: ABR;
  Gene Name: active BCR-related;
  ENSP ID: ENSP00000485918

SEQ ID NO: 1737 - protein, 189 aa, Homo sapiens; identical to SEQ ID NO: 1716
  Payload ID: 472;
  Gene Symbol: ABR;
  Gene Name: active BCR-related;
  ENSP ID: ENSP00000485949
  MOD_RES (1)..(1): Any amino acid

SEQ ID NO: 1738 - protein, 50 aa, Homo sapiens
  Payload ID: 472;
  Gene Symbol: ABR;
  Gene Name: active BCR-related;
  ENSP ID: ENSP00000485981
VEAGKGLEMRKLVLSGFLASEEIYINQLEALLLPMKPLKATATTSQPVLT

SEQ ID NO: 1739 - protein, 191 aa, Homo sapiens; identical to SEQ ID NO: 1726
  Payload ID: 472;
  Gene Symbol: ABR;
  Gene Name: active BCR-related;
  ENSP ID: ENSP00000486137
  MOD_RES (1)..(1): Any amino acid

SEQ ID NO: 1740 - protein, 93 aa, Homo sapiens
  Payload ID: 472;
  Gene Symbol: ABR;
  Gene Name: active BCR-related;
  ENSP ID: ENSP00000486156
VEAGKGLEMRKLVLSGFLASEEIYINQLEALLLPMKPLKATATTSQPVLTIQQIETIFYKIQDIYEIHKEFYDNLCPKVQQWDSQVTMGHLFQ

SEQ ID NO: 1741 - protein, 133 aa, Homo sapiens; identical to SEQ ID NO: 1723
  Payload ID: 472;
  Gene Symbol: ABR;
  Gene Name: active BCR-related;
  ENSP ID: ENSP00000486157

SEQ ID NO: 1742 - protein, 813 aa, Homo sapiens; identical to SEQ ID NO: 1714
  Payload ID: 472;
  Gene Symbol: ABR;
  Gene Name: active BCR-related;
  Uniprot ID:  Q12979;
  ENSP ID: ENSP00000486214

SEQ ID NO: 1743 - protein, 168 aa, Homo sapiens; identical to SEQ ID NO: 1721
  Payload ID: 472;
  Gene Symbol: ABR;
  Gene Name: active BCR-related;
  ENSP ID: ENSP00000486258

SEQ ID NO: 1744 - protein, 822 aa, Homo sapiens; identical to SEQ ID NO: 1711
  Payload ID: 472;
  Gene Symbol: ABR;
  Gene Name: active BCR-related;
  Uniprot ID:  Q12979;
  ENSP ID: ENSP00000486511

SEQ ID NO: 1745 - protein, 168 aa, Homo sapiens; identical to SEQ ID NO: 1721
  Payload ID: 472;
  Gene Symbol: ABR;
  Gene Name: active BCR-related;
  ENSP ID: ENSP00000486545

SEQ ID NO: 1746 - protein, 20 aa, Homo sapiens
  Payload ID: 472;
  Gene Symbol: ABR;
  Gene Name: active BCR-related;
  ENSP ID: ENSP00000486625
ETKNWHTDVIEMNGVSRGWE

SEQ ID NO: 1747 - protein, 153 aa, Homo sapiens; identical to SEQ ID NO: 1719
  Payload ID: 472;
  Gene Symbol: ABR;
  Gene Name: active BCR-related;
  ENSP ID: ENSP00000486789

SEQ ID NO: 1748 - protein, 97 aa, Homo sapiens
  Payload ID: 472;
  Gene Symbol: ABR;
  Gene Name: active BCR-related;
  ENSP ID: ENSP00000486808
PMKPLKATATTSQPVLTIQQIETIFYKIQDIYEIHKEFYDNLCPKVQQWDSQVTMGHLFQKLASQLGVYKAFVDNYKVALETAEKCSQSNNQFQKIS

SEQ ID NO: 1749 - protein, 86 aa, Homo sapiens; identical to SEQ ID NO: 1718
  Payload ID: 472;
  Gene Symbol: ABR;
  Gene Name: active BCR-related;
  ENSP ID: ENSP00000486817

SEQ ID NO: 1750 - protein, 777 aa, Homo sapiens; identical to SEQ ID NO: 1730
  Payload ID: 472;
  Gene Symbol: ABR;
  Gene Name: active BCR-related;
  ENSP ID: ENSP00000486868

SEQ ID NO: 1751 - protein, 117 aa, Homo sapiens; identical to SEQ ID NO: 1722
  Payload ID: 472;
  Gene Symbol: ABR;
  Gene Name: active BCR-related;
  ENSP ID: ENSP00000486946
  MOD_RES (1)..(1): Any amino acid

SEQ ID NO: 1752 - protein, 52 aa, Homo sapiens
  Payload ID: 472;
  Gene Symbol: ABR;
  Gene Name: active BCR-related;
  ENSP ID: ENSP00000487120
VEAGKGLEMRKLVLSGFLASEEIYINQLEALLLPMKPLKATATTSQPVLTIQ

SEQ ID NO: 1753 - protein, 153 aa, Homo sapiens; identical to SEQ ID NO: 1719
  Payload ID: 472;
  Gene Symbol: ABR;
  Gene Name: active BCR-related;
  ENSP ID: ENSP00000487341

SEQ ID NO: 1754 - protein, 165 aa, Homo sapiens; identical to SEQ ID NO: 1717
  Payload ID: 472;
  Gene Symbol: ABR;
  Gene Name: active BCR-related;
  ENSP ID: ENSP00000487381

SEQ ID NO: 1755 - protein, 49 aa, Homo sapiens
  Payload ID: 472;
  Gene Symbol: ABR;
  Gene Name: active BCR-related;
  ENSP ID: ENSP00000487388
GKSYLFLLSSDYERSEWREAIQKLQKKGKFLPLPRSPMMSVALMGLLYF

SEQ ID NO: 1756 - protein, 641 aa, Homo sapiens; identical to SEQ ID NO: 1713
  Payload ID: 472;
  Gene Symbol: ABR;
  Gene Name: active BCR-related;
  ENSP ID: ENSP00000487391

SEQ ID NO: 1757 - protein, 88 aa, Homo sapiens; identical to SEQ ID NO: 1720
  Payload ID: 472;
  Gene Symbol: ABR;
  Gene Name: active BCR-related;
  ENSP ID: ENSP00000487433

SEQ ID NO: 1758 - protein, 191 aa, Homo sapiens; identical to SEQ ID NO: 1726
  Payload ID: 472;
  Gene Symbol: ABR;
  Gene Name: active BCR-related;
  ENSP ID: ENSP00000487454
  MOD_RES (1)..(1): Any amino acid

SEQ ID NO: 1759 - protein, 117 aa, Homo sapiens; identical to SEQ ID NO: 1722
  Payload ID: 472;
  Gene Symbol: ABR;
  Gene Name: active BCR-related;
  ENSP ID: ENSP00000487459
  MOD_RES (1)..(1): Any amino acid

SEQ ID NO: 1760 - protein, 20 aa, Homo sapiens
  Payload ID: 472;
  Gene Symbol: ABR;
  Gene Name: active BCR-related;
  ENSP ID: ENSP00000487515
ETKNWHTDVIEMNGVSRGWE

SEQ ID NO: 1761 - protein, 49 aa, Homo sapiens
  Payload ID: 472;
  Gene Symbol: ABR;
  Gene Name: active BCR-related;
  ENSP ID: ENSP00000487565
GKSYLFLLSSDYERSEWREAIQKLQKKGKFLPLPRSPMMSVALMGLLFF

SEQ ID NO: 1762 - protein, 503 aa, Homo sapiens
  Payload ID: 473;
  Gene Symbol: ACVRL1;
  Gene Name: activin A receptor type II-like 1;
  Uniprot ID:  P37023;
  ENSP ID: ENSP00000373574
MTLGSPRKGLLMLLMALVTQGDPVKPSRGPLVTCTCESPHCKGPTCRGAWCTVVLVREEGRHPQEHRGCGNLHRELCRGRPTEFVNHYCCDSHLCNHNVSLVLEATQPPSEQPGTDGQLALILGPVLALLALVALGVLGLWHVRRRQEKQRGLHSELGESSLILKASEQGDSMLGDLLDSDCTTGSGSGLPFLVQRTVARQVALVECVGKGRYGEVWRGLWHGESVAVKIFSSRDEQSWFRETEIYNTVLLRHDNILGFIASDMTSRNSSTQLWLITHYHEHGSLYDFLQRQTLEPHLALRLAVSAACGLAHLHVEIFGTQGKPAIAHRDFKSRNVLVKSNLQCCIADLGLAVMHSQGSDYLDIGNNPRVGTKRYMAPEVLDEQIRTDCFESYKWTDIWAFGLVLWEIARRTIVNGIVEDYRPPFYDVVPNDPSFEDMKKVVCVDQQTPTIPNRLAADPVLSGLAQMMRECWYPNPSARLTALRIKKTLQKISNSPEKPKVIQ

SEQ ID NO: 1763 - protein, 329 aa, Homo sapiens
  Payload ID: 473;
  Gene Symbol: ACVRL1;
  Gene Name: activin A receptor type II-like 1;
  ENSP ID: ENSP00000392492
MALTPPLLLLSAGTMTLGSPRKGLLMLLMALVTQGKGRYGEVWRGLWHGESVAVKIFSSRDEQSWFRETEIYNTVLLRHDNILGFIASDMTSRNSSTQLWLITHYHEHGSLYDFLQRQTLEPHLALRLAVSAACGLAHLHVEIFGTQGKPAIAHRDFKSRNVLVKSNLQCCIADLGLAVMHSQGSDYLDIGNNPRVGTKRYMAPEVLDEQIRTDCFESYKWTDIWAFGLVLWEIARRTIVNGIVEDYRPPFYDVVPNDPSFEDMKKVVCVDQQTPTIPNRLAADPVLSGLAQMMRECWYPNPSARLTALRIKKTLQKISNSPEKPKVIQ

SEQ ID NO: 1764 - protein, 159 aa, Homo sapiens
  Payload ID: 473;
  Gene Symbol: ACVRL1;
  Gene Name: activin A receptor type II-like 1;
  ENSP ID: ENSP00000446724
MALTPPLLLLSAGTMTLGSPRKGLLMLLMALVTQGDPVKPSRGPLVTCTCESPHCKGPTCRGAWCTVVLVREEGRHPQEHRGCGNLHRELCRGRPTEFVNHYCCDSHLCNHNVSLVLEGKGRYGEVWRGLWHGESVAVKIFSSRDEQSWFRETEIYNTV

SEQ ID NO: 1765 - protein, 517 aa, Homo sapiens
  Payload ID: 473;
  Gene Symbol: ACVRL1;
  Gene Name: activin A receptor type II-like 1;
  ENSP ID: ENSP00000447884
MALTPPLLLLSAGTMTLGSPRKGLLMLLMALVTQGDPVKPSRGPLVTCTCESPHCKGPTCRGAWCTVVLVREEGRHPQEHRGCGNLHRELCRGRPTEFVNHYCCDSHLCNHNVSLVLEATQPPSEQPGTDGQLALILGPVLALLALVALGVLGLWHVRRRQEKQRGLHSELGESSLILKASEQGDSMLGDLLDSDCTTGSGSGLPFLVQRTVARQVALVECVGKGRYGEVWRGLWHGESVAVKIFSSRDEQSWFRETEIYNTVLLRHDNILGFIASDMTSRNSSTQLWLITHYHEHGSLYDFLQRQTLEPHLALRLAVSAACGLAHLHVEIFGTQGKPAIAHRDFKSRNVLVKSNLQCCIADLGLAVMHSQGSDYLDIGNNPRVGTKRYMAPEVLDEQIRTDCFESYKWTDIWAFGLVLWEIARRTIVNGIVEDYRPPFYDVVPNDPSFEDMKKVVCVDQQTPTIPNRLAADPVLSGLAQMMRECWYPNPSARLTALRIKKTLQKISNSPEKPKVIQ

SEQ ID NO: 1766 - protein, 89 aa, Homo sapiens
  Payload ID: 473;
  Gene Symbol: ACVRL1;
  Gene Name: activin A receptor type II-like 1;
  ENSP ID: ENSP00000455848
MTLGSPRKGLLMLLMALVTQGDPVKPSRGPLVTCTCESPHCKGPTCRGAWCTVVLVREEGRHPQEHRGCGNLHRELCRGRPTEFVNHYC

SEQ ID NO: 1767 - protein, 163 aa, Homo sapiens
  Payload ID: 473;
  Gene Symbol: ACVRL1;
  Gene Name: activin A receptor type II-like 1;
  ENSP ID: ENSP00000457394
  MOD_RES (1)..(1): Any amino acid
XSRNVLVKSNLQCCIADLGLAVMHSQGSDYLDIGNNPRVGTKRYMAPEVLDEQIRTDCFESYKWTDIWAFGLVLWEIARRTIVNGIVEDYRPPFYDVVPNDPSFEDMKKVVCVDQQTPTIPNRLAADPVRPLLGLGWRGVVAHGWDFWAQELVSEASASSHRY

SEQ ID NO: 1768 - protein, 509 aa, Homo sapiens
  Payload ID: 474;
  Gene Symbol: ACVR1;
  Gene Name: activin A receptor, type I;
  Uniprot ID:  Q04771;
  ENSP ID: ENSP00000263640
MVDGVMILPVLIMIALPSPSMEDEKPKVNPKLYMCVCEGLSCGNEDHCEGQQCFSSLSINDGFHVYQKGCFQVYEQGKMTCKTPPSPGQAVECCQGDWCNRNITAQLPTKGKSFPGTQNFHLEVGLIILSVVFAVCLLACLLGVALRKFKRRNQERLNPRDVEYGTIEGLITTNVGDSTLADLLDHSCTSGSGSGLPFLVQRTVARQITLLECVGKGRYGEVWRGSWQGENVAVKIFSSRDEKSWFRETELYNTVMLRHENILGFIASDMTSRHSSTQLWLITHYHEMGSLYDYLQLTTLDTVSCLRIVLSIASGLAHLHIEIFGTQGKPAIAHRDLKSKNILVKKNGQCCIADLGLAVMHSQSTNQLDVGNNPRVGTKRYMAPEVLDETIQVDCFDSYKRVDIWAFGLVLWEVARRMVSNGIVEDYKPPFYDVVPNDPSFEDMRKVVCVDQQRPNIPNRWFSDPTLTSLAKLMKECWYQNPSARLTALRIKKTLTKIDNSLDKLKTDC

SEQ ID NO: 1769 - protein, 509 aa, Homo sapiens; identical to SEQ ID NO: 1768
  Payload ID: 474;
  Gene Symbol: ACVR1;
  Gene Name: activin A receptor, type I;
  Uniprot ID:  Q04771;
  ENSP ID: ENSP00000387127

SEQ ID NO: 1770 - protein, 509 aa, Homo sapiens; identical to SEQ ID NO: 1768
  Payload ID: 474;
  Gene Symbol: ACVR1;
  Gene Name: activin A receptor, type I;
  Uniprot ID:  Q04771;
  ENSP ID: ENSP00000387273

SEQ ID NO: 1771 - protein, 21 aa, Homo sapiens
  Payload ID: 474;
  Gene Symbol: ACVR1;
  Gene Name: activin A receptor, type I;
  ENSP ID: ENSP00000399322
MVDGVMILPVLIMIALPSPSM

SEQ ID NO: 1772 - protein, 71 aa, Homo sapiens
  Payload ID: 474;
  Gene Symbol: ACVR1;
  Gene Name: activin A receptor, type I;
  ENSP ID: ENSP00000400767
MVDGVMILPVLIMIALPSPSMEDEKPKVNPKLYMCVCEGLSCGNEDHCEGQQCFSSLSINDGFHVYQKGCF

SEQ ID NO: 1773 - protein, 86 aa, Homo sapiens
  Payload ID: 474;
  Gene Symbol: ACVR1;
  Gene Name: activin A receptor, type I;
  ENSP ID: ENSP00000401189
MVDGVMILPVLIMIALPSPSMEDEKPKVNPKLYMCVCEGLSCGNEDHCEGQQCFSSLSINDGFHVYQKGCFQVYEQGKMTCKTPPS

SEQ ID NO: 1774 - protein, 87 aa, Homo sapiens
  Payload ID: 474;
  Gene Symbol: ACVR1;
  Gene Name: activin A receptor, type I;
  ENSP ID: ENSP00000403006
MVDGVMILPVLIMIALPSPSMEDEKPKVNPKLYMCVCEGLSCGNEDHCEGQQCFSSLSINDGFHVYQKGCFQVYEQGKMTCKTPPSP

SEQ ID NO: 1775 - protein, 509 aa, Homo sapiens; identical to SEQ ID NO: 1768
  Payload ID: 474;
  Gene Symbol: ACVR1;
  Gene Name: activin A receptor, type I;
  Uniprot ID:  Q04771;
  ENSP ID: ENSP00000405004

SEQ ID NO: 1776 - protein, 72 aa, Homo sapiens
  Payload ID: 474;
  Gene Symbol: ACVR1;
  Gene Name: activin A receptor, type I;
  ENSP ID: ENSP00000440091
MVDGVMILPVLIMIALPSPSMEDEKPKVNPKLYMCVCEGLSCGNEDHCEGQQCFSSLSINDGFHVYQKGCFQ

SEQ ID NO: 1777 - protein, 505 aa, Homo sapiens
  Payload ID: 475;
  Gene Symbol: ACVR1B;
  Gene Name: activin A receptor, type IB;
  Uniprot ID:  P36896;
  ENSP ID: ENSP00000257963
MAESAGASSFFPLVVLLLAGSGGSGPRGVQALLCACTSCLQANYTCETDGACMVSIFNLDGMEHHVRTCIPKVELVPAGKPFYCLSSEDLRNTHCCYTDYCNRIDLRVPSGHLKEPEHPSMWGPVELVGIIAGPVFLLFLIIIIVFLVINYHQRVYHNRQRLDMEDPSCEMCLSKDKTLQDLVYDLSTSGSGSGLPLFVQRTVARTIVLQEIIGKGRFGEVWRGRWRGGDVAVKIFSSREERSWFREAEIYQTVMLRHENILGFIAADNKDNGTWTQLWLVSDYHEHGSLFDYLNRYTVTIEGMIKLALSAASGLAHLHMEIVGTQGKPGIAHRDLKSKNILVKKNGMCAIADLGLAVRHDAVTDTIDIAPNQRVGTKRYMAPEVLDETINMKHFDSFKCADIYALGLVYWEIARRCNSGGVHEEYQLPYYDLVPSDPSIEEMRKVVCDQKLRPNIPNWWQSYEALRVMGKMMRECWYANGAARLTALRIKKTLSQLSVQEDVKI

SEQ ID NO: 1778 - protein, 476 aa, Homo sapiens
  Payload ID: 475;
  Gene Symbol: ACVR1B;
  Gene Name: activin A receptor, type IB;
  Uniprot ID:  P36896;
  ENSP ID: ENSP00000390477
MAESAGASSFFPLVVLLLAGSGGSGPRGVQALLCACTSCLQANYTCETDGACMVSIFNLDGMEHHVRTCIPKVELVPAGKPFYCLSSEDLRNTHCCYTDYCNRIDLRVPSGHLKEPEHPSMWGPVELVGIIAGPVFLLFLIIIIVFLVINYHQRVYHNRQRLDMEDPSCEMCLSKDKTLQDLVYDLSTSGSGSGLPLFVQRTVARTIVLQEIIGKGRFGEVWRGRWRGGDVAVKIFSSREERSWFREAEIYQTVMLRHENILGFIAADNKDNGTWTQLWLVSDYHEHGSLFDYLNRYTVTIEGMIKLALSAASGLAHLHMEIVGTQGKPGIAHRDLKSKNILVKKNGMCAIADLGLAVRHDAVTDTIDIAPNQRVGTKRYMAPEVLDETINMKHFDSFKCADIYALGLVYWEIARRCNSGGVHEEYQLPYYDLVPSDPSIEEMRKVVCDQKLRPNIPNWWQSYEVRSWPPAAFPSA

SEQ ID NO: 1779 - protein, 487 aa, Homo sapiens
  Payload ID: 475;
  Gene Symbol: ACVR1B;
  Gene Name: activin A receptor, type IB;
  Uniprot ID:  P36896;
  ENSP ID: ENSP00000397550
MAESAGASSFFPLVVLLLAGSGGSGPRGVQALLCACTSCLQANYTCETDGACMVSIFNLDGMEHHVRTCIPKVELVPAGKPFYCLSSEDLRNTHCCYTDYCNRIDLRVPSGHLKEPEHPSMWGPVELVGIIAGPVFLLFLIIIIVFLVINYHQRVYHNRQRLDMEDPSCEMCLSKDKTLQDLVYDLSTSGSGSGLPLFVQRTVARTIVLQEIIGKGRFGEVWRGRWRGGDVAVKIFSSREERSWFREAEIYQTVMLRHENILGFIAADNKDNGTWTQLWLVSDYHEHGSLFDYLNRYTVTIEGMIKLALSAASGLAHLHMEIVGTQGKPGIAHRDLKSKNILVKKNGMCAIADLGLAVRHDAVTDTIDIAPNQRVGTKRYMAPEVLDETINMKHFDSFKCADIYALGLVYWEIARRCNSGGTFLFCLCSYLPFQDAGSPKAVLLPPFFLQPVGCLLPEPESSFKVAIKGVEVAVLRVRLFFRDQFVE

SEQ ID NO: 1780 - protein, 546 aa, Homo sapiens
  Payload ID: 475;
  Gene Symbol: ACVR1B;
  Gene Name: activin A receptor, type IB;
  Uniprot ID:  P36896;
  ENSP ID: ENSP00000442656
MAESAGASSFFPLVVLLLAGSGGSGPRGVQALLCACTSCLQANYTCETDGACMVSIFNLDGMEHHVRTCIPKVELVPAGKPFYCLSSEDLRNTHCCYTDYCNRIDLRVPSGHLKEPEHPSMWGPVELVGIIAGPVFLLFLIIIIVFLVINYHQRVYHNRQRLDMEDPSCEMCLSKDKTLQDLVYDLSTSGSGSGLPLFVQRTVARTIVLQEIIGKGRFGEVWRGRWRGGDVAVKIFSSREERSWFREAEIYQTVMLRHENILGFIAADNKADCSFLTLPWEVVMVSAAPKLRSLRLQYKGGRGRARFLFPLNNGTWTQLWLVSDYHEHGSLFDYLNRYTVTIEGMIKLALSAASGLAHLHMEIVGTQGKPGIAHRDLKSKNILVKKNGMCAIADLGLAVRHDAVTDTIDIAPNQRVGTKRYMAPEVLDETINMKHFDSFKCADIYALGLVYWEIARRCNSGGVHEEYQLPYYDLVPSDPSIEEMRKVVCDQKLRPNIPNWWQSYEALRVMGKMMRECWYANGAARLTALRIKKTLSQLSVQEDVKI

SEQ ID NO: 1781 - protein, 453 aa, Homo sapiens
  Payload ID: 475;
  Gene Symbol: ACVR1B;
  Gene Name: activin A receptor, type IB;
  Uniprot ID:  P36896;
  ENSP ID: ENSP00000442885
MVSIFNLDGMEHHVRTCIPKVELVPAGKPFYCLSSEDLRNTHCCYTDYCNRIDLRVPSGHLKEPEHPSMWGPVELVGIIAGPVFLLFLIIIIVFLVINYHQRVYHNRQRLDMEDPSCEMCLSKDKTLQDLVYDLSTSGSGSGLPLFVQRTVARTIVLQEIIGKGRFGEVWRGRWRGGDVAVKIFSSREERSWFREAEIYQTVMLRHENILGFIAADNKDNGTWTQLWLVSDYHEHGSLFDYLNRYTVTIEGMIKLALSAASGLAHLHMEIVGTQGKPGIAHRDLKSKNILVKKNGMCAIADLGLAVRHDAVTDTIDIAPNQRVGTKRYMAPEVLDETINMKHFDSFKCADIYALGLVYWEIARRCNSGGVHEEYQLPYYDLVPSDPSIEEMRKVVCDQKLRPNIPNWWQSYEALRVMGKMMRECWYANGAARLTALRIKKTLSQLSVQEDVKI

SEQ ID NO: 1782 - protein, 71 aa, Homo sapiens
  Payload ID: 475;
  Gene Symbol: ACVR1B;
  Gene Name: activin A receptor, type IB;
  ENSP ID: ENSP00000443218
MVSIFNLDGMEHHVRTCIPKVELVPAGKPFYCLSSEDLRNTHCCYTDYCNRIDLRVPSGHLKEPEHPSMWG

SEQ ID NO: 1783 - protein, 493 aa, Homo sapiens
  Payload ID: 476;
  Gene Symbol: ACVR1C;
  Gene Name: activin A receptor, type IC;
  Uniprot ID:  Q8NER5;
  ENSP ID: ENSP00000243349
MTRALCSALRQALLLLAAAAELSPGLKCVCLLCDSSNFTCQTEGACWASVMLTNGKEQVIKSCVSLPELNAQVFCHSSNNVTKTECCFTDFCNNITLHLPTASPNAPKLGPMELAIIITVPVCLLSIAAMLTVWACQGRQCSYRKKKRPNVEEPLSECNLVNAGKTLKDLIYDVTASGSGSGLPLLVQRTIARTIVLQEIVGKGRFGEVWHGRWCGEDVAVKIFSSRDERSWFREAEIYQTVMLRHENILGFIAADNKDNGTWTQLWLVSEYHEQGSLYDYLNRNIVTVAGMIKLALSIASGLAHLHMEIVGTQGKPAIAHRDIKSKNILVKKCETCAIADLGLAVKHDSILNTIDIPQNPKVGTKRYMAPEMLDDTMNVNIFESFKRADIYSVGLVYWEIARRCSVGGIVEEYQLPYYDMVPSDPSIEEMRKVVCDQKFRPSIPNQWQSCEALRVMGRIMRECWYANGAARLTALRIKKTISQLCVKEDCKA

SEQ ID NO: 1784 - protein, 336 aa, Homo sapiens
  Payload ID: 476;
  Gene Symbol: ACVR1C;
  Gene Name: activin A receptor, type IC;
  Uniprot ID:  Q8NER5;
  ENSP ID: ENSP00000335139
MTRALCSALRQALLLLAAAAELSPGLKCVCLLCDSSNFTCQTEGACWASVMLTNGKEQVIKSCVSLPELNAQVFCHSSNNVTKTECCFTDFCNNITLHLPTDNGTWTQLWLVSEYHEQGSLYDYLNRNIVTVAGMIKLALSIASGLAHLHMEIVGTQGKPAIAHRDIKSKNILVKKCETCAIADLGLAVKHDSILNTIDIPQNPKVGTKRYMAPEMLDDTMNVNIFESFKRADIYSVGLVYWEIARRCSVGGIVEEYQLPYYDMVPSDPSIEEMRKVVCDQKFRPSIPNQWQSCEALRVMGRIMRECWYANGAARLTALRIKKTISQLCVKEDCKA

SEQ ID NO: 1785 - protein, 413 aa, Homo sapiens
  Payload ID: 476;
  Gene Symbol: ACVR1C;
  Gene Name: activin A receptor, type IC;
  Uniprot ID:  Q8NER5;
  ENSP ID: ENSP00000335178
MTRALCSALRQALLLLAAAAELSPGLKCVCLLCDSSNFTCQTEGACWASVMLTNGKEQVIKSCVSLPELNAQVFCHSSNNVTKTECCFTDFCNNITLHLPTGLPLLVQRTIARTIVLQEIVGKGRFGEVWHGRWCGEDVAVKIFSSRDERSWFREAEIYQTVMLRHENILGFIAADNKDNGTWTQLWLVSEYHEQGSLYDYLNRNIVTVAGMIKLALSIASGLAHLHMEIVGTQGKPAIAHRDIKSKNILVKKCETCAIADLGLAVKHDSILNTIDIPQNPKVGTKRYMAPEMLDDTMNVNIFESFKRADIYSVGLVYWEIARRCSVGGIVEEYQLPYYDMVPSDPSIEEMRKVVCDQKFRPSIPNQWQSCEALRVMGRIMRECWYANGAARLTALRIKKTISQLCVKEDCKA

SEQ ID NO: 1786 - protein, 443 aa, Homo sapiens
  Payload ID: 476;
  Gene Symbol: ACVR1C;
  Gene Name: activin A receptor, type IC;
  Uniprot ID:  Q8NER5;
  ENSP ID: ENSP00000387168
MLTNGKEQVIKSCVSLPELNAQVFCHSSNNVTKTECCFTDFCNNITLHLPTASPNAPKLGPMELAIIITVPVCLLSIAAMLTVWACQGRQCSYRKKKRPNVEEPLSECNLVNAGKTLKDLIYDVTASGSGSGLPLLVQRTIARTIVLQEIVGKGRFGEVWHGRWCGEDVAVKIFSSRDERSWFREAEIYQTVMLRHENILGFIAADNKDNGTWTQLWLVSEYHEQGSLYDYLNRNIVTVAGMIKLALSIASGLAHLHMEIVGTQGKPAIAHRDIKSKNILVKKCETCAIADLGLAVKHDSILNTIDIPQNPKVGTKRYMAPEMLDDTMNVNIFESFKRADIYSVGLVYWEIARRCSVGGIVEEYQLPYYDMVPSDPSIEEMRKVVCDQKFRPSIPNQWQSCEALRVMGRIMRECWYANGAARLTALRIKKTISQLCVKEDCKA

SEQ ID NO: 1787 - protein, 513 aa, Homo sapiens
  Payload ID: 477;
  Gene Symbol: ACVR2A;
  Gene Name: activin A receptor, type IIA;
  Uniprot ID:  P27037;
  ENSP ID: ENSP00000241416
MGAAAKLAFAVFLISCSSGAILGRSETQECLFFNANWEKDRTNQTGVEPCYGDKDKRRHCFATWKNISGSIEIVKQGCWLDDINCYDRTDCVEKKDSPEVYFCCCEGNMCNEKFSYFPEMEVTQPTSNPVTPKPPYYNILLYSLVPLMLIAGIVICAFWVYRHHKMAYPPVLVPTQDPGPPPPSPLLGLKPLQLLEVKARGRFGCVWKAQLLNEYVAVKIFPIQDKQSWQNEYEVYSLPGMKHENILQFIGAEKRGTSVDVDLWLITAFHEKGSLSDFLKANVVSWNELCHIAETMARGLAYLHEDIPGLKDGHKPAISHRDIKSKNVLLKNNLTACIADFGLALKFEAGKSAGDTHGQVGTRRYMAPEVLEGAINFQRDAFLRIDMYAMGLVLWELASRCTAADGPVDEYMLPFEEEIGQHPSLEDMQEVVVHKKKRPVLRDYWQKHAGMAMLCETIEECWDHDAEARLSAGCVGERITQMQRLTNIITTEDIVTVVTMVTNVDFPPKESSL

SEQ ID NO: 1788 - protein, 513 aa, Homo sapiens; identical to SEQ ID NO: 1787
  Payload ID: 477;
  Gene Symbol: ACVR2A;
  Gene Name: activin A receptor, type IIA;
  Uniprot ID:  P27037;
  ENSP ID: ENSP00000384338

SEQ ID NO: 1789 - protein, 405 aa, Homo sapiens
  Payload ID: 477;
  Gene Symbol: ACVR2A;
  Gene Name: activin A receptor, type IIA;
  Uniprot ID:  P27037;
  ENSP ID: ENSP00000439988
MCNEKFSYFPEMEVTQPTSNPVTPKPPYYNILLYSLVPLMLIAGIVICAFWVYRHHKMAYPPVLVPTQDPGPPPPSPLLGLKPLQLLEVKARGRFGCVWKAQLLNEYVAVKIFPIQDKQSWQNEYEVYSLPGMKHENILQFIGAEKRGTSVDVDLWLITAFHEKGSLSDFLKANVVSWNELCHIAETMARGLAYLHEDIPGLKDGHKPAISHRDIKSKNVLLKNNLTACIADFGLALKFEAGKSAGDTHGQVGTRRYMAPEVLEGAINFQRDAFLRIDMYAMGLVLWELASRCTAADGPVDEYMLPFEEEIGQHPSLEDMQEVVVHKKKRPVLRDYWQKHAGMAMLCETIEECWDHDAEARLSAGCVGERITQMQRLTNIITTEDIVTVVTMVTNVDFPPKESSL

SEQ ID NO: 1790 - protein, 512 aa, Homo sapiens
  Payload ID: 478;
  Gene Symbol: ACVR2B;
  Gene Name: activin A receptor, type IIB;
  Uniprot ID:  Q13705;
  ENSP ID: ENSP00000340361
MTAPWVALALLWGSLCAGSGRGEAETRECIYYNANWELERTNQSGLERCEGEQDKRLHCYASWRNSSGTIELVKKGCWLDDFNCYDRQECVATEENPQVYFCCCEGNFCNERFTHLPEAGGPEVTYEPPPTAPTLLTVLAYSLLPIGGLSLIVLLAFWMYRHRKPPYGHVDIHEDPGPPPPSPLVGLKPLQLLEIKARGRFGCVWKAQLMNDFVAVKIFPLQDKQSWQSEREIFSTPGMKHENLLQFIAAEKRGSNLEVELWLITAFHDKGSLTDYLKGNIITWNELCHVAETMSRGLSYLHEDVPWCRGEGHKPSIAHRDFKSKNVLLKSDLTAVLADFGLAVRFEPGKPPGDTHGQVGTRRYMAPEVLEGAINFQRDAFLRIDMYAMGLVLWELVSRCKAADGPVDEYMLPFEEEIGQHPSLEELQEVVVHKKMRPTIKDHWLKHPGLAQLCVTIEECWDHDAEARLSAGCVEERVSLIRRSVNGTTSDCLVSLVTSVTNVDLPPKESSI

SEQ ID NO: 1791 - protein, 1102 aa, Homo sapiens
  Payload ID: 479;
  Gene Symbol: ADNP;
  Gene Name: activity-dependent neuroprotector homeobox;
  Uniprot ID:  Q9H2P0;
  ENSP ID: ENSP00000342905
MFQLPVNNLGSLRKARKTVKKILSDIGLEYCKEHIEDFKQFEPNDFYLKNTTWEDVGLWDPSLTKNQDYRTKPFCCSACPFSSKFFSAYKSHFRNVHSEDFENRILLNCPYCTFNADKKTLETHIKIFHAPNASAPSSSLSTFKDKNKNDGLKPKQADSVEQAVYYCKKCTYRDPLYEIVRKHIYREHFQHVAAPYIAKAGEKSLNGAVPLGSNAREESSIHCKRCLFMPKSYEALVQHVIEDHERIGYQVTAMIGHTNVVVPRSKPLMLIAPKPQDKKSMGLPPRIGSLASGNVRSLPSQQMVNRLSIPKPNLNSTGVNMMSSVHLQQNNYGVKSVGQGYSVGQSMRLGLGGNAPVSIPQQSQSVKQLLPSGNGRSYGLGSEQRSQAPARYSLQSANASSLSSGQLKSPSLSQSQASRVLGQSSSKPAAAATGPPPGNTSSTQKWKICTICNELFPENVYSVHFEKEHKAEKVPAVANYIMKIHNFTSKCLYCNRYLPTDTLLNHMLIHGLSCPYCRSTFNDVEKMAAHMRMVHIDEEMGPKTDSTLSFDLTLQQGSHTNIHLLVTTYNLRDAPAESVAYHAQNNPPVPPKPQPKVQEKADIPVKSSPQAAVPYKKDVGKTLCPLCFSILKGPISDALAHHLRERHQVIQTVHPVEKKLTYKCIHCLGVYTSNMTASTITLHLVHCRGVGKTQNGQDKTNAPSRLNQSPSLAPVKRTYEQMEFPLLKKRKLDDDSDSPSFFEEKPEEPVVLALDPKGHEDDSYEARKSFLTKYFNKQPYPTRREIEKLAASLWLWKSDIASHFSNKRKKCVRDCEKYKPGVLLGFNMKELNKVKHEMDFDAEWLFENHDEKDSRVNASKTADKKLNLGKEDDSSSDSFENLEEESNESGSPFDPVFEVEPKISNDNPEEHVLKVIPEDASESEEKLDQKEDGSKYETIHLTEEPTKLMHNASDSEVDQDDVVEWKDGASPSESGPGSQQVSDFEDNTCEMKPGTWSDESSQSEDARSSKPAAKKKATMQGDREQLKWKNSSYGKVEGFWSKDQSQWKNASENDERLSNPQIEWQNSTIDSEDGEQFDNMTDGVAEPMHGSLAGVKLSSQQA

SEQ ID NO: 1792 - protein, 1102 aa, Homo sapiens; identical to SEQ ID NO: 1791
  Payload ID: 479;
  Gene Symbol: ADNP;
  Gene Name: activity-dependent neuroprotector homeobox;
  Uniprot ID:  Q9H2P0;
  ENSP ID: ENSP00000360662

SEQ ID NO: 1793 - protein, 1102 aa, Homo sapiens; identical to SEQ ID NO: 1791
  Payload ID: 479;
  Gene Symbol: ADNP;
  Gene Name: activity-dependent neuroprotector homeobox;
  Uniprot ID:  Q9H2P0;
  ENSP ID: ENSP00000379346

SEQ ID NO: 1794 - protein, 1102 aa, Homo sapiens; identical to SEQ ID NO: 1791
  Payload ID: 479;
  Gene Symbol: ADNP;
  Gene Name: activity-dependent neuroprotector homeobox;
  Uniprot ID:  Q9H2P0;
  ENSP ID: ENSP00000379349

SEQ ID NO: 1795 - protein, 172 aa, Homo sapiens
  Payload ID: 479;
  Gene Symbol: ADNP;
  Gene Name: activity-dependent neuroprotector homeobox;
  ENSP ID: ENSP00000436181
MFQLPVNNLGSLRKARKTVKKILSDIGLEYCKEHIEDFKQFEPNDFYLKNTTWEDVGLWDPSLTKNQDYRTKPFCCSACPFSSKFFSAYKSHFRNVHSEDFENRILLNCPYCTFNADKKTLETHIKIFHAPNASAPSSSLSTFKDKNKNDGLKPKQADSVEQAVYYCKKCTY

SEQ ID NO: 1796 - protein, 1102 aa, Homo sapiens; identical to SEQ ID NO: 1791
  Payload ID: 479;
  Gene Symbol: ADNP;
  Gene Name: activity-dependent neuroprotector homeobox;
  Uniprot ID:  Q9H2P0;
  ENSP ID: ENSP00000483881

SEQ ID NO: 1797 - protein, 396 aa, Homo sapiens
  Payload ID: 480;
  Gene Symbol: ARC;
  Gene Name: activity-regulated cytoskeleton-associated prt;
  Uniprot ID:  Q7LC44;
  ENSP ID: ENSP00000349022
MELDHRTSGGLHAYPGPRGGQVAKPNVILQIGKCRAEMLEHVRRTHRHLLAEVSKQVERELKGLHRSVGKLESNLDGYVPTSDSQRWKKSIKACLCRCQETIANLERWVKREMHVWREVFYRLERWADRLESTGGKYPVGSESARHTVSVGVGGPESYCHEADGYDYTVSPYAITPPPAAGELPGQEPAEAQQYQPWVPGEDGQPSPGVDTQIFEDPREFLSHLEEYLRQVGGSEEYWLSQIQNHMNGPAKKWWEFKQGSVKNWVEFKKEFLQYSEGTLSREAIQRELDLPQKQGEPLDQFLWRKRDLYQTLYVDADEEEIIQYVVGTLQPKLKRFLRHPLPKTLEQLIQRGMEVQDDLEQAAEPAGPHLPVEDEAETLTPAPNSESVASDRTQPE

SEQ ID NO: 1798 - protein, 732 aa, Homo sapiens
  Payload ID: 481;
  Gene Symbol: APEH;
  Gene Name: acylaminoacyl-peptide hydrolase;
  Uniprot ID:  P13798;
  ENSP ID: ENSP00000296456
MERQVLLSEPEEAAALYRGLSRQPALSAACLGPEVTTQYGGQYRTVHTEWTQRDLERMENIRFCRQYLVFHDGDSVVFAGPAGNSVETRGELLSRESPSGTMKAVLRKAGGTGPGEEKQFLEVWEKNRKLKSFNLSALEKHGPVYEDDCFGCLSWSHSETHLLYVAEKKRPKAESFFQTKALDVSASDDEIARLKKPDQAIKGDQFVFYEDWGENMVSKSIPVLCVLDVESGNISVLEGVPENVSPGQAFWAPGDAGVVFVGWWHEPFRLGIRFCTNRRSALYYVDLIGGKCELLSDDSLAVSSPRLSPDQCRIVYLQYPSLIPHHQCSQLCLYDWYTKVTSVVVDVVPRQLGENFSGIYCSLLPLGCWSADSQRVVFDSAQRSRQDLFAVDTQVGTVTSLTAGGSGGSWKLLTIDQDLMVAQFSTPSLPPTLKVGFLPSAGKEQSVLWVSLEEAEPIPDIHWGIRVLQPPPEQENVQYAGLDFEAILLQPGSPPDKTQVPMVVMPHGGPHSSFVTAWMLFPAMLCKMGFAVLLVNYRGSTGFGQDSILSLPGNVGHQDVKDVQFAVEQVLQEEHFDASHVALMGGSHGGFISCHLIGQYPETYRACVARNPVINIASMLGSTDIPDWCVVEAGFPFSSDCLPDLSVWAEMLDKSPIRYIPQVKTPLLLMLGQEDRRVPFKQGMEYYRALKTRNVPVRLLLYPKSTHALSEVEVESDSFMNAVLWLRTHLGS

SEQ ID NO: 1799 - protein, 50 aa, Homo sapiens
  Payload ID: 481;
  Gene Symbol: APEH;
  Gene Name: acylaminoacyl-peptide hydrolase;
  ENSP ID: ENSP00000401871
MERQVLLSEPEEAAALYRGLSRQPALSAACLGPEVTTQYGGQYRTVHTDC

SEQ ID NO: 1800 - protein, 308 aa, Homo sapiens
  Payload ID: 481;
  Gene Symbol: APEH;
  Gene Name: acylaminoacyl-peptide hydrolase;
  ENSP ID: ENSP00000402365
TPRLAPAAERRLWNVRLLSRESPSGTMKAVLRKAGGTGPGEEKQFLEVWEKNRKLKSFNLSALEKHGPVYEDDCFGCLSWSHSETHLLYVAEKKRPKAESFFQTKALDVSASDDEIARLKKPDQAIKGDQFVFYEDWGENMVSKSIPVLCVLDVESGNISVLEGVPENVSPGQAFWAPGDAGVVFVGWWHEPFRLGIRFCTNRRSALYYVDLIGGKCELLSDDSLAVSSPRLSPDQCRIVYLQYPSLIPHHQCSQLCLYDWYTKVTSVVVDVVPRQLGENFSGIYCSLLPLGCWSADSQRVVFDSAQR

SEQ ID NO: 1801 - protein, 54 aa, Homo sapiens
  Payload ID: 481;
  Gene Symbol: APEH;
  Gene Name: acylaminoacyl-peptide hydrolase;
  ENSP ID: ENSP00000404353
TAEQRVSFRHHESCAAQGWRHGPWGREAVPGGLGEEPEAQELQPVSAGETWACL

SEQ ID NO: 1802 - protein, 58 aa, Homo sapiens
  Payload ID: 481;
  Gene Symbol: APEH;
  Gene Name: acylaminoacyl-peptide hydrolase;
  ENSP ID: ENSP00000410149
MERQTAEQRVSFRHHESCAAQGWRHGPWGREAVPGGLGEEPEAQELQPVSAGETWACL

SEQ ID NO: 1803 - protein, 284 aa, Homo sapiens
  Payload ID: 481;
  Gene Symbol: APEH;
  Gene Name: acylaminoacyl-peptide hydrolase;
  ENSP ID: ENSP00000410366
QVLLSEPEEAAALYRGLSRQPALSAACLGPEVTTQYGGQYRTVHTEWTQRDLERMENIRFCRQYLVFHDGDSVVFAGPAGNSVETRGELLSRESPSGTMKAVLRKAGGTGPGEEKQFLEVWEKNRKLKSFNLSALEKHGPVYEDDCFGCLSWSHSETHLLYVAEKKRPKAESFFQTKALDVSASDDEIARLKKPDQAIKAFWAPGDAGVVFVGWWHEPFRLGIRFCTNRRSALYYVDLIGGKCELLSDDSLAVSSPRLSPDQCRIVYLQYPSLIPHHQCSQLCL

SEQ ID NO: 1804 - protein, 232 aa, Homo sapiens
  Payload ID: 481;
  Gene Symbol: APEH;
  Gene Name: acylaminoacyl-peptide hydrolase;
  ENSP ID: ENSP00000414369
MKAVLRKAGGTGPGEEKQFLEVWEKNRKLKSFNLSALEKHGPVYEDDCFGCLSWSHSETHLLYVAEKKRPKAESFFQTKALDVSASDDEIARLKKPDQAIKGDQFVFYEDWGENMVSKSIPVLCVLDVESGNISVLEGVPENVSPGQAFWAPGDAGVVFVGWWHEPFRLGIRFCTNRRSALYYVDLIGGKCELLSDDSLAVSSPRLSPDQCRIVYLQYPSLIPHHQCSQLCL

SEQ ID NO: 1805 - protein, 737 aa, Homo sapiens
  Payload ID: 481;
  Gene Symbol: APEH;
  Gene Name: acylaminoacyl-peptide hydrolase;
  ENSP ID: ENSP00000415862
MERQVLLSEPEEAAALYRGLSRQPALSAACLGPEVTTQYGGQYRTVHTEWTQRDLERMENIRFCRQYLVFHDGDSVVFAGPAGNSVETRGELLSRESPSGTMKAVLRKAGGTGPGEEKQFLEVWEKNRKLKSFNLSALEKHGPVYEDDCFGCLSWSHSETHLLYVAEKKRPKAESFFQTKALDVSASDDEIARLKKPDQAIKGDQFVFYEDWGENMVSKSIPVLCVLDVESGNISVLEGVPENVSPGQAFWAPGDAGVVFVGWWHEPFRLGIRFCTNRRSALYYVDLIGGKCELLSDDSLAVSSPRLSPDQCRIVYLQYPSLIPHHQCSQLCLYDWYTKVTSVVVDVVPRQLGENFSGIYCSLLPLGCWSADSQRVVFDSAQRSRQDLFAVDTQVGTVTSLTAGGSGGSWKLLTIDQDLMVAQFSTPSLPPTLKVGFLPSAGKEQSVLWVSLEEAEPIPDIHWGIRVLQPPPEQENVQYAGLDFEAILLQPGSPPDKTQVPMVVMPHGGPHSSFVTAWMLFPAMLCKMGFAVLLVNYRGSTGFGQDSILSLPGNVGHQDVKDVQFAVEQVLQEEHFDASHVALMGGSHGGFISCHLIGQYPETYRACVARNPVINIASMLGSTDIPDCSVSCRCVVEAGFPFSSDCLPDLSVWAEMLDKSPIRYIPQVKTPLLLMLGQEDRRVPFKQGMEYYRALKTRNVPVRLLLYPKSTHALSEVEVESDSFMNAVLWLRTHLGS

SEQ ID NO: 1806 - protein, 47 aa, Homo sapiens
  Payload ID: 481;
  Gene Symbol: APEH;
  Gene Name: acylaminoacyl-peptide hydrolase;
  ENSP ID: ENSP00000438180
QRVVFDSAQRSRQDLFAVDTQVGAGSCSQLTRTSWWHSFPHPAYLQP

SEQ ID NO: 1807 - protein, 528 aa, Homo sapiens
  Payload ID: 482;
  Gene Symbol: ACBD3;
  Gene Name: acyl-CoA binding domain containing 3;
  Uniprot ID:  Q9H3P7;
  ENSP ID: ENSP00000355777
MAAVLNAERLEVSVDGLTLSPDPEERPGAEGAPLLPPPLPPPSPPGSGRGPGASGEQPEPGEAAAGGAAEEARRLEQRWGFGLEELYGLALRFFKEKDGKAFHPTYEEKLKLVALHKQVLMGPYNPDTCPEVGFFDVLGNDRRREWAALGNMSKEDAMVEFVKLLNRCCHLFSTYVASHKIEKEEQEKKRKEEEERRRREEEERERLQKEEEKRRREEEERLRREEEERRRIEEERLRLEQQKQQIMAALNSQTAVQFQQYAAQQYPGNYEQQQILIRQLQEQHYQQYMQQLYQVQLAQQQAALQKQQEVVVAGSSLPTSSKVNATVPSNMMSVNGQAKTHTDSSEKELEPEAAEEALENGPKESLPVIAAPSMWTRPQIKDFKEKIQQDADSVITVGRGEVVTVRVPTHEEGSYLFWEFATDNYDIGFGVYFEWTDSPNTAVSVHVSESSDDDEEEEENIGCEEKAKKNANKPLLDEIVPVYRRDCHEEVYAGSHQYPGRGVYLLKFDNSYSLWRSKSVYYRVYYTR

SEQ ID NO: 1808 - protein, 305 aa, Homo sapiens
  Payload ID: 483;
  Gene Symbol: ACBD4;
  Gene Name: acyl-CoA binding domain containing 4;
  Uniprot ID:  Q8NC06;
  ENSP ID: ENSP00000314440
MGTEKESPEPDCQKQFQAAVSVIQNLPKNGSYRPSYEEMLRFYSYYKQATMGPCLVPRPGFWDPIGRYKWDAWNSLGKMSREEAMSAYITEMKLVAQKVIDTVPLGEVAEDMFGYFEPLYQVIPDMPRPPETFLRRVTGWKEQVVNGDVGAVSEPPCLPKEPAPPSPESHSPRDLDSEVFCDSLEQLEPELVWTEQRAASGGKRDPRNSPVPPTKKEGLRGSPPGPQELDVWLLGTVRALQESMQEVQARVQSLESMPRPPEQRPQPRPSARPWPLGLPGPALLFFLLWPFVVQWLFRMFRTQKR

SEQ ID NO: 1809 - protein, 268 aa, Homo sapiens
  Payload ID: 483;
  Gene Symbol: ACBD4;
  Gene Name: acyl-CoA binding domain containing 4;
  Uniprot ID:  Q8NC06;
  ENSP ID: ENSP00000366154
MGTEKESPEPDCQKQFQAAVSVIQNLPKNGSYRPSYEEMLRFYSYYKQATMGPCLVPRPGFWDPIGRYKWDAWNSLGKMSREEAMSAYITEMKLVAQKVIDTVPLGEVAEDMFGYFEPLYQVIPDMPRPPETFLRRVTGWKEQVVNGDVGAVSEPPCLPKEPAPPSPESHSPRDLDSEVFCDSLEQLEPELSSGQHLEESVIPGTAPCPPQRKRGCGAARRGPRSWTCGCWGQFEHYRRACRRCRRGCRAWRACPGPLSSLTLSVRLE

SEQ ID NO: 1810 - protein, 305 aa, Homo sapiens; identical to SEQ ID NO: 1808
  Payload ID: 483;
  Gene Symbol: ACBD4;
  Gene Name: acyl-CoA binding domain containing 4;
  Uniprot ID:  Q8NC06;
  ENSP ID: ENSP00000381367

SEQ ID NO: 1811 - protein, 341 aa, Homo sapiens
  Payload ID: 483;
  Gene Symbol: ACBD4;
  Gene Name: acyl-CoA binding domain containing 4;
  Uniprot ID:  Q8NC06;
  ENSP ID: ENSP00000405969
MGTEKESPEPDCQKQFQAAVSVIQNLPKNGSYRPSYEEMLRFYSYYKQATMGPCLVPRPGFWDPIGRYKWDAWNSLGKMSREEAMSAYITEMKLVAQKVIDTVPLGEVAEDMFGYFEPLYQVIPDMPRPPETFLRRVTGWKEQVVNGDVGAVSEPPCLPKEPAPPSPASLWAVTLPTPPQSPIHPGTWTPRFSVIPWSSWSLSWFGQSSGQHLEESVIPGTAPCPPQRKRGCGAARRGPRSWTCGCWGQFEHYRRACRRCRRGCRAWRACPGPLSRGRSPGPVLGHGPLGSRGPRCSSSSCGPSSSSGSSECFGPKRGDCQWRGLCSQLRLSCCALSLPRV

SEQ ID NO: 1812 - protein, 341 aa, Homo sapiens; identical to SEQ ID NO: 1811
  Payload ID: 483;
  Gene Symbol: ACBD4;
  Gene Name: acyl-CoA binding domain containing 4;
  Uniprot ID:  Q8NC06;
  ENSP ID: ENSP00000465484

SEQ ID NO: 1813 - protein, 341 aa, Homo sapiens; identical to SEQ ID NO: 1811
  Payload ID: 483;
  Gene Symbol: ACBD4;
  Gene Name: acyl-CoA binding domain containing 4;
  Uniprot ID:  Q8NC06;
  ENSP ID: ENSP00000465610

SEQ ID NO: 1814 - protein, 269 aa, Homo sapiens
  Payload ID: 483;
  Gene Symbol: ACBD4;
  Gene Name: acyl-CoA binding domain containing 4;
  ENSP ID: ENSP00000466305
MGTEKESPEPDCQKQFQAAVSVIQNLPKNGSYRPSYEEMLRFYSYYKQATMGPCLVPRPGFWDPIGRYKWDAWNSLGKMSREEAMSAYITEMKLVAQKVIDTVPLGEVAEDMFGYFEPLYQVIPDMPRPPETFLRRVTGWKEQVVNGDVGAVSEPPCLPKEPAPPSPESHSPRDLDSEVFCDSLEQLEPELVWTEQRAASGGKRDPRNSPVPPTKKEAAAQAQCSAMAPWAPGARAALLPPVALRRPVALPNVSDPKEVTVSGGVSAAN

SEQ ID NO: 1815 - protein, 38 aa, Homo sapiens
  Payload ID: 483;
  Gene Symbol: ACBD4;
  Gene Name: acyl-CoA binding domain containing 4;
  ENSP ID: ENSP00000466505
MGTEKESPEPDCQKQFQAAVSVIQNLPKNGTPGTVWAR

SEQ ID NO: 1816 - protein, 268 aa, Homo sapiens; identical to SEQ ID NO: 1809
  Payload ID: 483;
  Gene Symbol: ACBD4;
  Gene Name: acyl-CoA binding domain containing 4;
  Uniprot ID:  Q8NC06;
  ENSP ID: ENSP00000482750

SEQ ID NO: 1817 - protein, 534 aa, Homo sapiens
  Payload ID: 484;
  Gene Symbol: ACBD5;
  Gene Name: acyl-CoA binding domain containing 5;
  Uniprot ID:  Q5T8D3;
  ENSP ID: ENSP00000365049
MFQFHAGSWESWCCCCLIPADRPWDRGQHWQLEMADTRSVHETRFEAAVKVIQSLPKNGSFQPTNEMMLKFYSFYKQATEGPCKLSRPGFWDPIGRYKWDAWSSLGDMTKEEAMIAYVEEMKKIIETMPMTEKVEELLRVIGPFYEIVEDKKSGRSSDITSVRLEKISKCLEDLGNVLTSTPNAKTVNGKAESSDSGAESEEEEAQEEVKGAEQSDNDKKMMKKSADHKNLEVIVTNGYDKDGFVQDIQNDIHASSSLNGRSTEEVKPIDENLGQTGKSAVCIHQDINDDHVEDVTGIQHLTSDSDSEVYCDSMEQFGQEESLDSFTSNNGPFQYYLGGHSSQPMENSGFREDIQVPPGNGNIGNMQVVAVEGKGEVKHGGEDGRNNSGAPHREKRGGETDEFSNVRRGRGHRMQHLSEGTKGRQVGSGGDGERWGSDRGSRGSLNEQIALVLMRLQEDMQNVLQRLQKLETLTALQAKSSTSTLQTAPQPTSQRPSWWPFEMSPGVLTFAIIWPFIAQWLVYLYYQRRRRKLN

SEQ ID NO: 1818 - protein, 523 aa, Homo sapiens
  Payload ID: 484;
  Gene Symbol: ACBD5;
  Gene Name: acyl-CoA binding domain containing 5;
  ENSP ID: ENSP00000365062
MFQFHAGSWESWCCCCLIPADRPWDRGQHWQLEMADTRSVHETRFEAAVKVIQSLPKNGSFQPTNEMMLKFYSFYKQATEGPCKLSRPGFWDPIGRYKWDAWSSLGDMTKEEAMIAYVEEMKKIIETMPMTEKVEELLRVIGPFYEIVEDKKSGRSSDITSDLGNVLTSTPNAKTVNGKAESSDSGAESEEEEAQEEVKGAEQSDNDKKMMKKSADHKNLEVIVTNGYDKDGFVQDIQNDIHASSSLNGRSTEEVKPIDENLGQTGKSAVCIHQDINDDHVEDVTGIQHLTSDSDSEVYCDSMEQFGQEESLDSFTSNNGPFQYYLGGHSSQPMENSGFREDIQVPPGNGNIGNMQVVAVEGKGEVKHGGEDGRNNSGAPHREKRGGETDEFSNVRRGRGHRMQHLSEGTKGRQVGSGGDGERWGSDRGSRGSLNEQIALVLMRLQEDMQNVLQRLQKLETLTALQAKSSTSTLQTAPQPTSQRPSWWPFEMSPGVLTFAIIWPFIAQWLVYLYYQRRRRKLN

SEQ ID NO: 1819 - protein, 416 aa, Homo sapiens
  Payload ID: 484;
  Gene Symbol: ACBD5;
  Gene Name: acyl-CoA binding domain containing 5;
  Uniprot ID:  Q5T8D3;
  ENSP ID: ENSP00000365066
MTKEEAMIAYVEEMKKIIETMPMTEKVEELLRVIGPFYEIVEDKKSGRSSDITSDLGNVLTSTPNAKTVNGKAESSDSGAESEEEEAQEEVKGAEQSDNDKKMMKKSADHKNLEVIVTNGYDKDGFVQDIQNDIHASSSLNGRSTEEVKPIDENLGQTGKSAVCIHQDINDDHVEDVTGIQHLTSDSDSEVYCDSMEQFGQEESLDSFTSNNGPFQYYLGGHSSQPMENSGFREDIQVPPGNGNIGNMQVVAVEGKGEVKHGGEDGRNNSGAPHREKRGGETDEFSNVRRGRGHRMQHLSEGTKGRQVGSGGDGERWGSDRGSRGSLNEQIALVLMRLQEDMQNVLQRLQKLETLTALQAKSSTSTLQTAPQPTSQRPSWWPFEMSPGVLTFAIIWPFIAQWLVYLYYQRRRRKLN

SEQ ID NO: 1820 - protein, 490 aa, Homo sapiens
  Payload ID: 484;
  Gene Symbol: ACBD5;
  Gene Name: acyl-CoA binding domain containing 5;
  Uniprot ID:  Q5T8D3;
  ENSP ID: ENSP00000365070
MADTRSVHETRFEAAVKVIQSLPKNGSFQPTNEMMLKFYSFYKQATEGPCKLSRPGFWDPIGRYKWDAWSSLGDMTKEEAMIAYVEEMKKIIETMPMTEKVEELLRVIGPFYEIVEDKKSGRSSDITSDLGNVLTSTPNAKTVNGKAESSDSGAESEEEEAQEEVKGAEQSDNDKKMMKKSADHKNLEVIVTNGYDKDGFVQDIQNDIHASSSLNGRSTEEVKPIDENLGQTGKSAVCIHQDINDDHVEDVTGIQHLTSDSDSEVYCDSMEQFGQEESLDSFTSNNGPFQYYLGGHSSQPMENSGFREDIQVPPGNGNIGNMQVVAVEGKGEVKHGGEDGRNNSGAPHREKRGGETDEFSNVRRGRGHRMQHLSEGTKGRQVGSGGDGERWGSDRGSRGSLNEQIALVLMRLQEDMQNVLQRLQKLETLTALQAKSSTSTLQTAPQPTSQRPSWWPFEMSPGVLTFAIIWPFIAQWLVYLYYQRRRRKLN

SEQ ID NO: 1821 - protein, 525 aa, Homo sapiens
  Payload ID: 484;
  Gene Symbol: ACBD5;
  Gene Name: acyl-CoA binding domain containing 5;
  Uniprot ID:  Q5T8D3;
  ENSP ID: ENSP00000379568
MLFLSFHAGSWESWCCCCLIPADRPWDRGQHWQLEMADTRSVHETRFEAAVKVIQSLPKNGSFQPTNEMMLKFYSFYKQATEGPCKLSRPGFWDPIGRYKWDAWSSLGDMTKEEAMIAYVEEMKKIIETMPMTEKVEELLRVIGPFYEIVEDKKSGRSSDITSDLGNVLTSTPNAKTVNGKAESSDSGAESEEEEAQEEVKGAEQSDNDKKMMKKSADHKNLEVIVTNGYDKDGFVQDIQNDIHASSSLNGRSTEEVKPIDENLGQTGKSAVCIHQDINDDHVEDVTGIQHLTSDSDSEVYCDSMEQFGQEESLDSFTSNNGPFQYYLGGHSSQPMENSGFREDIQVPPGNGNIGNMQVVAVEGKGEVKHGGEDGRNNSGAPHREKRGGETDEFSNVRRGRGHRMQHLSEGTKGRQVGSGGDGERWGSDRGSRGSLNEQIALVLMRLQEDMQNVLQRLQKLETLTALQAKSSTSTLQTAPQPTSQRPSWWPFEMSPGVLTFAIIWPFIAQWLVYLYYQRRRRKLN

SEQ ID NO: 1822 - protein, 251 aa, Homo sapiens
  Payload ID: 484;
  Gene Symbol: ACBD5;
  Gene Name: acyl-CoA binding domain containing 5;
  ENSP ID: ENSP00000393398
MADTRSVHETRFEAAVKVIQSLPKNGSFQPTNEMMLKFYSFYKQATEGPCKLSRPGFWDPIGRYKWDAWSSLGDMTKEEAMIAYVEEMKKIIETMPMTEKVEELLRVIGPFYEIVEDKKSGRSSDITSVRLEKISKCLEDLGNVLTSTPNAKTVNGKAESSDSGAESEEEEAQEEVKGAEQSDNDKKMMKKSADHKNLEVIVTNGYDKDGFVQDIQNDIHASSSLNGRSTEEVKPIDENLGQTGKSAVCIH

SEQ ID NO: 1823 - protein, 252 aa, Homo sapiens
  Payload ID: 484;
  Gene Symbol: ACBD5;
  Gene Name: acyl-CoA binding domain containing 5;
  ENSP ID: ENSP00000401591
MADTRSVHETRFEAAVKVIQSLPKNGSFQPTNEMMLKFYSFYKQATEGPCKLSRPGFWDPIGRYKWDAWSSLGDMTKEEAMIAYVEEMKKIIETMPMTEKVEELLRVIGPFYEIVEDKKSGRSSDITSVRLEKISKCLEDLGNVLTSTPNAKTVNGKAESSDSGAESEEEEAQEEVKGAEQSDNDKKMMKKSADHKNLEVIVTNGYDKDGFVQDIQNDIHASSSLNGRSTEEVKPIDENLGQTGKSAVCIHQ

SEQ ID NO: 1824 - protein, 67 aa, Homo sapiens
  Payload ID: 484;
  Gene Symbol: ACBD5;
  Gene Name: acyl-CoA binding domain containing 5;
  ENSP ID: ENSP00000483256
MFQFHAGSWESWCCCCLIPADRPWDRGQHWQLEMADTRSVHETRFEAAVKVIQSLPKNGMLGVHWVI

SEQ ID NO: 1825 - protein, 282 aa, Homo sapiens
  Payload ID: 485;
  Gene Symbol: ACBD6;
  Gene Name: acyl-CoA binding domain containing 6;
  Uniprot ID:  Q9BR61;
  ENSP ID: ENSP00000356567
MASSFLPAGAITGDSGGELSSGDDSGEVEFPHSPEIEETSCLAELFEKAAAHLQGLIQVASREQLLYLYARYKQVKVGNCNTPKPSFFDFEGKQKWEAWKALGDSSPSQAMQEYIAVVKKLDPGWNPQIPEKKGKEANTGFGGPVISSLYHEETIREEDKNIFDYCRENNIDHITKAIKSKNVDVNVKDEEGRALLHWACDRGHKELVTVLLQHRADINCQDNEGQTALHYASACEFLDIVELLLQSGADPTLRDQDGCLPEEVTGCKTVSLVLQRHTTGKA

SEQ ID NO: 1826 - protein, 88 aa, Homo sapiens
  Payload ID: 486;
  Gene Symbol: ACBD7;
  Gene Name: acyl-CoA binding domain containing 7;
  Uniprot ID:  Q8N6N7;
  ENSP ID: ENSP00000367453
MALQADFDRAAEDVRKLKARPDDGELKELYGLYKQAIVGDINIACPGMLDLKGKAKWEAWNLKKGLSTEDATSAYISKAKELIEKYGI

SEQ ID NO: 1827 - protein, 1059 aa, Homo sapiens
  Payload ID: 487;
  Gene Symbol: ACAD10;
  Gene Name: acyl-CoA dehydrogenase family, member 10;
  Uniprot ID:  Q6JQN1;
  ENSP ID: ENSP00000325137
MCVRSCFQSPRLQWVWRTAFLKHTQRRHQGSHRWTHLGGSTYRAVIFDMGGVLIPSPGRVAAEWEVQNRIPSGTILKALMEGGENGPWMRFMRAEITAEGFLREFGRLCSEMLKTSVPVDSFFSLLTSERVAKQFPVMTEAITQIRAKGLQTAVLSNNFYLPNQKSFLPLDRKQFDVIVESCMEGICKPDPRIYKLCLEQLGLQPSESIFLDDLGTNLKEAARLGIHTIKVNDPETAVKELEALLGFTLRVGVPNTRPVKKTMEIPKDSLQKYLKDLLGIQTTGPLELLQFDHGQSNPTYYIRLANRDLVLRKKPPGTLLPSAHAIEREFRIMKALANAGVPVPNVLDLCEDSSVIGTPFYVMEYCPGLIYKDPSLPGLEPSHRRAIYTAMNTVLCKIHSVDLQAVGLEDYGKQGDYIPRQVRTWVKQYRASETSTIPAMERLIEWLPLHLPRQQRTTVVHGDFRLDNLVFHPEEPEVLAVLDWELSTLGDPLADVAYSCLAHYLPSSFPVLRGINDCDLTQLGIPAAEEYFRMYCLQMGLPPTENWNFYMAFSFFRVAAILQGVYKRSLTGQASSTYAEQTGKLTEFVSNLAWDFAVKEGFRVFKEMPFTNPLTRSYHTWARPQSQWCPTGSRSYSSVPEASPAHTSRGGLVISPESLSPPVRELYHRLKHFMEQRVYPAEPELQSHQASAARWSPSPLIEDLKEKAKAEGLWNLFLPLEADPEKKYGAGLTNVEYAHLCELMGTSLYAPEVCNCSAPDTGNMELLVRYGTEAQKARWLIPLLEGKARSCFAMTEPQVASSDATNIEASIREEDSFYVINGHKWWITGILDPRCQLCVFMGKTDPHAPRHRQQSVLLVPMDTPGIKIIRPLTVYGLEDAPGGHGEVRFEHVRVPKENMVLGPGRGFEIAQGRLGPGRIHHCMRLIGFSERALALMKARVKSRLAFGKPLVEQGTVLADIAQSRVEIEQARLLVLRAAHLMDLAGNKAAALDIAMIKMVAPSMASRVIDRAIQAFGAAGLSSDYPLAQFFTWARALRFADGPDEVHRATVAKLELKHRI

SEQ ID NO: 1828 - protein, 1090 aa, Homo sapiens
  Payload ID: 487;
  Gene Symbol: ACAD10;
  Gene Name: acyl-CoA dehydrogenase family, member 10;
  Uniprot ID:  Q6JQN1;
  ENSP ID: ENSP00000389813
MCVRSCFQSPRLQWVWRTAFLKHTQRRHQGSHRWTHLGGSTYRAVIFDMGGVLIPSPGRVAAEWEVQNRIPSGTILKALMEGGENGPWMRFMRAEITAEGFLREFGRLCSEMLKTSVPVDSFFSLLTSERVAKQFPVMTEAITQIRAKGLQTAVLSNNFYLPNQKSFLPLDRKQFDVIVESCMEGICKPDPRIYKLCLEQLGLQPSESIFLDDLGTNLKEAARLGIHTIKRQGFAVLPKLVSNSWAQAIYPPYPPKVVRLQVNDPETAVKELEALLGFTLRVGVPNTRPVKKTMEIPKDSLQKYLKDLLGIQTTGPLELLQFDHGQSNPTYYIRLANRDLVLRKKPPGTLLPSAHAIEREFRIMKALANAGVPVPNVLDLCEDSSVIGTPFYVMEYCPGLIYKDPSLPGLEPSHRRAIYTAMNTVLCKIHSVDLQAVGLEDYGKQGDYIPRQVRTWVKQYRASETSTIPAMERLIEWLPLHLPRQQRTTVVHGDFRLDNLVFHPEEPEVLAVLDWELSTLGDPLADVAYSCLAHYLPSSFPVLRGINDCDLTQLGIPAAEEYFRMYCLQMGLPPTENWNFYMAFSFFRVAAILQGVYKRSLTGQASSTYAEQTGKLTEFVSNLAWDFAVKEGFRVFKEMPFTNPLTRSYHTWARPQSQWCPTGSRSYSSVPEASPAHTSRGGLVISPESLSPPVRELYHRLKHFMEQRVYPAEPELQSHQASAARWSPSPLIEDLKEKAKAEGLWNLFLPLEADPEKKYGAGLTNVEYAHLCELMGTSLYAPEVCNCSAPDTGNMELLVRYGTEAQKARWLIPLLEGKARSCFAMTEPQVASSDATNIEASIREEDSFYVINGHKWWITGILDPRCQLCVFMGKTDPHAPRHRQQSVLLVPMDTPGIKIIRPLTVYGLEDAPGGHGEVRFEHVRVPKENMVLGPGRGFEIAQGRLGPGRIHHCMRLIGFSERALALMKARVKSRLAFGKPLVEQGTVLADIAQSRVEIEQARLLVLRAAHLMDLAGNKAAALDIAMIKMVAPSMASRVIDRAIQAFGAAGLSSDYPLAQFFTWARALRFADGPDEVHRATVAKLELKHRI

SEQ ID NO: 1829 - protein, 96 aa, Homo sapiens
  Payload ID: 487;
  Gene Symbol: ACAD10;
  Gene Name: acyl-CoA dehydrogenase family, member 10;
  ENSP ID: ENSP00000421527
MCVRSCFQSPRLQWVWRTAFLKHTQRRHQGSHRWTHLGGSTYRAVIFDMGGVLIPSPGRVAAEWEVQNRIPSGTILKALMEGGENGPWMRFMRAEI

SEQ ID NO: 1830 - protein, 278 aa, Homo sapiens
  Payload ID: 487;
  Gene Symbol: ACAD10;
  Gene Name: acyl-CoA dehydrogenase family, member 10;
  ENSP ID: ENSP00000446711
  MOD_RES (1)..(1): Any amino acid
XELEALLGFTLRVGVPNTRPVKKTMEIPKDSLQKYLKDLLGIQTTGPLELLQFDHGQSNPTYYIRLANRDLVLRKKPPGTLLPSAHAIEREFRIMKALANAGVPVPNVLDLCEDSSVIGTPFYVMEYCPGLIYKDPSLPGLEPSHRRAIYTAMNTVLCKIHSVDLQAVGLEDYGKQGQASSTYAEQTGKLTEFVSNLAWDFAVKEGFRVFKEMPFTNPLTRSYHTWARPQSQWCPTGSRSYSSVPEASPAHTSRGGLVISPESLSPPVRELYHRLKHF

SEQ ID NO: 1831 - protein, 710 aa, Homo sapiens
  Payload ID: 487;
  Gene Symbol: ACAD10;
  Gene Name: acyl-CoA dehydrogenase family, member 10;
  ENSP ID: ENSP00000446959
MCVRSCFQSPRLQWVWRTAFLKHTQRRHQGSHRWTHLGGSTYRAVIFDMGGVLIPSPGRVAAEWEVQNRIPSGTILKALMEGGENGPWMRFMRAEITAEGFLREFGRLCSEMLKTSVPVDSFFSLLTSERVAKQFPVMTEAITQIRAKGLQTAVLSNNFYLPNQKSFLPLDRKQFDVIVESCMEGICKPDPRIYKLCLEQLGLQPSESIFLDDLGTNLKEAARLGIHTIKVNDPETAVKELEALLGFTLRVGVPNTRPVKKTMEIPKDSLQKYLKDLLGIQTTGPLELLQFDHGQSNPTYYIRLANRDLVLRKKPPGTLLPSAHAIEREFRIMKALANAGVPVPNVLDLCEDSSVIGTPFYVMEYCPGLIYKDPSLPGLEPSHRRAIYTAMNTVLCKIHSVDLQAVGLEDYGKQGDYIPRQVRTWVKQYRASETSTIPAMERLIEWLPLHLPRQQRTTVVHGDFRLDNLVFHPEEPEVLAVLDWELSTLGDPLADVAYSCLAHYLPSSFPVLRGINDCDLTQLGIPAAEEYFRMYCLQMGLPPTENWNFYMAFSFFRVAAILQGVYKRSLTGQASSTYAEQTGKLTEFVSNLAWDFAVKEGFRVFKEMPFTNPLTRSYHTWARPQSQWCPTGSRSYSSVPEASPAHTSRGGLVISPESLSPPVRELYHRLKHFMEQRVYPAEPELQSHQASAARWSPSPLIEDLKVKQPW

SEQ ID NO: 1832 - protein, 13 aa, Homo sapiens
  Payload ID: 487;
  Gene Symbol: ACAD10;
  Gene Name: acyl-CoA dehydrogenase family, member 10;
  ENSP ID: ENSP00000446998
MCVRSCFQSPRLQ

SEQ ID NO: 1833 - protein, 226 aa, Homo sapiens
  Payload ID: 487;
  Gene Symbol: ACAD10;
  Gene Name: acyl-CoA dehydrogenase family, member 10;
  ENSP ID: ENSP00000447561
VNDPETAVKELEALLGFTLRVGVPNTRPVKKTMEIPKDSLQKYLKDLLGIQTTGPLELLQFDHGQSNPTYYIRLANRDLVLRKKPPGTLLPSAHAIEREFRIMKALANAGVPVPNVLDLCEDSSVIGTPFYVMEYCPGLIYKDPSLPGLEPSHRRAIYTAMNTVLCKIHSVDLQAVGLEDYGKQGSTTWCFIQKSQRCLLSLTGNFLPWATPLLMWPTAAWLITCH

SEQ ID NO: 1834 - protein, 146 aa, Homo sapiens
  Payload ID: 487;
  Gene Symbol: ACAD10;
  Gene Name: acyl-CoA dehydrogenase family, member 10;
  ENSP ID: ENSP00000449097
MPFTNPLTRSYHTWARPQSQWCPTGSRSYSSVPEASPAHTSRGGLVISPESLSPPVRELYHRLKHFMEQRVYPAEPELQSHQASAARWSPSPLIEDLKEKAKAEGLWNLFLPLEADPEKKYGAGLTNVEYAHLCELMGTSLYAPEV

SEQ ID NO: 1835 - protein, 780 aa, Homo sapiens
  Payload ID: 488;
  Gene Symbol: ACAD11;
  Gene Name: acyl-CoA dehydrogenase family, member 11;
  Uniprot ID:  Q709F0;
  ENSP ID: ENSP00000264990
MKPGATGESDLAEVLPQHKFDSKSLEAYLNQHLSGFGAEREATLTIAQYRAGKSNPTFYLQKGFQTYVLRKKPPGSLLPKAHQIDREFKVQKALFSIGFPVPKPILYCSDTSVIGTEFYVMEHVQGRIFRDLTIPGLSPAERSAIYVATVETLAQLHSLNIQSLQLEGYGIGAGYCKRQVSTWTKQYQAAAHQDIPAMQQLSEWLMKNLPDNDNEENLIHGDFRLDNIVFHPKECRVIAVLDWELSTIGHPLSDLAHFSLFYFWPRTVPMINQGSYSENSGIPSMEELISIYCRCRGINSILPNWNFFLALSYFKMAGIAQGVYSRYLLGNNSSEDSFLFANIVQPLAETGLQLSKRTFSTVLPQIDTTGQLFVQTRKGQEVLIKVKHFMKQHILPAEKEVTEFYVQNENSVDKWGKPLVIDKLKEMAKVEGLWNLFLPAVSGLSHVDYALIAEETGKCFFAPDVFNCQAPDTGNMEVLHLYGSEEQKKQWLEPLLQGNITSCFCMTEPDVASSDATNIECSIQRDEDSYVINGKKWWSSGAGNPKCKIAIVLGRTQNTSLSRHKQHSMILVPMNTPGVKIIRPLSVFGYTDNFHGGHFEIHFNQVRVPATNLILGEGRGFEISQGRLGPGRIHHCMRTVGLAERALQIMCERATQRIAFKKKLYAHEVVAHWIAESRIAIEKIRLLTLKAAHSMDTLGSAGAKKEIAMIKVAAPRAVSKIVDWAIQVCGGAGVSQDYPLANMYAITRVLRLADGPDEVHLSAIATMELRDQAKRLTAKI

SEQ ID NO: 1836 - protein, 433 aa, Homo sapiens
  Payload ID: 488;
  Gene Symbol: ACAD11;
  Gene Name: acyl-CoA dehydrogenase family, member 11;
  ENSP ID: ENSP00000419973
MKPGATGESDLAEVLPQHKFDSKSLEAYLNQHLSGFGAEREATLTIAQYRAGKSNPTFYLQKGFQTYVLRKKPPGSLLPKAHQIDREFKVQKALFSIGFPVPKPILYCSDTSVIGTEFYVMEHVQGRIFRDLTIPGLSPAERSAIYVATVETLAQLHSLNIQSLQLEGYGIGAGYCKRQVSTWTKQYQAAAHQDIPAMQQLSEWLMKNLPDNDNEENLIHGDFRLDNIVFHPKECRVIAVLDWELSTIGHPLSDLAHFSLFYFWPRTVPMINQGSYSENSGIPSMEELISIYCRCRGINSILPNWNFFLALSYFKMAGIAQGVYSRYLLGNNSSEDSFLFANIVQPLAETGLQLSKRTFSTVLPQIDTTGQLFVQTRKGQEVLIKVKHFMKQHILPAEKTQGIWRFCTCMEVRNRRNSGLSLFFKGTLPLASV

SEQ ID NO: 1837 - protein, 476 aa, Homo sapiens
  Payload ID: 488;
  Gene Symbol: ACAD11;
  Gene Name: acyl-CoA dehydrogenase family, member 11;
  ENSP ID: ENSP00000420907
MKPGATGESDLAEVLPQHKFDSKSLEAYLNQHLSGFGAEREATLTIAQYRAGKSNPTFYLQKGFQTYVLRKKPPGSLLPKAHQIDREFKVQKALFSIGFPVPKPILYCSDTSVIGTEFYVMEHVQGRIFRDLTIPGLSPAERSAIYVATVETLAQLHSLNIQSLQLEGYGIGAGYCKRQVSTWTKQYQAAAHQDIPAMQQLSEWLMKNLPDNDNEENLIHGDFRLDNIVFHPKECRVIAVLDWELSTIGHPLSDLAHFSLFYFWPRTVPMINQGSYSENSGIPSMEELISIYCRCRGINSILPNWNFFLALSYFKMAGIAQGVYSRYLLGNNSSEDSFLFANIVQPLAETGLQLSKRTFSTVLPQIDTTGQLFVQTRKGQEVLIKVKHFMKQHILPAEKEVTEFYVQNENSVDKWGKPLVIDKLKEMAKVEGLWNLFLPAVSGLSHVDYALIAEETGKCFFAPDVFNCQAPGYYIN

SEQ ID NO: 1838 - protein, 155 aa, Homo sapiens
  Payload ID: 488;
  Gene Symbol: ACAD11;
  Gene Name: acyl-CoA dehydrogenase family, member 11;
  ENSP ID: ENSP00000423796
GLSHVDYALIAEETGKCFFAPDVFNCQAPDTGNMEVLHLYGSEEQKKQWLEPLLQGNITSCFCMTEPDVASSDATNIECSIQRDEDSYVINGKKWWSSGAGNPKCKIAIVLGRTQNTSLSRSQPASDYVGVRLLHSSHSSHHCLHDYMKTSKRQL

SEQ ID NO: 1839 - protein, 415 aa, Homo sapiens
  Payload ID: 489;
  Gene Symbol: ACAD8;
  Gene Name: acyl-CoA dehydrogenase family, member 8;
  Uniprot ID:  Q9UKU7;
  ENSP ID: ENSP00000281182
MLWSGCRRFGARLGCLPGGLRVLVQTGHRSLTSCIDPSMGLNEEQKEFQKVAFDFAAREMAPNMAEWDQKELFPVDVMRKAAQLGFGGVYIQTDVGGSGLSRLDTSVIFEALATGCTSTTAYISIHNMCAWMIDSFGNEEQRHKFCPPLCTMEKFASYCLTEPGSGSDAASLLTSAKKQGDHYILNGSKAFISGAGESDIYVVMCRTGGPGPKGISCIVVEKGTPGLSFGKKEKKVGWNSQPTRAVIFEDCAVPVANRIGSEGQGFLIAVRGLNGGRINIASCSLGAAHASVILTRDHLNVRKQFGEPLASNQYLQFTLADMATRLVAARLMVRNAAVALQEERKDAVALCSMAKLFATDECFAICNQALQMHGGYGYLKDYAVQQYVRDSRVHQILEGSNEVMRILISRSLLQE

SEQ ID NO: 1840 - protein, 288 aa, Homo sapiens
  Payload ID: 489;
  Gene Symbol: ACAD8;
  Gene Name: acyl-CoA dehydrogenase family, member 8;
  Uniprot ID:  Q9UKU7;
  ENSP ID: ENSP00000363884
MLWSGCRRFGARLGCLPGGLRVLVQTGHRSLTSCIDRSGSDAASLLTSAKKQGDHYILNGSKAFISGAGESDIYVVMCRTGGPGPKGISCIVVEKGTPGLSFGKKEKKVGWNSQPTRAVIFEDCAVPVANRIGSEGQGFLIAVRGLNGGRINIASCSLGAAHASVILTRDHLNVRKQFGEPLASNQYLQFTLADMATRLVAARLMVRNAAVALQEERKDAVALCSMAKLFATDECFAICNQALQMHGGYGYLKDYAVQQYVRDSRVHQILEGSNEVMRILISRSLLQE

SEQ ID NO: 1841 - protein, 76 aa, Homo sapiens
  Payload ID: 489;
  Gene Symbol: ACAD8;
  Gene Name: acyl-CoA dehydrogenase family, member 8;
  ENSP ID: ENSP00000431310
MLWSGCRRFGARLGCLPGGLRVLVQTGHRSLTSCIDPSMGLNEEQKEFQKVAFDFAAREMAPNMAEWDQKHVCLDD

SEQ ID NO: 1842 - protein, 69 aa, Homo sapiens
  Payload ID: 489;
  Gene Symbol: ACAD8;
  Gene Name: acyl-CoA dehydrogenase family, member 8;
  ENSP ID: ENSP00000431532
MLWSGCRRFGARLGCLPGGLRVLVQTGHRSLTSCIDRAVPSGCDAEGSPARLRRGLHTNRCGRVWAVTS

SEQ ID NO: 1843 - protein, 621 aa, Homo sapiens
  Payload ID: 490;
  Gene Symbol: ACAD9;
  Gene Name: acyl-CoA dehydrogenase family, member 9;
  Uniprot ID:  Q9H845;
  ENSP ID: ENSP00000312618
MSGCGLFLRTTAAARACRGLVVSTANRRLLRTSPPVRAFAKELFLGKIKKKEVFPFPEVSQDELNEINQFLGPVEKFFTEEVDSRKIDQEGKIPDETLEKLKSLGLFGLQVPEEYGGLGFSNTMYSRLGEIISMDGSITVTLAAHQAIGLKGIILAGTEEQKAKYLPKLASGEHIAAFCLTEPASGSDAASIRSRATLSEDKKHYILNGSKVWITNGGLANIFTVFAKTEVVDSDGSVKDKITAFIVERDFGGVTNGKPEDKLGIRGSNTCEVHFENTKIPVENILGEVGDGFKVAMNILNSGRFSMGSVVAGLLKRLIEMTAEYACTRKQFNKRLSEFGLIQEKFALMAQKAYVMESMTYLTAGMLDQPGFPDCSIEAAMVKVFSSEAAWQCVSEALQILGGLGYTRDYPYERILRDTRILLIFEGTNEILRMYIALTGLQHAGRILTTRIHELKQAKVSTVMDTVGRRLRDSLGRTVDLGLTGNHGVVHPSLADSANKFEENTYCFGRTVETLLLRFGKTIMEEQLVLKRVANILINLYGMTAVLSRASRSIRIGLRNHDHEVLLANTFCVEAYLQNLFSLSQLDKYAPENLDEQIKKVSQQILEKRAYICAHPLDRTC

SEQ ID NO: 1844 - protein, 99 aa, Homo sapiens
  Payload ID: 490;
  Gene Symbol: ACAD9;
  Gene Name: acyl-CoA dehydrogenase family, member 9;
  ENSP ID: ENSP00000422020
MSGCGLFLRTTAAARACRGLVVSTANRRLLRTSPPVRAFAKELFLGKIKKKFSHFQKLAKMNLMKSISSWDPWKNSSLKRWTPEKLTRKGKSQMKLWRN

SEQ ID NO: 1845 - protein, 384 aa, Homo sapiens
  Payload ID: 490;
  Gene Symbol: ACAD9;
  Gene Name: acyl-CoA dehydrogenase family, member 9;
  ENSP ID: ENSP00000422683
VKDKITAFIVERDFGGVTNGKPEDKLGIRGSNTCEVHFENTKIPVENILGEVGDGFKVAMNILNSGRFSMGSVVAGLLKRLIEMTAEYACTRKQFNKRLSEFGLIQEKFALMAQKAYVMESMTYLTAGMLDQPGFPDCSIEAAMVKVFSSEAAWQCVSEALQILGGLGYTRDYPYERILRDTRILLIFEGTNEILRMYIALTGLQHAGRILTTRIHELKQAKVSTVMDTVGRRLRDSLGRTVDLGLTGNHGVVHPSLADSANKFEENTYCFGRTVETLLLRFGKTIMEEQLVLKRVANILINLYGMTAVLSRASRSIRIGLRNHDHEVLLANTFCVEAYLQNLFSLSQLDKYAPENLDEQIKKVSQQILEKRAYICAHPLDRTC

SEQ ID NO: 1846 - protein, 173 aa, Homo sapiens
  Payload ID: 490;
  Gene Symbol: ACAD9;
  Gene Name: acyl-CoA dehydrogenase family, member 9;
  ENSP ID: ENSP00000423758
MSGCGLFLRTTAAARACRGLVVSTANRRLLRTSPPVRAFAKELFLGKIKKKEVFPFPEVSQDELNEINQFLGPVEKFFTEEAYICLIKIFLLAVDSRKIDQEGKIPDETLEKLKSLGLFGLQVPEEYGGLGFSNTMYSRLGEIISMDGSITVTLAAHQAIGLKGIILAGTEEQ

SEQ ID NO: 1847 - protein, 93 aa, Homo sapiens
  Payload ID: 490;
  Gene Symbol: ACAD9;
  Gene Name: acyl-CoA dehydrogenase family, member 9;
  ENSP ID: ENSP00000425226
MSGCGLFLRTTAAARACRGLVVSTANRRLLRTSPPVRAFAKELFLGKIKKVTRALGEPLLSGSRFSPSAARLVLNFVRFPKPAREIHPAAEAC

SEQ ID NO: 1848 - protein, 93 aa, Homo sapiens; identical to SEQ ID NO: 1847
  Payload ID: 490;
  Gene Symbol: ACAD9;
  Gene Name: acyl-CoA dehydrogenase family, member 9;
  ENSP ID: ENSP00000425346

SEQ ID NO: 1849 - protein, 93 aa, Homo sapiens; identical to SEQ ID NO: 1847
  Payload ID: 490;
  Gene Symbol: ACAD9;
  Gene Name: acyl-CoA dehydrogenase family, member 9;
  ENSP ID: ENSP00000426189

SEQ ID NO: 1850 - protein, 69 aa, Homo sapiens
  Payload ID: 490;
  Gene Symbol: ACAD9;
  Gene Name: acyl-CoA dehydrogenase family, member 9;
  ENSP ID: ENSP00000426277
MSGCGLFLRTTAAARACRGLVVSTANRRLLRTSPPVRAFAKELFLGKIKKWTPEKLTRKGKSQMKLWRN

SEQ ID NO: 1851 - protein, 93 aa, Homo sapiens
  Payload ID: 490;
  Gene Symbol: ACAD9;
  Gene Name: acyl-CoA dehydrogenase family, member 9;
  ENSP ID: ENSP00000427283
MSGCGLFLRTTAAARACRGLVVSTANRRLLRTSPPVRAFAKELFLGKIKKKLAKMNLMKSISSWDPWKNSSLKRWTPEKLTRKGKSQMKLWRN

SEQ ID NO: 1852 - protein, 168 aa, Homo sapiens
  Payload ID: 490;
  Gene Symbol: ACAD9;
  Gene Name: acyl-CoA dehydrogenase family, member 9;
  ENSP ID: ENSP00000478191
MEEQLVLKGGQHPHQPVWHDGRAVAGQPLHPHWAPQPRPRGSLGQHLLRGSLLAESLQPLSAGQVCSRKPRSRLRKCPSRSLRSEPISVPTLWTGHAERGQCPLLPPAPTHGPLLDDCYSFFRRLGLSQVKPFVPRLHLKGCRLAWESLFQVLTCRQCSLTGPSQLLN

SEQ ID NO: 1853 - protein, 412 aa, Homo sapiens
  Payload ID: 491;
  Gene Symbol: ACADS;
  Gene Name: acyl-CoA dehydrogenase, C-2 to C-3 short chain;
  Uniprot ID:  P16219;
  ENSP ID: ENSP00000242592
MAAALLARASGPARRALCPRAWRQLHTIYQSVELPETHQMLLQTCRDFAEKELFPIAAQVDKEHLFPAAQVKKMGGLGLLAMDVPEELGGAGLDYLAYAIAMEEISRGCASTGVIMSVNNSLYLGPILKFGSKEQKQAWVTPFTSGDKIGCFALSEPGNGSDAGAASTTARAEGDSWVLNGTKAWITNAWEASAAVVFASTDRALQNKGISAFLVPMPTPGLTLGKKEDKLGIRGSSTANLIFEDCRIPKDSILGEPGMGFKIAMQTLDMGRIGIASQALGIAQTALDCAVNYAENRMAFGAPLTKLQVIQFKLADMALALESARLLTWRAAMLKDNKKPFIKEAAMAKLAASEAATAISHQAIQILGGMGYVTEMPAERHYRDARITEIYEGTSEIQRLVIAGHLLRSYRS

SEQ ID NO: 1854 - protein, 408 aa, Homo sapiens
  Payload ID: 491;
  Gene Symbol: ACADS;
  Gene Name: acyl-CoA dehydrogenase, C-2 to C-3 short chain;
  ENSP ID: ENSP00000401045
MAAALLARASGPARRALCPRAWRQLHTIYQSVELPETHQMLLQTCRDFAEKELFPIAAQVDKEHLFPAAQVKKMGGLGLLAMDVPEELGGAGLDYLAYAIAMEEISRGCASTGVIMSVNNSLYLGPILKFGSKEQKQAWVTPFTSGDKIGCFALSEPGPSLLGPTGPIFALGQVGCPCPSSAATEACTFPRSRQRVSRPELLREGISAFLVPMPTPGLTLGKKEDKLGIRGSSTANLIFEDCRIPKDSILGEPGMGFKIAMQTLDMGRIGIASQALGIAQTALDCAVNYAENRMAFGAPLTKLQVIQFKLADMALALESARLLTWRAAMLKDNKKPFIKEAAMAKLAASEAATAISHQAIQILGGMGYVTEMPAERHYRDARITEIYEGTSEIQRLVIAGHLLRSYRS

SEQ ID NO: 1855 - protein, 454 aa, Homo sapiens
  Payload ID: 492;
  Gene Symbol: ACADM;
  Gene Name: acyl-CoA dehydrogenase, C-4 to C-12 straight chain;
  ENSP ID: ENSP00000359871
MAAGFGRCCRVLRSISRFHWRSQHTKANRQREPGLGFSFEFTEQQKEFQATARKFAREEIIPVAAEYDKTGEYPVPLIRRAWELGLMNTHIPENCDYSVCPLLEACTLYLDAFFLLLTGSNLNLHLNLGGLGLGTFDACLISEELAYGCTGVQTAIEGNSLGQMPIIIAGNDQQKKKYLGRMTEEPLMCAYCVTEPGAGSDVAGIKTKAEKKGDEYIINGQKMWITNGGKANWYFLLARSDPDPKAPANKAFTGFIVEADTPGIQIGRKELNMGQRCSDTRGIVFEDVKVPKENVLIGDGAGFKVAMGAFDKTRPVVAAGAVGLAQRALDEATKYALERKTFGKLLVEHQAISFMLAEMAMKVELARMSYQRAAWEVDSGRRNTYYASIAKAFAGDIANQLATDAVQILGGNGFNTEYPVEKLMRDAKIYQIYEGTSQIQRLIVAREHIDKYKN

SEQ ID NO: 1856 - protein, 421 aa, Homo sapiens
  Payload ID: 492;
  Gene Symbol: ACADM;
  Gene Name: acyl-CoA dehydrogenase, C-4 to C-12 straight chain;
  Uniprot ID:  P11310;
  ENSP ID: ENSP00000359878
MAAGFGRCCRVLRSISRFHWRSQHTKANRQREPGLGFSFEFTEQQKEFQATARKFAREEIIPVAAEYDKTGEYPVPLIRRAWELGLMNTHIPENCGGLGLGTFDACLISEELAYGCTGVQTAIEGNSLGQMPIIIAGNDQQKKKYLGRMTEEPLMCAYCVTEPGAGSDVAGIKTKAEKKGDEYIINGQKMWITNGGKANWYFLLARSDPDPKAPANKAFTGFIVEADTPGIQIGRKELNMGQRCSDTRGIVFEDVKVPKENVLIGDGAGFKVAMGAFDKTRPVVAAGAVGLAQRALDEATKYALERKTFGKLLVEHQAISFMLAEMAMKVELARMSYQRAAWEVDSGRRNTYYASIAKAFAGDIANQLATDAVQILGGNGFNTEYPVEKLMRDAKIYQIYEGTSQIQRLIVAREHIDKYKN

SEQ ID NO: 1857 - protein, 425 aa, Homo sapiens
  Payload ID: 492;
  Gene Symbol: ACADM;
  Gene Name: acyl-CoA dehydrogenase, C-4 to C-12 straight chain;
  Uniprot ID:  P11310;
  ENSP ID: ENSP00000409612
MAAGFGRCCRCSLQVLRSISRFHWRSQHTKANRQREPGLGFSFEFTEQQKEFQATARKFAREEIIPVAAEYDKTGEYPVPLIRRAWELGLMNTHIPENCGGLGLGTFDACLISEELAYGCTGVQTAIEGNSLGQMPIIIAGNDQQKKKYLGRMTEEPLMCAYCVTEPGAGSDVAGIKTKAEKKGDEYIINGQKMWITNGGKANWYFLLARSDPDPKAPANKAFTGFIVEADTPGIQIGRKELNMGQRCSDTRGIVFEDVKVPKENVLIGDGAGFKVAMGAFDKTRPVVAAGAVGLAQRALDEATKYALERKTFGKLLVEHQAISFMLAEMAMKVELARMSYQRAAWEVDSGRRNTYYASIAKAFAGDIANQLATDAVQILGGNGFNTEYPVEKLMRDAKIYQIYEGTSQIQRLIVAREHIDKYKN

SEQ ID NO: 1858 - protein, 50 aa, Homo sapiens
  Payload ID: 492;
  Gene Symbol: ACADM;
  Gene Name: acyl-CoA dehydrogenase, C-4 to C-12 straight chain;
  ENSP ID: ENSP00000431372
MAAGFGRCCRVLRSISRFHWRSQHTKANRQREPGLGFSFGLLCNRTWSRL

SEQ ID NO: 1859 - protein, 47 aa, Homo sapiens
  Payload ID: 492;
  Gene Symbol: ACADM;
  Gene Name: acyl-CoA dehydrogenase, C-4 to C-12 straight chain;
  ENSP ID: ENSP00000431953
MAAGFGRCCRSSPNSRKNFKLLLVNLPERKSSQWLQNMIKLVNIQSP

SEQ ID NO: 1860 - protein, 45 aa, Homo sapiens
  Payload ID: 492;
  Gene Symbol: ACADM;
  Gene Name: acyl-CoA dehydrogenase, C-4 to C-12 straight chain;
  ENSP ID: ENSP00000432522
MAAGFGRCCRVLRSISRFHWRSQHTKANRQREPGLGFSFVSSPPN

SEQ ID NO: 1861 - protein, 76 aa, Homo sapiens
  Payload ID: 492;
  Gene Symbol: ACADM;
  Gene Name: acyl-CoA dehydrogenase, C-4 to C-12 straight chain;
  ENSP ID: ENSP00000434092
MAAGFGRCCRVLRSISRFHWRSQHTKANRQREPGLGFSFEFTEQQKEFQATARKFAREEIIPVAAEYDKTGEFFFF

SEQ ID NO: 1862 - protein, 67 aa, Homo sapiens
  Payload ID: 492;
  Gene Symbol: ACADM;
  Gene Name: acyl-CoA dehydrogenase, C-4 to C-12 straight chain;
  ENSP ID: ENSP00000434284
LIGDGAGFKVAMGAFDKTRPVVAAGAVGLAQRALDEATKYALERKTFGKLLVEVLFPLHLPTSLKVS

SEQ ID NO: 1863 - protein, 47 aa, Homo sapiens; identical to SEQ ID NO: 1859
  Payload ID: 492;
  Gene Symbol: ACADM;
  Gene Name: acyl-CoA dehydrogenase, C-4 to C-12 straight chain;
  ENSP ID: ENSP00000434823

SEQ ID NO: 1864 - protein, 104 aa, Homo sapiens
  Payload ID: 492;
  Gene Symbol: ACADM;
  Gene Name: acyl-CoA dehydrogenase, C-4 to C-12 straight chain;
  ENSP ID: ENSP00000435584
MAAGFGRCCRVLRSISRFHWRSQHTKANRQREPGLGFSFEFTEQQKEFQATARKFAREEIIPVAAEYDKTGEYPVPLIRRAWELGLMNTHIPENCANAYYYCWK

SEQ ID NO: 1865 - protein, 385 aa, Homo sapiens
  Payload ID: 492;
  Gene Symbol: ACADM;
  Gene Name: acyl-CoA dehydrogenase, C-4 to C-12 straight chain;
  ENSP ID: ENSP00000442324
MLQEFTEQQKEFQATARKFAREEIIPVAAEYDKTGEYPVPLIRRAWELGLMNTHIPENCGGLGLGTFDACLISEELAYGCTGVQTAIEGNSLGQMPIIIAGNDQQKKKYLGRMTEEPLMCAYCVTEPGAGSDVAGIKTKAEKKGDEYIINGQKMWITNGGKANWYFLLARSDPDPKAPANKAFTGFIVEADTPGIQIGRKELNMGQRCSDTRGIVFEDVKVPKENVLIGDGAGFKVAMGAFDKTRPVVAAGAVGLAQRALDEATKYALERKTFGKLLVEHQAISFMLAEMAMKVELARMSYQRAAWEVDSGRRNTYYASIAKAFAGDIANQLATDAVQILGGNGFNTEYPVEKLMRDAKIYQIYEGTSQIQRLIVAREHIDKYKN

SEQ ID NO: 1866 - protein, 430 aa, Homo sapiens [sequence omitted]

SEQ ID NO: 1867 - protein, 330 aa, Homo sapiens
  Payload ID: 494;
  Gene Symbol: ACADSB;
  Gene Name: acyl-CoA dehydrogenase, short/branched chain;
  Uniprot ID:  P45954;
  ENSP ID: ENSP00000357862
MGIEVDPEYGGTGASFLSTVLVIEELAKVDASVAVFCEIQNTLINTLIRKHGTEEQKATYLPQLTTEKVGSFCLSEAGAGSDSFALKTRADKEGDYYVLNGSKMWISSAEHAGLFLVMANVDPTIGYKGITSFLVDRDTPGLHIGKPENKLGLRASSTCPLTFENVKVPEANILGQIGHGYKYAIGSLNEGRIGIAAQMLGLAQGCFDYTIPYIKERIQFGKRLFDFQGLQHQVAHVATQLEAARLLTYNAARLLEAGKPFIKEASMAKYYASEIAGQTTSKCIEWMGGVGYTKDYPVEKYFRDAKIGTIYEGASNIQLNTIAKHIDAEY

SEQ ID NO: 1868 - protein, 432 aa, Homo sapiens
  Payload ID: 494;
  Gene Symbol: ACADSB;
  Gene Name: acyl-CoA dehydrogenase, short/branched chain;
  Uniprot ID:  P45954;
  ENSP ID: ENSP00000357873
MEGLAVRLLRGSRLLRRNFLTCLSSWKIPPHVSKSSQSEALLNITNNGIHFAPLQTFTDEEMMIKSSVKKFAQEQIAPLVSTMDENSKMEKSVIQGLFQQGLMGIEVDPEYGGTGASFLSTVLVIEELAKVDASVAVFCEIQNTLINTLIRKHGTEEQKATYLPQLTTEKVGSFCLSEAGAGSDSFALKTRADKEGDYYVLNGSKMWISSAEHAGLFLVMANVDPTIGYKGITSFLVDRDTPGLHIGKPENKLGLRASSTCPLTFENVKVPEANILGQIGHGYKYAIGSLNEGRIGIAAQMLGLAQGCFDYTIPYIKERIQFGKRLFDFQGLQHQVAHVATQLEAARLLTYNAARLLEAGKPFIKEASMAKYYASEIAGQTTSKCIEWMGGVGYTKDYPVEKYFRDAKIGTIYEGASNIQLNTIAKHIDAEY

SEQ ID NO: 1869 - protein, 39 aa, Homo sapiens
  Payload ID: 495;
  Gene Symbol: ACADVL;
  Gene Name: acyl-CoA dehydrogenase, very long chain;
  ENSP ID: ENSP00000325395
MQAARMAASLGRQLLRLGGGRSVCDKRDGGQRPWAPGRH

SEQ ID NO: 1870 - protein, 633 aa, Homo sapiens
  Payload ID: 495;
  Gene Symbol: ACADVL;
  Gene Name: acyl-CoA dehydrogenase, very long chain;
  Uniprot ID:  P49748;
  ENSP ID: ENSP00000344152
MQAARMAASLGRQLLRLGGGSSRLTALLGQPRPGPARRPYAGGAAQESKSFAVGMFKGQLTTDQVFPYPSVLNEEQTQFLKELVEPVSRFFEEVNDPAKNDALEMVEETTWQGLKELGAFGLQVPSELGGVGLCNTQYARLVEIVGMHDLGVGITLGAHQSIGFKGILLFGTKAQKEKYLPKLASGETVAAFCLTEPSSGSDAASIRTSAVPSPCGKYYTLNGSKLWISNGGLADIFTVFAKTPVTDPATGAVKEKITAFVVERGFGGITHGPPEKKMGIKASNTAEVFFDGVRVPSENVLGEVGSGFKVAMHILNNGRFGMAAALAGTMRGIIAKAVDHATNRTQFGEKIHNFGLIQEKLARMVMLQYVTESMAYMVSANMDQGATDFQIEAAISKIFGSEAAWKVTDECIQIMGGMGFMKEPGVERVLRDLRIFRIFEGTNDILRLFVALQGCMDKGKELSGLGSALKNPFGNAGLLLGEAGKQLRRRAGLGSGLSLSGLVHPELSRSGELAVRALEQFATVVEAKLIKHKKGIVNEQFLLQRLADGAIDLYAMVVVLSRASRSLSEGHPTAQHEKMLCDTWCIEAAARIREGMAALQSDPWQQELYRNFKSISKALVERGGVVTSNPLGF

SEQ ID NO: 1871 - protein, 655 aa, Homo sapiens
  Payload ID: 495;
  Gene Symbol: ACADVL;
  Gene Name: acyl-CoA dehydrogenase, very long chain;
  Uniprot ID:  P49748;
  ENSP ID: ENSP00000349297
MQAARMAASLGRQLLRLGGGSSRLTALLGQPRPGPARRPYAGGAAQLALDKSDSHPSDALTRKKPAKAESKSFAVGMFKGQLTTDQVFPYPSVLNEEQTQFLKELVEPVSRFFEEVNDPAKNDALEMVEETTWQGLKELGAFGLQVPSELGGVGLCNTQYARLVEIVGMHDLGVGITLGAHQSIGFKGILLFGTKAQKEKYLPKLASGETVAAFCLTEPSSGSDAASIRTSAVPSPCGKYYTLNGSKLWISNGGLADIFTVFAKTPVTDPATGAVKEKITAFVVERGFGGITHGPPEKKMGIKASNTAEVFFDGVRVPSENVLGEVGSGFKVAMHILNNGRFGMAAALAGTMRGIIAKAVDHATNRTQFGEKIHNFGLIQEKLARMVMLQYVTESMAYMVSANMDQGATDFQIEAAISKIFGSEAAWKVTDECIQIMGGMGFMKEPGVERVLRDLRIFRIFEGTNDILRLFVALQGCMDKGKELSGLGSALKNPFGNAGLLLGEAGKQLRRRAGLGSGLSLSGLVHPELSRSGELAVRALEQFATVVEAKLIKHKKGIVNEQFLLQRLADGAIDLYAMVVVLSRASRSLSEGHPTAQHEKMLCDTWCIEAAARIREGMAALQSDPWQQELYRNFKSISKALVERGGVVTSNPLGF

SEQ ID NO: 1872 - protein, 678 aa, Homo sapiens
  Payload ID: 495;
  Gene Symbol: ACADVL;
  Gene Name: acyl-CoA dehydrogenase, very long chain;
  Uniprot ID:  P49748;
  ENSP ID: ENSP00000438689
MLGGLAAAAGTRIMGKEIEAEAQRPLRQTWRPGQPPAMTAKTMSSRLTALLGQPRPGPARRPYAGGAAQLALDKSDSHPSDALTRKKPAKAESKSFAVGMFKGQLTTDQVFPYPSVLNEEQTQFLKELVEPVSRFFEEVNDPAKNDALEMVEETTWQGLKELGAFGLQVPSELGGVGLCNTQYARLVEIVGMHDLGVGITLGAHQSIGFKGILLFGTKAQKEKYLPKLASGETVAAFCLTEPSSGSDAASIRTSAVPSPCGKYYTLNGSKLWISNGGLADIFTVFAKTPVTDPATGAVKEKITAFVVERGFGGITHGPPEKKMGIKASNTAEVFFDGVRVPSENVLGEVGSGFKVAMHILNNGRFGMAAALAGTMRGIIAKAVDHATNRTQFGEKIHNFGLIQEKLARMVMLQYVTESMAYMVSANMDQGATDFQIEAAISKIFGSEAAWKVTDECIQIMGGMGFMKEPGVERVLRDLRIFRIFEGTNDILRLFVALQGCMDKGKELSGLGSALKNPFGNAGLLLGEAGKQLRRRAGLGSGLSLSGLVHPELSRSGELAVRALEQFATVVEAKLIKHKKGIVNEQFLLQRLADGAIDLYAMVVVLSRASRSLSEGHPTAQHEKMLCDTWCIEAAARIREGMAALQSDPWQQELYRNFKSISKALVERGGVVTSNPLGF

SEQ ID NO: 1873 - protein, 282 aa, Homo sapiens
  Payload ID: 495;
  Gene Symbol: ACADVL;
  Gene Name: acyl-CoA dehydrogenase, very long chain;
  ENSP ID: ENSP00000442082
  MOD_RES (1)..(1): Any amino acid
XKLARMVMLQYVTESMAYMVSANMDQGATDFQIEAAISKIFGSEAAWKVTDECIQIMGGMGFMKEPGVERVLRDLRIFRIFEGTNDILRLFVALQGCMDKGKELSGLGSALKNPFGNAGLLLGEAGKQLRRRAGLGSGLSLSGLVHPELSRSGELAVRALEQFATVVEAKLIKHKKGIVSEEAGRECLSRRGPGPGSQPAQIYFHLLLPARASRSLSEGHPTAQHEKMLCDTWCIEAAARIREGMAALQSDPWQQELYRNFKSISKALVERGGVVTSNPLGF

SEQ ID NO: 1874 - protein, 76 aa, Homo sapiens
  Payload ID: 495;
  Gene Symbol: ACADVL;
  Gene Name: acyl-CoA dehydrogenase, very long chain;
  ENSP ID: ENSP00000462366
  MOD_RES (1)..(1): Any amino acid
XLKELVEPVSRFFEEVNDPAKNDALEMVEETTWQGLKELGAFGLQVPSELGGVGLCNTQIPASPPVRPFGGDRGHA

SEQ ID NO: 1875 - protein, 204 aa, Homo sapiens
  Payload ID: 495;
  Gene Symbol: ACADVL;
  Gene Name: acyl-CoA dehydrogenase, very long chain;
  ENSP ID: ENSP00000462611
  MOD_RES (1)..(1): Any amino acid
XEVGSGFKVAMHILNNGRFGMAAALAGTMRGIIAKAVDHATNRTQFGEKIHNFGLIQEKLARMVMLQYVTESMAYMVSANMDQGATDFQIEAAISKIFGSEAAWKVTDECIQIMGGMGFMKEPGVERVLRDLRIFRIFEGTNDILRLFVALQGCMAGRAGQRPESQRTCPPGVESEWRAGSTGSGAVCHCGGGQADKTQEGDCQ

SEQ ID NO: 1876 - protein, 155 aa, Homo sapiens
  Payload ID: 495;
  Gene Symbol: ACADVL;
  Gene Name: acyl-CoA dehydrogenase, very long chain;
  ENSP ID: ENSP00000463246
MQAARMAASLGRQLLRLGGGSSRLTALLGQPRPGPARRPYAGGAAQLALDKSDSHPSDALTRKKPAKNDALEMVEETTWQGLKELGAFGLQVPSELGGVGLCNTQYARLVEIVGMHDLGVGITLGAHQSIGFKGILLFGTKAQKEKYLPKLASGE

SEQ ID NO: 1877 - protein, 194 aa, Homo sapiens
  Payload ID: 495;
  Gene Symbol: ACADVL;
  Gene Name: acyl-CoA dehydrogenase, very long chain;
  ENSP ID: ENSP00000464254
  MOD_RES (1)..(1): Any amino acid
XLQYVTESMAYMVSANMDQGATDFQIEAAISKIFGSEAAWKVTDECIQIMGGMGFMKEPGVERVLRDLRIFRIFEGTNDILRLFVALQGCMAGRAGQRPESQRTCPPGVESEWRAVRALEQFATVVEAKLIKHKKGIVNEQFLLQRLADGAIDLYAMVVVLSRASRSLSEGHPTAQHEKMLCDTWCIEAAARIR

SEQ ID NO: 1878 - protein, 157 aa, Homo sapiens
  Payload ID: 495;
  Gene Symbol: ACADVL;
  Gene Name: acyl-CoA dehydrogenase, very long chain;
  ENSP ID: ENSP00000465353
MQAARMAASLGRQLLRLGGGSSRLTALLGQPRPGPARRPYAGGAAQLALDKSDSHPSDALTRKKPAKAESKSFAVGMFKGQLTTDQVFPYPSVLNEEQTQFLKELVEPVSRFFEEPGCGILCLPQEVNDPAKNDALEMVEETTWQGLKELGAFGLQV

SEQ ID NO: 1879 - protein, 45 aa, Homo sapiens
  Payload ID: 495;
  Gene Symbol: ACADVL;
  Gene Name: acyl-CoA dehydrogenase, very long chain;
  ENSP ID: ENSP00000466487
ALEQFATVVEAKLIKHKKGIVTAGRRGHRPLCHGGGSLEGLKIPE

SEQ ID NO: 1880 - protein, 224 aa, Homo sapiens
  Payload ID: 495;
  Gene Symbol: ACADVL;
  Gene Name: acyl-CoA dehydrogenase, very long chain;
  ENSP ID: ENSP00000467920
MQAARMAASLGRQLLRLGGGSSRLTALLGQPRPGPARRPYAGGAAQLALDKSDSHPSDALTRKKPAKAESKSFAVGMFKGQLTTDQVFPYPSVLNEEQTQFLKELVEPVSRFFEEVNDPAKNDALEMVEETTWQGLKELGAFGLQVPSELGGVGLCNTQYARLVEIVGMHDLGVGITLGAHQSIGFKGILLFGTKAQKEKYLPKLASALSPTGETVAAFCLTEP

SEQ ID NO: 1881 - protein, 660 aa, Homo sapiens
  Payload ID: 496;
  Gene Symbol: ACOX1;
  Gene Name: acyl-CoA oxidase 1, palmitoyl;
  Uniprot ID:  Q15067;
  ENSP ID: ENSP00000293217
MNPDLRRERDSASFNPELLTHILDGSPEKTRRRREIENMILNDPDFQHEDLNFLTRSQRYEVAVRKSAIMVKKMREFGIADPDEIMWFKNFVHRGRPEPLDLHLGMFLPTLLHQATAEQQERFFMPAWNLEIIGTYAQTEMGHGTHLRGLETTATYDPETQEFILNSPTVTSIKWWPGGLGKTSNHAIVLAQLITKGKCYGLHAFIVPIREIGTHKPLPGITVGDIGPKFGYDEIDNGYLKMDNHRIPRENMLMKYAQVKPDGTYVKPLSNKLTYGTMVFVRSFLVGEAARALSKACTIAIRYSAVRHQSEIKPGEPEPQILDFQTQQYKLFPLLATAYAFQFVGAYMKETYHRINEGIGQGDLSELPELHALTAGLKAFTSWTANTGIEACRMACGGHGYSHCSGLPNIYVNFTPSCTFEGENTVMMLQTARFLMKSYDQVHSGKLVCGMVSYLNDLPSQRIQPQQVAVWPTMVDINSPESLTEAYKLRAARLVEIAAKNLQKEVIHRKSKEVAWNLTSVDLVRASEAHCHYVVVKLFSEKLLKIQDKAIQAVLRSLCLLYSLYGISQNAGDFLQGSIMTEPQITQVNQRVKELLTLIRSDAVALVDAFDFQDVTLGSVLGRYDGNVYENLFEWAKNSPLNKAEVHESYKHLKSLQSKL

SEQ ID NO: 1882 - protein, 660 aa, Homo sapiens
  Payload ID: 496;
  Gene Symbol: ACOX1;
  Gene Name: acyl-CoA oxidase 1, palmitoyl;
  Uniprot ID:  Q15067;
  ENSP ID: ENSP00000301608
MNPDLRRERDSASFNPELLTHILDGSPEKTRRRREIENMILNDPDFQHEDLNFLTRSQRYEVAVRKSAIMVKKMREFGIADPDEIMWFKKLHLVNFVEPVGLNYSMFIPTLLNQGTTAQKEKWLLSSKGLQIIGTYAQTEMGHGTHLRGLETTATYDPETQEFILNSPTVTSIKWWPGGLGKTSNHAIVLAQLITKGKCYGLHAFIVPIREIGTHKPLPGITVGDIGPKFGYDEIDNGYLKMDNHRIPRENMLMKYAQVKPDGTYVKPLSNKLTYGTMVFVRSFLVGEAARALSKACTIAIRYSAVRHQSEIKPGEPEPQILDFQTQQYKLFPLLATAYAFQFVGAYMKETYHRINEGIGQGDLSELPELHALTAGLKAFTSWTANTGIEACRMACGGHGYSHCSGLPNIYVNFTPSCTFEGENTVMMLQTARFLMKSYDQVHSGKLVCGMVSYLNDLPSQRIQPQQVAVWPTMVDINSPESLTEAYKLRAARLVEIAAKNLQKEVIHRKSKEVAWNLTSVDLVRASEAHCHYVVVKLFSEKLLKIQDKAIQAVLRSLCLLYSLYGISQNAGDFLQGSIMTEPQITQVNQRVKELLTLIRSDAVALVDAFDFQDVTLGSVLGRYDGNVYENLFEWAKNSPLNKAEVHESYKHLKSLQSKL

SEQ ID NO: 1883 - protein, 223 aa, Homo sapiens
  Payload ID: 496;
  Gene Symbol: ACOX1;
  Gene Name: acyl-CoA oxidase 1, palmitoyl;
  ENSP ID: ENSP00000458325
MNPDLRRERDSASFNPELLTHILDGSPEKTRRRREIENMILNDPDFQHEDLNFLTRSQRYEVAVRKSAIMVKKMREFGIADPDEIMWFKKLHLVNFVEPVGLNYSMFIPTLLNQGTTAQKEKWLLSSKGLQIIGTYAQTEMGHVLCTEGGLSLWIFTWACSCPPCFTRQLRSSRSASSCPPGTWRSLALMPRQRWVMELTFEAWKPQPRMTLKPRSSFSTVLL

SEQ ID NO: 1884 - protein, 71 aa, Homo sapiens
  Payload ID: 496;
  Gene Symbol: ACOX1;
  Gene Name: acyl-CoA oxidase 1, palmitoyl;
  ENSP ID: ENSP00000459936
MNPDLRRERDSASFNPELLTHILDGSPEKTRRRREIGEGGGRDLPPFPRKAGDSLDAESGALWGLGPLAQR

SEQ ID NO: 1885 - protein, 108 aa, Homo sapiens
  Payload ID: 496;
  Gene Symbol: ACOX1;
  Gene Name: acyl-CoA oxidase 1, palmitoyl;
  ENSP ID: ENSP00000461486
  MOD_RES (1)..(1): Any amino acid
XNMILNDPDFQHEDLNFLTRSQRYEVAVRKSAIMVKKMREFGIADPDEIMWFKKLHLVNFVEPVGLNYSMFIPTLLNQGTTAQKEKWLLSSKGLQIIGTYAQTEMGHG

SEQ ID NO: 1886 - protein, 156 aa, Homo sapiens
  Payload ID: 496;
  Gene Symbol: ACOX1;
  Gene Name: acyl-CoA oxidase 1, palmitoyl;
  ENSP ID: ENSP00000466210
MNPDLRRERDSASFNPELLTHILDGSPEKTRRRREIENMILNDPDFQHEDLNFLTRSQRYEVAVRKSAIMVKKMREFGIADPDEIMWFKKLHLVNFVEPVGLNYSMFIPTLLNQGTTAQKEKWLLSSKGLQIIGTYAQTEMGHVGKTSNHAIVLAQ

SEQ ID NO: 1887 - protein, 132 aa, Homo sapiens
  Payload ID: 496;
  Gene Symbol: ACOX1;
  Gene Name: acyl-CoA oxidase 1, palmitoyl;
  ENSP ID: ENSP00000466921
  MOD_RES (1)..(1): Any amino acid
XHCHYVVVKLFSEKLLKIQDKAIQAVLRSLCLLYSLYGISQNAGDFLQGSIMTEPQITQVNQRVKELLTLIRSDAVALVDAFDFQDVTLGSVLGRYDGNVYENLFEWAKNSPLNKAEVHESYKHLKSLQSKL

SEQ ID NO: 1888 - protein, 71 aa, Homo sapiens; identical to SEQ ID NO: 1884
  Payload ID: 496;
  Gene Symbol: ACOX1;
  Gene Name: acyl-CoA oxidase 1, palmitoyl;
  ENSP ID: ENSP00000468435

SEQ ID NO: 1889 - protein, 153 aa, Homo sapiens
  Payload ID: 496;
  Gene Symbol: ACOX1;
  Gene Name: acyl-CoA oxidase 1, palmitoyl;
  ENSP ID: ENSP00000468651
  MOD_RES (1)..(1): Any amino acid
XNLTSVDLVRASEAHCHYVVVKLFSEKLLKIQDKAIQAVLRSLCLLYSLYGISQNAGDFLQGSIMTEPQITQVNQRVKELLTLIRSDAVALVDAFDFQDVTLGSVLGRYDGNVYENLFEWAKNSPLNKAEGFGWRNKTLQMHDLGDPCESIIL

SEQ ID NO: 1890 - protein, 681 aa, Homo sapiens
  Payload ID: 497;
  Gene Symbol: ACOX2;
  Gene Name: acyl-CoA oxidase 2, branched chain;
  Uniprot ID:  Q99424;
  ENSP ID: ENSP00000307697
MGSPVHRVSLGDTWSRQMHPDIESERYMQSFDVERLTNILDGGAQNTALRRKVESIIHSYPEFSCKDNYFMTQNERYKAAMRRAFHIRLIARRLGWLEDGRELGYAYRALSGDVALNIHRVFVRALRSLGSEEQIAKWDPLCKNIQIIATYAQTELGHGTYLQGLETEATYDAATQEFVIHSPTLTATKWWPGDLGRSATHALVQAQLICSGARRGMHAFIVPIRSLQDHTPLPGIIIGDIGPKMDFDQTDNGFLQLNHVRVPRENMLSRFAQVLPDGTYVKLGTAQSNYLPMVVVRVELLSGEILPILQKACVIAMRYSVIRRQSRLRPSDPEAKVLDYQTQQQKLFPQLAISYAFHFLAVSLLEFFQHSYTAILNQDFSFLPELHALSTGMKAMMSEFCTQGAEMCRRACGGHGYSKLSGLPSLVTKLSASCTYEGENTVLYLQVARFLVKSYLQTQMSPGSTPQRSLSPSVAYLTAPDLARCPAQRAADFLCPELYTTAWAHVAVRLIKDSVQHLQTLTQSGADQHEAWNQTTVIHLQAAKVHCYYVTVKGFTEALEKLENEPAIQQVLKRLCDLHAIHGILTNSGDFLHDAFLSGAQVDMARTAYLDLLRLIRKDAILLTDAFDFTDQCLNSALGCYDGNVYERLFQWAQKSPTNTQENPAYEEYIRPLLQSWRSKL

SEQ ID NO: 1891 - protein, 93 aa, Homo sapiens
  Payload ID: 497;
  Gene Symbol: ACOX2;
  Gene Name: acyl-CoA oxidase 2, branched chain;
  ENSP ID: ENSP00000417877
EALEKLENEPAIQQVLKRLCDLHAIHGILTNSGDFLHDAFLSGAQVDMARTAYLDLLRLIREIRCKAIQAKEMGKVDSVNLRIKEMEGCHPVN

SEQ ID NO: 1892 - protein, 107 aa, Homo sapiens
  Payload ID: 497;
  Gene Symbol: ACOX2;
  Gene Name: acyl-CoA oxidase 2, branched chain;
  ENSP ID: ENSP00000418515
GTYLQGLETEATYDAATQEFVIHSPTLTATKWWPGDLGRSATHALVQAQLICSGARRGMHAFIVPIRSLQDHTPLPGVLISISFKESSLGTSDPRWTLIKQTMASCS

SEQ ID NO: 1893 - protein, 667 aa, Homo sapiens
  Payload ID: 497;
  Gene Symbol: ACOX2;
  Gene Name: acyl-CoA oxidase 2, branched chain;
  ENSP ID: ENSP00000418562
MGSPVHRVSLGDTWSRQMHPDIESERYMQSFDVERLTNILDGGAQNTALRRKVESIIHSYPEFSCKDNYFMTQNERYKAAMRRAFHIRLIARRLGWLEDGRELGYAYRALSGDVALNIHRVFVRALRSLGSEEQIAKWDPLCKNIQIIATYAQTELGHGTYLQGLETEATYDAATQEFVIHSPTLTATKWWPGDLGRSATHALVQAQLICSGARRGMHAFIVPIRSLQDHTPLPGIIIGDIGPKMDFDQTDNGFLQLNHVLPDGTYVKLGTAQSNYLPMVVVRVELLSGEILPILQKACVIAMRYSVIRRQSRLRPSDPEAKVLDYQTQQQKLFPQLAISYAFHFLAVSLLEFFQHSYTAILNQDFSFLPELHALSTGMKAMMSEFCTQGAEMCRRACGGHGYSKLSGLPSLVTKLSASCTYEGENTVLYLQVARFLVKSYLQTQMSPGSTPQRSLSPSVAYLTAPDLARCPAQRAADFLCPELYTTAWAHVAVRLIKDSVQHLQTLTQSGADQHEAWNQTTVIHLQAAKVHCYYVTVKGFTEALEKLENEPAIQQVLKRLCDLHAIHGILTNSGDFLHDAFLSGAQVDMARTAYLDLLRLIRKDAILLTDAFDFTDQCLNSALGCYDGNVYERLFQWAQKSPTNTQENPAYEEYIRPLLQSWRSKL

SEQ ID NO: 1894 - protein, 13 aa, Homo sapiens
  Payload ID: 497;
  Gene Symbol: ACOX2;
  Gene Name: acyl-CoA oxidase 2, branched chain;
  ENSP ID: ENSP00000419133
  MOD_RES (1)..(1): Any amino acid
XAQNTALRRKVDP

SEQ ID NO: 1895 - protein, 171 aa, Homo sapiens
  Payload ID: 497;
  Gene Symbol: ACOX2;
  Gene Name: acyl-CoA oxidase 2, branched chain;
  ENSP ID: ENSP00000419927
MGSPVHRVSLGDTWSRQMHPDIESERYMQSFDVERLTNILDGGAQNTALRRKVESIIHSYPEFSCKDNYFMTQNERYKAAMRRAFHIRLIARRLGWLEDGRELGYAYRALSGDVALNIHRVFVRALRSLGSEEQIAKWDPLCKNIQIIATYAQTELGHGTYLQGLETEATY

SEQ ID NO: 1896 - protein, 700 aa, Homo sapiens
  Payload ID: 498;
  Gene Symbol: ACOX3;
  Gene Name: acyl-CoA oxidase 3, pristanoyl;
  Uniprot ID:  O15254;
  ENSP ID: ENSP00000348775
MASTVEGGDTALLPEFPRGPLDAYRARASFSWKELALFTEGEGMLRFKKTIFSALENDPLFARSPGADLSLEKYRELNFLRCKRIFEYDFLSVEDMFKSPLKVPALIQCLGMYDSSLAAKYLLHSLVFGSAVYSSGSERHLTYIQKIFRMEIFGCFALTELSHGSNTKAIRTTAHYDPATEEFIIHSPDFEAAKFWVGNMGKTATHAVVFAKLCVPGDQCHGLHPFIVQIRDPKTLLPMPGVMVGDIGKKLGQNGLDNGFAMFHKVRVPRQSLLNRMGDVTPEGTYVSPFKDVRQRFGASLGSLSSGRVSIVSLAILNLKLAVAIALRFSATRRQFGPTEEEEIPVLEYPMQQWRLLPYLAAVYALDHFSKSLFLDLVELQRGLASGDRSARQAELGREIHALASASKPLASWTTQQGIQECREACGGHGYLAMNRLGVLRDDNDPNCTYEGDNNILLQQTSNYLLGLLAHQVHDGACFRSPLKSVDFLDAYPGILDQKFEVSSVADCLDSAVALAAYKWLVCYLLRETYQKLNQEKRSGSSDFEARNKCQVSHGRPLALAFVELTVVQRFHEHVHQPSVPPSLRAVLGRLSALYALWSLSRHAALLYRGGYFSGEQAGEVLESAVLALCSQLKDDAVALVDVIAPPDFVLDSPIGRADGELYKNLWGAVLQESKVLERASWWPEFSVNKPVIGSLKSKL

SEQ ID NO: 1897 - protein, 624 aa, Homo sapiens
  Payload ID: 498;
  Gene Symbol: ACOX3;
  Gene Name: acyl-CoA oxidase 3, pristanoyl;
  Uniprot ID:  O15254;
  ENSP ID: ENSP00000413994
MASTVEGGDTALLPEFPRGPLDAYRARASFSWKELALFTEGEGMLRFKKTIFSALENDPLFARSPGADLSLEKYRELNFLRCKRIFEYDFLSVEDMFKSPLKVPALIQCLGMYDSSLAAKYLLHSLVFGSAVYSSGSERHLTYIQKIFRMEIFGCFALTELSHGSNTKAIRTTAHYDPATEEFIIHSPDFEAAKFWVGNMGKTATHAVVFAKLCVPGDQCHGLHPFIVQIRDPKTLLPMPGVMVGDIGKKLGQNGLDNGFAMFHKVRVPRQSLLNRMGDVTPEGTYVSPFKDVRQRFGASLGSLSSGRVSIVSLAILNLKLAVAIALRFSATRRQFGPTEEEEIPVLEYPMQQWRLLPYLAAVYALDHFSKSLFLDLVELQRGLASGDRSARQAELGREIHALASASKPLASWTTQQGIQECREACGGHGYLAMNRLGVLRDDNDPNCTYEGDNNILLQQTSNYLLGLLAHQVHDGACFRSPLKSVDFLDAYPGILDQKFEVSSVADCLDSAVALAAYKWLVCYLLRETYQKLNQEKRSGSSDFEARNKCQVSHGRPLALAFVELTVVQRFHEHVHQPSVPPSLRAVLGRLSALYALWSLSRHAALLYRAERRCSCPGRRDRSS

SEQ ID NO: 1898 - protein, 700 aa, Homo sapiens; identical to SEQ ID NO: 1896
  Payload ID: 498;
  Gene Symbol: ACOX3;
  Gene Name: acyl-CoA oxidase 3, pristanoyl;
  Uniprot ID:  O15254;
  ENSP ID: ENSP00000421625

SEQ ID NO: 1899 - protein, 110 aa, Homo sapiens
  Payload ID: 498;
  Gene Symbol: ACOX3;
  Gene Name: acyl-CoA oxidase 3, pristanoyl;
  ENSP ID: ENSP00000427321
MFKSPLKVPALIQCLGMYDSSLAAKYLLHSLVFGSAVYSSGSERHLTYIQKIFRMEIFGCFALTELSHGSNTKAIRTTAHYDPATEEFIIHSPDFEAAKFWVGNMGKTAT

SEQ ID NO: 1900 - protein, 279 aa, Homo sapiens
  Payload ID: 499;
  Gene Symbol: ACOXL;
  Gene Name: acyl-CoA oxidase-like;
  Uniprot ID:  Q9NUZ1;
  ENSP ID: ENSP00000343717
MRALTVQRVKFAMDLPLLKRAGQDLAEKTKNFVSRSLVIGEVLSMADMATGVKCGIIYWLFGGAIRNLGSPEHVTKWFQPLQEQKYTGMFAMTERGHGSNARGIQTEATFDLSAQEFVIDTPCENAEKMYIGNAMYGNYAAVFAQLIIDGRSQGPHCFIVPVRDENGSLYPGVTAIDMMYKEGLHGVDNGILIFDKVRIPRENLLDKFGSVAPDGQYHSPIRNKSARFNAMLAALTPSRLAVAFQAMGAMKLGLTIAIRYSHRSRIISQNCCSAPAGLY

SEQ ID NO: 1901 - protein, 547 aa, Homo sapiens
  Payload ID: 499;
  Gene Symbol: ACOXL;
  Gene Name: acyl-CoA oxidase-like;
  Uniprot ID:  Q9NUZ1;
  ENSP ID: ENSP00000374461
MRALTVQRVKFAMDLPLLKRAGQDLAEKTKNFVSRSLVIGEVLSMADMATGVKCGIIYWLFGGAIRNLGSPEHVTKWFQPLQEQKYTGMFAMTERGHGSNARGIQTEATFDLSAQEFVIDTPCENAEKMYIGNAMYGNYAAVFAQLIIDGRSQGPHCFIVPVRDENGSLYPGVTAIDMMYKEGLHGVDNGILIFDKVRIPRENLLDKFGSVAPDGQYHSPIRNKSARFNAMLAALTPSRLAVAFQAMGAMKLGLTIAIRYSHSRRQFGPKTKEEVKIIEHQTQTLRLMPHLATALALTFVSRYAGALLDEDVFQGKELVNSRSLQALVAGLKAYSTWENIRCLQDCRECTGGMGYMMENRISGLKCDTDVFATFEGDDVVMLQVVGRELLAQYTKQYEEKPLFGLLQNWAESVGDKLRTSFLAFNMDTVDDLAFLLKAVKFRERVLQRGLVARIYYKVKTKKEDFFHAWNSCLHHVASLSLAHTHRVTLEQFSLAVKSCPDQEDQTLLMKFCLLYGTKLVFQERAWYLEHKYLTPMASTRIRNQERC

SEQ ID NO: 1902 - protein, 355 aa, Homo sapiens
  Payload ID: 499;
  Gene Symbol: ACOXL;
  Gene Name: acyl-CoA oxidase-like;
  ENSP ID: ENSP00000387832
RDENGSLYPGVTAIDMMYKEGLHGVDNGILIFDKVRIPRENLLDKFGSVAPDGQYHSPIRNKSARFNAMLAALTPSRLAVAFQAMGAMKLGLTIAIRYSHSRRQFGPKTKEEVKIIEHQTQTLRLMPHLATALALTFVSRYAGALLDEDVFQGKELVNSRSLQALVAGLKAYSTWENIRCLQDCRECTGGMVVGRELLAQYTKQYEEKPLFGLLQNWAESVGDKLRTSFLAFNMDTVDDLAFLLKAVKFRERVLQRGLVARIYYKVKTKKEDFFHAWNSCLHHVASLSLAHTHRVTLEQFSLAVKSCPDQEDQTLLMKFCLLYGTKLVFQERAWYLEHKYLTPMASTRIRNQERC

SEQ ID NO: 1903 - protein, 93 aa, Homo sapiens
  Payload ID: 499;
  Gene Symbol: ACOXL;
  Gene Name: acyl-CoA oxidase-like;
  ENSP ID: ENSP00000393823
GDKLRTSFLAFNMDTVDDLAFLLKAVKFRERVLQRGLVARIYYKVKTKKEDFFHAWNSCLHHVASLSLAHTHRVLSVVWNQAGVSGAGLVFRT

SEQ ID NO: 1904 - protein, 70 aa, Homo sapiens
  Payload ID: 499;
  Gene Symbol: ACOXL;
  Gene Name: acyl-CoA oxidase-like;
  ENSP ID: ENSP00000394701
MRALTVQRVKFAMDLPLLKRAGQDLAEKTKNFVSRSLVIGEVLSMADMATGVKCGIIYWLFGGAIRNLGS

SEQ ID NO: 1905 - protein, 161 aa, Homo sapiens
  Payload ID: 499;
  Gene Symbol: ACOXL;
  Gene Name: acyl-CoA oxidase-like;
  ENSP ID: ENSP00000406774
  MOD_RES (1)..(1): Any amino acid
XRFNAMLAALTPSRLAVAFQAMGAMKLGLTIAIRYSHRYAGALLDEDVFQGKELVNSRSLQALVAGLKAYSTWENIRCLQDCRECTGGMGYMMENRISGLKCDTDVFATFEGDDVVMLQVVGRELLAQYTKQYEEKPLFGLLQNWAESVGDKLRTSFLAFN

SEQ ID NO: 1906 - protein, 580 aa, Homo sapiens
  Payload ID: 499;
  Gene Symbol: ACOXL;
  Gene Name: acyl-CoA oxidase-like;
  Uniprot ID:  Q9NUZ1;
  ENSP ID: ENSP00000407761
MRALTVQRVKFAMDLPLLKRAGQDLAEKTKNFVSRSLVIGEVLSMADMATGVKCGIIYWLFGGAIRNLGSPEHVTKWFQPLQEQKYTGMFAMTERGHGSNARGIQTEATFDLSAQEFVIDTPCENAEKMYIGNAMYGNYAAVFAQLIIDGRSQGPHCFIVPVRDENGSLYPGVTAIDMMYKEGLHGVDNGILIFDKVRIPRENLLDKFGSVAPDGQYHSPIRNKSARFNAMLAALTPSRLAVAFQAMGAMKLGLTIAIRYSHSRRQFGPKTKEEVKIIEHQTQTLRLMPHLATALALTFVSRYAGALLDEDVFQGKELVNSRSLQALVAGLKAYSTWENIRCLQDCRECTGGMVVGRELLAQYTKQYEEKPLFGLLQNWAESVGDKLRTSFLAFNMDTVDDLAFLLKAVKFRERVLQRGLVARIYYKVKTKKEDFFHAWNSCLHHVASLSLAHTHRVTLEQFSLAVKSCPDQEDQTLLMKFCLLYGTKLVFQERAWYLEHKYLTPMASTRIRNQLLDLCDSVKDDARRVISTFNIPHTYLHAPIAGISNPRAAWAFYPAPLQPRPREEARSRRPKLGAKL

SEQ ID NO: 1907 - protein, 106 aa, Homo sapiens
  Payload ID: 499;
  Gene Symbol: ACOXL;
  Gene Name: acyl-CoA oxidase-like;
  ENSP ID: ENSP00000409500
GYMMENRISGLKCDTDVFATFEGDDVVMLQVVGRELLAQYTKQYEEKPLFGLLQNWAESVGDKLRTSFLAFNMDTVDDLAFLLKAVKFRERVLQRGLVARIYYKLP

SEQ ID NO: 1908 - protein, 724 aa, Homo sapiens
  Payload ID: 500;
  Gene Symbol: ACSBG1;
  Gene Name: acyl-CoA synthetase bubblegum family member 1;
  Uniprot ID:  Q96GR2;
  ENSP ID: ENSP00000258873
MPRNSGAGYGCPHGDPSMLDSRETPQESRQDMIVRTTQEKLKTSSLTDRQPLSKESLNHALELSVPEKVNNAQWDAPEEALWTTRADGRVRLRIDPSCPQLPYTVHRMFYEALDKYGDLIALGFKRQDKWEHISYSQYYLLARRAAKGFLKLGLKQAHSVAILGFNSPEWFFSAVGTVFAGGIVTGIYTTSSPEACQYIAYDCCANVIMVDTQKQLEKILKIWKQLPHLKAVVIYKEPPPNKMANVYTMEEFMELGNEVPEEALDAIIDTQQPNQCCVLVYTSGTTGNPKGVMLSQDNITWTARYGSQAGDIRPAEVQQEVVVSYLPLSHIAAQIYDLWTGIQWGAQVCFAEPDALKGSLVNTLREVEPTSHMGVPRVWEKIMERIQEVAAQSGFIRRKMLLWAMSVTLEQNLTCPGSDLKPFTTRLADYLVLAKVRQALGFAKCQKNFYGAAPMMAETQHFFLGLNIRLYAGYGLSETSGPHFMSSPYNYRLYSSGKLVPGCRVKLVNQDAEGIGEICLWGRTIFMGYLNMEDKTCEAIDEEGWLHTGDAGRLDADGFLYITGRLKELIITAGGENVPPVPIEEAVKMELPIISNAMLIGDQRKFLSMLLTLKCTLDPDTSDQTDNLTEQAMEFCQRVGSRATTVSEIIEKKDEAVYQAIEEGIRRVNMNAAARPYHIQKWAILERDFSISGGELGPTMKLKRLTVLEKYKGIIDSFYQEQKM

SEQ ID NO: 1909 - protein, 80 aa, Homo sapiens
  Payload ID: 500;
  Gene Symbol: ACSBG1;
  Gene Name: acyl-CoA synthetase bubblegum family member 1;
  ENSP ID: ENSP00000453447
MPRNSGAGYGCPHGDPSMLDSRETPQESRQDMIVRTTQEKLKTRGGAVDDSGRWAGAPAHRPQLPTASLHCASDVLRGPG

SEQ ID NO: 1910 - protein, 482 aa, Homo sapiens
  Payload ID: 500;
  Gene Symbol: ACSBG1;
  Gene Name: acyl-CoA synthetase bubblegum family member 1;
  ENSP ID: ENSP00000453451
MANVYTMEEFMELGNEVPEEALDAIIDTQQPNQCCVLVYTSGTTGNPKGVMLSQDNITWTARYGSQAGDIRPAEVQQEVVVSYLPLSHIAAQIYDLWTGIQWGAQVCFAEPDALKGSLVNTLREVEPTSHMGVPRVWEKIMERIQEVAAQSGFIRRKMLLWAMSVTLEQNLTCPGSDLKPFTTRLADYLVLAKVRQALGFAKCQKNFYGAAPMMAETQHFFLGLNIRLYAGYGLSETSGPHFMSSPYNYRLYSSGKLVPGCRVKLVNQDAEGIGEICLWGRTIFMGYLNMEDKTCEAIDEEGWLHTGDAGRLDADGFLYITGRLKELIITAGGENVPPVPIEEAVKMELPIISNAMLIGDQRKFLSMLLTLKCTLDPDTSDQTDNLTEQAMEFCQRVGSRATTVSEIIEKKDEAVYQAIEEGIRRVNMNAAARPYHIQKWAILERDFSISGGELGPTMKLKRLTVLEKYKGIIDSFYQEQKM

SEQ ID NO: 1911 - protein, 243 aa, Homo sapiens
  Payload ID: 500;
  Gene Symbol: ACSBG1;
  Gene Name: acyl-CoA synthetase bubblegum family member 1;
  ENSP ID: ENSP00000453547
MPEVLLLRSASSILRTAFLSRWLPGGPRCVHKLSFVRNLQCRQGVRLNVRSSSLTDRQPLSKESLNHALELSVPEKVNNAQWDAPEEALWTTRADGRVRLRIDPSCPQLPYTVHRMFYEALDKYGDLIALGFKRQDKWEHISYSQYYLLARRAAKGFLKLGLKQAHSVAILGFNSPEWFFSAVGTVFAGGIVTGIYTTSSPEACQYIAYDCCANVIMVDTQKQLEKILKIWKQLPHLKAVVIY

SEQ ID NO: 1912 - protein, 55 aa, Homo sapiens
  Payload ID: 500;
  Gene Symbol: ACSBG1;
  Gene Name: acyl-CoA synthetase bubblegum family member 1;
  ENSP ID: ENSP00000453585
MPRNSGAGYGCPHGDPSMLDSRETPQESRQDMIVRTTQEKLKTRDGVLLHCPGWP

SEQ ID NO: 1913 - protein, 51 aa, Homo sapiens
  Payload ID: 500;
  Gene Symbol: ACSBG1;
  Gene Name: acyl-CoA synthetase bubblegum family member 1;
  ENSP ID: ENSP00000453605
MPRNSGAGYGCPHGDPSMLDSRETPQESRQDMIVRTTQEKLKTRSGNSCHI

SEQ ID NO: 1914 - protein, 181 aa, Homo sapiens
  Payload ID: 500;
  Gene Symbol: ACSBG1;
  Gene Name: acyl-CoA synthetase bubblegum family member 1;
  ENSP ID: ENSP00000453800
MPRNSGAGYGCPHGDPSMLDSRETPQESRQDMIVRTTQEKLKTSSLTDRQPLSKESLNHALELSVPEKVNNAQWDAPEEALWTTRADGRVRLRIDPSCPQLPYTVHRMFYEALDKYGDLIALGFKRQDKWEHISYSQYYLLARRAAKGFLKQAHSVAILGFNSPEWFFSAVGTVFAGGIVT

SEQ ID NO: 1915 - protein, 138 aa, Homo sapiens
  Payload ID: 500;
  Gene Symbol: ACSBG1;
  Gene Name: acyl-CoA synthetase bubblegum family member 1;
  ENSP ID: ENSP00000454188
MFYEALDKYGDLIALGFKRQDKWEHISYSQYYLLARRAAKGFLKLGLKQAHSVAILGFNSPEWFFSAVGTVFAGGIVTGIYTTSSPEACQYIAYDCCANVIMVDTQKQLEKILKIWKQLPHLKAVVIYKEPPPNKMAN

SEQ ID NO: 1916 - protein, 616 aa, Homo sapiens
  Payload ID: 501;
  Gene Symbol: ACSBG2;
  Gene Name: acyl-CoA synthetase bubblegum family member 2;
  Uniprot ID:  Q5FVE4;
  ENSP ID: ENSP00000464938
MTIPEFFRESVNRFGTYPALASKNGKKWEILNFNQYYEACRKAAKSLIKLGLERFHGVGILGFNSAEWFITAVGAILAGGLCVGIYATNSAEVCQYVITHAKVNILLVENDQQLQKILSIPQSSLEPLKAIIQYRLPMKKNNNLYSWDDFMELGRSIPDTQLEQVIESQKANQCAVLIYTSGTTGIPKGVMLSHDNITWIAGAVTKDFKLTDKHETVVSYLPLSHIAAQMMDIWVPIKIGALTYFAQADALKGTLVSTLKEVKPTVFIGVPQIWEKIHEMVKKNSAKSMGLKKKAFVWARNIGFKVNSKKMLGKYNTPVSYRMAKTLVFSKVKTSLGLDHCHSFISGTAPLNQETAEFFLSLDIPIGELYGLSESSGPHTISNQNNYRLLSCGKILTGCKNMLFQQNKDGIGEICLWGRHIFMGYLESETETTEAIDDEGWLHSGDLGQLDGLGFLYVTGHIKEILITAGGENVPPIPVETLVKKKIPIISNAMLVGDKLKFLSMLLTLKCEMNQMSGEPLDKLNFEAINFCRGLGSQASTVTEIVKQQDPLVYKAIQQGINAVNQEAMNNAQRIEKWVILEKDFSIYGGELGPMMKLKRHFVAQKYKKQIDHMYH

SEQ ID NO: 1917 - protein, 134 aa, Homo sapiens
  Payload ID: 501;
  Gene Symbol: ACSBG2;
  Gene Name: acyl-CoA synthetase bubblegum family member 2;
  ENSP ID: ENSP00000465088
MTGTPKTQEGAKDLEVDMNKTEVTPRLWTTCRDGEVLLRLSKHGPGHETPMTIPEFFRESVNRFGTYPALASKNGKKWEILNFNQYYEACRKAAKSLIKLGLERFHGVGILGFNSAEWFITAVGAILAGFHRAA

SEQ ID NO: 1918 - protein, 117 aa, Homo sapiens
  Payload ID: 501;
  Gene Symbol: ACSBG2;
  Gene Name: acyl-CoA synthetase bubblegum family member 2;
  ENSP ID: ENSP00000465581
YATNSAEVCQYVITHAKVNILLVENDQQLQKILSIPQSSLEPLKAIIQYRLPMKKNNNLYSWDDFMELGRSIPDTQLEQVIESQKANQCAVLIYTSGTTGIPKGVMLSHDNKNSLST

SEQ ID NO: 1919 - protein, 666 aa, Homo sapiens
  Payload ID: 501;
  Gene Symbol: ACSBG2;
  Gene Name: acyl-CoA synthetase bubblegum family member 2;
  Uniprot ID:  Q5FVE4;
  ENSP ID: ENSP00000465589
MTGTPKTQEGAKDLEVDMNKTEVTPRLWTTCRDGEVLLRLSKHGPGHETPMTIPEFFRESVNRFGTYPALASKNGKKWEILNFNQYYEACRKAAKSLIKLGLERFHGVGILGFNSAEWFITAVGAILAGGLCVGIYATNSAEVCQYVITHAKVNILLVENDQQLQKILSIPQSSLEPLKAIIQYRLPMKKNNNLYSWDDFMELGRSIPDTQLEQVIESQKANQCAVLIYTSGTTGIPKGVMLSHDNITWIAGAVTKDFKLTDKHETVVSYLPLSHIAAQMMDIWVPIKIGALTYFAQADALKGTLVSTLKEVKPTVFIGVPQIWEKIHEMVKKNSAKSMGLKKKAFVWARNIGFKVNSKKMLGKYNTPVSYRMAKTLVFSKVKTSLGLDHCHSFISGTAPLNQETAEFFLSLDIPIGELYGLSESSGPHTISNQNNYRLLSCGKILTGCKNMLFQQNKDGIGEICLWGRHIFMGYLESETETTEAIDDEGWLHSGDLGQLDGLGFLYVTGHIKEILITAGGENVPPIPVETLVKKKIPIISNAMLVGDKLKFLSMLLTLKCEMNQMSGEPLDKLNFEAINFCRGLGSQASTVTEIVKQQDPLVYKAIQQGINAVNQEAMNNAQRIEKWVILEKDFSIYGGELGPMMKLKRHFVAQKYKKQIDHMYH

SEQ ID NO: 1920 - protein, 142 aa, Homo sapiens
  Payload ID: 501;
  Gene Symbol: ACSBG2;
  Gene Name: acyl-CoA synthetase bubblegum family member 2;
  ENSP ID: ENSP00000465870
MTGTPKTQEGAKDLEVDMNKTEVTPRLWTTCRDGEVLLRLSKHGPGHETPMTIPEFFRESVNRFGTYPALASKNGKKWEILNFNQYYEACRKAAKSLIKLGLERFHGVGILGFNSAEWFITAVGAILAGGLCVGIYATNSAE

SEQ ID NO: 1921 - protein, 479 aa, Homo sapiens
  Payload ID: 501;
  Gene Symbol: ACSBG2;
  Gene Name: acyl-CoA synthetase bubblegum family member 2;
  Uniprot ID:  Q5FVE4;
  ENSP ID: ENSP00000466336
MKKNNNLYSWDDFMELGRSIPDTQLEQVIESQKANQCAVLIYTSGTTGIPKGVMLSHDNITWIAGAVTKDFKLTDKHETVVSYLPLSHIAAQMMDIWVPIKIGALTYFAQADALKGTLVSTLKEVKPTVFIGVPQIWEKIHEMVKKNSAKSMGLKKKAFVWARNIGFKVNSKKMLGKYNTPVSYRMAKTLVFSKVKTSLGLDHCHSFISGTAPLNQETAEFFLSLDIPIGELYGLSESSGPHTISNQNNYRLLSCGKILTGCKNMLFQQNKDGIGEICLWGRHIFMGYLESETETTEAIDDEGWLHSGDLGQLDGLGFLYVTGHIKEILITAGGENVPPIPVETLVKKKIPIISNAMLVGDKLKFLSMLLTLKCEMNQMSGEPLDKLNFEAINFCRGLGSQASTVTEIVKQQDPLVYKAIQQGINAVNQEAMNNAQRIEKWVILEKDFSIYGGELGPMMKLKRHFVAQKYKKQIDHMYH

SEQ ID NO: 1922 - protein, 37 aa, Homo sapiens
  Payload ID: 501;
  Gene Symbol: ACSBG2;
  Gene Name: acyl-CoA synthetase bubblegum family member 2;
  ENSP ID: ENSP00000466434
  MOD_RES (1)..(1): Any amino acid
XTLVKKKIPIISNAMLVGDKLKFLSMLLTLKPGIHRD

SEQ ID NO: 1923 - protein, 666 aa, Homo sapiens; identical to SEQ ID NO: 1919
  Payload ID: 501;
  Gene Symbol: ACSBG2;
  Gene Name: acyl-CoA synthetase bubblegum family member 2;
  Uniprot ID:  Q5FVE4;
  ENSP ID: ENSP00000467755

SEQ ID NO: 1924 - protein, 129 aa, Homo sapiens
  Payload ID: 501;
  Gene Symbol: ACSBG2;
  Gene Name: acyl-CoA synthetase bubblegum family member 2;
  ENSP ID: ENSP00000468394
MTGTPKTQEGAKDLEVDMNKTEVTPRLWTTCRDGEVLLRLSKHGPGHETPMTIPEFFRESVNRFGTYPALASKNGKKWEILNFNQYYEACRKAAKSLIKLGLERFHGVGILGFNSAEWFITAVGAILAG

SEQ ID NO: 1925 - protein, 76 aa, Homo sapiens
  Payload ID: 501;
  Gene Symbol: ACSBG2;
  Gene Name: acyl-CoA synthetase bubblegum family member 2;
  ENSP ID: ENSP00000468652
MTGTPKTQEGAKDLEVDMNKTEVTPRLWTTCRDGEVLLRLSKHGPGHETPMTIPEFFRESVNRFGTYPALASKNGK

SEQ ID NO: 1926 - protein, 134 aa, Homo sapiens; identical to SEQ ID NO: 1917
  Payload ID: 501;
  Gene Symbol: ACSBG2;
  Gene Name: acyl-CoA synthetase bubblegum family member 2;
  ENSP ID: ENSP00000468684

SEQ ID NO: 1927 - protein, 615 aa, Homo sapiens
  Payload ID: 502;
  Gene Symbol: ACSF2;
  Gene Name: acyl-CoA synthetase family member 2;
  Uniprot ID:  Q96CM8;
  ENSP ID: ENSP00000300441
MAVYVGMLRLGRLCAGSSGVLGARAALSRSWQEARLQGVRFLSSREVDRMVSTPIGGLSYVQGCTKKHLNSKTVGQCLETTAQRVPEREALVVLHEDVRLTFAQLKEEVDKAASGLLSIGLCKGDRLGMWGPNSYAWVLMQLATAQAGIILVSVNPAYQAMELEYVLKKVGCKALVFPKQFKTQQYYNVLKQICPEVENAQPGALKSQRLPDLTTVISVDAPLPGTLLLDEVVAAGSTRQHLDQLQYNQQFLSCHDPINIQFTSGTTGSPKGATLSHYNIVNNSNILGERLKLHEKTPEQLRMILPNPLYHCLGSVAGTMMCLMYGATLILASPIFNGKKALEAISRERGTFLYGTPTMFVDILNQPDFSSYDISTMCGGVIAGSPAPPELIRAIINKINMKDLVVAYGTTENSPVTFAHFPEDTVEQKAESVGRIMPHTEARIMNMEAGTLAKLNTPGELCIRGYCVMLGYWGEPQKTEEAVDQDKWYWTGDVATMNEQGFCKIVGRSKDMIIRGGENIYPAELEDFFHTHPKVQEVQVVGVKDDRMGEEICACIRLKDGEETTVEEIKAFCKGKISHFKIPKYIVFVTNYPLTISGKIQKFKLREQMERHLNL

SEQ ID NO: 1928 - protein, 640 aa, Homo sapiens
  Payload ID: 502;
  Gene Symbol: ACSF2;
  Gene Name: acyl-CoA synthetase family member 2;
  Uniprot ID:  Q96CM8;
  ENSP ID: ENSP00000401831
MAVYVGMLRLGRLCAGSSGVLGARAALSRSWQEARLQGVRFLSARGGMEAGRQRISVPSSFTASAAAHSREVDRMVSTPIGGLSYVQGCTKKHLNSKTVGQCLETTAQRVPEREALVVLHEDVRLTFAQLKEEVDKAASGLLSIGLCKGDRLGMWGPNSYAWVLMQLATAQAGIILVSVNPAYQAMELEYVLKKVGCKALVFPKQFKTQQYYNVLKQICPEVENAQPGALKSQRLPDLTTVISVDAPLPGTLLLDEVVAAGSTRQHLDQLQYNQQFLSCHDPINIQFTSGTTGSPKGATLSHYNIVNNSNILGERLKLHEKTPEQLRMILPNPLYHCLGSVAGTMMCLMYGATLILASPIFNGKKALEAISRERGTFLYGTPTMFVDILNQPDFSSYDISTMCGGVIAGSPAPPELIRAIINKINMKDLVVAYGTTENSPVTFAHFPEDTVEQKAESVGRIMPHTEARIMNMEAGTLAKLNTPGELCIRGYCVMLGYWGEPQKTEEAVDQDKWYWTGDVATMNEQGFCKIVGRSKDMIIRGGENIYPAELEDFFHTHPKVQEVQVVGVKDDRMGEEICACIRLKDGEETTVEEIKAFCKGKISHFKIPKYIVFVTNYPLTISGKIQKFKLREQMERHLNL

SEQ ID NO: 1929 - protein, 104 aa, Homo sapiens
  Payload ID: 502;
  Gene Symbol: ACSF2;
  Gene Name: acyl-CoA synthetase family member 2;
  ENSP ID: ENSP00000421558
  MOD_RES (1)..(1): Any amino acid
XGKKALEAISRERGTFLYGTPTMFVDILNQPDFSSYDISTMCGGVIAGSPAPPELIRAIINKINMKDLVKSQEEIAAWEDGQQSTDVLLERPGRLLMEPQRTVP

SEQ ID NO: 1930 - protein, 602 aa, Homo sapiens
  Payload ID: 502;
  Gene Symbol: ACSF2;
  Gene Name: acyl-CoA synthetase family member 2;
  Uniprot ID:  Q96CM8;
  ENSP ID: ENSP00000421884
MAVYVGMLRLGRLCAGSSGVLGARAALSRSWQEARLQGVRFLSSREVDRMVSTPIGGLSYVQGCTKKHLNSKTVGQCLETTAQRVPEREALVVLHEDVRLTFAQLKEEVDKAASGLLSIGLCKGDRLGMWGPNSYAWVLMQLATAQAMELEYVLKKVGCKALVFPKQFKTQQYYNVLKQICPEVENAQPGALKSQRLPDLTTVISVDAPLPGTLLLDEVVAAGSTRQHLDQLQYNQQFLSCHDPINIQFTSGTTGSPKGATLSHYNIVNNSNILGERLKLHEKTPEQLRMILPNPLYHCLGSVAGTMMCLMYGATLILASPIFNGKKALEAISRERGTFLYGTPTMFVDILNQPDFSSYDISTMCGGVIAGSPAPPELIRAIINKINMKDLVVAYGTTENSPVTFAHFPEDTVEQKAESVGRIMPHTEARIMNMEAGTLAKLNTPGELCIRGYCVMLGYWGEPQKTEEAVDQDKWYWTGDVATMNEQGFCKIVGRSKDMIIRGGENIYPAELEDFFHTHPKVQEVQVVGVKDDRMGEEICACIRLKDGEETTVEEIKAFCKGKISHFKIPKYIVFVTNYPLTISGKIQKFKLREQMERHLNL

SEQ ID NO: 1931 - protein, 85 aa, Homo sapiens
  Payload ID: 502;
  Gene Symbol: ACSF2;
  Gene Name: acyl-CoA synthetase family member 2;
  ENSP ID: ENSP00000422546
TVPPSSWPLPSSMARRHWRPSAERGVIAGSPAPPELIRAIINKINMKDLVKSQEEIAAWEDGQQSTDVLLERPGRLLMEPQRTVP

SEQ ID NO: 1932 - protein, 183 aa, Homo sapiens
  Payload ID: 502;
  Gene Symbol: ACSF2;
  Gene Name: acyl-CoA synthetase family member 2;
  ENSP ID: ENSP00000424842
MAVYVGMLRLGRLCAGSSGVLGARAALSRSWQEARLQGVRFLSSREVDRMVSTPIGGLSYVQGCTKKHLNSKTVGQCLETTAQRVPEREALVVLHEDVRLTFAQLKEEVDKAASGLLSIGLCKGVCEPSLPGYGTGVCPQEGGLQGPCVPQAIQDPAILQRPEADLSRSGECPARGLEESEAP

SEQ ID NO: 1933 - protein, 45 aa, Homo sapiens
  Payload ID: 502;
  Gene Symbol: ACSF2;
  Gene Name: acyl-CoA synthetase family member 2;
  ENSP ID: ENSP00000425332
MAVYVGMLRLGRLCAGSSGVLGARAALSRSWQEARLQGVRFLRCL

SEQ ID NO: 1934 - protein, 572 aa, Homo sapiens
  Payload ID: 502;
  Gene Symbol: ACSF2;
  Gene Name: acyl-CoA synthetase family member 2;
  ENSP ID: ENSP00000425964
MAVYVGMLRLGRLCAGSSGVLGARAALSRSWQEARLQGVRFLSSREVDRMVSTPIGGLSYVQGCTKKHLNSKTVGQCLETTAQRVPEREALVVLHEDVRLTFAQLKEEVSVNPAYQAMELEYVLKKVGCKALVFPKQFKTQQYYNVLKQICPEVENAQPGALKSQRLPDLTTVISVDAPLPGTLLLDEVVAAGSTRQHLDQLQYNQQFLSCHDPINIQFTSGTTGSPKGATLSHYNIVNNSNILGERLKLHEKTPEQLRMILPNPLYHCLGSVAGTMMCLMYGATLILASPIFNGKKALEAISRERGTFLYGTPTMFVDILNQPDFSSYDISTMCGGVIAGSPAPPELIRAIINKINMKDLVVAYGTTENSPVTFAHFPEDTVEQKAESVGRIMPHTEARIMNMEAGTLAKLNTPGELCIRGYCVMLGYWGEPQKTEEAVDQDKWYWTGDVATMNEQGFCKIVGRSKDMIIRGGENIYPAELEDFFHTHPKVQEVQVVGVKDDRMGEEICACIRLKDGEETTVEEIKAFCKGKISHFKIPKYIVFVTNYPLTISGKIQKFKLREQMERHLNL

SEQ ID NO: 1935 - protein, 54 aa, Homo sapiens
  Payload ID: 502;
  Gene Symbol: ACSF2;
  Gene Name: acyl-CoA synthetase family member 2;
  ENSP ID: ENSP00000426730
MAVYVGMLRLGRLCAGSSGVLGARAALSRSWQEARLQGVRFLRPSGEKLAHQGV

SEQ ID NO: 1936 - protein, 576 aa, Homo sapiens
  Payload ID: 503;
  Gene Symbol: ACSF3;
  Gene Name: acyl-CoA synthetase family member 3;
  Uniprot ID:  Q4G176;
  ENSP ID: ENSP00000320646
MLPHVVLTFRRLGCALASCRLAPARHRGSGLLHTAPVARSDRSAPVFTRALAFGDRIALVDQHGRHTYRELYSRSLRLSQEICRLCGCVGGDLREERVSFLCANDASYVVAQWASWMSGGVAVPLYRKHPAAQLEYVICDSQSSVVLASQEYLELLSPVVRKLGVPLLPLTPAIYTGAVEEPAEVPVPEQGWRNKGAMIIYTSGTTGRPKGVLSTHQNIRAVVTGLVHKWAWTKDDVILHVLPLHHVHGVVNALLCPLWVGATCVMMPEFSPQQVWEKFLSSETPRINVFMAVPTIYTKLMEYYDRHFTQPHAQDFLRAVCEEKIRLMVSGSAALPLPVLEKWKNITGHTLLERYGMTEIGMALSGPLTTAVRLPGSVGTPLPGVQVRIVSENPQREACSYTIHAEGDERGTKVTPGFEEKEGELLVRGPSVFREYWNKPEETKSAFTLDGWFKTGDTVVFKDGQYWIRGRTSVDIIKTGGYKVSALEVEWHLLAHPSITDVAVIGVPDMTWGQRVTAVVTLREGHSLSHRELKEWARNVLAPYAVPSELVLVEEIPRNQMGKIDKKALIRHFHPS

SEQ ID NO: 1937 - protein, 311 aa, Homo sapiens
  Payload ID: 503;
  Gene Symbol: ACSF3;
  Gene Name: acyl-CoA synthetase family member 3;
  ENSP ID: ENSP00000367596
MMPEFSPQQVWEKFLSSETPRINVFMAVPTIYTKLMEYYDRHFTQPHAQDFLRAVCEEKIRLMVSGSAALPLPVLEKWKNITGHTLLERYGMTEIGMALSGPLTTAVRLPGSVGTPLPGVQVRIVSENPQREACSYTIHAEGDERGTKVTPGFEEKEGELLVRGPSVFREYWNKPEETKSAFTLDGWFKTGDTVVFKDGQYWIRGRTSVDIIKTGGYKVSALEVEWHLLAHPSITDVAVIGVPDMTWGQRVTAVVTLREGHSLSHRELKEWARNVLAPYAVPSELVLVEEIPRNQMGKIDKKALIRHFHPS

SEQ ID NO: 1938 - protein, 576 aa, Homo sapiens; identical to SEQ ID NO: 1936
  Payload ID: 503;
  Gene Symbol: ACSF3;
  Gene Name: acyl-CoA synthetase family member 3;
  Uniprot ID:  Q4G176;
  ENSP ID: ENSP00000384627

SEQ ID NO: 1939 - protein, 105 aa, Homo sapiens
  Payload ID: 503;
  Gene Symbol: ACSF3;
  Gene Name: acyl-CoA synthetase family member 3;
  ENSP ID: ENSP00000439201
MMPEFSPQQVWEKFLSSETPRINVFMAVPTIYTKLMEYYDRHFTQPHAQDFLRAVCEEKIRLMVSGSAALPLPVLEKWKNITGHTLLERYGMTEIGMALSGPLTT

SEQ ID NO: 1940 - protein, 237 aa, Homo sapiens
  Payload ID: 503;
  Gene Symbol: ACSF3;
  Gene Name: acyl-CoA synthetase family member 3;
  ENSP ID: ENSP00000440734
MLPHVVLTFRRLGCALASCRLAPARHRGSGLLHTAPVARSDRSAPVFTRALAFGDRIALVDQHGRHTYRELYSRSLRLSQEICRLCGCVGGDLREERVSFLCANDASYVVAQWASWMSGGVAVPLYRKHPAAQLEYVICDSQSSVVLASQEYLELLSPVVRKLGVPLLPLTPAIYTGAVEEPAEVPVPEQGWRNKGAMIIYTSGTTGRPKGVLSTHQNIRAVVTGLVHKWAWTKDDV

SEQ ID NO: 1941 - protein, 183 aa, Homo sapiens
  Payload ID: 503;
  Gene Symbol: ACSF3;
  Gene Name: acyl-CoA synthetase family member 3;
  ENSP ID: ENSP00000442683
  MOD_RES (1)..(1): Any amino acid
XLLCPLWVGATCVMMPEFSPQQVWEKFLSSETPRINVFMAVPTIYTKLMEYYDRHFTQPHAQDFLRAVCEEKIRLMVSGSAALPLPVLEKWKNITGHTLLERYGMTEIGMALSGPLTTAVRLPGSVGTPLPGVQVRIVSENPQREACSYTIHAEGDERGTKGPSPCCCPDMPLLGFLPLPCWY

SEQ ID NO: 1942 - protein, 235 aa, Homo sapiens
  Payload ID: 503;
  Gene Symbol: ACSF3;
  Gene Name: acyl-CoA synthetase family member 3;
  ENSP ID: ENSP00000442781
MMPEFSPQQVWEKFLSSETPRINVFMAVPTIYTKLMEYYDRHFTQPHAQDFLRAVCEEKIRLMVSGSAALPLPVLEKWKNITGHTLLERYGMTEIGMALSGPLTTAVRLPGSVGTPLPGVQVRIVSENPQREACSYTIHAEGDERGTKVTPGFEEKEGELLVRGPSVFREYWNKPEETKSAFTLDGWFKTGDTVVFKDGQYWIRGRTSVDIIKTGGYKVSALEVEWHLLAHPSIT

SEQ ID NO: 1943 - protein, 106 aa, Homo sapiens
  Payload ID: 503;
  Gene Symbol: ACSF3;
  Gene Name: acyl-CoA synthetase family member 3;
  ENSP ID: ENSP00000443428
  MOD_RES (1)..(1): Any amino acid
XGVPDMTWGQRVTAVVTLREGHSLSHRELKEWARLKEHPTKRRENSILNIGRKRNLASGMRALTGRMAARRAAVSSEVSSSDETDNSLKRHKLPRLTQTLKQTEQF

SEQ ID NO: 1944 - protein, 190 aa, Homo sapiens
  Payload ID: 503;
  Gene Symbol: ACSF3;
  Gene Name: acyl-CoA synthetase family member 3;
  ENSP ID: ENSP00000445397
MMPEFSPQQVWEKFLSSETPRINVFMAVPTIYTKLMEYYDRHFTQPHAQDFLRAVCEEKIRLMVSGSAALPLPVLEKWKNITGHTLLERYGMTEIGMALSGPLTTAVRLPGSVGTPLPGVQVRIVSENPQREACSYTIHAEGDERGTKVTPGFEEKEGELLVRGPSVFREYWNKPEETKSAFTLDGWFKT

SEQ ID NO: 1945 - protein, 144 aa, Homo sapiens
  Payload ID: 503;
  Gene Symbol: ACSF3;
  Gene Name: acyl-CoA synthetase family member 3;
  ENSP ID: ENSP00000445870
LVHKWAWTKDDVILHVLPLHHVHGVVNALLCPLWVGATCVMMPEFSPQQVWEKFLSSETPRINVFMAVPTIYTKLMEYYDRHFTQPHAQDFLRAVCEEKIRFRGDPTAWSTGAHCLRKPTEGSLLLHHPRRGRREGDQGPQPML

SEQ ID NO: 1946 - protein, 368 aa, Homo sapiens
  Payload ID: 503;
  Gene Symbol: ACSF3;
  Gene Name: acyl-CoA synthetase family member 3;
  ENSP ID: ENSP00000446281
MLPHVVLTFRRLGCALASCRLAPARHRGSGLLHTAPVARSDRSAPVFTRALAFGDRIALVDQHGRHTYRELYSRSLRLSQEICRLCGCVGGDLREERVSFLCANDASYVVAQWASWMSGGVAVPLYRKHPAAQLEYVICDSQSSVVLASQEYLELLSPVVRKLGVPLLPLTPAIYTGAVEEPAEVPVPEQGWRNKGAMIIYTSGTTGRPKGVLSTHQNIRAVVTGLVHKWAWTKDDVILHVLPLHHVHGVVNALLCPLWVGATCVMMPEFSPQQVWEKFLSSETPRINVFMAVPTIYTKLMEYYDRHFTQPHAQDFLRAVCEEKIRFRGDPTAWSTGAHCLRKPTEGSLLLHHPRRGRREGDQGDPRV

SEQ ID NO: 1947 - protein, 28 aa, Homo sapiens
  Payload ID: 503;
  Gene Symbol: ACSF3;
  Gene Name: acyl-CoA synthetase family member 3;
  ENSP ID: ENSP00000457301
MLPHVVLTFRRLGCALASCRLAPARHRG

SEQ ID NO: 1948 - protein, 576 aa, Homo sapiens; identical to SEQ ID NO: 1936
  Payload ID: 503;
  Gene Symbol: ACSF3;
  Gene Name: acyl-CoA synthetase family member 3;
  Uniprot ID:  Q4G176;
  ENSP ID: ENSP00000479130

SEQ ID NO: 1949 - protein, 698 aa, Homo sapiens
  Payload ID: 504;
  Gene Symbol: ACSL1;
  Gene Name: acyl-CoA synthetase long-chain family member 1;
  Uniprot ID:  P33121;
  ENSP ID: ENSP00000281455
MQAHELFRYFRMPELVDFRQYVRTLPTNTLMGFGAFAALTTFWYATRPKPLKPPCDLSMQSVEVAGSGGARRSALLDSDEPLVYFYDDVTTLYEGFQRGIQVSNNGPCLGSRKPDQPYEWLSYKQVAELSECIGSALIQKGFKTAPDQFIGIFAQNRPEWVIIEQGCFAYSMVIVPLYDTLGNEAITYIVNKAELSLVFVDKPEKAKLLLEGVENKLIPGLKIIVVMDAYGSELVERGQRCGVEVTSMKAMEDLGRANRRKPKPPAPEDLAVICFTSGTTGNPKGAMVTHRNIVSDCSAFVKATENTVNPCPDDTLISFLPLAHMFERVVECVMLCHGAKIGFFQGDIRLLMDDLKVLQPTVFPVVPRLLNRMFDRIFGQANTTLKRWLLDFASKRKEAELRSGIIRNNSLWDRLIFHKVQSSLGGRVRLMVTGAAPVSATVLTFLRAALGCQFYEGYGQTECTAGCCLTMPGDWTAGHVGAPMPCNLIKLVDVEEMNYMAAEGEGEVCVKGPNVFQGYLKDPAKTAEALDKDGWLHTGDIGKWLPNGTLKIIDRKKHIFKLAQGEYIAPEKIENIYMRSEPVAQVFVHGESLQAFLIAIVVPDVETLCSWAQKRGFEGSFEELCRNKDVKKAILEDMVRLGKDSGLKPFEQVKGITLHPELFSIDNGLLTPTMKAKRPELRNYFRSQIDDLYSTIKV

SEQ ID NO: 1950 - protein, 527 aa, Homo sapiens
  Payload ID: 504;
  Gene Symbol: ACSL1;
  Gene Name: acyl-CoA synthetase long-chain family member 1;
  ENSP ID: ENSP00000407165
MVIVPLYDTLGNEAITYIVNKAELSLVFVDKPEKAKLLLEGVENKLIPGLKIIVVMDAYGSELVERGQRCGVEVTSMKAMEDLGRANRRKPKPPAPEDLAVICFTSGTTGNPKGAMVTHRNIVSDCSAFVKATENTVNPCPDDTLISFLPLAHMFERVVECVMLCHGAKIGFFQGDIRLLMDDLKVLQPTVFPVVPRLLNRMFDRIFGQANTTLKRWLLDFASKRKEAELRSGIIRNNSLWDRLIFHKVQSSLGGRVRLMVTGAAPVSATVLTFLRAALGCQFYEGYGQTECTAGCCLTMPGDWTAGHVGAPMPCNLIKLVDVEEMNYMAAEGEGEVCVKGPNVFQGYLKDPAKTAEALDKDGWLHTGDIGKWLPNGTLKIIDRKKHIFKLAQGEYIAPEKIENIYMRSEPVAQVFVHGESLQAFLIAIVVPDVETLCSWAQKRGFEGSFEELCRNKDVKKAILEDMVRLGKDSGLKPFEQVKGITLHPELFSIDNGLLTPTMKAKRPELRNYFRSQIDDLYSTIKV

SEQ ID NO: 1951 - protein, 698 aa, Homo sapiens; identical to SEQ ID NO: 1949
  Payload ID: 504;
  Gene Symbol: ACSL1;
  Gene Name: acyl-CoA synthetase long-chain family member 1;
  Uniprot ID:  P33121;
  ENSP ID: ENSP00000422607

SEQ ID NO: 1952 - protein, 388 aa, Homo sapiens
  Payload ID: 504;
  Gene Symbol: ACSL1;
  Gene Name: acyl-CoA synthetase long-chain family member 1;
  ENSP ID: ENSP00000424935
MQAHELFRYFRMPELVDFRQYVRTLPTNTLMGFGAFAALTTFWYATRPKPLKPPCDLSMQSVEVAGSGGARRSALLDSDEPLVYFYDDVTTLYEGFQRGIQVSNNGPCLGSRKPDQPYEWLSYKQVAELSECIGSALIQKGFKTAPDQFIGIFAQNRPEWVIIEQGCFAYSMVIVPLYDTLGNEAITYIVNKAELSLVFVDKPEKAKLLLEGVENKLIPGLKIIVVMDAYGSELVERGQRCGVEVTSMKAMEDLGRANRRKPKPPAPEDLAVICFTSGTTGNPKGAMVTHRNIVSDCSAFVKATENTVNPCPDDTLISFLPLAHMFERVVECVMLCHGAKIGFFQGDIRLLMDDLKVLQPTVFPVVPRLLNRMFDRVSSKQRSPRTEH

SEQ ID NO: 1953 - protein, 698 aa, Homo sapiens; identical to SEQ ID NO: 1949
  Payload ID: 504;
  Gene Symbol: ACSL1;
  Gene Name: acyl-CoA synthetase long-chain family member 1;
  Uniprot ID:  P33121;
  ENSP ID: ENSP00000425006

SEQ ID NO: 1954 - protein, 294 aa, Homo sapiens
  Payload ID: 504;
  Gene Symbol: ACSL1;
  Gene Name: acyl-CoA synthetase long-chain family member 1;
  ENSP ID: ENSP00000425098
KRKEAELRSGIIRNNSLWDRLIFHKVQSSLGGRVRLMVTGAAPVSATVLTFLRAALGCQFYEGYGQTECTAGCCLTMPGDWTAGHVGAPMPCNLIKLVDVEEMNYMAAEGEGEGYLKDPAKTAEALDKDGWLHTGDIGKWLPNGTLKIIDRKKHIFKLAQGEYIAPEKIENIYMRSEPVAQVFVHGESLQAFLIAIVVPDVETLCSWAQKRGFEGSFEELCRNKDVKKAILEDMVRLGKDSGLKPFEQVKGITLHPELFSIDNGLLTPTMKAKRPELRNYFRSQIDDLYSTIKV

SEQ ID NO: 1955 - protein, 94 aa, Homo sapiens
  Payload ID: 504;
  Gene Symbol: ACSL1;
  Gene Name: acyl-CoA synthetase long-chain family member 1;
  ENSP ID: ENSP00000425640
  MOD_RES (1)..(1): Any amino acid
XLGRANRRKPKPPAPEDLAVICFTSGTTGNPKGAMVTHRNIVSDCSAFVKATECVMLCHGAKIGFFQGDIRLLMDDLKVLQPTVFPVVPRLLNR

SEQ ID NO: 1956 - protein, 698 aa, Homo sapiens
  Payload ID: 504;
  Gene Symbol: ACSL1;
  Gene Name: acyl-CoA synthetase long-chain family member 1;
  Uniprot ID:  P33121;
  ENSP ID: ENSP00000426150
MQAHELFRYFRMPELVDFRQYVRTLPTNTLMGFGAFAALTTFWYATRPKPLKPPCDLSMQSVEVAGSGGARRSALLDSDEPLVYFYDDVTTLYEGFQRGIQVSNNGPCLGSRKPDQPYEWLSYKQVAELSECIGSALIQKGFKTAPDQFIGIFAQNRPEWVIIEQGCFAYSMVIVPLYDTLGNEAITYIVNKAELSLVFVDKPEKAKLLLEGVENKLIPGLKIIVVMDAYGSELVERGQRCGVEVTSMKAMEDLGRANRRKPKPPAPEDLAVICFTSGTTGNPKGAMVTHRNIVSDCSAFVKATEKALPLSASDTHISYLPLAHIYEQLLKCVMLCHGAKIGFFQGDIRLLMDDLKVLQPTVFPVVPRLLNRMFDRIFGQANTTLKRWLLDFASKRKEAELRSGIIRNNSLWDRLIFHKVQSSLGGRVRLMVTGAAPVSATVLTFLRAALGCQFYEGYGQTECTAGCCLTMPGDWTAGHVGAPMPCNLIKLVDVEEMNYMAAEGEGEVCVKGPNVFQGYLKDPAKTAEALDKDGWLHTGDIGKWLPNGTLKIIDRKKHIFKLAQGEYIAPEKIENIYMRSEPVAQVFVHGESLQAFLIAIVVPDVETLCSWAQKRGFEGSFEELCRNKDVKKAILEDMVRLGKDSGLKPFEQVKGITLHPELFSIDNGLLTPTMKAKRPELRNYFRSQIDDLYSTIKV

SEQ ID NO: 1957 - protein, 664 aa, Homo sapiens
  Payload ID: 504;
  Gene Symbol: ACSL1;
  Gene Name: acyl-CoA synthetase long-chain family member 1;
  ENSP ID: ENSP00000426244
MQAHELFRYFRMPELVDFRQYVRTLPTNTLMGFGAFAALTTFWYATRPKPLKPPCDLSMQSVEVAGSGGARRSALLDSDEPLVYFYDDVTTLYEGFQRGIQVSNNGPCLGSRKPDQPYEWLSYKQWVIIEQGCFAYSMVIVPLYDTLGNEAITYIVNKAELSLVFVDKPEKAKLLLEGVENKLIPGLKIIVVMDAYGSELVERGQRCGVEVTSMKAMEDLGRANRRKPKPPAPEDLAVICFTSGTTGNPKGAMVTHRNIVSDCSAFVKATENTVNPCPDDTLISFLPLAHMFERVVECVMLCHGAKIGFFQGDIRLLMDDLKVLQPTVFPVVPRLLNRMFDRIFGQANTTLKRWLLDFASKRKEAELRSGIIRNNSLWDRLIFHKVQSSLGGRVRLMVTGAAPVSATVLTFLRAALGCQFYEGYGQTECTAGCCLTMPGDWTAGHVGAPMPCNLIKLVDVEEMNYMAAEGEGEVCVKGPNVFQGYLKDPAKTAEALDKDGWLHTGDIGKWLPNGTLKIIDRKKHIFKLAQGEYIAPEKIENIYMRSEPVAQVFVHGESLQAFLIAIVVPDVETLCSWAQKRGFEGSFEELCRNKDVKKAILEDMVRLGKDSGLKPFEQVKGITLHPELFSIDNGLLTPTMKAKRPELRNYFRSQIDDLYSTIKV

SEQ ID NO: 1958 - protein, 126 aa, Homo sapiens
  Payload ID: 504;
  Gene Symbol: ACSL1;
  Gene Name: acyl-CoA synthetase long-chain family member 1;
  ENSP ID: ENSP00000426491
MQAHELFRYFRMPELVDFRQYVRTLPTNTLMGFGAFAALTTFWYATRPKPLKPPCDLSMQSVEVAGSGGARRSALLDSDEPLVYFYDDVTTLYEGFQRGIQVSRSLRPLCVHCNFPRVGPKAHWTL

SEQ ID NO: 1959 - protein, 527 aa, Homo sapiens; identical to SEQ ID NO: 1950
  Payload ID: 504;
  Gene Symbol: ACSL1;
  Gene Name: acyl-CoA synthetase long-chain family member 1;
  ENSP ID: ENSP00000485264

SEQ ID NO: 1960 - protein, 720 aa, Homo sapiens
  Payload ID: 505;
  Gene Symbol: ACSL3;
  Gene Name: acyl-CoA synthetase long-chain family member 3;
  Uniprot ID:  O95573;
  ENSP ID: ENSP00000350012
MNNHVSSKPSTMKLKHTINPILLYFIHFLISLYTILTYIPFYFFSESRQEKSNRIKAKPVNSKPDSAYRSVNSLDGLASVLYPGCDTLDKVFTYAKNKFKNKRLLGTREVLNEEDEVQPNGKIFKKVILGQYNWLSYEDVFVRAFNFGNGLQMLGQKPKTNIAIFCETRAEWMIAAQACFMYNFQLVTLYATLGGPAIVHALNETEVTNIITSKELLQTKLKDIVSLVPRLRHIITVDGKPPTWSEFPKGIIVHTMAAVEALGAKASMENQPHSKPLPSDIAVIMYTSGSTGLPKGVMISHSNIIAGITGMAERIPELGEEDVYIGYLPLAHVLELSAELVCLSHGCRIGYSSPQTLADQSSKIKKGSKGDTSMLKPTLMAAVPEIMDRIYKNVMNKVSEMSSFQRNLFILAYNYKMEQISKGRNTPLCDSFVFRKVRSLLGGNIRLLLCGGAPLSATTQRFMNICFCCPVGQGYGLTESAGAGTISEVWDYNTGRVGAPLVCCEIKLKNWEEGGYFNTDKPHPRGEILIGGQSVTMGYYKNEAKTKADFFEDENGQRWLCTGDIGEFEPDGCLKIIDRKKDLVKLQAGEYVSLGKVEAALKNLPLVDNICAYANSYHSYVIGFVVPNQKELTELARKKGLKGTWEELCNSCEMENEVLKVLSEAAISASLEKFEIPVKIRLSPEPWTPETGLVTDAFKLKRKELKTHYQADIERMYGRK

SEQ ID NO: 1961 - protein, 720 aa, Homo sapiens; identical to SEQ ID NO: 1960
  Payload ID: 505;
  Gene Symbol: ACSL3;
  Gene Name: acyl-CoA synthetase long-chain family member 3;
  Uniprot ID:  O95573;
  ENSP ID: ENSP00000375918

SEQ ID NO: 1962 - protein, 18 aa, Homo sapiens
  Payload ID: 505;
  Gene Symbol: ACSL3;
  Gene Name: acyl-CoA synthetase long-chain family member 3;
  ENSP ID: ENSP00000385157
  MOD_RES (1)..(1): Any amino acid
XEQISKGRNTPLCDRWIL

SEQ ID NO: 1963 - protein, 88 aa, Homo sapiens
  Payload ID: 505;
  Gene Symbol: ACSL3;
  Gene Name: acyl-CoA synthetase long-chain family member 3;
  ENSP ID: ENSP00000416913
MNNHVSSKPSTMKLKHTINPILLYFIHFLISLYTILTYIPFYFFSESRQEKSNRIKAKPVNSKPDSAYRSVNSLDGLASVLYPGCDTL

SEQ ID NO: 1964 - protein, 95 aa, Homo sapiens
  Payload ID: 505;
  Gene Symbol: ACSL3;
  Gene Name: acyl-CoA synthetase long-chain family member 3;
  ENSP ID: ENSP00000438342
MNNHVSSKPSTMKLKHTINPILLYFIHFLISLYTILTYIPFYFFSESRQEKSNRIKAKPVNSKPDSAYRSVNSLDGLASVLYPGCDTLDKVFTYA

SEQ ID NO: 1965 - protein, 141 aa, Homo sapiens
  Payload ID: 505;
  Gene Symbol: ACSL3;
  Gene Name: acyl-CoA synthetase long-chain family member 3;
  ENSP ID: ENSP00000441643
MLGQKPKTNIAIFCETRAEWMIAAQACFMYNFQLVTLYATLGGPAIVHALNETEVTNIITSKELLQTKLKDIVSLVPRLRHIITVDGKPPTWSEFPKGIIVHTMAAVEALGAKASMENQPHSKPLPSDIAVIMYTSGSTGL

SEQ ID NO: 1966 - protein, 670 aa, Homo sapiens
  Payload ID: 506;
  Gene Symbol: ACSL4;
  Gene Name: acyl-CoA synthetase long-chain family member 4;
  Uniprot ID:  O60488;
  ENSP ID: ENSP00000262835
MAKRIKAKPTSDKPGSPYRSVTHFDSLAVIDIPGADTLDKLFDHAVSKFGKKDSLGTREILSEENEMQPNGKVFKKLILGNYKWMNYLEVNRRVNNFGSGLTALGLKPKNTIAIFCETRAEWMIAAQTCFKYNFPLVTLYATLGKEAVVHGLNESEASYLITSVELLESKLKTALLDISCVKHIIYVDNKAINKAEYPEGFEIHSMQSVEELGSNPENLGIPPSRPTPSDMAIVMYTSGSTGRPKGVMMHHSNLIAGMTGQCERIPGLGPKDTYIGYLPLAHVLELTAEISCFTYGCRIGYSSPLTLSDQSSKIKKGSKGDCTVLKPTLMAAVPEIMDRIYKNVMSKVQEMNYIQKTLFKIGYDYKLEQIKKGYDAPLCNLLLFKKVKALLGGNVRMMLSGGAPLSPQTHRFMNVCFCCPIGQGYGLTESCGAGTVTEVTDYTTGRVGAPLICCEIKLKDWQEGGYTINDKPNPRGEIVIGGQNISMGYFKNEEKTAEDYSVDENGQRWFCTGDIGEFHPDGCLQIIDRKKDLVKLQAGEYVSLGKVEAALKNCPLIDNICAFAKSDQSYVISFVVPNQKRLTLLAQQKGVEGTWVDICNNPAMEAEILKEIREAANAMKLERFEIPIKVRLSPEPWTPETGLVTDAFKLKRKELRNHYLKDIERMYGGK

SEQ ID NO: 1967 - protein, 711 aa, Homo sapiens
  Payload ID: 506;
  Gene Symbol: ACSL4;
  Gene Name: acyl-CoA synthetase long-chain family member 4;
  Uniprot ID:  O60488;
  ENSP ID: ENSP00000339787
MKLKLNVLTIILLPVHLLITIYSALIFIPWYFLTNAKKKNAMAKRIKAKPTSDKPGSPYRSVTHFDSLAVIDIPGADTLDKLFDHAVSKFGKKDSLGTREILSEENEMQPNGKVFKKLILGNYKWMNYLEVNRRVNNFGSGLTALGLKPKNTIAIFCETRAEWMIAAQTCFKYNFPLVTLYATLGKEAVVHGLNESEASYLITSVELLESKLKTALLDISCVKHIIYVDNKAINKAEYPEGFEIHSMQSVEELGSNPENLGIPPSRPTPSDMAIVMYTSGSTGRPKGVMMHHSNLIAGMTGQCERIPGLGPKDTYIGYLPLAHVLELTAEISCFTYGCRIGYSSPLTLSDQSSKIKKGSKGDCTVLKPTLMAAVPEIMDRIYKNVMSKVQEMNYIQKTLFKIGYDYKLEQIKKGYDAPLCNLLLFKKVKALLGGNVRMMLSGGAPLSPQTHRFMNVCFCCPIGQGYGLTESCGAGTVTEVTDYTTGRVGAPLICCEIKLKDWQEGGYTINDKPNPRGEIVIGGQNISMGYFKNEEKTAEDYSVDENGQRWFCTGDIGEFHPDGCLQIIDRKKDLVKLQAGEYVSLGKVEAALKNCPLIDNICAFAKSDQSYVISFVVPNQKRLTLLAQQKGVEGTWVDICNNPAMEAEILKEIREAANAMKLERFEIPIKVRLSPEPWTPETGLVTDAFKLKRKELRNHYLKDIERMYGGK

SEQ ID NO: 1968 - protein, 711 aa, Homo sapiens; identical to SEQ ID NO: 1967
  Payload ID: 506;
  Gene Symbol: ACSL4;
  Gene Name: acyl-CoA synthetase long-chain family member 4;
  Uniprot ID:  O60488;
  ENSP ID: ENSP00000419171

SEQ ID NO: 1969 - protein, 126 aa, Homo sapiens
  Payload ID: 506;
  Gene Symbol: ACSL4;
  Gene Name: acyl-CoA synthetase long-chain family member 4;
  ENSP ID: ENSP00000421425
MKLKLNVLTIILLPVHLLITIYSALIFIPWYFLTNAKKKNAMAKRIKAKPTSDKPGSPYRSVTHFDSLAVIDIPGADTLDKLFDHAVSKFGKKDSLGTREILSEENEMQPNGKVFKKLILGNYKWM

SEQ ID NO: 1970 - protein, 54 aa, Homo sapiens
  Payload ID: 506;
  Gene Symbol: ACSL4;
  Gene Name: acyl-CoA synthetase long-chain family member 4;
  ENSP ID: ENSP00000423077
MKLKLNVLTIILLPVHLLITIYSALIFIPWYFLTNAKKKNAMAKRIKAKPTSDK

SEQ ID NO: 1971 - protein, 156 aa, Homo sapiens
  Payload ID: 506;
  Gene Symbol: ACSL4;
  Gene Name: acyl-CoA synthetase long-chain family member 4;
  ENSP ID: ENSP00000423539
  MOD_RES (1)..(1): Any amino acid
XTLFKIGYDYKLEQIKKGYDAPLCNLLLFKKVKALLGGNVRMMLSGGAPLSPQTHRFMNVCFCCPIGQGYGLTESCGAGTVTEVTDYTTGRVGAPLICCEIKLKDWQEGGYTINDKPNPRGEIVIGGQNISMGYFKNEEKTAEDYSVDENGQRNLG

SEQ ID NO: 1972 - protein, 154 aa, Homo sapiens
  Payload ID: 506;
  Gene Symbol: ACSL4;
  Gene Name: acyl-CoA synthetase long-chain family member 4;
  ENSP ID: ENSP00000424808
MAKRIKAKPTSDKPGSPYRSVTHFDSLAVIDIPGADTLDKLFDHAVSKFGKKDSLGTREILSEENEMQPNGKVFKKLILGNYKWMNYLEVNRRVNNFGSGLTALGLKPKNTIAIFCETRAEWMIAAQTCFKYNFPLVTLYATLGKEAVVHGLNE

SEQ ID NO: 1973 - protein, 128 aa, Homo sapiens
  Payload ID: 506;
  Gene Symbol: ACSL4;
  Gene Name: acyl-CoA synthetase long-chain family member 4;
  ENSP ID: ENSP00000425378
MKLKLNVLTIILLPVHLLITIYSALIFIPWYFLTNAKKKNAMAKRIKAKPTSDKPGSPYRSVTHFDSLAVIDIPGADTLDKLFDHAVSKFGKKDSLGTREILSEENEMQPNGKVFKKLILGNYKWMNY

SEQ ID NO: 1974 - protein, 145 aa, Homo sapiens
  Payload ID: 506;
  Gene Symbol: ACSL4;
  Gene Name: acyl-CoA synthetase long-chain family member 4;
  ENSP ID: ENSP00000425408
MKLKLNVLTIILLPVHLLITIYSALIFIPWYFLTNAKKKNAMAKRIKAKPTSDKPGSPYRSVTHFDSLAVIDIPGADTLDKLFDHAVSKFGKKDSLGTREILSEENEMQPNGKVFKKLILGNYKWMNYLEVNRRVNNFGSGLTAL

SEQ ID NO: 1975 - protein, 683 aa, Homo sapiens
  Payload ID: 507;
  Gene Symbol: ACSL5;
  Gene Name: acyl-CoA synthetase long-chain family member 5;
  Uniprot ID:  Q9ULC5;
  ENSP ID: ENSP00000346223
MLFIFNFLFSPLPTPALICILTFGAAIFLWLITRPQPVLPLLDLNNQSVGIEGGARKGVSQKNNDLTSCCFSDAKTMYEVFQRGLAVSDNGPCLGYRKPNQPYRWLSYKQVSDRAEYLGSCLLHKGYKSSPDQFVGIFAQNRPEWIISELACYTYSMVAVPLYDTLGPEAIVHIVNKADIAMVICDTPQKALVLIGNVEKGFTPSLKVIILMDPFDDDLKQRGEKSGIEILSLYDAENLGKEHFRKPVPPSPEDLSVICFTSGTTGDPKGAMITHQNIVSNAAAFLKCVEHAYEPTPDDVAISYLPLAHMFERIVQAVVYSCGARVGFFQGDIRLLADDMKTLKPTLFPAVPRLLNRIYDKVQNEAKTPLKKFLLKLAVSSKFKELQKGIIRHDSFWDKLIFAKIQDSLGGRVRVIVTGAAPMSTSVMTFFRAAMGCQVYEAYGQTECTGGCTFTLPGDWTSGHVGVPLACNYVKLEDVADMNYFTVNNEGEVCIKGTNVFKGYLKDPEKTQEALDSDGWLHTGDIGRWLPNGTLKIIDRKKNIFKLAQGEYIAPEKIENIYNRSQPVLQIFVHGESLRSSLVGVVVPDTDVLPSFAAKLGVKGSFEELCQNQVVREAILEDLQKIGKESGLKTFEQVKAIFLHPEPFSIENGLLTPTLKAKRGELSKYFRTQIDSLYEHIQD

SEQ ID NO: 1976 - protein, 683 aa, Homo sapiens; identical to SEQ ID NO: 1975
  Payload ID: 507;
  Gene Symbol: ACSL5;
  Gene Name: acyl-CoA synthetase long-chain family member 5;
  Uniprot ID:  Q9ULC5;
  ENSP ID: ENSP00000346680

SEQ ID NO: 1977 - protein, 739 aa, Homo sapiens
  Payload ID: 507;
  Gene Symbol: ACSL5;
  Gene Name: acyl-CoA synthetase long-chain family member 5;
  Uniprot ID:  Q9ULC5;
  ENSP ID: ENSP00000348429
MDALKPPCLWRNHERGKKDRDSCGRKNSEPGSPHSLEALRDAAPSQGLNFLLLFTKMLFIFNFLFSPLPTPALICILTFGAAIFLWLITRPQPVLPLLDLNNQSVGIEGGARKGVSQKNNDLTSCCFSDAKTMYEVFQRGLAVSDNGPCLGYRKPNQPYRWLSYKQVSDRAEYLGSCLLHKGYKSSPDQFVGIFAQNRPEWIISELACYTYSMVAVPLYDTLGPEAIVHIVNKADIAMVICDTPQKALVLIGNVEKGFTPSLKVIILMDPFDDDLKQRGEKSGIEILSLYDAENLGKEHFRKPVPPSPEDLSVICFTSGTTGDPKGAMITHQNIVSNAAAFLKCVEHAYEPTPDDVAISYLPLAHMFERIVQAVVYSCGARVGFFQGDIRLLADDMKTLKPTLFPAVPRLLNRIYDKVQNEAKTPLKKFLLKLAVSSKFKELQKGIIRHDSFWDKLIFAKIQDSLGGRVRVIVTGAAPMSTSVMTFFRAAMGCQVYEAYGQTECTGGCTFTLPGDWTSGHVGVPLACNYVKLEDVADMNYFTVNNEGEVCIKGTNVFKGYLKDPEKTQEALDSDGWLHTGDIGRWLPNGTLKIIDRKKNIFKLAQGEYIAPEKIENIYNRSQPVLQIFVHGESLRSSLVGVVVPDTDVLPSFAAKLGVKGSFEELCQNQVVREAILEDLQKIGKESGLKTFEQVKAIFLHPEPFSIENGLLTPTLKAKRGELSKYFRTQIDSLYEHIQD

SEQ ID NO: 1978 - protein, 683 aa, Homo sapiens; identical to SEQ ID NO: 1975
  Payload ID: 507;
  Gene Symbol: ACSL5;
  Gene Name: acyl-CoA synthetase long-chain family member 5;
  Uniprot ID:  Q9ULC5;
  ENSP ID: ENSP00000376796

SEQ ID NO: 1979 - protein, 659 aa, Homo sapiens
  Payload ID: 507;
  Gene Symbol: ACSL5;
  Gene Name: acyl-CoA synthetase long-chain family member 5;
  Uniprot ID:  Q9ULC5;
  ENSP ID: ENSP00000403647
MLFIFNFLFSPLPTPALICILTFGAAIFLWLITRPQPVLPLLDLNNQSVGIEGGARKGVSQKNNDLTSCCFSDAKTMYEVFQRGLAVSDNGPCLGYRKPNQPYRWLSYKQVSDRAEYLGSCLLHKGYKSSPDQFVGIFAQNRPEWIISELACYTYSMVAVPLYDTLGPEAIVHIVNKADIAMVICDTPQKALVLIGNVEKGFTPSLKVIILMDPFDDDLKQRGEKSGIEILSLYDAENLGKEHFRKPVPPSPEDLSVICFTSGTTGDPKGAMITHQNIVSNAAAFLKCVEHAYEPTPDDVAISYLPLAHMFERIVQAVVYSCGARVGFFQGDIRLLADDMKTLKPTLFPAVPRLLNRIYDKVQNEAKTPLKKFLLKLAVSSKFKELQKGIIRHDSFWDKLIFAKIQDSLGGRVRVIVTGAAPMSTSVMTFFRAAMGCQVYEAYGQTECTGGCTFTLPGDWTSGHVGVPLACNYVKLEDVADMNYFTVNNEGEVCIKGTNVFKGYLKDPEKTQEALDSDGWLHTGDIGRWLPNGTLKIIDRKKNIFKLAQGEYIAPEKIENIYNRSQPVLQIFVHGESLRSSLVGVVVPDTDVLPSFAAKLGVKGSFEELCQNQVKAIFLHPEPFSIENGLLTPTLKAKRGELSKYFRTQIDSLYEHIQD

SEQ ID NO: 1980 - protein, 722 aa, Homo sapiens
  Payload ID: 508;
  Gene Symbol: ACSL6;
  Gene Name: acyl-CoA synthetase long-chain family member 6;
  Uniprot ID:  Q9UKU0;
  ENSP ID: ENSP00000296869
MLTFFLVSGGSLWLFVEFVLSLLEKMQTQEILRILRLPELGDLGQFFRSLSATTLVSMGALAAILAYWFTHRPKALQPPCNLLMQSEEVEDSGGARRSVIGSGPQLLTHYYDDARTMYQVFRRGLSISGNGPCLGFRKPKQPYQWLSYQEVADRAEFLGSGLLQHNCKACTDQFIGVFAQNRPEWIIVELACYTYSMVVVPLYDTLGPGAIRYIINTADISTVIVDKPQKAVLLLEHVERKETPGLKLIILMDPFEEALKERGQKCGVVIKSMQAVEDCGQENHQAPVPPQPDDLSIVCFTSGTTGNPKGAMLTHGNVVADFSGFLKVTESQWAPTCADVHISYLPLAHMFERMVQSVVYCHGGRVGFFQGDIRLLSDDMKALCPTIFPVVPRLLNRMYDKIFSQANTPLKRWLLEFAAKRKQAEVRSGIIRNDSIWDELFFNKIQASLGGCVRMIVTGAAPASPTVLGFLRAALGCQVYEGYGQTECTAGCTFTTPGDWTSGHVGAPLPCNHIKLVDVEELNYWACKGEGEICVRGPNVFKGYLKDPDRTKEALDSDGWLHTGDIGKWLPAGTLKIIDRKKHIFKLAQGEYVAPEKIENIYIRSQPVAQIYVHGDSLKAFLVGIVVPDPEVMPSWAQKRGIEGTYADLCTNKDLKKAILEDMVRLGKESGLHSFEQVKAIHIHSDMFSVQNGLLTPTLKAKRPELREYFKKQIEELYSISM

SEQ ID NO: 1981 - protein, 622 aa, Homo sapiens
  Payload ID: 508;
  Gene Symbol: ACSL6;
  Gene Name: acyl-CoA synthetase long-chain family member 6;
  Uniprot ID:  Q9UKU0;
  ENSP ID: ENSP00000349608
MQTQEILRILRLPELGDLGQFFRSLSATTLDSGGARRSVIGSGPQLLTHYYDDARTMYQVFRRGLSISGNGPCLGFRKPKQPYQWLSYQEVADRAEFLGSGLLQHNCKACTDQFIGVFAQNRPEWIIVELACYTYSMVVVPLYDTLGPGAIRYIINTADISTVIVDKPQKAVLLLEHVERKETPGLKLIILMDPFEEALKERGQKCGVVIKSMQAVEDCGQENHQAPVPPQPDDLSIVCFTSGTTGNPKGAMLTHGNVVADFSGFLKVTEGDIRLLSDDMKALCPTIFPVVPRLLNRMYDKIFSQANTPLKRWLLEFAAKRKQAEVRSGIIRNDSIWDELFFNKIQASLGGCVRMIVTGAAPASPTVLGFLRAALGCQVYEGYGQTECTAGCTFTTPGDWTSGHVGAPLPCNHIKLVDVEELNYWACKGEGEICVRGPNVFKGYLKDPDRTKEALDSDGWLHTGDIGKWLPAGTLKIIDRKKHIFKLAQGEYVAPEKIENIYIRSQPVAQIYVHGDSLKAFLVGIVVPDPEVMPSWAQKRGIEGTYADLCTNKDLKKAILEDMVRLGKESGLHSFEQVKAIHIHSDMFSVQNGLLTPTLKAKRPELREYFKKQIEELYSISM

SEQ ID NO: 1982 - protein, 697 aa, Homo sapiens
  Payload ID: 508;
  Gene Symbol: ACSL6;
  Gene Name: acyl-CoA synthetase long-chain family member 6;
  Uniprot ID:  Q9UKU0;
  ENSP ID: ENSP00000368542
MQTQEILRILRLPELGDLGQFFRSLSATTLVSMGALAAILAYWFTHRPKALQPPCNLLMQSEEVEDSGGARRSVIGSGPQLLTHYYDDARTMYQVFRRGLSISGNGPCLGFRKPKQPYQWLSYQEVADRAEFLGSGLLQHNCKACTDQFIGVFAQNRPEWIIVELACYTYSMVVVPLYDTLGPGAIRYIINTADISTVIVDKPQKAVLLLEHVERKETPGLKLIILMDPFEEALKERGQKCGVVIKSMQAVEDCGQENHQAPVPPQPDDLSIVCFTSGTTGNPKGAMLTHGNVVADFSGFLKVTEKVIFPRQDDVLISFLPLAHMFERVIQSVVYCHGGRVGFFQGDIRLLSDDMKALCPTIFPVVPRLLNRMYDKIFSQANTPLKRWLLEFAAKRKQAEVRSGIIRNDSIWDELFFNKIQASLGGCVRMIVTGAAPASPTVLGFLRAALGCQVYEGYGQTECTAGCTFTTPGDWTSGHVGAPLPCNHIKLVDVEELNYWACKGEGEICVRGPNVFKGYLKDPDRTKEALDSDGWLHTGDIGKWLPAGTLKIIDRKKHIFKLAQGEYVAPEKIENIYIRSQPVAQIYVHGDSLKAFLVGIVVPDPEVMPSWAQKRGIEGTYADLCTNKDLKKAILEDMVRLGKESGLHSFEQVKAIHIHSDMFSVQNGLLTPTLKAKRPELREYFKKQIEELYSISM

SEQ ID NO: 1983 - protein, 697 aa, Homo sapiens
  Payload ID: 508;
  Gene Symbol: ACSL6;
  Gene Name: acyl-CoA synthetase long-chain family member 6;
  Uniprot ID:  Q9UKU0;
  ENSP ID: ENSP00000368546
MQTQEILRILRLPELGDLGQFFRSLSATTLVSMGALAAILAYWFTHRPKALQPPCNLLMQSEEVEDSGGARRSVIGSGPQLLTHYYDDARTMYQVFRRGLSISGNGPCLGFRKPKQPYQWLSYQEVADRAEFLGSGLLQHNCKACTDQFIGVFAQNRPEWIIVELACYTYSMVVVPLYDTLGPGAIRYIINTADISTVIVDKPQKAVLLLEHVERKETPGLKLIILMDPFEEALKERGQKCGVVIKSMQAVEDCGQENHQAPVPPQPDDLSIVCFTSGTTGNPKGAMLTHGNVVADFSGFLKVTESQWAPTCADVHISYLPLAHMFERMVQSVVYCHGGRVGFFQGDIRLLSDDMKALCPTIFPVVPRLLNRMYDKIFSQANTPLKRWLLEFAAKRKQAEVRSGIIRNDSIWDELFFNKIQASLGGCVRMIVTGAAPASPTVLGFLRAALGCQVYEGYGQTECTAGCTFTTPGDWTSGHVGAPLPCNHIKLVDVEELNYWACKGEGEICVRGPNVFKGYLKDPDRTKEALDSDGWLHTGDIGKWLPAGTLKIIDRKKHIFKLAQGEYVAPEKIENIYIRSQPVAQIYVHGDSLKAFLVGIVVPDPEVMPSWAQKRGIEGTYADLCTNKDLKKAILEDMVRLGKESGLHSFEQVKAIHIHSDMFSVQNGLLTPTLKAKRPELREYFKKQIEELYSISM

SEQ ID NO: 1984 - protein, 708 aa, Homo sapiens
  Payload ID: 508;
  Gene Symbol: ACSL6;
  Gene Name: acyl-CoA synthetase long-chain family member 6;
  Uniprot ID:  Q9UKU0;
  ENSP ID: ENSP00000368548
MPEFVLSLLEKMQTQEILRILRLPELGDLGQFFRSLSATTLVSMGALAAILAYWFTHRPKALQPPCNLLMQSEEVEDSGGARRSVIGSGPQLLTHYYDDARTMYQVFRRGLSISGNGPCLGFRKPKQPYQWLSYQEVADRAEFLGSGLLQHNCKACTDQFIGVFAQNRPEWIIVELACYTYSMVVVPLYDTLGPGAIRYIINTADISTVIVDKPQKAVLLLEHVERKETPGLKLIILMDPFEEALKERGQKCGVVIKSMQAVEDCGQENHQAPVPPQPDDLSIVCFTSGTTGNPKGAMLTHGNVVADFSGFLKVTEKVIFPRQDDVLISFLPLAHMFERVIQSVVYCHGGRVGFFQGDIRLLSDDMKALCPTIFPVVPRLLNRMYDKIFSQANTPLKRWLLEFAAKRKQAEVRSGIIRNDSIWDELFFNKIQASLGGCVRMIVTGAAPASPTVLGFLRAALGCQVYEGYGQTECTAGCTFTTPGDWTSGHVGAPLPCNHIKLVDVEELNYWACKGEGEICVRGPNVFKGYLKDPDRTKEALDSDGWLHTGDIGKWLPAGTLKIIDRKKHIFKLAQGEYVAPEKIENIYIRSQPVAQIYVHGDSLKAFLVGIVVPDPEVMPSWAQKRGIEGTYADLCTNKDLKKAILEDMVRLGKESGLHSFEQVKAIHIHSDMFSVQNGLLTPTLKAKRPELREYFKKQIEELYSISM

SEQ ID NO: 1985 - protein, 622 aa, Homo sapiens; identical to SEQ ID NO: 1981
  Payload ID: 508;
  Gene Symbol: ACSL6;
  Gene Name: acyl-CoA synthetase long-chain family member 6;
  Uniprot ID:  Q9UKU0;
  ENSP ID: ENSP00000368557

SEQ ID NO: 1986 - protein, 722 aa, Homo sapiens
  Payload ID: 508;
  Gene Symbol: ACSL6;
  Gene Name: acyl-CoA synthetase long-chain family member 6;
  Uniprot ID:  Q9UKU0;
  ENSP ID: ENSP00000368566
MLTFFLVSGGSLWLFVEFVLSLLEKMQTQEILRILRLPELGDLGQFFRSLSATTLVSMGALAAILAYWFTHRPKALQPPCNLLMQSEEVEDSGGARRSVIGSGPQLLTHYYDDARTMYQVFRRGLSISGNGPCLGFRKPKQPYQWLSYQEVADRAEFLGSGLLQHNCKACTDQFIGVFAQNRPEWIIVELACYTYSMVVVPLYDTLGPGAIRYIINTADISTVIVDKPQKAVLLLEHVERKETPGLKLIILMDPFEEALKERGQKCGVVIKSMQAVEDCGQENHQAPVPPQPDDLSIVCFTSGTTGNPKGAMLTHGNVVADFSGFLKVTEKVIFPRQDDVLISFLPLAHMFERVIQSVVYCHGGRVGFFQGDIRLLSDDMKALCPTIFPVVPRLLNRMYDKIFSQANTPLKRWLLEFAAKRKQAEVRSGIIRNDSIWDELFFNKIQASLGGCVRMIVTGAAPASPTVLGFLRAALGCQVYEGYGQTECTAGCTFTTPGDWTSGHVGAPLPCNHIKLVDVEELNYWACKGEGEICVRGPNVFKGYLKDPDRTKEALDSDGWLHTGDIGKWLPAGTLKIIDRKKHIFKLAQGEYVAPEKIENIYIRSQPVAQIYVHGDSLKAFLVGIVVPDPEVMPSWAQKRGIEGTYADLCTNKDLKKAILEDMVRLGKESGLHSFEQVKAIHIHSDMFSVQNGLLTPTLKAKRPELREYFKKQIEELYSISM

SEQ ID NO: 1987 - protein, 152 aa, Homo sapiens
  Payload ID: 508;
  Gene Symbol: ACSL6;
  Gene Name: acyl-CoA synthetase long-chain family member 6;
  ENSP ID: ENSP00000388424
MQTQEILRILRLPELGDLGQFFRSLSATTLVSMGALAAILAYWFTHRPKALQPPCNLLMQSEEVEDSGGARRSVIGSGPQLLTHYYDDARTMYQVFRRGLSISGNGPCLGFRKPKQPYQWLSYQEVADRAEFLGSGLLQHNCKACTDQFIGV

SEQ ID NO: 1988 - protein, 99 aa, Homo sapiens
  Payload ID: 508;
  Gene Symbol: ACSL6;
  Gene Name: acyl-CoA synthetase long-chain family member 6;
  ENSP ID: ENSP00000389189
MQTQEILRILRLPELGDLGQFFRSLSATTLDSGGARRSVIGSGPQLLTHYYDDARTMYQVFRRGLSISGNGPCLGFRKPKQPYQWLSYQEVADRAEFLG

SEQ ID NO: 1989 - protein, 134 aa, Homo sapiens
  Payload ID: 508;
  Gene Symbol: ACSL6;
  Gene Name: acyl-CoA synthetase long-chain family member 6;
  ENSP ID: ENSP00000394810
MQTQEILRILRLPELGDLGQFFRSLSATTLVSMGALAAILAYWFTHRPKALQPPCNLLMQSEEVEDSGGARRSVIGSGPQLLTHYYDDARTMYQVFRRGLSISGNGPCLGFRKPKQPYQWLSYQEVADRAEFLG

SEQ ID NO: 1990 - protein, 365 aa, Homo sapiens
  Payload ID: 508;
  Gene Symbol: ACSL6;
  Gene Name: acyl-CoA synthetase long-chain family member 6;
  ENSP ID: ENSP00000397507
MQTQEILRILRLPELGDLGQFFRSLSATTLDSGGARRSVIGSGPQLLTHYYDDARTMYQVFRRGLSISGNGPCLGFRKPKQPYQWLSYQEVADRAEFLGSGLLQHNCKACTDQFIGVFAQNRPEWIIVELACYTYSMVVVPLYDTLGPGAIRYIINTADISTVIVDKPQKAVLLLEHVERKETPGLKLIILMDPFEEALKERGQKCGVVIKSMQAVEDCGQENHQAPVPPQPDDLSIVCFTSGTTGNPKGAMLTHGNVVADFSGFLKVTESQWAPTCADVHISYLPLAHMFERMVQSVVYCHGGRVGFFQGDIRLLSDDMKALCPTIFPVVPRLLNRMYDKIFSQANTPLKRWLLEFAAKRKQAE

SEQ ID NO: 1991 - protein, 144 aa, Homo sapiens
  Payload ID: 508;
  Gene Symbol: ACSL6;
  Gene Name: acyl-CoA synthetase long-chain family member 6;
  ENSP ID: ENSP00000398381
MQTQEILRILRLPELGDLGQFFRSLSATTLVSMGALAAILAYWFTHRPKALQPPCNLLMQSEEVEDSGGARRSVIGSGPQLLTHYYDDARTMYQVFRRGLSISGNGPCLGFRKPKQPYQWLSYQEVADRAEFLGSGLLQHNCKA

SEQ ID NO: 1992 - protein, 213 aa, Homo sapiens
  Payload ID: 508;
  Gene Symbol: ACSL6;
  Gene Name: acyl-CoA synthetase long-chain family member 6;
  ENSP ID: ENSP00000398423
MQTQEILRILRLPELGDLGQFFRSLSATTLVSMGALAAILAYWFTHRPKALQPPCNLLMQSEEVEDSGGARRSVIGSGPQLLTHYYDDARTMYQVFRRGLSISGNGPCLGFRKPKQPYQWLSYQEVADRAEFLGSGLLQHNCKACTDQFIGVFAQNRPEWIIVELACYTYSMVVVPLYDTLGPGAIRYIINTADISTVIVDKPQKAVLLLEHV

SEQ ID NO: 1993 - protein, 677 aa, Homo sapiens
  Payload ID: 508;
  Gene Symbol: ACSL6;
  Gene Name: acyl-CoA synthetase long-chain family member 6;
  ENSP ID: ENSP00000413329
MQTQEILRILRLPELGDLGQFFRSLSATTLDSGGARRSVIGSGPQLLTHYYDDARTMYQVFRRGLSISGNGPCLGFRKPKQPYQWLSYQEVADRAEFLGSGLLQHNCKACTDQFIGVFAQNRPEWIIVELACYTYSMVVVPLYDTLGPGAIRYIINTGLSCQEGASATASTQADISTVIVDKPQKAVLLLEHVERKETPGLKLIILMDPFEEALKERGQKCGVVIKSMQAVEDCGQENHQAPVPPQPDDLSIVCFTSGTTGNPKGAMLTHGNVVADFSGFLKVTEKVIFPRQDDVLISFLPLAHMFERVIQSVVYCHGGRVGFFQGDIRLLSDDMKALCPTIFPVVPRLLNRMYDKIFSQANTPLKRWLLEFAAKRKQAEVRSGIIRNDSIWDELFFNKIQASLGGCVRMIVTGAAPASPTVLGFLRAALGCQVYEGYGQTECTAGCTFTTPGDWTSGHVGAPLPCNHIKLVDVEELNYWACKGEGEICVRGPNVFKGYLKDPDRTKEALDSDGWLHTGDIGKWLPAGTLKIIDRKKHIFKLAQGEYVAPEKIENIYIRSQPVAQIYVHGDSLKAFLVGIVVPDPEVMPSWAQKRGIEGTYADLCTNKDLKKAILEDMVRLGKESGLHSFEQVKAIHIHSDMFSVQNGLLTPTLKAKRPELREYFKKQIEELYSISM

SEQ ID NO: 1994 - protein, 712 aa, Homo sapiens
  Payload ID: 508;
  Gene Symbol: ACSL6;
  Gene Name: acyl-CoA synthetase long-chain family member 6;
  Uniprot ID:  Q9UKU0;
  ENSP ID: ENSP00000442124
MQTQEILRILRLPELGDLGQFFRSLSATTLVSMGALAAILAYWFTHRPKALQPPCNLLMQSEEVEDSGGARRSVIGSGPQLLTHYYDDARTMYQVFRRGLSISGNGPCLGFRKPKQPYQWLSYQEVADRAEFLGSGLLQHNCKACTDQFIGVFAQNRPEWIIVELACYTYSMVVVPLYDTLGPGAIRYIINTGLSCQEGASATASTQADISTVIVDKPQKAVLLLEHVERKETPGLKLIILMDPFEEALKERGQKCGVVIKSMQAVEDCGQENHQAPVPPQPDDLSIVCFTSGTTGNPKGAMLTHGNVVADFSGFLKVTEKVIFPRQDDVLISFLPLAHMFERVIQSVVYCHGGRVGFFQGDIRLLSDDMKALCPTIFPVVPRLLNRMYDKIFSQANTPLKRWLLEFAAKRKQAEVRSGIIRNDSIWDELFFNKIQASLGGCVRMIVTGAAPASPTVLGFLRAALGCQVYEGYGQTECTAGCTFTTPGDWTSGHVGAPLPCNHIKLVDVEELNYWACKGEGEICVRGPNVFKGYLKDPDRTKEALDSDGWLHTGDIGKWLPAGTLKIIDRKKHIFKLAQGEYVAPEKIENIYIRSQPVAQIYVHGDSLKAFLVGIVVPDPEVMPSWAQKRGIEGTYADLCTNKDLKKAILEDMVRLGKESGLHSFEQVKAIHIHSDMFSVQNGLLTPTLKAKRPELREYFKKQIEELYSISM

SEQ ID NO: 1995 - protein, 577 aa, Homo sapiens
  Payload ID: 509;
  Gene Symbol: ACSM1;
  Gene Name: acyl-CoA synthetase medium-chain family member 1;
  Uniprot ID:  Q08AH1;
  ENSP ID: ENSP00000301956
MQWLMRFRTLWGIHKSFHNIHPAPSQLRCRSLSEFGAPRWNDYEVPEEFNFASYVLDYWAQKEKEGKRGPNPAFWWVNGQGDEVKWSFREMGDLTRRVANVFTQTCGLQQGDHLALMLPRVPEWWLVAVGCMRTGIIFIPATILLKAKDILYRLQLSKAKGIVTIDALASEVDSIASQCPSLKTKLLVSDHSREGWLDFRSLVKSASPEHTCVKSKTLDPMVIFFTSGTTGFPKMAKHSHGLALQPSFPGSRKLRSLKTSDVSWCLSDSGWIVATIWTLVEPWTAGCTVFIHHLPQFDTKVIIQTLLKYPINHFWGVSSIYRMILQQDFTSIRFPALEHCYTGGEVVLPKDQEEWKRRTGLLLYENYGQSETGLICATYWGMKIKPGFMGKATPPYDVQVIDDKGSILPPNTEGNIGIRIKPVRPVSLFMCYEGDPEKTAKVECGDFYNTGDRGKMDEEGYICFLGRSDDIINASGYRIGPAEVESALVEHPAVAESAVVGSPDPIRGEVVKAFIVLTPQFLSHDKDQLTKELQQHVKSVTAPYKYPRKVEFVSELPKTITGKIERKELRKKETGQM

SEQ ID NO: 1996 - protein, 577 aa, Homo sapiens; identical to SEQ ID NO: 1995
  Payload ID: 509;
  Gene Symbol: ACSM1;
  Gene Name: acyl-CoA synthetase medium-chain family member 1;
  Uniprot ID:  Q08AH1;
  ENSP ID: ENSP00000428047

SEQ ID NO: 1997 - protein, 249 aa, Homo sapiens
  Payload ID: 509;
  Gene Symbol: ACSM1;
  Gene Name: acyl-CoA synthetase medium-chain family member 1;
  ENSP ID: ENSP00000428098
  MOD_RES (1)..(1): Any amino acid
XQFDTKVIIQTLLKYPINHFWGVSSIYRMILQQDFTSIRFPALEHCYTGGEVVLPKDQEEWKRRTGLLLYENYGQSETGLICATYWGMKIKPGFMGKATPPYDVQGDPEKTAKVECGDFYNTGDRGKMDEEGYICFLGRSDDIINASGYRIGPAEVESALVEHPAVAESAVVGSPDPIRGEVVKAFIVLTPQFLSHDKDQLTKELQQHVKSVTAPYKYPRKVEFVSELPKTITGKIERKELRKKETGQM

SEQ ID NO: 1998 - protein, 204 aa, Homo sapiens
  Payload ID: 509;
  Gene Symbol: ACSM1;
  Gene Name: acyl-CoA synthetase medium-chain family member 1;
  Uniprot ID:  Q08AH1;
  ENSP ID: ENSP00000428650
MQWLMRFRTLWGIHKSFHNIHPAPSQLRCRSLSEFGAPRWNDYEVPEEFNFASYVLDYWAQKEKEGKRGPNPAFWWVNGQGDEVKWSFREMGDLTRRVANVFTQTCGLQQGDHLALMLPRVPEWWLVAVGCMRTGIIFIPATILLKAKDILYRLQLSKAKGIVTIDALASEVDSIASQCPSLKTKLLVSDHSREGWLDFRSLVK

SEQ ID NO: 1999 - protein, 154 aa, Homo sapiens
  Payload ID: 509;
  Gene Symbol: ACSM1;
  Gene Name: acyl-CoA synthetase medium-chain family member 1;
  ENSP ID: ENSP00000428830
MQWLMRFRTLWGIHKSFHNIHPAPSQLRCRSLSEFGAPRWNDYEVPEEFNFASYVLDYWAQKEKEGKRGPNPAFWWVNGQGDEVKWSFREMGDLTRRVANVFTQTCGLQQGDHLALMLPRVPEWWLVAVGCMRTGIIFIPATILLKAKDILYRL

SEQ ID NO: 2000 - protein, 577 aa, Homo sapiens
  Payload ID: 510;
  Gene Symbol: ACSM2A;
  Gene Name: acyl-CoA synthetase medium-chain family member 2A;
  Uniprot ID:  Q08AH3;
  ENSP ID: ENSP00000219054
MHWLRKVQGLCTLWGTQMSSRTLYINSRQLVSLQWGHQEVPAKFNFASDVLDHWADMEKAGKRLPSPALWWVNGKGKELMWNFRELSENSQQAANVLSGACGLQRGDRVAVVLPRVPEWWLVILGCIRAGLIFMPGTIQMKSTDILYRLQMSKAKAIVAGDEVIQEVDTVASECPSLRIKLLVSEKSCDGWLNFKKLLNEASTTHHCVETGSQEASAIYFTSGTSGLPKMAEHSYSSLGLKAKMDAGWTGLQASDIMWTISDTGWILNILCSLMEPWALGACTFVHLLPKFDPLVILKTLSSYPIKSMMGAPIVYRMLLQQDLSSYKFPHLQNCVTVGESLLPETLENWRAQTGLDIRESYGQTETGLTCMVSKTMKIKPGYMGTAASCYDVQIIDDKGNVLPPGTEGDIGIRVKPIRPIGIFSGYVDNPDKTAANIRGDFWLLGDRGIKDEDGYFQFMGRANDIINSSGYRIGPSEVENALMEHPAVVETAVISSPDPVRGEVVKAFVVLASQFLSHDPEQLTKELQQHVKSVTAPYKYPRKIEFVLNLPKTVTGKIQRAKLRDKEWKMSGKARAQ

SEQ ID NO: 2001 - protein, 577 aa, Homo sapiens; identical to SEQ ID NO: 2000
  Payload ID: 510;
  Gene Symbol: ACSM2A;
  Gene Name: acyl-CoA synthetase medium-chain family member 2A;
  Uniprot ID:  Q08AH3;
  ENSP ID: ENSP00000379411

SEQ ID NO: 2002 - protein, 498 aa, Homo sapiens
  Payload ID: 510;
  Gene Symbol: ACSM2A;
  Gene Name: acyl-CoA synthetase medium-chain family member 2A;
  ENSP ID: ENSP00000392169
MWNFRELSENSQQAANVLSGACGLQRGDRVAVVLPRVPEWWLVILGCIRAGLIFMPGTIQMKSTDILYRLQMSKAKAIVAGDEVIQEVDTVASECPSLRIKLLVSEKSCDGWLNFKKLLNEASTTHHCVETGSQEASAIYFTSGTSGLPKMAEHSYSSLGLKAKMDAGWTGLQASDIMWTISDTGWILNILCSLMEPWALGACTFVHLLPKFDPLVILKTLSSYPIKSMMGAPIVYRMLLQQDLSSYKFPHLQNCVTVGESLLPETLENWRAQTGLDIRESYGQTETGLTCMVSKTMKIKPGYMGTAASCYDVQIIDDKGNVLPPGTEGDIGIRVKPIRPIGIFSGYVDNPDKTAANIRGDFWLLGDRGIKDEDGYFQFMGRANDIINSSGYRIGPSEVENALMEHPAVVETAVISSPDPVRGEVVKAFVVLASQFLSHDPEQLTKELQQHVKSVTAPYKYPRKIEFVLNLPKTVTGKIQRAKLRDKEWKMSGKARAQ

SEQ ID NO: 2003 - protein, 577 aa, Homo sapiens; identical to SEQ ID NO: 2000
  Payload ID: 510;
  Gene Symbol: ACSM2A;
  Gene Name: acyl-CoA synthetase medium-chain family member 2A;
  Uniprot ID:  Q08AH3;
  ENSP ID: ENSP00000459451

SEQ ID NO: 2004 - protein, 118 aa, Homo sapiens
  Payload ID: 510;
  Gene Symbol: ACSM2A;
  Gene Name: acyl-CoA synthetase medium-chain family member 2A;
  ENSP ID: ENSP00000460031
MHWLRKVQGLCTLWGTQMSSRTLYINSRQLVSLQWGHQEVPAKFNFASDVLDHWADMEKAGKRLPSPALWWVNGKGKELMWNFRELSENSQQAANVLSGACGLQRGDRVAVVLPRVPE

SEQ ID NO: 2005 - protein, 61 aa, Homo sapiens
  Payload ID: 510;
  Gene Symbol: ACSM2A;
  Gene Name: acyl-CoA synthetase medium-chain family member 2A;
  ENSP ID: ENSP00000460153
MWNFRELSENSQQAANVLSGACGLQRGDRVAVVLPRVPEWWLVILGCIRAGLIFMPGTIQM

SEQ ID NO: 2006 - protein, 577 aa, Homo sapiens; identical to SEQ ID NO: 2000
  Payload ID: 510;
  Gene Symbol: ACSM2A;
  Gene Name: acyl-CoA synthetase medium-chain family member 2A;
  Uniprot ID:  Q08AH3;
  ENSP ID: ENSP00000460349

SEQ ID NO: 2007 - protein, 208 aa, Homo sapiens
  Payload ID: 510;
  Gene Symbol: ACSM2A;
  Gene Name: acyl-CoA synthetase medium-chain family member 2A;
  ENSP ID: ENSP00000460884
MHWLRKVQGLCTLWGTQMSSRTLYINSRQLVSLQWGHQEVPAKFNFASDVLDHWADMEKAGKRLPSPALWWVNGKGKELMWNFRELSENSQQAANVLSGACGLQRGDRVAVVLPRVPEWWLVILGCIRAGLIFMPGTIQMKSTDILYRLQMSKAKAIVAGDEVIQEVDTVASECPSLRIKLLVSEKSCDGWLNFKKLLKYKVRHRDVK

SEQ ID NO: 2008 - protein, 105 aa, Homo sapiens
  Payload ID: 510;
  Gene Symbol: ACSM2A;
  Gene Name: acyl-CoA synthetase medium-chain family member 2A;
  ENSP ID: ENSP00000460948
MHWLRKVQGLCTLWGTQMSSRTLYINSRQLVSLQWGHQEVPAKFNFASDVLDHWADMEKAGKRLPSPALWWVNGKGKELMWNFRELSENSQQAANVLSGACGLQR

SEQ ID NO: 2009 - protein, 577 aa, Homo sapiens
  Payload ID: 511;
  Gene Symbol: ACSM2B;
  Gene Name: acyl-CoA synthetase medium-chain family member 2B;
  Uniprot ID:  Q68CK6;
  ENSP ID: ENSP00000327453
MHWLRKVQGLCTLWGTQMSSRTLYINSRQLVSLQWGHQEVPAKFNFASDVLDHWADMEKAGKRLPSPALWWVNGKGKELMWNFRELSENSQQAANILSGACGLQRGDRVAVMLPRVPEWWLVILGCIRAGLIFMPGTIQMKSTDILYRLQMSKAKAIVAGDEVIQEVDTVASECPSLRIKLLVSEKSCDGWLNFKKLLNEASTTHHCVETGSQEASAIYFTSGTSGLPKMAEHSYSSLGLKAKMDAGWTGLQASDIMWTISDTGWILNILGSLLESWTLGACTFVHLLPKFDPLVILKTLSSYPIKSMMGAPIVYRMLLQQDLSSYKFPHLQNCLAGGESLLPETLENWRAQTGLDIREFYGQTETGLTCMVSKTMKIKPGYMGTAASCYDVQVIDDKGNVLPPGTEGDIGIRVKPIRPIGIFSGYVENPDKTAANIRGDFWLLGDRGIKDEDGYFQFMGRADDIINSSGYRIGPSEVENALMKHPAVVETAVISSPDPVRGEVVKAFVILASQFLSHDPEQLTKELQQHVKSVTAPYKYPRKIEFVLNLPKTVTGKIQRTKLRDKEWKMSGKARAQ

SEQ ID NO: 2010 - protein, 577 aa, Homo sapiens; identical to SEQ ID NO: 2009
  Payload ID: 511;
  Gene Symbol: ACSM2B;
  Gene Name: acyl-CoA synthetase medium-chain family member 2B;
  Uniprot ID:  Q68CK6;
  ENSP ID: ENSP00000390378

SEQ ID NO: 2011 - protein, 118 aa, Homo sapiens
  Payload ID: 511;
  Gene Symbol: ACSM2B;
  Gene Name: acyl-CoA synthetase medium-chain family member 2B;
  ENSP ID: ENSP00000454247
MHWLRKVQGLCTLWGTQMSSRTLYINSRQLVSLQWGHQEVPAKFNFASDVLDHWADMEKAGKRLPSPALWWVNGKGKELMWNFRELSENSQQAANILSGACGLQRGDRVAVMLPRVPE

SEQ ID NO: 2012 - protein, 208 aa, Homo sapiens
  Payload ID: 511;
  Gene Symbol: ACSM2B;
  Gene Name: acyl-CoA synthetase medium-chain family member 2B;
  ENSP ID: ENSP00000454887
MHWLRKVQGLCTLWGTQMSSRTLYINSRQLVSLQWGHQEVPAKFNFASDVLDHWADMEKAGKRLPSPALWWVNGKGKELMWNFRELSENSQQAANILSGACGLQRGDRVAVMLPRVPEWWLVILGCIRAGLIFMPGTIQMKSTDILYRLQMSKAKAIVAGDEVIQEVDTVASECPSLRIKLLVSEKSCDGWLNFKKLLKYKVRHREVK

SEQ ID NO: 2013 - protein, 577 aa, Homo sapiens; identical to SEQ ID NO: 2009
  Payload ID: 511;
  Gene Symbol: ACSM2B;
  Gene Name: acyl-CoA synthetase medium-chain family member 2B;
  Uniprot ID:  Q68CK6;
  ENSP ID: ENSP00000454995

SEQ ID NO: 2014 - protein, 110 aa, Homo sapiens
  Payload ID: 511;
  Gene Symbol: ACSM2B;
  Gene Name: acyl-CoA synthetase medium-chain family member 2B;
  ENSP ID: ENSP00000455137
  MOD_RES (1)..(1): Any amino acid
XSGYVENPDKTAANIRGDFWLLGDRGIKDEDGYFQFMGRAFVILASQFLSHDPEQLTKELQQHVKSVTAPYKYPRKIEFVLNLPKTVTGKIQRTKLRDKEWKMSGKARAQ

SEQ ID NO: 2015 - protein, 61 aa, Homo sapiens
  Payload ID: 511;
  Gene Symbol: ACSM2B;
  Gene Name: acyl-CoA synthetase medium-chain family member 2B;
  ENSP ID: ENSP00000455190
MWNFRELSENSQQAANILSGACGLQRGDRVAVMLPRVPEWWLVILGCIRAGLIFMPGTIQM

SEQ ID NO: 2016 - protein, 105 aa, Homo sapiens
  Payload ID: 511;
  Gene Symbol: ACSM2B;
  Gene Name: acyl-CoA synthetase medium-chain family member 2B;
  ENSP ID: ENSP00000455658
MHWLRKVQGLCTLWGTQMSSRTLYINSRQLVSLQWGHQEVPAKFNFASDVLDHWADMEKAGKRLPSPALWWVNGKGKELMWNFRELSENSQQAANILSGACGLQR

SEQ ID NO: 2017 - protein, 149 aa, Homo sapiens
  Payload ID: 511;
  Gene Symbol: ACSM2B;
  Gene Name: acyl-CoA synthetase medium-chain family member 2B;
  ENSP ID: ENSP00000456369
WLNFKKLLNEASTTHHCVETGSQEASAIYFTSGTSGLPKMAEHSYSSLGLKAKMDAGWTGLQASDIMWTISDTGWILNILGSLLESWTLGACTFVHLLPKFDPLVILKVFRSTQPIVNQKKFKSTYKLEAPASSCPTFLDQTNVFFKCV

SEQ ID NO: 2018 - protein, 577 aa, Homo sapiens; identical to SEQ ID NO: 2009
  Payload ID: 511;
  Gene Symbol: ACSM2B;
  Gene Name: acyl-CoA synthetase medium-chain family member 2B;
  Uniprot ID:  Q68CK6;
  ENSP ID: ENSP00000456378

SEQ ID NO: 2019 - protein, 498 aa, Homo sapiens
  Payload ID: 511;
  Gene Symbol: ACSM2B;
  Gene Name: acyl-CoA synthetase medium-chain family member 2B;
  ENSP ID: ENSP00000457377
MWNFRELSENSQQAANILSGACGLQRGDRVAVMLPRVPEWWLVILGCIRAGLIFMPGTIQMKSTDILYRLQMSKAKAIVAGDEVIQEVDTVASECPSLRIKLLVSEKSCDGWLNFKKLLNEASTTHHCVETGSQEASAIYFTSGTSGLPKMAEHSYSSLGLKAKMDAGWTGLQASDIMWTISDTGWILNILGSLLESWTLGACTFVHLLPKFDPLVILKTLSSYPIKSMMGAPIVYRMLLQQDLSSYKFPHLQNCLAGGESLLPETLENWRAQTGLDIREFYGQTETGLTCMVSKTMKIKPGYMGTAASCYDVQVIDDKGNVLPPGTEGDIGIRVKPIRPIGIFSGYVENPDKTAANIRGDFWLLGDRGIKDEDGYFQFMGRADDIINSSGYRIGPSEVENALMKHPAVVETAVISSPDPVRGEVVKAFVILASQFLSHDPEQLTKELQQHVKSVTAPYKYPRKIEFVLNLPKTVTGKIQRTKLRDKEWKMSGKARAQ

SEQ ID NO: 2020 - protein, 200 aa, Homo sapiens
  Payload ID: 511;
  Gene Symbol: ACSM2B;
  Gene Name: acyl-CoA synthetase medium-chain family member 2B;
  ENSP ID: ENSP00000478316
EHSYSSLGLKAKMDAGWTGLQASDIMWTISDTGWILNILGSLLESWTLGACTFVHLLPKFDPLVILKTLSSYPIKSMMGAPIVYRMLLQQDLSSYKFPHLQNCLAGGESLLPETLENWRAQTGLDIREFYGQTETGLTCMVSKTMKIKPGYMGTAASCYDVQVIDDKGNVLPPGTEGDIGIRVKPIRPIGIFSGYVVSSP

SEQ ID NO: 2021 - protein, 586 aa, Homo sapiens
  Payload ID: 512;
  Gene Symbol: ACSM3;
  Gene Name: acyl-CoA synthetase medium-chain family member 3;
  Uniprot ID:  Q53FZ2;
  ENSP ID: ENSP00000289416
MLARVTRKMLRHAKCFQRLAIFGSVRALHKDNRTATPQNFSNYESMKQDFKLGIPEYFNFAKDVLDQWTDKEKAGKKPSNPAFWWINRNGEEMRWSFEELGSLSRKFANILSEACSLQRGDRVILILPRVPEWWLANVACLRTGTVLIPGTTQLTQKDILYRLQSSKANCIITNDVLAPAVDAVASKCENLHSKLIVSENSREGWGNLKELMKHASDSHTCVKTKHNEIMAIFFTSGTSGYPKMTAHTHSSFGLGLSVNGRFWLDLTPSDVMWNTSDTGWAKSAWSSVFSPWIQGACVFTHHLPRFEPTSILQTLSKYPITVFCSAPTVYRMLVQNDITSYKFKSLKHCVSAGEPITPDVTEKWRNKTGLDIYEGYGQTETVLICGNFKGMKIKPGSMGKPSPAFDVKIVDVNGNVLPPGQEGDIGIQVLPNRPFGLFTHYVDNPSKTASTLRGNFYITGDRGYMDKDGYFWFVARADDVILSSGYRIGPFEVENALNEHPSVAESAVVSSPDPIRGEVVKAFVVLNPDYKSHDQEQLIKEIQEHVKKTTAPYKYPRKVEFIQELPKTISGKTKRNELRKKEWKTI

SEQ ID NO: 2022 - protein, 438 aa, Homo sapiens
  Payload ID: 512;
  Gene Symbol: ACSM3;
  Gene Name: acyl-CoA synthetase medium-chain family member 3;
  Uniprot ID:  Q53FZ2;
  ENSP ID: ENSP00000394565
MLARVTRKMLRHAKCFQRLAIFGSVRALHKDNRTATPQNFSNYESMKQDFKLGIPEYFNFAKDVLDQWTDKEKAGKKPSNPAFWWINRNGEEMRWSFEELGSLSRKFANILSEACSLQRGDRVILILPRVPEWWLANVACLRTGTVLIPGTTQLTQKDILYRLQSSKANCIITNDVLAPAVDAVASKCENLHSKLIVSENSREGWGNLKELMKHASDSHTCVKTKHNEIMAIFFTSGTSGYPKMTAHTHSSFGLGLSVNGRFWLDLTPSDVMWNTSDTGWAKSAWSSVFSPWIQGACVFTHHLPRFEPTSILQTLSKYPITVFCSAPTVYRMLVQNDITSYKFKSLKHCVSAGEPITPDVTEKWRNKTGLDIYEGYGQTETVLICGNFKGMKIKPGSMGKPSPAFDVKVCTSPSRRMFNNPICTLPTYRLPPYKLSLL

SEQ ID NO: 2023 - protein, 52 aa, Homo sapiens
  Payload ID: 512;
  Gene Symbol: ACSM3;
  Gene Name: acyl-CoA synthetase medium-chain family member 3;
  ENSP ID: ENSP00000456055
MLARVTRKMLRHAKCFQRLAIFGSVRALHKDNRTATPQNFSNYESMKQDFKL

SEQ ID NO: 2024 - protein, 582 aa, Homo sapiens
  Payload ID: 512;
  Gene Symbol: ACSM3;
  Gene Name: acyl-CoA synthetase medium-chain family member 3;
  ENSP ID: ENSP00000456767
  MOD_RES (1)..(1): Any amino acid
XYESMKQDFKLGIPEYFNFAKDVLDQWTDKEKAGKKPSNPAFWWINRNGEEMRWSFEELGSLSRKFANILSEACSLQRGDRVILILPRVPEWWLANVACLRTGTVLIPGTTQLTQKDILYRLQSSKANCIITNDVLAPAVDAVASKCENLHSKLIVSENSREGWGNLKELMKVFLCHPGWSTVARSWLTATSTSLVQAILSLLSSWDYRHASDSHTCVKTKHNEIMAIFFTSGTSGYPKMTAHTHSSFGLGLSVNGRFWLDLTPSDVMWNTSDTGWAKSAWSSVFSPWIQGACVFTHHLPRFEPTSILQTLSKYPITVFCSAPTVYRMLVQNDITSYKFKSLKHCVSAGEPITPDVTEKWRNKTGLDIYEGYGQTETVLICGNFKGMKIKPGSMGKPSPAFDVKIVDVNGNVLPPGQEGDIGIQVLPNRPFGLFTHYVDNPSKTASTLRGNFYITGDRGYMDKDGYFWFVARADDVILSSGYRIGPFEVENALNEHPSVAESAVVSSPDPIRGEVVKAFVVLNPDYKSHDQEQLIKEIQEHVKKTTAPYKYPRKVEFIQELPKTISGKTKRNELRKKEWKTI

SEQ ID NO: 2025 - protein, 100 aa, Homo sapiens
  Payload ID: 512;
  Gene Symbol: ACSM3;
  Gene Name: acyl-CoA synthetase medium-chain family member 3;
  ENSP ID: ENSP00000457003
MLARVTRKMLRHAKCFQRLAIFGSVRALHKDNRTATPQNFSNYESMKQDFKLGIPEYFNFAKDVLDQWTDKEKAGKKPSNPAFWWINRNGEEMRWSFEEL

SEQ ID NO: 2026 - protein, 25 aa, Homo sapiens
  Payload ID: 512;
  Gene Symbol: ACSM3;
  Gene Name: acyl-CoA synthetase medium-chain family member 3;
  ENSP ID: ENSP00000457158
MLARVTRKMLRHAKCFQRLAIFGSV

SEQ ID NO: 2027 - protein, 135 aa, Homo sapiens
  Payload ID: 512;
  Gene Symbol: ACSM3;
  Gene Name: acyl-CoA synthetase medium-chain family member 3;
  ENSP ID: ENSP00000457608
  MOD_RES (1)..(1): Any amino acid
XKWRNKTGLDIYEGYGQTETVLICGNFKGMKIKPGSMGKPSPAFDVKIVDVNGNVLPPGQEGDIGIQVLPNRPFGLFTHYVVVKAFVVLNPDYKSHDQEQLIKEIQEHVKKTTAPYKYPRKVEFIQELPKTISGK

SEQ ID NO: 2028 - protein, 235 aa, Homo sapiens
  Payload ID: 512;
  Gene Symbol: ACSM3;
  Gene Name: acyl-CoA synthetase medium-chain family member 3;
  ENSP ID: ENSP00000457926
  MOD_RES (1)..(1): Any amino acid
XSLLSSWDYRHASDSHTCVKTKHNEIMAIFFTSGTSGYPKMTAHTHSSFGLGLSVNGRFWLDLTPSDVMWNTSDTGWAKSAWSSVFSPWIQGACVFTHHLPRFEPTSILQTLSKYPITVFCSAPTVYRMLVQNDITSYKFKSLKHCVSAGEPITPDVTEKWRNKTGLDIYEGYGQTETVLICGNFKGMKIKPGSMGKPSPAFDVKVCTSPSRRMFNNPICTLPTYRLPPYKLSLL

SEQ ID NO: 2029 - protein, 158 aa, Homo sapiens
  Payload ID: 512;
  Gene Symbol: ACSM3;
  Gene Name: acyl-CoA synthetase medium-chain family member 3;
  ENSP ID: ENSP00000458068
MLARVTRKMLRHAKCFQRLAIFGSVRALHKDNRTATPQNFSNYESMKQDFKLGIPEYFNFAKDVLDQWTDKEKAGKKPSNPAFWWINRNGEEMRWSFEELGSLSRKFANILSEACSLQRGDRVILILPRVPEWWLANVACLRTGTVLIPGTTQLTQKD

SEQ ID NO: 2030 - protein, 580 aa, Homo sapiens
  Payload ID: 513;
  Gene Symbol: ACSM4;
  Gene Name: acyl-CoA synthetase medium-chain family member 4;
  Uniprot ID:  P0C7M7;
  ENSP ID: ENSP00000382349
MKIFFRYQTFRFIWLTKPPGRRLHKDHQLWTPLTLADFEAINRCNRPLPKNFNFAADVLDQWSQKEKTGERPANPALWWVNGKGDEVKWSFRELGSLSRKAANVLTKPCGLQRGDRLAVILPRIPEWWLVNVACIRTGIIFMPGTIQLTAKDILYRLRASKAKCIVASEEVAPAVESIVLECPDLKTKLLVSPQSWNGWLSFQELFQFASEEHSCVETGSQEPMTIYFTSGTTGFPKMAQHSQSSLGIGFTLCGRYWLDLKSSDIIWNMSDTGWVKAAIGSVFSSWLCGACVFVHRMAQFDTDTFLDTLTTYPITTLCSPPTVYRMLVQKDLKRYKFKSLRHCLTGGEPLNPEVLEQWRVQTGLELYEGYGQTEVGMICANQKGQEIKPGSMGKGMLPYDVQIIDENGNVLPPGKEGEIALRLKPTRPFCFFSKYVDNPQKTAATIRGDFYVTGDRGVMDSDGYFWFVGRADDVIISSGYRIGPFEVESALIEHPAVVESAVVSSPDQIRGEVVKAFVVLAAPFKSYNPEKLTLELQDHVKKSTAPYKYPRKVEFVQELPKTITGKIKRNVLRDQEWRGR

SEQ ID NO: 2031 - protein, 579 aa, Homo sapiens
  Payload ID: 514;
  Gene Symbol: ACSM5;
  Gene Name: acyl-CoA synthetase medium-chain family member 5;
  Uniprot ID:  Q6NUN0;
  ENSP ID: ENSP00000327916
MRPWLRHLVLQALRNSRAFCGSHGKPAPLPVPQKIVATWEAISLGRQLVPEYFNFAHDVLDVWSRLEEAGHRPPNPAFWWVNGTGAEIKWSFEELGKQSRKAANVLGGACGLQPGDRMMLVLPRLPEWWLVSVACMRTGTVMIPGVTQLTEKDLKYRLQASRAKSIITSDSLAPRVDAISAECPSLQTKLLVSDSSRPGWLNFRELLREASTEHNCMRTKSRDPLAIYFTSGTTGAPKMVEHSQSSYGLGFVASGRRWVALTESDIFWNTTDTGWVKAAWTLFSAWPNGSCIFVHELPRVDAKVILNTLSKFPITTLCCVPTIFRLLVQEDLTRYQFQSLRHCLTGGEALNPDVREKWKHQTGVELYEGYGQSETVVICANPKGMKIKSGSMGKASPPYDVQIVDDEGNVLPPGEEGNVAVRIRPTRPFCFFNCYLDNPEKTAASEQGDFYITGDRARMDKDGYFWFMGRNDDVINSSSYRIGPVEVESALAEHPAVLESAVVSSPDPIRGEVVKAFIVLTPAYSSHDPEALTRELQEHVKRVTAPYKYPRKVAFVSELPKTVSGKIQRSKLRSQEWGK

SEQ ID NO: 2032 - protein, 208 aa, Homo sapiens
  Payload ID: 514;
  Gene Symbol: ACSM5;
  Gene Name: acyl-CoA synthetase medium-chain family member 5;
  Uniprot ID:  Q6NUN0;
  ENSP ID: ENSP00000460112
MRPWLRHLVLQALRNSRAFCGSHGKPAPLPVPQKIVATWEAISLGRQLVPEYFNFAHDVLDVWSRLEEAGHRPPNPAFWWVNGTGAEIKWSFEELGKQSRKAANVLGGACGLQPGDRMMLVLPRLPEWWLVSVACMRTGTVMIPGVTQLTEKDLKYRLQASRAKSIITSDSLAPRVDAISAECPSLQTKLLVSDSSRPGWLNFRELLR

SEQ ID NO: 2033 - protein, 112 aa, Homo sapiens
  Payload ID: 514;
  Gene Symbol: ACSM5;
  Gene Name: acyl-CoA synthetase medium-chain family member 5;
  ENSP ID: ENSP00000461752
HNCMRTKSRDPLAIYFTSGTTGAPKMVEHSQSSYGLGFVASGRRWVALTESDIFWNTTDTGWVKAAWTLFSAWPNGSCIFVHELPRVDAKVILNVPVSEPEALSDRRRGPQP

SEQ ID NO: 2034 - protein, 74 aa, Homo sapiens
  Payload ID: 514;
  Gene Symbol: ACSM5;
  Gene Name: acyl-CoA synthetase medium-chain family member 5;
  ENSP ID: ENSP00000478073
MRPWLRHLVLQALRNSRAFCGSHGKPAPLPVPQKIVATWEAISLGRQLVPEYFNFAHDVLDVWSRLEEVKPVLS

SEQ ID NO: 2035 - protein, 141 aa, Homo sapiens
  Payload ID: 515;
  Gene Symbol: ACSM6;
  Gene Name: acyl-CoA synthetase medium-chain family member 6;
  ENSP ID: ENSP00000328491
MLGRFQPFSLVRSFRLGFEACCYPNQKCATQTIRPPDSRCLVQAVSQNFNFAKDVLDQWSQLEKDGLRGPYPALWKVSAKGEEDKWSFERMTQLSKKAASILSDTCALSHGDRLMIILPPTPEAYWICLACESPLCLGAPS

SEQ ID NO: 2036 - protein, 480 aa, Homo sapiens
  Payload ID: 515;
  Gene Symbol: ACSM6;
  Gene Name: acyl-CoA synthetase medium-chain family member 6;
  Uniprot ID:  Q6P461;
  ENSP ID: ENSP00000340296
MLGRFQPFSLVRSFRLGFEACCYPNQKCATQTIRPPDSRCLVQAVSQNFNFAKDVLDQWSQLEKDGLRGPYPALWKVSAKGEEDKWSFERMTQLSKKAASILSDTCALSHGDRLMIILPPTPEAYWICLACVRLGITFVPGSPQLTAKKIRYQLRMSKAQCIVANEAMAPVVNSAVSDCPTLKTKLLVSDKSYDGWLDFKKLIQVAPPKQTYMRTKSQDPMAIFFTKGTTGAPKMVEYSQYGLGMGFSQASRRWMDLQPTDVLWSLGDAFGGSLSLSAVLGTWFQGACVFLCHMPTFCPETVLNVLSRFPITTLSANPEMYQELLQHKCFTSYRFKSLKQCVAAGGPISPGVIEDWKRITKLDIYEGYGQTETGLLCATSKTIKLKPSSLGKPLPPYIVQIVDENSNLLPPGEEGNIAIRIKLNQPASLYCPHMVSWEEYASARGHMLYLTGDRGIMDEDGYFWWSGRVDDVANALGQRL

SEQ ID NO: 2037 - protein, 480 aa, Homo sapiens; identical to SEQ ID NO: 2036
  Payload ID: 515;
  Gene Symbol: ACSM6;
  Gene Name: acyl-CoA synthetase medium-chain family member 6;
  Uniprot ID:  Q6P461;
  ENSP ID: ENSP00000377573

SEQ ID NO: 2038 - protein, 85 aa, Homo sapiens
  Payload ID: 515;
  Gene Symbol: ACSM6;
  Gene Name: acyl-CoA synthetase medium-chain family member 6;
  ENSP ID: ENSP00000384922
MLGRFQPFSLVRSFRLGFEACCYPNQKCATQTIRPPDSRCLVQAVSQNFNFAKDVLDQWSQLEKDNGLQLHPCCCKRQDFILFHG

SEQ ID NO: 2039 - protein, 689 aa, Homo sapiens [sequence omitted]

SEQ ID NO: 2040 - protein, 153 aa, Homo sapiens
  Payload ID: 516;
  Gene Symbol: ACSS1;
  Gene Name: acyl-CoA synthetase short-chain family member 1;
  ENSP ID: ENSP00000365916
MAARTLGRGVGRLLGSLRGLSGQPARPPCGVSAPRRAASGPSGSAPAVAAAAAQPGSYPALSAQAAREPAAFWGPLARDTLVWDTPYHTVWDCDFSTGKIGWFLGGQLNVSVNCLDQHVRKSPESVALIWERDEPGTEVRITYSPWLQMPCGP

SEQ ID NO: 2041 - protein, 575 aa, Homo sapiens
  Payload ID: 516;
  Gene Symbol: ACSS1;
  Gene Name: acyl-CoA synthetase short-chain family member 1;
  Uniprot ID:  Q9NUB1;
  ENSP ID: ENSP00000388793
MAARTLGRGVGRLLGSLRGLSGQPARPPCGVSAPRRAASGPSGSAPAVAAAAAQPGSYPALSAQAAREPAAFWGPLARDTLVWDTPYHTVWDCDFSTGKIGWFLGGQLNVSVNCLDQHVRKSPESVALIWERDEPGTEVRITYRELLETTCRLANTLKRHGVHRGDRVAIYMPVSPLAVAAMLACARIGAVHTVIFAGFSAESLAGRINDAKCKVVITFNQGLRGGRVVELKKIVDEAVKHCPTVQHVLVAHRTDNKVHMGDLDVPLEQEMAKEDPVCAPESMGSEDMLFMLYTSGSTGMPKGIVHTQAGYLLYAALTHKLVFDHQPGDIFGCVADIGWITGHSYVVYGPLCNGATSVLFESTPVYPNAGRYWETVERLKINQFYGAPTAVRLLLKYGDAWVKKYDRSSLRTLGSVGEPINCEAWEWLHRVVGDSRCTLVDTWWQTETGGICIAPRPSEEGAEILPAMAMRPFFGIVPVLMDEKGSVVEGSNVSGALCISQAWPGMARTIYGDHQRFVDAYFKAYPGYYFTGDGAYRTEGGYYQITGRMDDVINILQIVGFFREAIRNSGDLLEH

SEQ ID NO: 2042 - protein, 568 aa, Homo sapiens
  Payload ID: 516;
  Gene Symbol: ACSS1;
  Gene Name: acyl-CoA synthetase short-chain family member 1;
  Uniprot ID:  Q9NUB1;
  ENSP ID: ENSP00000439304
MRRRKERQPWDRFHFLHFAPHGRELLETTCRLANTLKRHGVHRGDRVAIYMPVSPLAVAAMLACARIGAVHTVIFAGFSAESLAGRINDAKCKVVITFNQGLRGGRVVELKKIVDEAVKHCPTVQHVLVAHRTDNKVHMGDLDVPLEQEMAKEDPVCAPESMGSEDMLFMLYTSGSTGMPKGIVHTQAGYLLYAALTHKLVFDHQPGDIFGCVADIGWITGHSYVVYGPLCNGATSVLFESTPVYPNAGRYWETVERLKINQFYGAPTAVRLLLKYGDAWVKKYDRSSLRTLGSVGEPINCEAWEWLHRVVGDSRCTLVDTWWQTETGGICIAPRPSEEGAEILPAMAMRPFFGIVPVLMDEKGSVVEGSNVSGALCISQAWPGMARTIYGDHQRFVDAYFKAYPGYYFTGDGAYRTEGGYYQITGRMDDVINISGHRLGTAEIEDAIADHPAVPESAVIGYPHDIKGEAAFAFIVVKDSAGDSDVVVQELKSMVATKIAKYAVPDEILVVKRLPKTRSGKVMRRLLRKIITSEAQELGDTTTLEDPSIIAEILSVYQKCKDKQAAAK

SEQ ID NO: 2043 - protein, 714 aa, Homo sapiens
  Payload ID: 517;
  Gene Symbol: ACSS2;
  Gene Name: acyl-CoA synthetase short-chain family member 2;
  Uniprot ID:  Q9NR19;
  ENSP ID: ENSP00000253382
MGLPEERVRSGSGSRGQEEAGAGGRARSWSPPPEVSRSAHVPSLQRYRELHRRSVEEPREFWGDIAKEFYWKTPCPGPFLRYNFDVTKGKIFIEWMKGATTNICYNVLDRNVHEKKLGDKVAFYWEGNEPGETTQITYHQLLVQVCQFSNVLRKQGIQKGDRVAIYMPMIPELVVAMLACARIGALHSIVFAGFSSESLCERILDSSCSLLITTDAFYRGEKLVNLKELADEALQKCQEKGFPVRCCIVVKHLGRAELGMGDSTSQSPPIKRSCPDVQGKLKEKSKRVQPQISWNQGIDLWWHELMQEAGDECEPEWCDAEDPLFILYTSGSTGKPKGVVHTVGGYMLYVATTFKYVFDFHAEDVFWCTADIGWITGHSYVTYGPLANGATSVLFEGIPTYPDVNRLWSIVDKYKVTKFYTAPTAIRLLMKFGDEPVTKHSRASLQVLGTVGEPINPEAWLWYHRVVGAQRCPIVDTFWQTETGGHMLTPLPGATPMKPGSATFPFFGVAPAILNESGEELEGEAEGYLVFKQPWPGIMRTVYGNHERFETTYFKKFPGYYVTGDGCQRDQDGYYWITGRIDDMLNVSGHLLSTAEVESALVEHEAVAEAAVVGHPHPVKGECLYCFVTLCDGHTFSPKLTEELKKQIREKIGPIATPDYIQNAPGLPKTRSGKIMRRVLRKIAQNDHDLGDMSTVADPSVISHLFSHRCLTIQ

SEQ ID NO: 2044 - protein, 701 aa, Homo sapiens [sequence omitted]

SEQ ID NO: 2045 - protein, 163 aa, Homo sapiens
  Payload ID: 517;
  Gene Symbol: ACSS2;
  Gene Name: acyl-CoA synthetase short-chain family member 2;
  ENSP ID: ENSP00000417783
MMVRWALLCEFWGDIAKEFYWKTPCPGPFLRYNFDVTKGKIFIEWMKGATTNICYNVLDRNVHEKKLGDKVAFYWEGNEPGETTQITYHQLLVQVCQFSNVLRKQGIQKGDRVAIYMPMIPELVVAMLACARIGALHSIVFAGFSSESLCERILDSSCSLLIT

SEQ ID NO: 2046 - protein, 37 aa, Homo sapiens
  Payload ID: 517;
  Gene Symbol: ACSS2;
  Gene Name: acyl-CoA synthetase short-chain family member 2;
  ENSP ID: ENSP00000418152
MMVRWALLCGECRILGRHCQGILLEDSMPWPIPSVQL

SEQ ID NO: 2047 - protein, 124 aa, Homo sapiens
  Payload ID: 517;
  Gene Symbol: ACSS2;
  Gene Name: acyl-CoA synthetase short-chain family member 2;
  ENSP ID: ENSP00000418362
MGLPEERVRSGSGSRGQEEAGAGGRARSWSPPPEVSRSAHVPSLQRYRELHRRSVEEPREFWGDIAKEFYWKTPCPGPFLRYNFDVTKGKIFIEWMKGATTNICYNVLDRNVHEKKLGDKVAFY

SEQ ID NO: 2048 - protein, 60 aa, Homo sapiens
  Payload ID: 517;
  Gene Symbol: ACSS2;
  Gene Name: acyl-CoA synthetase short-chain family member 2;
  ENSP ID: ENSP00000418608
MGLPEERVRSGSGSRGQEEAGAGGRARSWSPPPENSGETLPRNFTGRLHALAHSFGTTLM

SEQ ID NO: 2049 - protein, 182 aa, Homo sapiens
  Payload ID: 517;
  Gene Symbol: ACSS2;
  Gene Name: acyl-CoA synthetase short-chain family member 2;
  ENSP ID: ENSP00000418812
MGLPEERVRSGSGSRGQEEAGAGGRARSWSPPPEVSRSAHVPSLQRYRELHRRSVEEPREFWGDIAKEFYWKTPCPGPFLRYNFDVTKGKIFIEWMKGATTNICYNVLDRNVHEKKLGDKVAFYCGDVVLPCWPGWSQLPDLREGNEPGETTQITYHQLLVQVCQFSNVLRKQGIQKGDRVA

SEQ ID NO: 2050 - protein, 147 aa, Homo sapiens
  Payload ID: 517;
  Gene Symbol: ACSS2;
  Gene Name: acyl-CoA synthetase short-chain family member 2;
  ENSP ID: ENSP00000419167
MGLPEERVRSGSGSRGQEEAGAGGRARSWSPPPEVSRSAHVPSLQRYRELHRRSVEEPREFYWKTPCPGPFLRYNFDVTKGKIFIEWMKGATTNICYNVLDRNVHEKKLGDKVAFYWEGNEPGETTQITYHQLLVQVCQFSNVLRKQ

SEQ ID NO: 2051 - protein, 203 aa, Homo sapiens
  Payload ID: 517;
  Gene Symbol: ACSS2;
  Gene Name: acyl-CoA synthetase short-chain family member 2;
  ENSP ID: ENSP00000419925
MGLPEERVRSGSGSRGQEEAGAGGRARSWSPPPEVSRSAHVPSLQRYRELHRRSVEEPREFWGDIAKEFYWKTPCPGPFLRYNFDVTKGKIFIEWMKGATTNICYNVLDRNVHEKKLGDKVAFYWSTSGNSSYRYTCREGNEPGETTQITYHQLLVQVCQFSNVLRKQGIQKGDRVAIYMPMIPELVVAMLACARIGALHSIV

SEQ ID NO: 2052 - protein, 74 aa, Homo sapiens
  Payload ID: 517;
  Gene Symbol: ACSS2;
  Gene Name: acyl-CoA synthetase short-chain family member 2;
  ENSP ID: ENSP00000420105
MMVRWALLCEFWGDIAKEFYWKTPCPGPFLRYNFDVTKGKIFIEWMKGATTNICYNVLDRNVHEKKLGDKVAFY

SEQ ID NO: 2053 - protein, 187 aa, Homo sapiens
  Payload ID: 517;
  Gene Symbol: ACSS2;
  Gene Name: acyl-CoA synthetase short-chain family member 2;
  ENSP ID: ENSP00000420351
MGLPEERVRSGSGSRGQEEAGAGGRARSWSPPPEVSRSAHVPSLQRYRELHRRSVEEPREFWGDIAKEFYWKTPCPGPFLRYNFDVTKGKIFIEWMKGATTNICYNVLDRNVHEKKLGDKVAFYWCSSSPGQGSCAQSMGTTNALRQPTLRSFLDTMLQEMAASGTRMAITGSLAGLMTCSMYLDTC

SEQ ID NO: 2054 - protein, 685 aa, Homo sapiens
  Payload ID: 518;
  Gene Symbol: ACSS3;
  Gene Name: acyl-CoA synthetase short-chain family member 3;
  ENSP ID: ENSP00000261206
MKPSWLQCRKVTSAGGLGGPLPGSSPARGAGAALRALVVPGPRGGLGGRGCRALSSGSGSEYKTHFAASVTDPERFWGKAAEQISWYKPWTKTLENKHSPSTRFVEGMLNICYNAVDRHIENGKGDKIAIIYDSPVTNTKATFTYKEVLEQVSKLAGVLVKHGIKKGDTVVIYMPMIPQAMYTMLACARIGAIHSLIFGGFASKELSSRIDHVKPKVVVTASFGIEPGRRVEYVPLVEEALKIGQHKPDKILIYNRPNMEAVPLAPGRDLDWDEEMAKAQSHDCVPVLSEHPLYILYTSGTTGLPKGVIRPTGGYAVMLHWSMSSIYGLQPGEVWWAASDLGWVVGHSYICYGPLLHGNTTVLYEGKPVGTPDAGAYFRVLAEHGVAALFTAPTAIRAIRQQDPGAALGKQYSLTRFKTLFVAGERCDVETLEWSKNVFRVPVLDHWWQTETGSPITASCVGLGNSKTPPPGQAGKSVPGYNVMILDDNMQKLKARCLGNIVVKLPLPPGAFSGLWKNQEAFKHLYFEKFPGYYDTMDAGYMDEEGYLYVMSRVDDVINVAGHRISAGAIEESILSHGTVADCAVVGKEDPLKGHVPLALCVLRKDINATEEQVLEEIVKHVRQNIGPVAAFRNAVFVKQLPKTRSGKIPRSALSAIVNGKPYKITSTIEDPSIFGHVEEMLKQA

SEQ ID NO: 2055 - protein, 93 aa, Homo sapiens
  Payload ID: 518;
  Gene Symbol: ACSS3;
  Gene Name: acyl-CoA synthetase short-chain family member 3;
  ENSP ID: ENSP00000447748
MLNICYNAVDRHIENGKGDKIAIIYDSPVTNTKATFTYKEVLEQVSKLAGVLVKHGIKKGDTVVIYMPMIPQAMYTMLACARIGAIHSLIFGG

SEQ ID NO: 2056 - protein, 75 aa, Homo sapiens
  Payload ID: 518;
  Gene Symbol: ACSS3;
  Gene Name: acyl-CoA synthetase short-chain family member 3;
  ENSP ID: ENSP00000449507
  MOD_RES (1)..(1): Any amino acid
XLAEHGVAALFTAPTAIRAIRQQDPGAALGKQYSLTRFKTLFVAGERCDVETLEWSKNVFRVPVLDHWWQTGIKH

SEQ ID NO: 2057 - protein, 686 aa, Homo sapiens
  Payload ID: 518;
  Gene Symbol: ACSS3;
  Gene Name: acyl-CoA synthetase short-chain family member 3;
  Uniprot ID:  Q9H6R3;
  ENSP ID: ENSP00000449535
MKPSWLQCRKVTSAGGLGGPLPGSSPARGAGAALRALVVPGPRGGLGGRGCRALSSGSGSEYKTHFAASVTDPERFWGKAAEQISWYKPWTKTLENKHSPSTRWFVEGMLNICYNAVDRHIENGKGDKIAIIYDSPVTNTKATFTYKEVLEQVSKLAGVLVKHGIKKGDTVVIYMPMIPQAMYTMLACARIGAIHSLIFGGFASKELSSRIDHVKPKVVVTASFGIEPGRRVEYVPLVEEALKIGQHKPDKILIYNRPNMEAVPLAPGRDLDWDEEMAKAQSHDCVPVLSEHPLYILYTSGTTGLPKGVIRPTGGYAVMLHWSMSSIYGLQPGEVWWAASDLGWVVGHSYICYGPLLHGNTTVLYEGKPVGTPDAGAYFRVLAEHGVAALFTAPTAIRAIRQQDPGAALGKQYSLTRFKTLFVAGERCDVETLEWSKNVFRVPVLDHWWQTETGSPITASCVGLGNSKTPPPGQAGKSVPGYNVMILDDNMQKLKARCLGNIVVKLPLPPGAFSGLWKNQEAFKHLYFEKFPGYYDTMDAGYMDEEGYLYVMSRVDDVINVAGHRISAGAIEESILSHGTVADCAVVGKEDPLKGHVPLALCVLRKDINATEEQVLEEIVKHVRQNIGPVAAFRNAVFVKQLPKTRSGKIPRSALSAIVNGKPYKITSTIEDPSIFGHVEEMLKQA

SEQ ID NO: 2058 - protein, 421 aa, Homo sapiens
  Payload ID: 519;
  Gene Symbol: ACOT1;
  Gene Name: acyl-CoA thioesterase 1;
  Uniprot ID:  Q86TX2;
  ENSP ID: ENSP00000311224
MAATLILEPAGRCCWDEPVRIAVRGLAPEQPVTLRASLRDEKGALFQAHARYRADTLGELDLERAPALGGSFAGLEPMGLLWALEPEKPLVRLVKRDVRTPLAVELEVLDGHDPDPGRLLCRVRHERYFLPPGVRREPVRAGRVRGTLFLPPEPGPFPGIVDMFGTGGGLLEYRASLLAGKGFAVMALAYYNYEDLPKTMETLHLEYFEEAVNYLLSHPEVKGPGVGLLGISKGGELCLSMASFLKGITAAVVINGSVANVGGTLRYKGETLPPVGVNRNRIKVTKDGYADIVDVLNSPLEGPDQKSFIPVERAESTFLFLVGQDDHNWKSEFYANEACKRLQAHGRRKPQIICYPETGHYIEPPYFPLCRASLHALVGSPIIWGGEPRAHAMAQVDAWKQLQTFFHKHLGGHEGTIPSKV

SEQ ID NO: 2059 - protein, 395 aa, Homo sapiens
  Payload ID: 519;
  Gene Symbol: ACOT1;
  Gene Name: acyl-CoA thioesterase 1;
  ENSP ID: ENSP00000451764
MAATLILEPAGRCCWDEPVRIAVRGLAPEQPVTLRASLRDEKGALFQAHARYRADTLGELDLERAPALGGSFAGLEPMGLLWALEPEKPLVRLVKRDVRTPLAVELEVLDGHDPDPGRLLCRVRHERYFLPPGVRREPVRAGRVRGTLFLPPEPGPFPGIVDMFGTGGGLLEYRASLLAGKGFAVMALAYYNYEDLPKTMETLHLEYFEEAVNYLLSHPEGITAAVVINGSVANVGGTLRYKGETLPPVGVNRNRIKVTKDGYADIVDVLNSPLEGPDQKSFIPVERAESTFLFLVGQDDHNWKSEFYANEACKRLQAHGRRKPQIICYPETGHYIEPPYFPLCRASLHALVGSPIIWGGEPRAHAMAQVDAWKQLQTFFHKHLGGHEGTIPSKV

SEQ ID NO: 2060 - protein, 594 aa, Homo sapiens
  Payload ID: 520;
  Gene Symbol: ACOT11;
  Gene Name: acyl-CoA thioesterase 11;
  Uniprot ID:  Q8WXI4;
  ENSP ID: ENSP00000340260
MIQNVGNHLRRGLASVFSNRTSRKSALRAGNDSAMADGEGYRNPTEVQMSQLVLPCHTNQRGELSVGQLLKWIDTTACLSAERHAGCPCVTASMDDIYFEHTISVGQVVNIKAKVNRAFNSSMEVGIQVASEDLCSEKQWNVCKALATFVARREITKVKLKQITPRTEEEKMEHSVAAERRRMRLVYADTIKDLLANCAIQGDLESRDCSRMVPAEKTRVESVELVLPPHANHQGNTFGGQIMAWMENVATIAASRLCRAHPTLKAIEMFHFRGPSQVGDRLVLKAIVNNAFKHSMEVGVCVEAYRQEAETHRRHINSAFMTFVVLDADDQPQLLPWIRPQPGDGERRYREASARKKIRLDRKYIVSCKQTEVPLSVPWDPSNQVYLSYNNVSSLKMLVAKDNWVLSSEISQVRLYTLEDDKFLSFHMEMVVHVDAAQAFLLLSDLRQRPEWDKHYRSVELVQQVDEDDAIYHVTSPALGGHTKPQDFVILASRRKPCDNGDPYVIALRSVTLPTHRETPEYRRGETLCSGFCLWREGDQLTKVSYYNQATPGVLNYVTTNVAGLSSEFYTTFKACEQFLLDNRNDLAPSLQTL

SEQ ID NO: 2061 - protein, 607 aa, Homo sapiens
  Payload ID: 520;
  Gene Symbol: ACOT11;
  Gene Name: acyl-CoA thioesterase 11;
  Uniprot ID:  Q8WXI4;
  ENSP ID: ENSP00000360366
MIQNVGNHLRRGLASVFSNRTSRKSALRAGNDSAMADGEGYRNPTEVQMSQLVLPCHTNQRGELSVGQLLKWIDTTACLSAERHAGCPCVTASMDDIYFEHTISVGQVVNIKAKVNRAFNSSMEVGIQVASEDLCSEKQWNVCKALATFVARREITKVKLKQITPRTEEEKMEHSVAAERRRMRLVYADTIKDLLANCAIQGDLESRDCSRMVPAEKTRVESVELVLPPHANHQGNTFGGQIMAWMENVATIAASRLCRAHPTLKAIEMFHFRGPSQVGDRLVLKAIVNNAFKHSMEVGVCVEAYRQEAETHRRHINSAFMTFVVLDADDQPQLLPWIRPQPGDGERRYREASARKKIRLDRKYIVSCKQTEVPLSVPWDPSNQVYLSYNNVSSLKMLVAKDNWVLSSEISQVRLYTLEDDKFLSFHMEMVVHVDAAQAFLLLSDLRQRPEWDKHYRSVELVQQVDEDDAIYHVTSPALGGHTKPQDFVILASRRKPCDNGDPYVIALRSVTLPTHRETPEYRRGETLCSGFCLWREGDQLTKCCWVRVSLTELVSASGFYSWGLESRSKGRRSDGWNGKLAGGHLSTLKAIPVAKINSRFGYLQDT

SEQ ID NO: 2062 - protein, 555 aa, Homo sapiens
  Payload ID: 521;
  Gene Symbol: ACOT12;
  Gene Name: acyl-CoA thioesterase 12;
  Uniprot ID:  Q8WYK0;
  ENSP ID: ENSP00000303246
MERPAPGEVVMSQAIQPAHATARGELSAGQLLKWIDTTACLAAEKHAGVSCVTASVDDIQFEETARVGQVITIKAKVTRAFSTSMEISIKVMVQDMLTGIEKLVSVAFSTFVAKPVGKEKIHLKPVTLLTEQDHVEHNLAAERRKVRLQHEDTFNNLMKESSKFDDLIFDEEEGAVSTRGTSVQSIELVLPPHANHHGNTFGGQIMAWMETVATISASRLCWAHPFLKSVDMFKFRGPSTVGDRLVFTAIVNNTFQTCVEVGVRVEAFDCQEWAEGRGRHINSAFLIYNAADDKENLITFPRIQPISKDDFRRYRGAIARKRIRLGRKYVISHKEEVPLCIHWDISKQASLSDSNVEALKKLAAKRGWEVTSTVEKIKIYTLEEHDVLSVWVEKHVGSPAHLAYRLLSDFTKRPLWDPHFVSCEVIDWVSEDDQLYHITCPILNDDKPKDLVVLVSRRKPLKDGNTYTVAVKSVILPSVPPSPQYIRSEIICAGFLIHAIDSNSCIVSYFNHMSASILPYFAGNLGGWSKSIEETAASCIQFLENPPDDGFVSTF

SEQ ID NO: 2063 - protein, 167 aa, Homo sapiens
  Payload ID: 521;
  Gene Symbol: ACOT12;
  Gene Name: acyl-CoA thioesterase 12;
  Uniprot ID:  Q8WYK0;
  ENSP ID: ENSP00000421628
MERPAPGEVVMSQAIQPAHATARGELSAGQLLKWIDTTACLAAEKHAGVSCVTASVDDIQFEETARVGQVITIKAKVTRAFSTSMEISIKVMVQDMLTGIEKLVSVAFSTFVAKPVGKEKIHLKPVTLLTEQDHVEHNLAAERRKVRLQHEDTFNNLMKESSKFDGQ

SEQ ID NO: 2064 - protein, 140 aa, Homo sapiens
  Payload ID: 522;
  Gene Symbol: ACOT13;
  Gene Name: acyl-CoA thioesterase 13;
  Uniprot ID:  Q9NPJ3;
  ENSP ID: ENSP00000230048
MTSMTQSLREVIKAMTKARNFERVLGKITLVSAAPGKVICEMKVEEEHTNAIGTLHGGLTATLVDNISTMALLCTERGAPGVSVDMNITYMSPAKLGEDIVITAHVLKQGKTLAFTSVDLTNKATGKLIAQGRHTKHLGN

SEQ ID NO: 2065 - protein, 117 aa, Homo sapiens
  Payload ID: 522;
  Gene Symbol: ACOT13;
  Gene Name: acyl-CoA thioesterase 13;
  Uniprot ID:  Q9NPJ3;
  ENSP ID: ENSP00000445552
MVRKITLVSAAPGKVICEMKVEEEHTNAIGTLHGGLTATLVDNISTMALLCTERGAPGVSVDMNITYMSPAKLGEDIVITAHVLKQGKTLAFTSVDLTNKATGKLIAQGRHTKHLGN

SEQ ID NO: 2066 - protein, 483 aa, Homo sapiens
  Payload ID: 523;
  Gene Symbol: ACOT2;
  Gene Name: acyl-CoA thioesterase 2;
  Uniprot ID:  P49753;
  ENSP ID: ENSP00000238651
MSNKLLSPHPHSVVLRSEFKMASSPAVLRASRLYQWSLKSSAQFLGSPQLRQVGQIIRVPARMAATLILEPAGRCCWDEPVRIAVRGLAPEQPVTLRASLRDEKGALFQAHARYRADTLGELDLERAPALGGSFAGLEPMGLLWALEPEKPLVRLVKRDVRTPLAVELEVLDGHDPDPGRLLCQTRHERYFLPPGVRREPVRVGRVRGTLFLPPEPGPFPGIVDMFGTGGGLLEYRASLLAGKGFAVMALAYYNYEDLPKTMETLHLEYFEEAMNYLLSHPEVKGPGVGLLGISKGGELCLSMASFLKGITAAVVINGSVANVGGTLHYKGETLPPVGVNRNRIKVTKDGYADIVDVLNSPLEGPDQKSFIPVERAESTFLFLVGQDDHNWKSEFYANEACKRLQAHGRRKPQIICYPETGHYIEPPYFPLCRASLHALVGSPIIWGGEPRAHAMAQVDAWKQLQTFFHKHLGGHEGTIPSKV

SEQ ID NO: 2067 - protein, 64 aa, Homo sapiens
  Payload ID: 523;
  Gene Symbol: ACOT2;
  Gene Name: acyl-CoA thioesterase 2;
  ENSP ID: ENSP00000440961
MASSPAVLRASRLYQWSLKSSAQFLGSPQLRQNLGPFLGLWTCSELEVACWSIGLVCWLGRVLL

SEQ ID NO: 2068 - protein, 463 aa, Homo sapiens
  Payload ID: 523;
  Gene Symbol: ACOT2;
  Gene Name: acyl-CoA thioesterase 2;
  ENSP ID: ENSP00000477685
MASSPAVLRASRLYQWSLKSSAQFLGSPQLRQVGQIIRVPARMAATLILEPAGRCCWDEPVRIAVRGLAPEQPVTLRASLRDEKGALFQAHARYRADTLGELDLERAPALGGSFAGLEPMGLLWALEPEKPLVRLVKRDVRTPLAVELEVLDGHDPDPGRLLCQTRHERYFLPPGVRREPVRVGRVRGTLFLPPEPGPFPGIVDMFGTGGGLLEYRASLLAGKGFAVMALAYYNYEDLPKTMETLHLEYFEEAMNYLLSHPEVKGPGVGLLGISKGGELCLSMASFLKGITAAVVINGSVANVGGTLHYKGETLPPVGVNRNRIKVTKDGYADIVDVLNSPLEGPDQKSFIPVERAESTFLFLVGQDDHNWKSEFYANEACKRLQAHGRRKPQIICYPETGHYIEPPYFPLCRASLHALVGSPIIWGGEPRAHAMAQVDAWKQLQTFFHKHLGGHEGTIPSKV

SEQ ID NO: 2069 - protein, 421 aa, Homo sapiens [sequence omitted]

SEQ ID NO: 2070 - protein, 421 aa, Homo sapiens
  Payload ID: 524;
  Gene Symbol: ACOT4;
  Gene Name: acyl-CoA thioesterase 4;
  Uniprot ID:  Q8N9L9;
  ENSP ID: ENSP00000323071
MSATLILEPPGRCCWNEPVRIAVRGLAPEQRVTLRASLRDEKGALFRAHARYCADARGELDLERAPALGGSFAGLEPMGLLWALEPEKPFWRFLKRDVQIPFVVELEVLDGHDPEPGRLLCQAQHERHFLPPGVRRQSVRAGRVRATLFLPPGPGPFPGIIDIFGIGGGLLEYRASLLAGHGFATLALAYYNFEDLPNNMDNISLEYFEEAVCYMLQHPQVKGPGIGLLGISLGADICLSMASFLKNVSATVSINGSGISGNTAINYKHSSIPPLGYDLRRIKVAFSGLVDIVDIRNALVGGYKNPSMIPIEKAQGPILLIVGQDDHNWRSELYAQTVSERLQAHGKEKPQIICYPGTGHYIEPPYFPLCPASLHRLLNKHVIWGGEPRAHSKAQEDAWKQILAFFCKHLGGTQKTAVPKL

SEQ ID NO: 2071 - protein, 207 aa, Homo sapiens
  Payload ID: 525;
  Gene Symbol: ACOT6;
  Gene Name: acyl-CoA thioesterase 6;
  Uniprot ID:  Q3I5F7;
  ENSP ID: ENSP00000370531
MLQHPKVKGPSIALLGFSKGGDLCLSMASFLKGITATVLINACVANTVAPLHYKDMIIPKLVDDLGKVKITKSGFLTFMDTWSNPLEEHNHQSLVPLEKAQVPFLFIVGMDDQSWKSEFYAQIASERLQAHGKERPQIICYPETGHCIDPPYFPPSRASVHAVLGEAIFYGGEPKAHSKAQVDAWQQIQTFFHKHLNGKKSVKHSKI

SEQ ID NO: 2072 - protein, 168 aa, Homo sapiens
  Payload ID: 525;
  Gene Symbol: ACOT6;
  Gene Name: acyl-CoA thioesterase 6;
  ENSP ID: ENSP00000451464
MLQHPKVKGPSIALLGFSKGGDLCLSMASFLKGITATVLINACVANTVAPLHYKDMIIPKLVDDLGKVKITKSGFLTFMDTWSNPLEEHNHQSLVPLEKAQVPFLFIVGMDDQSWKSEFYAQIASERLQAHGKERPQIICYPETGHCIDPPYFPPSRASVHAVLGEAI

SEQ ID NO: 2073 - protein, 370 aa, Homo sapiens
  Payload ID: 526;
  Gene Symbol: ACOT7;
  Gene Name: acyl-CoA thioesterase 7;
  Uniprot ID:  O00154;
  ENSP ID: ENSP00000354615
MARPGLIHSAPGLPDTCALLQPPAASAAAAPSMSGPDVETPSAIQICRIMRPDDANVAGNVHGGTILKMIEEAGAIISTRHCNSQNGERCVAALARVERTDFLSPMCIGEVAHVSAEITYTSKHSVEVQVNVMSENILTGAKKLTNKATLWYVPLSLKNVDKVLEVPPVVYSRQEQEEEGRKRYEAQKLERMETKWRNGDIVQPVLNPEPNTVSYSQSSLIHLVGPSDCTLHGFVHGGVTMKLMDEVAGIVAARHCKTNIVTASVDAINFHDKIRKGCVITISGRMTFTSNKSMEIEVLVDADPVVDSSQKRYRAASAFFTYVSLSQEGRSLPVPQLVPETEDEKKRFEEGKGRYLQMKAKRQGHAEPQP

SEQ ID NO: 2074 - protein, 329 aa, Homo sapiens
  Payload ID: 526;
  Gene Symbol: ACOT7;
  Gene Name: acyl-CoA thioesterase 7;
  Uniprot ID:  O00154;
  ENSP ID: ENSP00000367073
MAFQLSRIMRPDDANVAGNVHGGTILKMIEEAGAIISTRHCNSQNGERCVAALARVERTDFLSPMCIGEVAHVSAEITYTSKHSVEVQVNVMSENILTGAKKLTNKATLWYVPLSLKNVDKVLEVPPVVYSRQEQEEEGRKRYEAQKLERMETKWRNGDIVQPVLNPEPNTVSYSQSSLIHLVGPSDCTLHGFVHGGVTMKLMDEVAGIVAARHCKTNIVTASVDAINFHDKIRKGCVITISGRMTFTSNKSMEIEVLVDADPVVDSSQKRYRAASAFFTYVSLSQEGRSLPVPQLVPETEDEKKRFEEGKGRYLQMKAKRQGHAEPQP

SEQ ID NO: 2075 - protein, 350 aa, Homo sapiens
  Payload ID: 526;
  Gene Symbol: ACOT7;
  Gene Name: acyl-CoA thioesterase 7;
  Uniprot ID:  O00154;
  ENSP ID: ENSP00000367076
MLLLRRSLSLNVLRKEVDRACFGEKAKQIMRPDDANVAGNVHGGTILKMIEEAGAIISTRHCNSQNGERCVAALARVERTDFLSPMCIGEVAHVSAEITYTSKHSVEVQVNVMSENILTGAKKLTNKATLWYVPLSLKNVDKVLEVPPVVYSRQEQEEEGRKRYEAQKLERMETKWRNGDIVQPVLNPEPNTVSYSQSSLIHLVGPSDCTLHGFVHGGVTMKLMDEVAGIVAARHCKTNIVTASVDAINFHDKIRKGCVITISGRMTFTSNKSMEIEVLVDADPVVDSSQKRYRAASAFFTYVSLSQEGRSLPVPQLVPETEDEKKRFEEGKGRYLQMKAKRQGHAEPQP

SEQ ID NO: 2076 - protein, 380 aa, Homo sapiens
  Payload ID: 526;
  Gene Symbol: ACOT7;
  Gene Name: acyl-CoA thioesterase 7;
  Uniprot ID:  O00154;
  ENSP ID: ENSP00000367086
MKLLARALRLCEFGRQASSRRLVAGQGCVGPRRGCCAPVQVVGPRADLPPCGACITGRIMRPDDANVAGNVHGGTILKMIEEAGAIISTRHCNSQNGERCVAALARVERTDFLSPMCIGEVAHVSAEITYTSKHSVEVQVNVMSENILTGAKKLTNKATLWYVPLSLKNVDKVLEVPPVVYSRQEQEEEGRKRYEAQKLERMETKWRNGDIVQPVLNPEPNTVSYSQSSLIHLVGPSDCTLHGFVHGGVTMKLMDEVAGIVAARHCKTNIVTASVDAINFHDKIRKGCVITISGRMTFTSNKSMEIEVLVDADPVVDSSQKRYRAASAFFTYVSLSQEGRSLPVPQLVPETEDEKKRFEEGKGRYLQMKAKRQGHAEPQP

SEQ ID NO: 2077 - protein, 283 aa, Homo sapiens
  Payload ID: 526;
  Gene Symbol: ACOT7;
  Gene Name: acyl-CoA thioesterase 7;
  Uniprot ID:  O00154;
  ENSP ID: ENSP00000367091
MSGPDVETPSAIQICRIMRPDDANVAGNVHGGTILKMIEEAGAIISTRHCNSQNGERCVAALARVERTDFLSPMCIGEVAHVSAEITYTSKHSVEVQVNVMSENILTGAKKLTNKATLWYVPLSLKNVDKVLEVPPVVYSRQEQEEEGRKRYEAQKLERMETKWRNGDIVQPVLNPEPNTVSYSQSSLIHLVGPSDCTLHGFVHGGVTMKLMDEVAGIVAARHCKTNIVTASVDAINFHDKIRKAHVMPAGADHTAPSSSPSTGTKCSLLRHHHLGTHDLHEQ

SEQ ID NO: 2078 - protein, 246 aa, Homo sapiens
  Payload ID: 526;
  Gene Symbol: ACOT7;
  Gene Name: acyl-CoA thioesterase 7;
  Uniprot ID:  O00154;
  ENSP ID: ENSP00000402532
MSGPDVETPSAIQICRIMRPDDANVAGNVHGGTILKMIEEAGAIISTRHCNSQNGERCVAALARVERTDFLSPMCIGEVAHVSAEITYTSKHSVEVQVNVMSENILTGAKKLTNKATLWYVPLSLKNVDKVLEVPPVVYSRQEQEEEGRKRYEAQKLERMETKWRNGDIVQPVLNPEPNTVSYSQSSLIHLVGPSDCTLHGFVHGGVTMKLMDEVAGIVAARHCKTNIVTASVDAINFHDKIRKAP

SEQ ID NO: 2079 - protein, 370 aa, Homo sapiens; identical to SEQ ID NO: 2073
  Payload ID: 526;
  Gene Symbol: ACOT7;
  Gene Name: acyl-CoA thioesterase 7;
  Uniprot ID:  O00154;
  ENSP ID: ENSP00000439218

SEQ ID NO: 2080 - protein, 279 aa, Homo sapiens
  Payload ID: 526;
  Gene Symbol: ACOT7;
  Gene Name: acyl-CoA thioesterase 7;
  ENSP ID: ENSP00000465719
MRPDDANVAGNVHGGTILKMIEEAGAIISTRHCNSQNGERCVAALARVERTDFLSPMCIGEVAHVSAEITYTSKHSVEVQVNVMSENILTGAKKLTNKATLWYVPLSLKNVDKVLEVPPVVYSRQEQEEEGRKRYEAQKLERMETKWRNGDIVQPVLNPEPNTVSYSQSSLIHLVGPSDCTLHGFVHGGVTMKLMDEVAGIVAARHCKTNIVTASVDAINFHDKIRKGCVITISGRMTFTSNKSMEIEVLVDADPVVDSSQKRYRAASAFFTYVSLSQE

SEQ ID NO: 2081 - protein, 338 aa, Homo sapiens
  Payload ID: 526;
  Gene Symbol: ACOT7;
  Gene Name: acyl-CoA thioesterase 7;
  Uniprot ID:  O00154;
  ENSP ID: ENSP00000476610
MSGPDVETPSAIQICRIMRPDDANVAGNVHGGTILKMIEEAGAIISTRHCNSQNGERCVAALARVERTDFLSPMCIGEVAHVSAEITYTSKHSVEVQVNVMSENILTGAKKLTNKATLWYVPLSLKNVDKVLEVPPVVYSRQEQEEEGRKRYEAQKLERMETKWRNGDIVQPVLNPEPNTVSYSQSSLIHLVGPSDCTLHGFVHGGVTMKLMDEVAGIVAARHCKTNIVTASVDAINFHDKIRKGCVITISGRMTFTSNKSMEIEVLVDADPVVDSSQKRYRAASAFFTYVSLSQEGRSLPVPQLVPETEDEKKRFEEGKGRYLQMKAKRQGHAEPQP

SEQ ID NO: 2082 - protein, 319 aa, Homo sapiens
  Payload ID: 527;
  Gene Symbol: ACOT8;
  Gene Name: acyl-CoA thioesterase 8;
  Uniprot ID:  O14734;
  ENSP ID: ENSP00000217455
MSSPQAPEDGQGCGDRGDPPGDLRSVLVTTVLNLEPLDEDLFRGRHYWVPAKRLFGGQIVGQALVAAAKSVSEDVHVHSLHCYFVRAGDPKLPVLYQVERTRTGSSFSVRSVKAVQHGKPIFICQASFQQAQPSPMQHQFSMPTVPPPEELLDCETLIDQYLRDPNLQKRYPLALNRIAAQEVPIEIKPVNPSPLSQLQRMEPKQMFWVRARGYIGEGDMKMHCCVAAYISDYAFLGTALLPHQWQHKVHFMVSLDHSMWFHAPFRADHWMLYECESPWAGGSRGLVHGRLWRQDGVLAVTCAQEGVIRVKPQVSESKL

SEQ ID NO: 2083 - protein, 74 aa, Homo sapiens
  Payload ID: 527;
  Gene Symbol: ACOT8;
  Gene Name: acyl-CoA thioesterase 8;
  ENSP ID: ENSP00000403862
  MOD_RES (1)..(1): Any amino acid
XLFRGRHYWVPAKRLFGGQIVGQALVAAAKSVSEDVHVHSLHCYFVRAEQMPSCVLRRSPAEKSLWTFTVCDLY

SEQ ID NO: 2084 - protein, 92 aa, Homo sapiens
  Payload ID: 527;
  Gene Symbol: ACOT8;
  Gene Name: acyl-CoA thioesterase 8;
  ENSP ID: ENSP00000416217
SPQAPEDGQGCGDRGDPPGDLRSVLVTTVLNLEPLDEDLFRGRHYWVPAKRLFGGQIVGQALVAAAKSVSEDVHVHSLHCYFVRADALMCSA

SEQ ID NO: 2085 - protein, 209 aa, Homo sapiens [sequence omitted]

SEQ ID NO: 2086 - protein, 94 aa, Homo sapiens
  Payload ID: 527;
  Gene Symbol: ACOT8;
  Gene Name: acyl-CoA thioesterase 8;
  ENSP ID: ENSP00000431175
MSSPQAPEDGQGCGDRGDPPGDLRSVLVTTVLNLEPLDEDLFRGRHYWVPAKRLFGGQIVGQALVAAAKSVSEDVHVHSLHCYFVRADALMCSA

SEQ ID NO: 2087 - protein, 132 aa, Homo sapiens
  Payload ID: 527;
  Gene Symbol: ACOT8;
  Gene Name: acyl-CoA thioesterase 8;
  ENSP ID: ENSP00000433923
MSSPQAPEDGQGCGDRGDPPGDLRSVLVTTVLNLEPLDEDLFRGRHYWVPAKRLFGGQIVGQALVAAAKSVSEDVHVHSLHCYFVRAEQMPSCVLRRSPAEKSLWTFTGTRSCQYCTKWSGHEQGRASRCAL

SEQ ID NO: 2088 - protein, 171 aa, Homo sapiens
  Payload ID: 527;
  Gene Symbol: ACOT8;
  Gene Name: acyl-CoA thioesterase 8;
  ENSP ID: ENSP00000434216
MSSPQAPEDGQGCGDRGDPPGDLRSVLVTTVLNLEPLDEDLFRDPNLQKRYPLALNRIAAQEVPIEIKPVNPSPLSQLQRMEPKQMFWVRARGYIGEGDMKMHCCVAAYISDYAFLGTALLPHQWQHKVHFMVSLDHSMWFHAPFRADHWMLYECESPWAGFGIFIFKMRG

SEQ ID NO: 2089 - protein, 107 aa, Homo sapiens
  Payload ID: 527;
  Gene Symbol: ACOT8;
  Gene Name: acyl-CoA thioesterase 8;
  ENSP ID: ENSP00000435115
MSSPQAPEDGQGCGDRGDPPGDLRSVLVTTVLNLEPLDEDLFRGPEAASTVPSGADTNRVELLGALCEGRATWEAHLHLPGLLPAGPAQPHAAPVLHAHCATTRRAA

SEQ ID NO: 2090 - protein, 226 aa, Homo sapiens
  Payload ID: 527;
  Gene Symbol: ACOT8;
  Gene Name: acyl-CoA thioesterase 8;
  ENSP ID: ENSP00000435581
MSSPQAPEDGQGCGDRGDPPGDLRSVLVTTVLNLEPLDEDLFRGRHYWVPAKRLFGGQIVGQALVAAAKSVSEDVHVHSLHCYFVRAGDPKLPVLYQVERTRTGSSFSVRSVKAVQHGKPIFICQASFQQAQPSPMQHQFSMPTVPPPEELLDCETLIDQYLRDPNLQKRYPLALNRIAAQEVPIEIKPVNPSPLSQLQRMEPKQMFWVRARGYIGPELESPGAQG

SEQ ID NO: 2091 - protein, 439 aa, Homo sapiens
  Payload ID: 528;
  Gene Symbol: ACOT9;
  Gene Name: acyl-CoA thioesterase 9;
  Uniprot ID:  Q9Y305;
  ENSP ID: ENSP00000336580
MRRAALRLCALGKGQLTPGRGLTQGPQNPKKQGIFHIHEVRDKLREIVGASTNWRDHVKAMEERKLLHSFLAKSQDGLPPRRMKDSYIEVLLPLGSEPELREKYLTVQNTVRFGRILEDLDSLGVLICYMHNKIHSAKMSPLSIVTALVDKIDMCKKSLSPEQDIKFSGHVSWVGKTSMEVKMQMFQLHGDEFCPVLDATFVMVARDSENKGPAFVNPLIPESPEEEELFRQGELNKGRRIAFSSTSLLKMAPSAEERTTIHEMFLSTLDPKTISFRSRVLPSNAVWMENSKLKSLEICHPQERNIFNRIFGGFLMRKAYELAWATACSFGGSRPFVVAVDDIMFQKPVEVGSLLFLSSQVCFTQNNYIQVRVHSEVASLQEKQHTTTNVFHFTFMSEKEVPLVFPKTYGESMLYLDGQRHFNSMSGPATLRKDYLVEP

SEQ ID NO: 2092 - protein, 379 aa, Homo sapiens
  Payload ID: 528;
  Gene Symbol: ACOT9;
  Gene Name: acyl-CoA thioesterase 9;
  Uniprot ID:  Q9Y305;
  ENSP ID: ENSP00000368597
MEERKLLHSFLAKSQDGLPPRRMKDSYIEVLLPLGSEPELREKYLTVQNTVRFGRILEDLDSLGVLICYMHNKIHSAKMSPLSIVTALVDKIDMCKKSLSPEQDIKFSGHVSWVGKTSMEVKMQMFQLHGDEFCPVLDATFVMVARDSENKGPAFVNPLIPESPEEEELFRQGELNKGRRIAFSSTSLLKMAPSAEERTTIHEMFLSTLDPKTISFRSRVLPSNAVWMENSKLKSLEICHPQERNIFNRIFGGFLMRKAYELAWATACSFGGSRPFVVAVDDIMFQKPVEVGSLLFLSSQVCFTQNNYIQVRVHSEVASLQEKQHTTTNVFHFTFMSEKEVPLVFPKTYGESMLYLDGQRHFNSMSGPATLRKDYLVEP

SEQ ID NO: 2093 - protein, 448 aa, Homo sapiens
  Payload ID: 528;
  Gene Symbol: ACOT9;
  Gene Name: acyl-CoA thioesterase 9;
  Uniprot ID:  Q9Y305;
  ENSP ID: ENSP00000368605
MRRAALRLCALGKGQLTPGRGLTQGPQNPKKQGIFHIHEACSSIHVNHVRDKLREIVGASTNWRDHVKAMEERKLLHSFLAKSQDGLPPRRMKDSYIEVLLPLGSEPELREKYLTVQNTVRFGRILEDLDSLGVLICYMHNKIHSAKMSPLSIVTALVDKIDMCKKSLSPEQDIKFSGHVSWVGKTSMEVKMQMFQLHGDEFCPVLDATFVMVARDSENKGPAFVNPLIPESPEEEELFRQGELNKGRRIAFSSTSLLKMAPSAEERTTIHEMFLSTLDPKTISFRSRVLPSNAVWMENSKLKSLEICHPQERNIFNRIFGGFLMRKAYELAWATACSFGGSRPFVVAVDDIMFQKPVEVGSLLFLSSQVCFTQNNYIQVRVHSEVASLQEKQHTTTNVFHFTFMSEKEVPLVFPKTYGESMLYLDGQRHFNSMSGPATLRKDYLVEP

SEQ ID NO: 2094 - protein, 136 aa, Homo sapiens
  Payload ID: 528;
  Gene Symbol: ACOT9;
  Gene Name: acyl-CoA thioesterase 9;
  ENSP ID: ENSP00000417778
MEERKLLHSFLAKSQDGLPPRRMKDSYIEVLLPLGSEPELREKYLTVQNTVRFGRILEDLDSLGVLICYMHNKIHSAKMSPLSIVTALVDKIDMCKKSLSPEQDIKFSGHVSWVGKTSMEVKMQMFQAGICKSTHP

SEQ ID NO: 2095 - protein, 46 aa, Homo sapiens
  Payload ID: 528;
  Gene Symbol: ACOT9;
  Gene Name: acyl-CoA thioesterase 9;
  ENSP ID: ENSP00000420238
MRRAALRLCALGKGQLTPGRGLTQGPQNPKKQGIFHIHEGKHGVSV

SEQ ID NO: 2096 - protein, 264 aa, Homo sapiens
  Payload ID: 528;
  Gene Symbol: ACOT9;
  Gene Name: acyl-CoA thioesterase 9;
  ENSP ID: ENSP00000420490
IVGASTNWRDHVKAMEERKLLHSFLAKSQDGLPPRRMKDSYIEVLLPLGSEPELREKYLTVQNTVRFGRILEDLDSLGDMCKKSLSPEQDIKFSGHVSWVGKTSMEVKMQMFQLHGDEFCPVLDATFVMVARDSENKGPAFVNPLIPESPEEEELFRQGELNKGRRIAFSSTSLLKMAPSAEERTTIHEMFLSTLDPKTISFRSRVLPSNAVWMENSKLKSLEICHPQERNIFNRIFGGFLMRKAYELAWATACSFGGSRPFVV

SEQ ID NO: 2097 - protein, 328 aa, Homo sapiens
  Payload ID: 529;
  Gene Symbol: AWAT1;
  Gene Name: acyl-CoA wax alcohol acyltransferase 1;
  Uniprot ID:  Q58HT5;
  ENSP ID: ENSP00000363645
MAHSKQPSHFQSLMLLQWPLSYLAIFWILQPLFVYLLFTSLWPLPVLYFAWLFLDWKTPERGGRRSAWVRNWCVWTHIRDYFPITILKTKDLSPEHNYLMGVHPHGLLTFGAFCNFCTEATGFSKTFPGITPHLATLSWFFKIPFVREYLMAKGVCSVSQPAINYLLSHGTGNLVGIVVGGVGEALQSVPNTTTLILQKRKGFVRTALQHGAHLVPTFTFGETEVYDQVLFHKDSRMYKFQSCFRRIFGFYCCVFYGQSFCQGSTGLLPYSRPIVTVVGEPLPLPQIEKPSQEMVDKYHALYMDALHKLFDQHKTHYGCSETQKLFFL

SEQ ID NO: 2098 - protein, 333 aa, Homo sapiens
  Payload ID: 530;
  Gene Symbol: AWAT2;
  Gene Name: acyl-CoA wax alcohol acyltransferase 2;
  Uniprot ID:  Q6E213;
  ENSP ID: ENSP00000421172
MLLPSKKDLKTALDVFAVFQWSFSALLITTTVIAVNLYLVVFTPYWPVTVLILTWLAFDWKTPQRGGRRFTCVRHWRLWKHYSDYFPLKLLKTHDICPSRNYILVCHPHGLFAHGWFGHFATEASGFSKIFPGITPYILTLGAFFWMPFLREYVMSTGACSVSRSSIDFLLTHKGTGNMVIVVIGGLAECRYSLPGSSTLVLKNRSGFVRMALQHGVPLIPAYAFGETDLYDQHIFTPGGFVNRFQKWFQSMVHIYPCAFYGRGFTKNSWGLLPYSRPVTTIVGEPLPMPKIENPSQEIVAKYHTLYIDALRKLFDQHKTKFGISETQELEII

SEQ ID NO: 2099 - protein, 166 aa, Homo sapiens
  Payload ID: 530;
  Gene Symbol: AWAT2;
  Gene Name: acyl-CoA wax alcohol acyltransferase 2;
  ENSP ID: ENSP00000427523
EASGFSKIFPGITPYILTLGAFFWMPFLREYVMSTGACSVSRSSIDFLLTHKGTGNMVIVVIGGLAECRYSLPGSSTLVLKNRSGFVRMALQHGQPGVGHGAPTLNLDLGTAGLGSEKPVGRPRDHAPSACLAFDKVPTFLGFRRYAFALQGASNTCLCLWGDGPL

SEQ ID NO: 2100 - protein, 422 aa, Homo sapiens
  Payload ID: 531;
  Gene Symbol: AGK;
  Gene Name: acylglycerol kinase;
  Uniprot ID:  Q53H12;
  ENSP ID: ENSP00000347581
MTVFFKTLRNHWKKTTAGLCLLTWGGHWLYGKHCDNLLRRAACQEAQVFGNQLIPPNAQVKKATVFLNPAACKGKARTLFEKNAAPILHLSGMDVTIVKTDYEGQAKKLLELMENTDVIIVAGGDGTLQEVVTGVLRRTDEATFSKIPIGFIPLGETSSLSHTLFAESGNKVQHITDATLAIVKGETVPLDVLQIKGEKEQPVFAMTGLRWGSFRDAGVKVSKYWYLGPLKIKAAHFFSTLKEWPQTHQASISYTGPTERPPNEPEETPVQRPSLYRRILRRLASYWAQPQDALSQEVSPEVWKDVQLSTIELSITTRNNQLDPTSKEDFLNICIEPDTISKGDFITIGSRKVRNPKLHVEGTECLQASQCTLLIPEGAGGSFSIDSEEYEAMPVEVKLLPRKLQFFCDPRKREQMLTSPTQ

SEQ ID NO: 2101 - protein, 244 aa, Homo sapiens
  Payload ID: 531;
  Gene Symbol: AGK;
  Gene Name: acylglycerol kinase;
  ENSP ID: ENSP00000418101
MTVFFKTLRNHWKKTTAGLCLLTWGGHWLYGKHCDNLLRRAACQEAQVFGNQLIPPNAQVKKATVFLNPAACKGTLFEKNAAPILHLSGMDVTIVKTDYEGQAKKLLELMENTDVIIVAGGDGTLQEVVTGVLRRTDEATFSKIPIGFIPLGETSSLSHTLFAESGNKVQHITDATLAIVKGETVPLDVLQIKGEKEQPVFAMTGLRWGSFRDAGVKVSKYWYLGPLKIKAAHFFSTLKPFPKR

SEQ ID NO: 2102 - protein, 65 aa, Homo sapiens
  Payload ID: 531;
  Gene Symbol: AGK;
  Gene Name: acylglycerol kinase;
  Uniprot ID:  Q53H12;
  ENSP ID: ENSP00000418789
MTVFFKTLRNHWKKTTAGLCLLTWGGHWLYGKHCDNLLRRAACQEAQHYQDESRWEPTLSRTPGS

SEQ ID NO: 2103 - protein, 46 aa, Homo sapiens
  Payload ID: 531;
  Gene Symbol: AGK;
  Gene Name: acylglycerol kinase;
  ENSP ID: ENSP00000420540
MTVFFKTLRNHWKKTTAGLCLLTWGGHWLYGKHWCLAINSFLPMHK

SEQ ID NO: 2104 - protein, 394 aa, Homo sapiens
  Payload ID: 531;
  Gene Symbol: AGK;
  Gene Name: acylglycerol kinase;
  ENSP ID: ENSP00000420776
MENTDSDNLLRRAACQEAQVFGNQLIPPNAQVKKATVFLNPAACKGKARTLFEKNAAPILHLSGMDVTIVKTDYEGQAKKLLELMENTDVIIVAGGDGTLQEVVTGVLRRTDEATFSKIPIGFIPLGETSSLSHTLFAESGNKVQHITDATLAIVKGETVPLDVLQIKGEKEQPVFAMTGLRWGSFRDAGVKVSKYWYLGPLKIKAAHFFSTLKEWPQTHQASISYTGPTERPPNEPEETPVQRPSLYRRILRRLASYWAQPQDALSQEVSPEVWKDVQLSTIELSITTRNNQLDPTSKEDFLNICIEPDTISKGDFITIGSRKVRNPKLHVEGTECLQASQCTLLIPEGAGGSFSIDSEEYEAMPVEVKLLPRKLQFFCDPRKREQMLTSPTQ

SEQ ID NO: 2105 - protein, 226 aa, Homo sapiens
  Payload ID: 531;
  Gene Symbol: AGK;
  Gene Name: acylglycerol kinase;
  Uniprot ID:  Q53H12;
  ENSP ID: ENSP00000458417
GEKEQPVFAMTGLRWGSFRDAGVKVSKYWYLGPLKIKAAHFFSTLKEWPQTHQASISYTGPTERPPNEPEETPVQRPSLYRRILRRLASYWAQPQDALSQEVSPEVWKDVQLSTIELSITTRNNQLDPTSKEDFLNICIEPDTISKGDFITIGSRKVRNPKLHVEGTECLQASQCTLLIPEGAGGSFSIDSEEYEAMPVEVKLLPRKLQFFCDPRKREQMLTSPTQ

SEQ ID NO: 2106 - protein, 51 aa, Homo sapiens
  Payload ID: 531;
  Gene Symbol: AGK;
  Gene Name: acylglycerol kinase;
  ENSP ID: ENSP00000459752
GEKEQPVFAMTGLRWGSFRDAGVKVSKYWYLGPLKIKAAHFFSTLKPFPKR

SEQ ID NO: 2107 - protein, 226 aa, Homo sapiens; identical to SEQ ID NO: 2105
  Payload ID: 531;
  Gene Symbol: AGK;
  Gene Name: acylglycerol kinase;
  ENSP ID: ENSP00000461611

SEQ ID NO: 2108 - protein, 244 aa, Homo sapiens; identical to SEQ ID NO: 2101
  Payload ID: 531;
  Gene Symbol: AGK;
  Gene Name: acylglycerol kinase;
  ENSP ID: ENSP00000487274

SEQ ID NO: 2109 - protein, 108 aa, Homo sapiens
  Payload ID: 532;
  Gene Symbol: AOAH;
  Gene Name: acyloxyacyl hydrolase (neutrophil);
  ENSP ID: ENSP00000416051
MQSPWKILTVAPLFLLLSLQSSASPANDDQSRPSLSNGHTCVEKLFLKTTCYLVIDKFGSDIIKLLSADMNADVVCHTLEFCKQNTGQPLCHLYPLPKETWKFTLQKA

SEQ ID NO: 2110 - protein, 52 aa, Homo sapiens
  Payload ID: 532;
  Gene Symbol: AOAH;
  Gene Name: acyloxyacyl hydrolase (neutrophil);
  ENSP ID: ENSP00000416472
MQSPWKILTVAPLFLLLSLQSSASPANDDQSRPSLSNGHTCVASSAEKPQLS

SEQ ID NO: 2111 - protein, 688 aa, Homo sapiens
  Payload ID: 532;
  Gene Symbol: AOAH;
  Gene Name: acyloxyacyl hydrolase (neutrophil);
  ENSP ID: ENSP00000479664
MQSPWKILTVAPLFLLLSLQSSASPANDDQSRPSLSNGHTCVGCVLVVSVIEQLAQVHNSTVQASMERLCSYLPEKLFLKTTCYLVIDKFGSDIIKLLSADMNADVVCHTLEFCKQNTGQPLCHLYPLPKETWKFTLQKARQIVKKSPILKYSRSGSDICSLPVLAKICQKIKLAMEQSVPFKDVDSDKYSVFPTLRGYHWRGRDCNDSDESVYPGRRPNNWDVHQDSNCNGIWGVDPKDGVPYEKKFCEGSQPRGIILLGDSAGAHFHISPEWITASQMSLNSFINLPTALTNELDWPQLSGATGFLDSTVGIKEKSIYLRLWKRNHCNHRDYQNISRNGASSRNLKKFIESLSRNKVLDYPAIVIYAMIGNDVCSGKSDPVPAMTTPEKLYSNVMQTLKHLNSHLPNGSHVILYGLPDGTFLWDNLHNRYHPLGQLNKDMTYAQLYSFLNCLQVSPCHGWMSSNKTLRTLTSERAEQLSNTLKKIAASEKFTNFNLFYMDFAFHEIIQEWQKRGGQPWQLIEPVDGFHPNERKSILLKGILMTSQTLDNQEWTQLTSWIKGNLTCDSRTREWLCCCWRIISGKRCSSSGPKSWERRIRSTPRLNRCLETKAGTEPLRSMHPWGAQGGRGLGKLIPQTLWGLPRHRPKGLFFSSIFAKCLSLNEEHIWTTVQCCVLPGSVTLPLFLK

SEQ ID NO: 2112 - protein, 575 aa, Homo sapiens
  Payload ID: 532;
  Gene Symbol: AOAH;
  Gene Name: acyloxyacyl hydrolase (neutrophil);
  Uniprot ID:  P28039;
  ENSP ID: ENSP00000483783
MQSPWKILTVAPLFLLLSLQSSASPANDDQSRPSLSNGHTCVGCVLVVSVIEQLAQVHNSTVQASMERLCSYLPEKLFLKTTCYLVIDKFGSDIIKLLSADMNADVVCHTLEFCKQNTGQPLCHLYPLPKETWKFTLQKARQIVKKSPILKYSRSGSDICSLPVLAKICQKIKLAMEQSVPFKDVDSDKYSVFPTLRGYHWRGRDCNDSDESVYPGRRPNNWDVHQDSNCNGIWGVDPKDGVPYEKKFCEGSQPRGIILLGDSAGAHFHISPEWITASQMSLNSFINLPTALTNELDWPQLSGATGFLDSTVGIKEKSIYLRLWKRNHCNHRDYQNISRNGASSRNLKKFIESLSRNKVLDYPAIVIYAMIGNDVCSGKSDPVPAMTTPEKLYSNVMQTLKHLNSHLPNGSHVILYGLPDGTFLWDNLHNRYHPLGQLNKDMTYAQLYSFLNCLQVSPCHGWMSSNKTLRTLTSERAEQLSNTLKKIAASEKFTNFNLFYMDFAFHEIIQEWQKRGGQPWQLIEPVDGFHPNEVALLLLADHFWKKVQLQWPQILGKENPFNPQIKQVFGDQGGH

SEQ ID NO: 2113 - protein, 543 aa, Homo sapiens
  Payload ID: 532;
  Gene Symbol: AOAH;
  Gene Name: acyloxyacyl hydrolase (neutrophil);
  Uniprot ID:  P28039;
  ENSP ID: ENSP00000484305
MQSPWKILTVAPLFLLLSLQSSASPANDDQSRPSLSNGHTCVEKLFLKTTCYLVIDKFGSDIIKLLSADMNADVVCHTLEFCKQNTGQPLCHLYPLPKETWKFTLQKARQIVKKSPILKYSRSGSDICSLPVLAKICQKIKLAMEQSVPFKDVDSDKYSVFPTLRGYHWRGRDCNDSDESVYPGRRPNNWDVHQDSNCNGIWGVDPKDGVPYEKKFCEGSQPRGIILLGDSAGAHFHISPEWITASQMSLNSFINLPTALTNELDWPQLSGATGFLDSTVGIKEKSIYLRLWKRNHCNHRDYQNISRNGASSRNLKKFIESLSRNKVLDYPAIVIYAMIGNDVCSGKSDPVPAMTTPEKLYSNVMQTLKHLNSHLPNGSHVILYGLPDGTFLWDNLHNRYHPLGQLNKDMTYAQLYSFLNCLQVSPCHGWMSSNKTLRTLTSERAEQLSNTLKKIAASEKFTNFNLFYMDFAFHEIIQEWQKRGGQPWQLIEPVDGFHPNEVALLLLADHFWKKVQLQWPQILGKENPFNPQIKQVFGDQGGH

SEQ ID NO: 2114 - protein, 99 aa, Homo sapiens
  Payload ID: 533;
  Gene Symbol: ACYP1;
  Gene Name: acylphosphatase 1, erythrocyte (common) type;
  Uniprot ID:  P07311;
  ENSP ID: ENSP00000238618
MAEGNTLISVDYEIFGKVQGVFFRKHTQAEGKKLGLVGWVQNTDRGTVQGQLQGPISKVRHMQEWLETRGSPKSHIDKANFNNEKVILKLDYSDFQIVK

SEQ ID NO: 2115 - protein, 55 aa, Homo sapiens
  Payload ID: 533;
  Gene Symbol: ACYP1;
  Gene Name: acylphosphatase 1, erythrocyte (common) type;
  Uniprot ID:  P07311;
  ENSP ID: ENSP00000350655
MAEGNTLISVDYEIFGKVQGVFFRKHTQEMTVENRIAETHSKSCVPVSFATSYAG

SEQ ID NO: 2116 - protein, 129 aa, Homo sapiens
  Payload ID: 533;
  Gene Symbol: ACYP1;
  Gene Name: acylphosphatase 1, erythrocyte (common) type;
  ENSP ID: ENSP00000450873
MPASARLAGAGLLLAFLRALGCAGRAPGLSMAEGNTLISVDYEIFGKVQGVFFRKHTQAEGKKLGLVGWVQNTDRGTVQGQLQGPISKVRHMQEWLETRGSPKSHIDKANFNNEKVILKLDYSDFQIVK

SEQ ID NO: 2117 - protein, 37 aa, Homo sapiens
  Payload ID: 533;
  Gene Symbol: ACYP1;
  Gene Name: acylphosphatase 1, erythrocyte (common) type;
  ENSP ID: ENSP00000451220
MAEGNTLISVDYEIFGKVQGVFFRKHTQVCGLQALGW

SEQ ID NO: 2118 - protein, 99 aa, Homo sapiens; identical to SEQ ID NO: 2114
  Payload ID: 533;
  Gene Symbol: ACYP1;
  Gene Name: acylphosphatase 1, erythrocyte (common) type;
  Uniprot ID:  P07311;
  ENSP ID: ENSP00000451581

SEQ ID NO: 2119 - protein, 62 aa, Homo sapiens
  Payload ID: 533;
  Gene Symbol: ACYP1;
  Gene Name: acylphosphatase 1, erythrocyte (common) type;
  ENSP ID: ENSP00000452249
MAEGNTLISVDYEIFGKVQGVFFRKHTQEMTVENRIAETHSKSCVPVSFATSYAGINEFKRI

SEQ ID NO: 2120 - protein, 98 aa, Homo sapiens
  Payload ID: 534;
  Gene Symbol: ACYP2;
  Gene Name: acylphosphatase 2, muscle type;
  ENSP ID: ENSP00000306448
MCPLPLAAAAVAAPRAPLRLLNRGLAAAMSTAQSLKSVDYEVFGRVQGVCFRMYTEDEARKIGVVGWVKNTSKGTVTGQVQGPEDKVNSMNSSAPEAG

SEQ ID NO: 2121 - protein, 99 aa, Homo sapiens
  Payload ID: 534;
  Gene Symbol: ACYP2;
  Gene Name: acylphosphatase 2, muscle type;
  Uniprot ID:  P14621;
  ENSP ID: ENSP00000378161
MSTAQSLKSVDYEVFGRVQGVCFRMYTEDEARKIGVVGWVKNTSKGTVTGQVQGPEDKVNSMKSWLSKVGSPSSRIDRTNFSNEKTISKLEYSNFSIRY

SEQ ID NO: 2122 - protein, 97 aa, Homo sapiens
  Payload ID: 534;
  Gene Symbol: ACYP2;
  Gene Name: acylphosphatase 2, muscle type;
  ENSP ID: ENSP00000385674
MCPLPLAAAAVAAPRAPLRLLNRGLAAAMSTAQSLKSVDYEVFGRVQGVCFRMYTEDEARKIGVVGWVKNTSKGTVTGQVQGPEDKVNSMLECSGLI

SEQ ID NO: 2123 - protein, 66 aa, Homo sapiens
  Payload ID: 534;
  Gene Symbol: ACYP2;
  Gene Name: acylphosphatase 2, muscle type;
  ENSP ID: ENSP00000475312
  MOD_RES (1)..(1): Any amino acid
XAQSLKSVDYEVFGRVQGVCFRMYTEDEARKIGVVGWVKNTSKGTVTGQVQGPEDKVNSILAFPFY

SEQ ID NO: 2124 - protein, 83 aa, Homo sapiens
  Payload ID: 534;
  Gene Symbol: ACYP2;
  Gene Name: acylphosphatase 2, muscle type;
  ENSP ID: ENSP00000475333
MTALVLQIEYTEDEARKIGVVGWVKNTSKGTVTGQVQGPEDKVNSMKSWLSKVGSPSSRIDRTNFSNEKTISKLEYSNFSIRY

SEQ ID NO: 2125 - protein, 40 aa, Homo sapiens
  Payload ID: 534;
  Gene Symbol: ACYP2;
  Gene Name: acylphosphatase 2, muscle type;
  ENSP ID: ENSP00000475424
MLLTQSLFGGLFPRTRETMRREAVPDDNELPRNKHLNWKS

SEQ ID NO: 2126 - protein, 116 aa, Homo sapiens
  Payload ID: 534;
  Gene Symbol: ACYP2;
  Gene Name: acylphosphatase 2, muscle type;
  ENSP ID: ENSP00000475658
MLLTQSLFGGLFPRTRETMRRYKVSLFYLGCSRTPNVKLSSCLGLPCCWDYSYKFIQLSEFGFGQVIIVSEEPWKENISCSSTTFIKSTICLNPDSEFRPCFNAWLSLIRENAVGL

SEQ ID NO: 2127 - protein, 172 aa, Homo sapiens
  Payload ID: 534;
  Gene Symbol: ACYP2;
  Gene Name: acylphosphatase 2, muscle type;
  ENSP ID: ENSP00000475986
MLLTQSLFGGLFPRTRETMRRYKVSLFYLGCSRTPNVKLSSCLGLPCCWDYSYKFIQLSEFGFGQVIIVSEEPWKENISCSSTTFIKSTICLSVCFRMYTEDEARKIGVVGWVKNTSKGTVTGQVQGPEDKVNSMKSWLSKVGSPSSRIDRTNFSNEKTISKLEYSNFSIRY

SEQ ID NO: 2128 - protein, 97 aa, Homo sapiens
  Payload ID: 535;
  Gene Symbol:;
  Gene Name: AD000671.6;
  ENSP ID: ENSP00000472696
MAEYLASIFGTEKDKVNCSFYFKIGVCRHGDRCSRLHNKPTFSQPCPLSSGPAPFKFCADHSAAQPVPESTEHSPNCRRITLRCSQNCRRSMGRLKR

SEQ ID NO: 2129 - protein, 748 aa, Homo sapiens
  Payload ID: 536;
  Gene Symbol: ADAM10;
  Gene Name: ADAM metallopeptidase domain 10;
  Uniprot ID:  O14672;
  ENSP ID: ENSP00000260408
MVLLRVLILLLSWAAGMGGQYGNPLNKYIRHYEGLSYNVDSLHQKHQRAKRAVSHEDQFLRLDFHAHGRHFNLRMKRDTSLFSDEFKVETSNKVLDYDTSHIYTGHIYGEEGSFSHGSVIDGRFEGFIQTRGGTFYVEPAERYIKDRTLPFHSVIYHEDDINYPHKYGPQGGCADHSVFERMRKYQMTGVEEVTQIPQEEHAANGPELLRKKRTTSAEKNTCQLYIQTDHLFFKYYGTREAVIAQISSHVKAIDTIYQTTDFSGIRNISFMVKRIRINTTADEKDPTNPFRFPNIGVEKFLELNSEQNHDDYCLAYVFTDRDFDDGVLGLAWVGAPSGSSGGICEKSKLYSDGKKKSLNTGIITVQNYGSHVPPKVSHITFAHEVGHNFGSPHDSGTECTPGESKNLGQKENGNYIMYARATSGDKLNNNKFSLCSIRNISQVLEKKRNNCFVESGQPICGNGMVEQGEECDCGYSDQCKDECCFDANQPEGRKCKLKPGKQCSPSQGPCCTAQCAFKSKSEKCRDDSDCAREGICNGFTALCPASDPKPNFTDCNRHTQVCINGQCAGSICEKYGLEECTCASSDGKDDKELCHVCCMKKMDPSTCASTGSVQWSRHFSGRTITLQPGSPCNDFRGYCDVFMRCRLVDADGPLARLKKAIFSPELYENIAEWIVAHWWAVLLMGIALIMLMAGFIKICSVHTPSSNPKLPPPKPLPGTLKRRRPPQPIQQPQRQRPRESYQMGHMRR

SEQ ID NO: 2130 - protein, 71 aa, Homo sapiens
  Payload ID: 536;
  Gene Symbol: ADAM10;
  Gene Name: ADAM metallopeptidase domain 10;
  ENSP ID: ENSP00000386056
MVLLRVLILLLSWAAGMGDRDFDDGVLGLAWVGAPSGSSGGICEKSKLYSDVPTMGKLHSKEKPIKSSSPN

SEQ ID NO: 2131 - protein, 125 aa, Homo sapiens
  Payload ID: 536;
  Gene Symbol: ADAM10;
  Gene Name: ADAM metallopeptidase domain 10;
  ENSP ID: ENSP00000391930
MVLLRVLILLLSWAAGMGGQYGNPLNKYIRHYEGLSYNVDSLHQKHQRAKRAVSHEDQFLRLDFHAHGRHFNLRMKRDTSLFSDEFKVETSNKVLDYDTSHIYTGHIYDYPHKYGPQGGCADHSV

SEQ ID NO: 2132 - protein, 38 aa, Homo sapiens
  Payload ID: 536;
  Gene Symbol: ADAM10;
  Gene Name: ADAM metallopeptidase domain 10;
  ENSP ID: ENSP00000452639
MVLLRVLILLLSWAAGMGVPTMGKLHSKEKPIKSSSPN

SEQ ID NO: 2133 - protein, 115 aa, Homo sapiens
  Payload ID: 536;
  Gene Symbol: ADAM10;
  Gene Name: ADAM metallopeptidase domain 10;
  ENSP ID: ENSP00000452704
MVLLRVLILLLSWAAGMGGQYGNPLNKYIRHYEGLSYNVDSLHQKHQRAKRAVSHEDQFLRLDFHAHGRDGVLPCCPGWSQTPGLKRSTCLSLPQCWDYRCEPSPMISVFDYPHK

SEQ ID NO: 2134 - protein, 148 aa, Homo sapiens
  Payload ID: 536;
  Gene Symbol: ADAM10;
  Gene Name: ADAM metallopeptidase domain 10;
  ENSP ID: ENSP00000453952
MVLLRVLILLLSWAAGMGDRDFDDGVLGLAWVGAPSGSSGGICEKSKLYSDGKKKSLNTGIITVQNYGSHVPPKVSHITFAHEVGHNFGSPHDSGTECTPGESKNLGQKENGNYIMYARATSGDKLNNNKFSLCSIRNISQVLEKKRN

SEQ ID NO: 2135 - protein, 58 aa, Homo sapiens
  Payload ID: 536;
  Gene Symbol: ADAM10;
  Gene Name: ADAM metallopeptidase domain 10;
  ENSP ID: ENSP00000456542
  MOD_RES (1)..(1): Any amino acid
XEEGSFSHGSVIDGRFEGFIQTRGGTFYVEPAERYIKDRTLPFHSVIYHEDDISEGLN

SEQ ID NO: 2136 - protein, 59 aa, Homo sapiens
  Payload ID: 536;
  Gene Symbol: ADAM10;
  Gene Name: ADAM metallopeptidase domain 10;
  ENSP ID: ENSP00000481779
MVLLRVLILLLSWAAGMGAPARWRIPKSSPPPRPAAQTRGKLCCLQLGSCIVLYPARRS

SEQ ID NO: 2137 - protein, 769 aa, Homo sapiens
  Payload ID: 537;
  Gene Symbol: ADAM11;
  Gene Name: ADAM metallopeptidase domain 11;
  Uniprot ID:  O75078;
  ENSP ID: ENSP00000200557
MRLLRRWAFAALLLSLLPTPGLGTQGPAGALRWGGLPQLGGPGAPEVTEPSRLVRESSGGEVRKQQLDTRVRQEPPGGPPVHLAQVSFVIPAFNSNFTLDLELNHHLLSSQYVERHFSREGTTQHSTGAGDHCYYQGKLRGNPHSFAALSTCQGLHGVFSDGNLTYIVEPQEVAGPWGAPQGPLPHLIYRTPLLPDPLGCREPGCLFAVPAQSAPPNRPRLRRKRQVRRGHPTVHSETKYVELIVINDHQLFEQMRQSVVLTSNFAKSVVNLADVIYKEQLNTRIVLVAMETWADGDKIQVQDDLLETLARLMVYRREGLPEPSDATHLFSGRTFQSTSSGAAYVGGICSLSHGGGVNEYGNMGAMAVTLAQTLGQNLGMMWNKHRSSAGDCKCPDIWLGCIMEDTGFYLPRKFSRCSIDEYNQFLQEGGGSCLFNKPLKLLDPPECGNGFVEAGEECDCGSVQECSRAGGNCCKKCTLTHDAMCSDGLCCRRCKYEPRGVSCREAVNECDIAETCTGDSSQCPPNLHKLDGYYCDHEQGRCYGGRCKTRDRQCQVLWGHAAADRFCYEKLNVEGTERGSCGRKGSGWVQCSKQDVLCGFLLCVNISGAPRLGDLVGDISSVTFYHQGKELDCRGGHVQLADGSDLSYVEDGTACGPNMLCLDHRCLPASAFNFSTCPGSGERRICSHHGVCSNEGKCICQPDWTGKDCSIHNPLPTSPPTGETERYKGPSGTNIIIGSIAGAVLVAAIVLGGTGWGFKNIRRGRSGGA

SEQ ID NO: 2138 - protein, 241 aa, Homo sapiens
  Payload ID: 537;
  Gene Symbol: ADAM11;
  Gene Name: ADAM metallopeptidase domain 11;
  ENSP ID: ENSP00000347856
MRLLRRWAFAALLLSLLPTPGLGTQGPAGALRWGGLPQLGGPGAPEVTEPSRLVRESSGGEVRKQQLDTRVRQEPPGGPPVHLAQVSFVIPAFNSNFTLDLELNHHLLSSQYVERHFSREGTTQHSTGAGDHCYYQGKLRGNPHSFAALSTCQGLHGVFSDGNLTYIVEPQEVAGPWGAPQGPLPHLIYRTPLLPDPLGCREPGCLFAVPAQSAPPNRPRLRRKRSAGATLQCTVKPSMWS

SEQ ID NO: 2139 - protein, 569 aa, Homo sapiens
  Payload ID: 537;
  Gene Symbol: ADAM11;
  Gene Name: ADAM metallopeptidase domain 11;
  ENSP ID: ENSP00000443773
MQGTRLPVCCACPVGSSKPAEAEKEKVRRGHPTVHSETKYVELIVINDHQLFEQMRQSVVLTSNFAKSVVNLADVIYKEQLNTRIVLVAMETWADGDKIQVQDDLLETLARLMVYRREGLPEPSDATHLFSGRTFQSTSSGAAYVGGICSLSHGGGVNEYGNMGAMAVTLAQTLGQNLGMMWNKHRSSAGDCKCPDIWLGCIMEDTGFYLPRKFSRCSIDEYNQFLQEGGGSCLFNKPLKLLDPPECGNGFVEAGEECDCGSVQECSRAGGNCCKKCTLTHDAMCSDGLCCRRCKYEPRGVSCREAVNECDIAETCTGDSSQCPPNLHKLDGYYCDHEQGRCYGGRCKTRDRQCQVLWGHAAADRFCYEKLNVEGTERGSCGRKGSGWVQCSKQDVLCGFLLCVNISGAPRLGDLVGDISSVTFYHQGKELDCRGGHVQLADGSDLSYVEDGTACGPNMLCLDHRCLPASAFNFSTCPGSGERRICSHHGVCSNEGKCICQPDWTGKDCSIHNPLPTSPPTGETERYKGPSGTNIIIGSIAGAVLVAAIVLGGTGWGFKNIRRGRSGGA

SEQ ID NO: 2140 - protein, 517 aa, Homo sapiens
  Payload ID: 537;
  Gene Symbol: ADAM11;
  Gene Name: ADAM metallopeptidase domain 11;
  ENSP ID: ENSP00000465537
LLSSQYVERHFSREGTTQHSTGAGDHCYYQGKLRGNPHSFAALSTCQGLHGVFSDGNLTYIVEPQEVAGPWGAPQGPLPHLIYRTPLLPDPLGCREPGCLFAVPAQSAPPNRPRLRRKRQVRRGHPTVHSETKYVELIVINDHQLFEQMRQSVVLTSNFAKSVVNLADVIYKEQLNTRIVLVAMETWADGDKIQVQDDLLETLARLMVYRREGLPEPSDATHLFSGRTFQSTSSGAAYVGGICSLSHGGGVNEYGNMGAMAVTLAQTLGQNLGMMWNKHRSSAGDCKCPDIWLGCIMEDTGFYLPRKFSRCSIDEYNQFLQEGGGSCLFNKPLKLLDPPECGNGFVEAGEECDCGSVQECSRAGGNCCKKCTLTHDAMCSDGLCCRRCKYEPRGVSCREAVNECDIAETCTGDSSQCPPNLHKLDGYYCDHEQGRCYGGRCKTRDRQCQVLWGHAAADRFCYEKLNVEGTERGSCGRKGSGWVQCSKQPQQGRAVWLPPLCQHLWSSSARGPGGRHQ

SEQ ID NO: 2141 - protein, 738 aa, Homo sapiens
  Payload ID: 538;
  Gene Symbol: ADAM12;
  Gene Name: ADAM metallopeptidase domain 12;
  Uniprot ID:  O43184;
  ENSP ID: ENSP00000357665
MAARPLPVSPARALLLALAGALLAPCEARGVSLWNQGRADEVVSASVGSGDLWIPVKSFDSKNHPEVLNIRLQRESKELIINLERNEGLIASSFTETHYLQDGTDVSLARNYTVILGHCYYHGHVRGYSDSAVSLSTCSGLRGLIVFENESYVLEPMKSATNRYKLFPAKKLKSVRGSCGSHHNTPNLAAKNVFPPPSQTWARRHKRETLKATKYVELVIVADNREFQRQGKDLEKVKQRLIEIANHVDKFYRPLNIRIVLVGVEVWNDMDKCSVSQDPFTSLHEFLDWRKMKLLPRKSHDNAQLVSGVYFQGTTIGMAPIMSMCTADQSGGIVMDHSDNPLGAAVTLAHELGHNFGMNHDTLDRGCSCQMAVEKGGCIMNASTGYPFPMVFSSCSRKDLETSLEKGMGVCLFNLPEVRESFGGQKCGNRFVEEGEECDCGEPEECMNRCCNATTCTLKPDAVCAHGLCCEDCQLKPAGTACRDSSNSCDLPEFCTGASPHCPANVYLHDGHSCQDVDGYCYNGICQTHEQQCVTLWGPGAKPAPGICFERVNSAGDPYGNCGKVSKSSFAKCEMRDAKCGKIQCQGGASRPVIGTNAVSIETNIPLQQGGRILCRGTHVYLGDDMPDPGLVLAGTKCADGKICLNRQCQNISVFGVHECAMQCHGRGVCNNRKNCHCEAHWAPPFCDKFGFGGSTDSGPIRQAEARQEAAESNRERGQGQEPVGSQEHASTASLTLI

SEQ ID NO: 2142 - protein, 909 aa, Homo sapiens
  Payload ID: 538;
  Gene Symbol: ADAM12;
  Gene Name: ADAM metallopeptidase domain 12;
  Uniprot ID:  O43184;
  ENSP ID: ENSP00000357668
MAARPLPVSPARALLLALAGALLAPCEARGVSLWNQGRADEVVSASVGSGDLWIPVKSFDSKNHPEVLNIRLQRESKELIINLERNEGLIASSFTETHYLQDGTDVSLARNYTVILGHCYYHGHVRGYSDSAVSLSTCSGLRGLIVFENESYVLEPMKSATNRYKLFPAKKLKSVRGSCGSHHNTPNLAAKNVFPPPSQTWARRHKRETLKATKYVELVIVADNREFQRQGKDLEKVKQRLIEIANHVDKFYRPLNIRIVLVGVEVWNDMDKCSVSQDPFTSLHEFLDWRKMKLLPRKSHDNAQLVSGVYFQGTTIGMAPIMSMCTADQSGGIVMDHSDNPLGAAVTLAHELGHNFGMNHDTLDRGCSCQMAVEKGGCIMNASTGYPFPMVFSSCSRKDLETSLEKGMGVCLFNLPEVRESFGGQKCGNRFVEEGEECDCGEPEECMNRCCNATTCTLKPDAVCAHGLCCEDCQLKPAGTACRDSSNSCDLPEFCTGASPHCPANVYLHDGHSCQDVDGYCYNGICQTHEQQCVTLWGPGAKPAPGICFERVNSAGDPYGNCGKVSKSSFAKCEMRDAKCGKIQCQGGASRPVIGTNAVSIETNIPLQQGGRILCRGTHVYLGDDMPDPGLVLAGTKCADGKICLNRQCQNISVFGVHECAMQCHGRGVCNNRKNCHCEAHWAPPFCDKFGFGGSTDSGPIRQADNQGLTIGILVTILCLLAAGFVVYLKRKTLIRLLFTNKKTTIEKLRCVRPSRPPRGFQPCQAHLGHLGKGLMRKPPDSYPPKDNPRRLLQCQNVDISRPLNGLNVPQPQSTQRVLPPLHRAPRAPSVPARPLPAKPALRQAQGTCKPNPPQKPLPADPLARTTRLTHALARTPGQWETGLRLAPLRPAPQYPHQVPRSTHTAYIK

SEQ ID NO: 2143 - protein, 278 aa, Homo sapiens
  Payload ID: 538;
  Gene Symbol: ADAM12;
  Gene Name: ADAM metallopeptidase domain 12;
  ENSP ID: ENSP00000391268
MAARPLPVSPARALLLALAGALLAPCEARGVSLWNQGRADEVVSASVGSGDLWIPVKSFDSKNHPEVLNIRLQRESKELIINLERNEGLIASSFTETHYLQDGTDVSLARNYTGHCYYHGHVRGYSDSAVSLSTCSGLRGLIVFENESYVLEPMKSATNRYKLFPAKKLKSVRGSCGSHHNTPNLAAKNVFPPPSQTWARRHKRETLKATKYVELVIVADNREFQRQGKDLEKVKQRLIEIANHVDKFYRPLNIRIVLVGVEVWNDMDKCSVSQDPFT

SEQ ID NO: 2144 - protein, 814 aa, Homo sapiens
  Payload ID: 539;
  Gene Symbol: ADAM15;
  Gene Name: ADAM metallopeptidase domain 15;
  Uniprot ID:  Q13444;
  ENSP ID: ENSP00000271836
MRLALLWALGLLGAGSPLPSWPLPNIGGTEEQQAESEKAPREPLEPQVLQDDLPISLKKVLQTSLPEPLRIKLELDGDSHILELLQNRELVPGRPTLVWYQPDGTRVVSEGHTLENCCYQGRVRGYAGSWVSICTCSGLRGLVVLTPERSYTLEQGPGDLQGPPIISRIQDLHLPGHTCALSWRESVHTQKPPEHPLGQRHIRRRRDVVTETKTVELVIVADHSEAQKYRDFQHLLNRTLEVALLLDTFFRPLNVRVALVGLEAWTQRDLVEISPNPAVTLENFLHWRRAHLLPRLPHDSAQLVTGTSFSGPTVGMAIQNSICSPDFSGGVNMDHSTSILGVASSIAHELGHSLGLDHDLPGNSCPCPGPAPAKTCIMEASTDFLPGLNFSNCSRRALEKALLDGMGSCLFERLPSLPPMAAFCGNMFVEPGEQCDCGFLDDCVDPCCDSLTCQLRPGAQCASDGPCCQNCQLRPSGWQCRPTRGDCDLPEFCPGDSSQCPPDVSLGDGEPCAGGQAVCMHGRCASYAQQCQSLWGPGAQPAAPLCLQTANTRGNAFGSCGRNPSGSYVSCTPRDAICGQLQCQTGRTQPLLGSIRDLLWETIDVNGTELNCSWVHLDLGSDVAQPLLTLPGTACGPGLVCIDHRCQRVDLLGAQECRSKCHGHGVCDSNRHCYCEEGWAPPDCTTQLKATSSLTTGLLLSLLVLLVLVMLGASYWYRARLHQRLCQLKGPTCQYRAAQSGPSERPGPPQRALLARGTKSQGPAKPPPPRKPLPADPQGRCPSGDLPGPGAGIPPLVVPSRPAPPPPTVSSLYL

SEQ ID NO: 2145 - protein, 839 aa, Homo sapiens
  Payload ID: 539;
  Gene Symbol: ADAM15;
  Gene Name: ADAM metallopeptidase domain 15;
  Uniprot ID:  Q13444;
  ENSP ID: ENSP00000348227
MRLALLWALGLLGAGSPLPSWPLPNIGGTEEQQAESEKAPREPLEPQVLQDDLPISLKKVLQTSLPEPLRIKLELDGDSHILELLQNRELVPGRPTLVWYQPDGTRVVSEGHTLENCCYQGRVRGYAGSWVSICTCSGLRGLVVLTPERSYTLEQGPGDLQGPPIISRIQDLHLPGHTCALSWRESVHTQKPPEHPLGQRHIRRRRDVVTETKTVELVIVADHSEAQKYRDFQHLLNRTLEVALLLDTFFRPLNVRVALVGLEAWTQRDLVEISPNPAVTLENFLHWRRAHLLPRLPHDSAQLVTGTSFSGPTVGMAIQNSICSPDFSGGVNMDHSTSILGVASSIAHELGHSLGLDHDLPGNSCPCPGPAPAKTCIMEASTDFLPGLNFSNCSRRALEKALLDGMGSCLFERLPSLPPMAAFCGNMFVEPGEQCDCGFLDDCVDPCCDSLTCQLRPGAQCASDGPCCQNCQLRPSGWQCRPTRGDCDLPEFCPGDSSQCPPDVSLGDGEPCAGGQAVCMHGRCASYAQQCQSLWGPGAQPAAPLCLQTANTRGNAFGSCGRNPSGSYVSCTPRDAICGQLQCQTGRTQPLLGSIRDLLWETIDVNGTELNCSWVHLDLGSDVAQPLLTLPGTACGPGLVCIDHRCQRVDLLGAQECRSKCHGHGVCDSNRHCYCEEGWAPPDCTTQLKATSSLTTGLLLSLLVLLVLVMLGASYWYRARLHQRLCQLKGPTCQYRAAQSGPSERPGPPQRALLARGTKQASALSFPAPPSRPLPPDPVSKRLQSQGPAKPPPPRKPLPADPQGRCPSGDLPGPGAGIPPLVVPSRPAPPPPTVSSLYL

SEQ ID NO: 2146 - protein, 863 aa, Homo sapiens
  Payload ID: 539;
  Gene Symbol: ADAM15;
  Gene Name: ADAM metallopeptidase domain 15;
  Uniprot ID:  Q13444;
  ENSP ID: ENSP00000349436
MRLALLWALGLLGAGSPLPSWPLPNIGGTEEQQAESEKAPREPLEPQVLQDDLPISLKKVLQTSLPEPLRIKLELDGDSHILELLQNRELVPGRPTLVWYQPDGTRVVSEGHTLENCCYQGRVRGYAGSWVSICTCSGLRGLVVLTPERSYTLEQGPGDLQGPPIISRIQDLHLPGHTCALSWRESVHTQKPPEHPLGQRHIRRRRDVVTETKTVELVIVADHSEAQKYRDFQHLLNRTLEVALLLDTFFRPLNVRVALVGLEAWTQRDLVEISPNPAVTLENFLHWRRAHLLPRLPHDSAQLVTGTSFSGPTVGMAIQNSICSPDFSGGVNMDHSTSILGVASSIAHELGHSLGLDHDLPGNSCPCPGPAPAKTCIMEASTDFLPGLNFSNCSRRALEKALLDGMGSCLFERLPSLPPMAAFCGNMFVEPGEQCDCGFLDDCVDPCCDSLTCQLRPGAQCASDGPCCQNCQLRPSGWQCRPTRGDCDLPEFCPGDSSQCPPDVSLGDGEPCAGGQAVCMHGRCASYAQQCQSLWGPGAQPAAPLCLQTANTRGNAFGSCGRNPSGSYVSCTPRDAICGQLQCQTGRTQPLLGSIRDLLWETIDVNGTELNCSWVHLDLGSDVAQPLLTLPGTACGPGLVCIDHRCQRVDLLGAQECRSKCHGHGVCDSNRHCYCEEGWAPPDCTTQLKATSSLTTGLLLSLLVLLVLVMLGASYWYRARLHQRLCQLKGPTCQYRAAQSGPSERPGPPQRALLARGTKQASALSFPAPPSRPLPPDPVSKRLQAELADRPNPPTRPLPADPVVRSPKSQGPAKPPPPRKPLPADPQGRCPSGDLPGPGAGIPPLVVPSRPAPPPPTVSSLYL

SEQ ID NO: 2147 - protein, 838 aa, Homo sapiens
  Payload ID: 539;
  Gene Symbol: ADAM15;
  Gene Name: ADAM metallopeptidase domain 15;
  Uniprot ID:  Q13444;
  ENSP ID: ENSP00000352226
MRLALLWALGLLGAGSPLPSWPLPNIGGTEEQQAESEKAPREPLEPQVLQDDLPISLKKVLQTSLPEPLRIKLELDGDSHILELLQNRELVPGRPTLVWYQPDGTRVVSEGHTLENCCYQGRVRGYAGSWVSICTCSGLRGLVVLTPERSYTLEQGPGDLQGPPIISRIQDLHLPGHTCALSWRESVHTQKPPEHPLGQRHIRRRRDVVTETKTVELVIVADHSEAQKYRDFQHLLNRTLEVALLLDTFFRPLNVRVALVGLEAWTQRDLVEISPNPAVTLENFLHWRRAHLLPRLPHDSAQLVTGTSFSGPTVGMAIQNSICSPDFSGGVNMDHSTSILGVASSIAHELGHSLGLDHDLPGNSCPCPGPAPAKTCIMEASTDFLPGLNFSNCSRRALEKALLDGMGSCLFERLPSLPPMAAFCGNMFVEPGEQCDCGFLDDCVDPCCDSLTCQLRPGAQCASDGPCCQNCQLRPSGWQCRPTRGDCDLPEFCPGDSSQCPPDVSLGDGEPCAGGQAVCMHGRCASYAQQCQSLWGPGAQPAAPLCLQTANTRGNAFGSCGRNPSGSYVSCTPRDAICGQLQCQTGRTQPLLGSIRDLLWETIDVNGTELNCSWVHLDLGSDVAQPLLTLPGTACGPGLVCIDHRCQRVDLLGAQECRSKCHGHGVCDSNRHCYCEEGWAPPDCTTQLKATSSLTTGLLLSLLVLLVLVMLGASYWYRARLHQRLCQLKGPTCQYRAAQSGPSERPGPPQRALLARGTKAELADRPNPPTRPLPADPVVRSPKSQGPAKPPPPRKPLPADPQGRCPSGDLPGPGAGIPPLVVPSRPAPPPPTVSSLYL

SEQ ID NO: 2148 - protein, 772 aa, Homo sapiens
  Payload ID: 539;
  Gene Symbol: ADAM15;
  Gene Name: ADAM metallopeptidase domain 15;
  Uniprot ID:  Q13444;
  ENSP ID: ENSP00000353892
MRLALLWALGLLGAGSPLPSWPLPNIGGTEEQQAESEKAPREPLEPQVLQDDLPISLKKVLQTSLPEPLRIKLELDGDSHILELLQNRELVPGRPTLVWYQPDGTRVVSEGHTLENCCYQGRVRGYAGSWVSICTCSGLRGLVVLTPERSYTLEQGPGDLQGPPIISRIQDLHLPGHTCALSWRESVHTQKPPEHPLGQRHIRRRRDVVTETKTVELVIVADHSEAQKYRDFQHLLNRTLEVALLLDTFFRPLNVRVALVGLEAWTQRDLVEISPNPAVTLENFLHWRRAHLLPRLPHDSAQLVTGTSFSGPTVGMAIQNSICSPDFSGGVNMDHSTSILGVASSIAHELGHSLGLDHDLPGNSCPCPGPAPAKTCIMEASTDFLPGLNFSNCSRRALEKALLDGMGSCLFERLPSLPPMAAFCGNMFVEPGEQCDCGFLDDCVDPCCDSLTCQLRPGAQCASDGPCCQNCQLRPSGWQCRPTRGDCDLPEFCPGDSSQCPPDVSLGDGEPCAGGQAVCMHGRCASYAQQCQSLWGPGAQPAAPLCLQTANTRGNAFGSCGRNPSGSYVSCTPRDAICGQLQCQTGRTQPLLGSIRDLLWETIDVNGTELNCSWVHLDLGSDVAQPLLTLPGTACGPGLVCIDHRCQRVDLLGAQECRSKCHGHGVCDSNRHCYCEEGWAPPDCTTQLKATSSLTTGLLLSLLVLLVLVMLGASYWYRARLHQRLCQLKGPTCQYSLRGQPSPHPQGSHCLPTPRAGAHRVTCPAQGLESRP

SEQ ID NO: 2149 - protein, 796 aa, Homo sapiens
  Payload ID: 539;
  Gene Symbol: ADAM15;
  Gene Name: ADAM metallopeptidase domain 15;
  Uniprot ID:  Q13444;
  ENSP ID: ENSP00000357397
MRLALLWALGLLGAGSPLPSWPLPNIGGTEEQQAESEKAPREPLEPQVLQDDLPISLKKVLQTSLPEPLRIKLELDGDSHILELLQNRELVPGRPTLVWYQPDGTRVVSEGHTLENCCYQGRVRGYAGSWVSICTCSGLRGLVVLTPERSYTLEQGPGDLQGPPIISRIQDLHLPGHTCALSWRESVHTQKPPEHPLGQRHIRRRRDVVTETKTVELVIVADHSEAQKYRDFQHLLNRTLEVALLLDTFFRPLNVRVALVGLEAWTQRDLVEISPNPAVTLENFLHWRRAHLLPRLPHDSAQLVTGTSFSGPTVGMAIQNSICSPDFSGGVNMDHSTSILGVASSIAHELGHSLGLDHDLPGNSCPCPGPAPAKTCIMEASTDFLPGLNFSNCSRRALEKALLDGMGSCLFERLPSLPPMAAFCGNMFVEPGEQCDCGFLDDCVDPCCDSLTCQLRPGAQCASDGPCCQNCQLRPSGWQCRPTRGDCDLPEFCPGDSSQCPPDVSLGDGEPCAGGQAVCMHGRCASYAQQCQSLWGPGAQPAAPLCLQTANTRGNAFGSCGRNPSGSYVSCTPRDAICGQLQCQTGRTQPLLGSIRDLLWETIDVNGTELNCSWVHLDLGSDVAQPLLTLPGTACGPGLVCIDHRCQRVDLLGAQECRSKCHGHGVCDSNRHCYCEEGWAPPDCTTQLKATSSLTTGLLLSLLVLLVLVMLGASYWYRARLHQRLCQLKGPTCQYRLVLSASRPPLPGRCRLTLCPRDSSLRGQPSPHPQGSHCLPTPRAGAHRVTCPAQGLESRP

SEQ ID NO: 2150 - protein, 520 aa, Homo sapiens
  Payload ID: 539;
  Gene Symbol: ADAM15;
  Gene Name: ADAM metallopeptidase domain 15;
  Uniprot ID:  Q13444;
  ENSP ID: ENSP00000357398
MRLALLWALGLLGAGSPLPSWPLPNIGGTEEQQAESEKAPREPLEPQVLQDDLPISLKKVLQTSLPEPLRIKLELDGDSHILELLQNRELVPGLNFSNCSRRALEKALLDGMGSCLFERLPSLPPMAAFCGNMFVEPGEQCDCGFLDDCVDPCCDSLTCQLRPGAQCASDGPCCQNCQLRPSGWQCRPTRGDCDLPEFCPGDSSQCPPDVSLGDGEPCAGGQAVCMHGRCASYAQQCQSLWGPGAQPAAPLCLQTANTRGNAFGSCGRNPSGSYVSCTPRDAICGQLQCQTGRTQPLLGSIRDLLWETIDVNGTELNCSWVHLDLGSDVAQPLLTLPGTACGPGLVCIDHRCQRVDLLGAQECRSKCHGHGVCDSNRHCYCEEGWAPPDCTTQLKATSSLTTGLLLSLLVLLVLVMLGASYWYRARLHQRLCQLKGPTCQYRAAQSGPSERPGPPQRALLARGTKSQGPAKPPPPRKPLPADPQGRCPSGDLPGPGAGIPPLVVPSRPAPPPPTVSSLYL

SEQ ID NO: 2151 - protein, 862 aa, Homo sapiens
  Payload ID: 539;
  Gene Symbol: ADAM15;
  Gene Name: ADAM metallopeptidase domain 15;
  Uniprot ID:  Q13444;
  ENSP ID: ENSP00000403843
MRLALLWALGLLGAGSPLPSWPLPNIGGTEEQQAESEKAPREPLEPQVLQDDLPISLKKVLQTSLPEPLRIKLELDGDSHILELLQNRELVPGRPTLVWYQPDGTRVVSEGHTLENCCYQGRVRGYAGSWVSICTCSGLRGLVVLTPERSYTLEQGPGDLQGPPIISRIQDLHLPGHTCALSWRESVHTQKPPEHPLGQRHIRRRRDVVTETKTVELVIVADHSEAQKYRDFQHLLNRTLEVALLLDTFFRPLNVRVALVGLEAWTQRDLVEISPNPAVTLENFLHWRRAHLLPRLPHDSAQLVTGTSFSGPTVGMAIQNSICSPDFSGGVNMDHSTSILGVASSIAHELGHSLGLDHDLPGNSCPCPGPAPAKTCIMEASTDFLPGLNFSNCSRRALEKALLDGMGSCLFERLPSLPPMAAFCGNMFVEPGEQCDCGFLDDCVDPCCDSLTCQLRPGAQCASDGPCCQNCQLRPSGWQCRPTRGDCDLPEFCPGDSSQCPPDVSLGDGEPCAGGQAVCMHGRCASYAQQCQSLWGPGAQPAAPLCLQTANTRGNAFGSCGRNPSGSYVSCTPRDAICGQLQCQTGRTQPLLGSIRDLLWETIDVNGTELNCSWVHLDLGSDVAQPLLTLPGTACGPGLVCIDHRCQRVDLLGAQECRSKCHGHGVCDSNRHCYCEEGWAPPDCTTQLKATSSLTTGLLLSLLVLLVLVMLGASYWYRARLHQRLCQLKGPTCQYRAAQSGPSERPGPPQRALLARGTKASALSFPAPPSRPLPPDPVSKRLQAELADRPNPPTRPLPADPVVRSPKSQGPAKPPPPRKPLPADPQGRCPSGDLPGPGAGIPPLVVPSRPAPPPPTVSSLYL

SEQ ID NO: 2152 - protein, 822 aa, Homo sapiens
  Payload ID: 539;
  Gene Symbol: ADAM15;
  Gene Name: ADAM metallopeptidase domain 15;
  Uniprot ID:  Q13444;
  ENSP ID: ENSP00000432347
MRLALLWALGLLGAGSPLPSWPLPNIGGTEEQQAESEKAPREPLEPQVLQDDLPISLKKVLQTSLPEPLRIKLELDGDSHILELLQNRELVPGRPTLVWYQPDGTRVVSEGHTLENCCYQGRVRGYAGSWVSICTCSGLRGLVVLTPERSYTLEQGPGDLQGPPIISRIQDLHLPGHTCALSWRESVHTQKPPEHPLGQRHIRRRRDVVTETKTVELVIVADHSEAQKYRDFQHLLNRTLEVALLLDTFFRPLNVRVALVGLEAWTQRDLVEISPNPAVTLENFLHWRRAHLLPRLPHDSAQLVTGTSFSGPTVGMAIQNSICSPDFSGGVNMDHSTSILGVASSIAHELGHSLGLDHDLPGNSCPCPGPAPAKTCIMEASTDFLPGLNFSNCSRRALEKALLDGMGSCLFERLPSLPPMAAFCGNMFVEPGEQCDCGFLDDCVDPCCDSLTCQLRPGAQCASDGPCCQNCQLRPSGWQCRPTRGDCDLPEFCPGDSSQCPPDVSLGDGEPCAGGQAVCMHGRCASYAQQCQSLWGPGAQPAAPLCLQTANTRGNAFGSCGRNPSGSYVSCTPRDAICGQLQCQTGRTQPLLGSIRDLLWETIDVNGTELNCSWVHLDLGSDVAQPLLTLPGTACGPGLVCIDHRCQRVDLLGAQECRSKCHGHGVCDSNRHCYCEEGWAPPDCTTQLKATSSLTTGLLLSLLVLLVLVMLGASYWYRARLHQRLCQLKGPTCQYRAAQSGPSERPGPPQRALLARGTKQASALSFPAPPSRPLPPDPVSKRLQAELADRPNPPTRPLPADPVVRSPKVTVGGEKGTASPPT

SEQ ID NO: 2153 - protein, 824 aa, Homo sapiens
  Payload ID: 539;
  Gene Symbol: ADAM15;
  Gene Name: ADAM metallopeptidase domain 15;
  Uniprot ID:  Q13444;
  ENSP ID: ENSP00000432927
MRLALLWALGLLGAGSPLPSWPLPNIVLSWGVLGPAGGTEEQQAESEKAPREPLEPQVLQDDLPISLKKVLQTSLPEPLRIKLELDGDSHILELLQNRELVPGRPTLVWYQPDGTRVVSEGHTLENCCYQGRVRGYAGSWVSICTCSGLRGLVVLTPERSYTLEQGPGDLQGPPIISRIQDLHLPGHTCALSWRESVHTQKPPEHPLGQRHIRRRRDVVTETKTVELVIVADHSEAQKYRDFQHLLNRTLEVALLLDTFFRPLNVRVALVGLEAWTQRDLVEISPNPAVTLENFLHWRRAHLLPRLPHDSAQLVTGTSFSGPTVGMAIQNSICSPDFSGGVNMDHSTSILGVASSIAHELGHSLGLDHDLPGNSCPCPGPAPAKTCIMEASTDFLPGLNFSNCSRRALEKALLDGMGSCLFERLPSLPPMAAFCGNMFVEPGEQCDCGFLDDCVDPCCDSLTCQLRPGAQCASDGPCCQNCQLRPSGWQCRPTRGDCDLPEFCPGDSSQCPPDVSLGDGEPCAGGQAVCMHGRCASYAQQCQSLWGPGAQPAAPLCLQTANTRGNAFGSCGRNPSGSYVSCTPRDAICGQLQCQTGRTQPLLGSIRDLLWETIDVNGTELNCSWVHLDLGSDVAQPLLTLPGTACGPGLVCIDHRCQRVDLLGAQECRSKCHGHGVCDSNRHCYCEEGWAPPDCTTQLKATSSLTTGLLLSLLVLLVLVMLGASYWYRARLHQRLCQLKGPTCQYRAAQSGPSERPGPPQRALLARGTKSQGPAKPPPPRKPLPADPQGRCPSGDLPGPGAGIPPLVVPSRPAPPPPTVSSLYL

SEQ ID NO: 2154 - protein, 797 aa, Homo sapiens
  Payload ID: 539;
  Gene Symbol: ADAM15;
  Gene Name: ADAM metallopeptidase domain 15;
  Uniprot ID:  Q13444;
  ENSP ID: ENSP00000434227
MRLALLWALGLLGAGSPLPSWPLPNIGGTEEQQAESEKAPREPLEPQVLQDDLPISLKKVLQTSLPEPLRIKLELDGDSHILELLQNRELVPGRPTLVWYQPDGTRVVSEGHTLENCCYQGRVRGYAGSWVSICTCSGLRGLVVLTPERSYTLEQGPGDLQGPPIISRIQDLHLPGHTCALSWRESVHTQKPPEHPLGQRHIRRRRDVVTETKTVELVIVADHSEAQKYRDFQHLLNRTLEVALLLDTFFRPLNVRVALVGLEAWTQRDLVEISPNPAVTLENFLHWRRAHLLPRLPHDSAQLVTGTSFSGPTVGMAIQNSICSPDFSGGVNMDHSTSILGVASSIAHELGHSLGLDHDLPGNSCPCPGPAPAKTCIMEASTDFLPGLNFSNCSRRALEKALLDGMGSCLFERLPSLPPMAAFCGNMFVEPGEQCDCGFLDDCVDPCCDSLTCQLRPGAQCASDGPCCQNCQLRPSGWQCRPTRGDCDLPEFCPGDSSQCPPDVSLGDGEPCAGGQAVCMHGRCASYAQQCQSLWGPGAQPAAPLCLQTANTRGNAFGSCGRNPSGSYVSCTPRDAICGQLQCQTGRTQPLLGSIRDLLWETIDVNGTELNCSWVHLDLGSDVAQPLLTLPGTACGPGLVCIDHRCQRVDLLGAQECRSKCHGHGVCDSNRHCYCEEGWAPPDCTTQLKATSSLTTGLLLSLLVLLVLVMLGASYWYRARLHQRLCQLKGPTCQYRAAQSGPSERPGPPQRALLARGTKAELADRPNPPTRPLPADPVVRSPKVTVGGEKGTASPPT

SEQ ID NO: 2155 - protein, 633 aa, Homo sapiens
  Payload ID: 539;
  Gene Symbol: ADAM15;
  Gene Name: ADAM metallopeptidase domain 15;
  Uniprot ID:  Q13444;
  ENSP ID: ENSP00000476000
MRLALLWALGLLGAGSPLPSWPLPNIVSACNVEAPQVALRSSRQSQRRPRGSPWSPRSFRTISQLASKRCFRELVPGRPTLVWYQPDGTRVVSEGHTLENCCYQGRVRGYAGSWVSICTCSGLRGLVVLTPERSYTLEQGPGDLQGPPIISRIQDLHLPGHTCALSWRESVHTQKPPEHPLGQRHIRRRRDVVTETKTVELVIVADHSEAQKYRDFQHLLNRTLEVALLLDTFFRPLNVRVALVGLEAWTQRDLVEISPNPAVTLENFLHWRRAHLLPRLPHDSAQLVTGTSFSGPTVGMAIQNSICSPDFSGGVNMDHSTSILGVASSIAHELGHSLGLDHDLPGNSCPCPGPAPAKTCIMEASTDFLPGLNFSNCSRRALEKALLDGMGSCLFERLPSLPPMAAFCGNMFVEPGEQCDCGFLDDCVDPCCDSLTCQLRPGAQCASDGPCCQNCQLRPSGWQCRPTRGDCDLPEFCPGDSSQCPPDVSLGDGEPCAGGQAVCMHGRCASYAQQCQSLWGPGAQPAAPLCLQTANTRGNAFGSCGRNPSGSYVSCTPRDAICGQLQCQTGRTQPLLGSIRDLLWETIDVNGTELNCSWVHLDLGSDVAQPLLTLPGTACGPGLVSSLGGQDQV

SEQ ID NO: 2156 - protein, 824 aa, Homo sapiens
  Payload ID: 540;
  Gene Symbol: ADAM17;
  Gene Name: ADAM metallopeptidase domain 17;
  Uniprot ID:  P78536;
  ENSP ID: ENSP00000309968
MRQSLLFLTSVVPFVLAPRPPDDPGFGPHQRLEKLDSLLSDYDILSLSNIQQHSVRKRDLQTSTHVETLLTFSALKRHFKLYLTSSTERFSQNFKVVVVDGKNESEYTVKWQDFFTGHVVGEPDSRVLAHIRDDDVIIRINTDGAEYNIEPLWRFVNDTKDKRMLVYKSEDIKNVSRLQSPKVCGYLKVDNEELLPKGLVDREPPEELVHRVKRRADPDPMKNTCKLLVVADHRFYRYMGRGEESTTTNYLIELIDRVDDIYRNTSWDNAGFKGYGIQIEQIRILKSPQEVKPGEKHYNMAKSYPNEEKDAWDVKMLLEQFSFDIAEEASKVCLAHLFTYQDFDMGTLGLAYVGSPRANSHGGVCPKAYYSPVGKKNIYLNSGLTSTKNYGKTILTKEADLVTTHELGHNFGAEHDPDGLAECAPNEDQGGKYVMYPIAVSGDHENNKMFSNCSKQSIYKTIESKAQECFQERSNKVCGNSRVDEGEECDPGIMYLNNDTCCNSDCTLKEGVQCSDRNSPCCKNCQFETAQKKCQEAINATCKGVSYCTGNSSECPPPGNAEDDTVCLDLGKCKDGKCIPFCEREQQLESCACNETDNSCKVCCRDLSGRCVPYVDAEQKNLFLRKGKPCTVGFCDMNGKCEKRVQDVIERFWDFIDQLSINTFGKFLADNIVGSVLVFSLIFWIPFSILVHCVDKKLDKQYESLSLFHPSNVEMLSSMDSASVRIIKPFPAPQTPGRLQPAPVIPSAPAAPKLDHQRMDTIQEDPSTDSHMDEDGFEKDPFPNSSTAAKSFEDLTDHPVTRSEKAASFKLQRQNRVDSKETEC

SEQ ID NO: 2157 - protein, 285 aa, Homo sapiens
  Payload ID: 540;
  Gene Symbol: ADAM17;
  Gene Name: ADAM metallopeptidase domain 17;
  ENSP ID: ENSP00000418728
MRQSLLFLTSVVPFVLAPRPPDDPGFGPHQRLEKLDSLLSDYDILSLSNIQQHSVRKRDLQTSTHVETLLTFSALKRHFKLYLTSSTERFSQNFKVVVVDGKNESEYTVKWQDFFTGHVVGEPDSRVLAHIRDDDVIIRINTDGAEYNIEPLWRFVNDTKDKRMLVYKSEDIKNVSRLQSPKVCGYLKVDNEELLPKGLVDREPPEELVHRVKRRADPDPMKNTCKLLVVADHRFYRYMGRGEESTTTNYLIELIDRVDDIYRNTSWDNAGFKGYGIQIEQLLFE

SEQ ID NO: 2158 - protein, 258 aa, Homo sapiens
  Payload ID: 540;
  Gene Symbol: ADAM17;
  Gene Name: ADAM metallopeptidase domain 17;
  ENSP ID: ENSP00000480552
MRQSLLFLTSVVPFVLAPRPPDDPGFGPHQRLEKLDSLLSDYDILSLSNIQQHSVRKRDLQTSTHVETLLTFSALKRHFKLYLTSSTERFSQNFKVVVVDGKNESEYTVKWQDFFTGHVVGEPDSRVLAHIRDDDVIIRINTDGAEYNIEPLWRFVNDTKDKRMLVYKSEDIKNVSRLQSPKVCGYLKVDNEELLPKGLVDREPPEELVHRVKRRADPDPMKNTCKLLVVADHRFYRYMGRGEESTTTNYLIHTDRAN

SEQ ID NO: 2159 - protein, 739 aa, Homo sapiens
  Payload ID: 541;
  Gene Symbol: ADAM18;
  Gene Name: ADAM metallopeptidase domain 18;
  Uniprot ID:  Q9Y3Q7;
  ENSP ID: ENSP00000265707
MFLLLALLTELGRLQAHEGSEGIFLHVTVPRKIKSNDSEVSERKMIYIITIDGQPYTLHLGKQSFLPQNFLVYTYNETGSLHSVSPYFMMHCHYQGYAAEFPNSFVTLSICSGLRGFLQFENISYGIEPVESSARFEHIIYQMKNNDPNVSILAVNYSHIWQKDQPYKVPLNSQIKNLSKLLPQYLEIYIIVEKALYDYMGSEMMAVTQKIVQVIGLVNTMFTQFKLTVILSSLELWSNENQISTSGDADDILQRFLAWKRDYLILRPHDIAYLLVYRKHPKYVGATFPGTVCNKSYDAGIAMYPDAIGLEGFSVIIAQLLGLNVGLTYDDITQCFCLRATCIMNHEAVSASGRKIFSNCSMHDYRYFVSKFETKCLQKLSNLQPLHQNQPVCGNGILESNEECDCGNKNECQFKKCCDYNTCKLKGSVKCGSGPCCTSKCELSIAGTPCRKSIDPECDFTEYCNGTSSNCVPDTYALNGRLCKLGTAYCYNGQCQTTDNQCAKIFGKGAQGAPFACFKEVNSLHERSENCGFKNSQPLPCERKDVLCGKLACVQPHKNANKSDAQSTVYSYIQDHVCVSIATGSSMRSDGTDNAYVADGTMCGPEMYCVNKTCRKVHLMGYNCNATTKCKGKGICNNFGNCQCFPGHRPPDCKFQFGSPGGSIDDGNFQKSGDFYTEKGYNTHWNNWFILSFCIFLPFFIVFTTVIFKRNEISKSCNRENAEYNRNSSVVSESDDVGH

SEQ ID NO: 2160 - protein, 715 aa, Homo sapiens
  Payload ID: 541;
  Gene Symbol: ADAM18;
  Gene Name: ADAM metallopeptidase domain 18;
  Uniprot ID:  Q9Y3Q7;
  ENSP ID: ENSP00000369195
MFLLLALLTELGRLQAHEGSEGIFLHVTVPRKIKSNDSEVSERKMIYIITIDGQPYTLHLGKQSFLPQNFLVYTYNETGSLHSVSPYFMMHCHYQGYAAEFPNSFVTLSICSGLRGFLQFENISYGIEPVESSARFEHIIYQMKNNDPNVSILAVNYSHIWQKDQPYKVPLNSQIKNLSKLLPQYLEIYIIVEKALMFTQFKLTVILSSLELWSNENQISTSGDADDILQRFLAWKRDYLILRPHDIAYLLVYRKHPKYVGATFPGTVCNKSYDAGIAMYPDAIGLEGFSVIIAQLLGLNVGLTYDDITQCFCLRATCIMNHEAVSASGRKIFSNCSMHDYRYFVSKFETKCLQKLSNLQPLHQNQPVCGNGILESNEECDCGNKNECQFKKCCDYNTCKLKGSVKCGSGPCCTSKCELSIAGTPCRKSIDPECDFTEYCNGTSSNCVPDTYALNGRLCKLGTAYCYNGQCQTTDNQCAKIFGKGAQGAPFACFKEVNSLHERSENCGFKNSQPLPCERKDVLCGKLACVQPHKNANKSDAQSTVYSYIQDHVCVSIATGSSMRSDGTDNAYVADGTMCGPEMYCVNKTCRKVHLMGYNCNATTKCKGKGICNNFGNCQCFPGHRPPDCKFQFGSPGGSIDDGNFQKSGDFYTEKGYNTHWNNWFILSFCIFLPFFIVFTTVIFKRNEISKSCNRENAEYNRNSSVVSESDDVGH

SEQ ID NO: 2161 - protein, 115 aa, Homo sapiens
  Payload ID: 541;
  Gene Symbol: ADAM18;
  Gene Name: ADAM metallopeptidase domain 18;
  ENSP ID: ENSP00000428083
MFLLLALLTELGRLQAHEGSEGIFLHVTVPRKIKSNDSEVSERKMIYIITIDGQPYTLHLGKQSFLPQNFLVYTYNETGSLHSVSPYFMMHCHYQGYAAEFPNSFVTLSICSGLR

SEQ ID NO: 2162 - protein, 62 aa, Homo sapiens
  Payload ID: 541;
  Gene Symbol: ADAM18;
  Gene Name: ADAM metallopeptidase domain 18;
  ENSP ID: ENSP00000429335
MFLLLALLTELGRLQAHEGSEGIFLHVTVPRKIKSNDSEVSERKVFGEQVVFGYMNDLHHYN

SEQ ID NO: 2163 - protein, 182 aa, Homo sapiens
  Payload ID: 541;
  Gene Symbol: ADAM18;
  Gene Name: ADAM metallopeptidase domain 18;
  Uniprot ID:  Q9Y3Q7;
  ENSP ID: ENSP00000429908
MFLLLALLTELGRLQAHEGSEGIFLHVTVPRKIKSNDSEVSERKMIYIITIDGQPYTLHLGKQSFLPQNFLVYTYNETGSLHSVSPYFMMHCHYQGYAAEFPNSFVTLSICSGLRGFLQFENISYGIEPVESSARFEHIIYQMKNNDPNVSILAVNYSHIWQKDQPYKVPLNSQVTVIILML

SEQ ID NO: 2164 - protein, 739 aa, Homo sapiens; identical to SEQ ID NO: 2159
  Payload ID: 541;
  Gene Symbol: ADAM18;
  Gene Name: ADAM metallopeptidase domain 18;
  Uniprot ID:  Q9Y3Q7;
  ENSP ID: ENSP00000482348

SEQ ID NO: 2165 - protein, 115 aa, Homo sapiens; identical to SEQ ID NO: 2161
  Payload ID: 541;
  Gene Symbol: ADAM18;
  Gene Name: ADAM metallopeptidase domain 18;
  ENSP ID: ENSP00000484966

SEQ ID NO: 2166 - protein, 182 aa, Homo sapiens; identical to SEQ ID NO: 2163
  Payload ID: 541;
  Gene Symbol: ADAM18;
  Gene Name: ADAM metallopeptidase domain 18;
  Uniprot ID:  Q9Y3Q7;
  ENSP ID: ENSP00000488128

SEQ ID NO: 2167 - protein, 715 aa, Homo sapiens; identical to SEQ ID NO: 2160
  Payload ID: 541;
  Gene Symbol: ADAM18;
  Gene Name: ADAM metallopeptidase domain 18;
  Uniprot ID:  Q9Y3Q7;
  ENSP ID: ENSP00000488176

SEQ ID NO: 2168 - protein, 62 aa, Homo sapiens; identical to SEQ ID NO: 2162
  Payload ID: 541;
  Gene Symbol: ADAM18;
  Gene Name: ADAM metallopeptidase domain 18;
  ENSP ID: ENSP00000488816

SEQ ID NO: 2169 - protein, 918 aa, Homo sapiens
  Payload ID: 542;
  Gene Symbol: ADAM19;
  Gene Name: ADAM metallopeptidase domain 19;
  Uniprot ID:  Q9H013;
  ENSP ID: ENSP00000257527
MPGGAGAARLCLLAFALQPLRPRAAREPGWTRGSEEGSPKLQHELIIPQWKTSESPVREKHPLKAELRVMAEGRELILDLEKNEQLFAPSYTETHYTSSGNPQTTTRKLEDHCFYHGTVRETELSSVTLSTCRGIRGLITVSSNLSYVIEPLPDSKGQHLIYRSEHLKPPPGNCGFEHSKPTTRDWALQFTQQTKKRPRRMKREDLNSMKYVELYLVADYLEFQKNRRDQDATKHKLIEIANYVDKFYRSLNIRIALVGLEVWTHGNMCEVSENPYSTLWSFLSWRRKLLAQKYHDNAQLITGMSFHGTTIGLAPLMAMCSVYQSGGVNMDHSENAIGVAATMAHEMGHNFGMTHDSADCCSASAADGGCIMAAATGHPFPKVFNGCNRRELDRYLQSGGGMCLSNMPDTRMLYGGRRCGNGYLEDGEECDCGEEEECNNPCCNASNCTLRPGAECAHGSCCHQCKLLAPGTLCREQARQCDLPEFCTGKSPHCPTNFYQMDGTPCEGGQAYCYNGMCLTYQEQCQQLWGPGARPAPDLCFEKVNVAGDTFGNCGKDMNGEHRKCNMRDAKCGKIQCQSSEARPLESNAVPIDTTIIMNGRQIQCRGTHVYRGPEEEGDMLDPGLVMTGTKCGYNHICFEGQCRNTSFFETEGCGKKCNGHGVCNNNQNCHCLPGWAPPFCNTPGHGGSIDSGPMPPESVGPVVAGVLVAILVLAVLMLMYYCCRQNNKLGQLKPSALPSKLRQQFSCPFRVSQNSGTGHANPTFKLQTPQGKRKVINTPEILRKPSQPPPRPPPDYLRGGSPPAPLPAHLSRAARNSPGPGSQIERTESSRRPPPSRPIPPAPNCIVSQDFSRPRPPQKALPANPVPGRRSLPRPGGASPLRPPGAGPQQSRPLAALAPKFPEYRSQRAGGMISSKI

SEQ ID NO: 2170 - protein, 272 aa, Homo sapiens
  Payload ID: 542;
  Gene Symbol: ADAM19;
  Gene Name: ADAM metallopeptidase domain 19;
  ENSP ID: ENSP00000428376
MPGGAGAARLCLLAFALQPLRPRAAREPGWTRGSEEGSPKLQHELIIPQWKTSESPVREKHPLKAELRVMAEGRELILDLEKNEQLFAPSYTETHYTSSGNPQTTTRKLEDHCFYHGTVRETELSSVTLSTCRGIRGLITVSSNLSYVIEPLPDSKGQHLIYRSEHLKPPPGNCGFEHSKPTTRDWALQFTQQTKKRPRRMKREDLNSMKYVELYLVADYLEFQKNRRDQDATKHKLIEIANYVDKVRPVLPILEHPDCSRGLGSVDPREHV

SEQ ID NO: 2171 - protein, 955 aa, Homo sapiens
  Payload ID: 542;
  Gene Symbol: ADAM19;
  Gene Name: ADAM metallopeptidase domain 19;
  Uniprot ID:  Q9H013;
  ENSP ID: ENSP00000428654
MPGGAGAARLCLLAFALQPLRPRAAREPGWTRGSEEGSPKLQHELIIPQWKTSESPVREKHPLKAELRVMAEGRELILDLEKNEQLFAPSYTETHYTSSGNPQTTTRKLEDHCFYHGTVRETELSSVTLSTCRGIRGLITVSSNLSYVIEPLPDSKGQHLIYRSEHLKPPPGNCGFEHSKPTTRDWALQFTQQTKKRPRRMKREDLNSMKYVELYLVADYLEFQKNRRDQDATKHKLIEIANYVDKFYRSLNIRIALVGLEVWTHGNMCEVSENPYSTLWSFLSWRRKLLAQKYHDNAQLITGMSFHGTTIGLAPLMAMCSVYQSGGVNMDHSENAIGVAATMAHEMGHNFGMTHDSADCCSASAADGGCIMAAATGHPFPKVFNGCNRRELDRYLQSGGGMCLSNMPDTRMLYGGRRCGNGYLEDGEECDCGEEEECNNPCCNASNCTLRPGAECAHGSCCHQCKLLAPGTLCREQARQCDLPEFCTGKSPHCPTNFYQMDGTPCEGGQAYCYNGMCLTYQEQCQQLWGPGARPAPDLCFEKVNVAGDTFGNCGKDMNGEHRKCNMRDAKCGKIQCQSSEARPLESNAVPIDTTIIMNGRQIQCRGTHVYRGPEEEGDMLDPGLVMTGTKCGYNHICFEGQCRNTSFFETEGCGKKCNGHGVCNNNQNCHCLPGWAPPFCNTPGHGGSIDSGPMPPESVGPVVAGVLVAILVLAVLMLMYYCCRQNNKLGQLKPSALPSKLRQQFSCPFRVSQNSGTGHANPTFKLQTPQGKRKVINTPEILRKPSQPPPRPPPDYLRGGSPPAPLPAHLSRAARNSPGPGSQIERTESSRRPPPSRPIPPAPNCIVSQDFSRPRPPQKALPANPVPGRRSLPRPGGASPLRPPGAGPQQSRPLAALAPKVSPREALKVKAGTRGLQGGRCRVEKTKQFMLLVVWTELPEQKPRAKHSCFLVPA

SEQ ID NO: 2172 - protein, 489 aa, Homo sapiens
  Payload ID: 542;
  Gene Symbol: ADAM19;
  Gene Name: ADAM metallopeptidase domain 19;
  ENSP ID: ENSP00000431027
  MOD_RES (1)..(1): Any amino acid
XDCGEEEECNNPCCNASNCTLRPGAECAHGSCCHQCKLLAPGTLCREQARQCDLPEFCTGKSPHCPTNFYQMDGTPCEGGQAYCYNGMCLTYQEQCQQLWGPGARPAPDLCFEKVNVAGDTFGNCGKDMNGEHRKCNMRDAKCGKIQCQSSEARPLESNAVPIDTTIIMNGRQIQCRGTHVYRGPEEEGDMLDPGLVMTGTKCGYNHICFEGQCRNTSFFETEGCGKKCNGHGVCNNNQNCHCLPGWAPPFCNTPGHGGSIDSGPMPPESVGPVVAGVLVAILVLAVLMLMYYCCRQNNKLGQLKPSALPSKLRQQFSCPFRVSQNSGTGHANPTFKLQTPQGKRKVINTPEILRKPSQPPPRPPPDYLRGGSPPAPLPAHLSRAARNSPGPGSQIERTESSRRPPPSRPIPPAPNCIVSQDFSRPRPPQKALPANPVPGRRSLPRPGGASPLRPPGAGPQQSRPLAALAPKRVWKTCNLKTGDQFQSQ

SEQ ID NO: 2173 - protein, 735 aa, Homo sapiens
  Payload ID: 543;
  Gene Symbol: ADAM2;
  Gene Name: ADAM metallopeptidase domain 2;
  Uniprot ID:  Q99965;
  ENSP ID: ENSP00000265708
MWRVLFLLSGLGGLRMDSNFDSLPVQITVPEKIRSIIKEGIESQASYKIVIEGKPYTVNLMQKNFLPHNFRVYSYSGTGIMKPLDQDFQNFCHYQGYIEGYPKSVVMVSTCTGLRGVLQFENVSYGIEPLESSVGFEHVIYQVKHKKADVSLYNEKDIESRDLSFKLQSVEPQQDFAKYIEMHVIVEKQLYNHMGSDTTVVAQKVFQLIGLTNAIFVSFNITIILSSLELWIDENKIATTGEANELLHTFLRWKTSYLVLRPHDVAFLLVYREKSNYVGATFQGKMCDANYAGGVVLHPRTISLESLAVILAQLLSLSMGITYDDINKCQCSGAVCIMNPEAIHFSGVKIFSNCSFEDFAHFISKQKSQCLHNQPRLDPFFKQQAVCGNAKLEAGEECDCGTEQDCALIGETCCDIATCRFKAGSNCAEGPCCENCLFMSKERMCRPSFEECDLPEYCNGSSASCPENHYVQTGHPCGLNQWICIDGVCMSGDKQCTDTFGKEVEFGPSECYSHLNSKTDVSGNCGISDSGYTQCEADNLQCGKLICKYVGKFLLQIPRATIIYANISGHLCIAVEFASDHADSQKMWIKDGTSCGSNKVCRNQRCVSSSYLGYDCTTDKCNDRGVCNNKKHCHCSASYLPPDCSVQSDLWPGGSIDSGNFPPVAIPARLPERRYIENIYHSKPMRWPFFLFIPFFIIFCVLIAIMVKVNFQRKKWRTEDYSSDEQPESESEPKG

SEQ ID NO: 2174 - protein, 716 aa, Homo sapiens
  Payload ID: 543;
  Gene Symbol: ADAM2;
  Gene Name: ADAM metallopeptidase domain 2;
  Uniprot ID:  Q99965;
  ENSP ID: ENSP00000343854
MWRVLFLLSGLGGLRMDSNFDSLPVQITVPEKIRSIIKEGIESQASYKIVIEGKPYTVNLMQKNFLPHNFRVYSYSGTGIMKPLDQDFQNFCHYQGYIEGYPKSVVMVSTCTGLRGVLQFENVSYGIEPLESSVGFEHVIYQVKHKKADVSLYNEKDIESRDLSFKLQSVEYNHMGSDTTVVAQKVFQLIGLTNAIFVSFNITIILSSLELWIDENKIATTGEANELLHTFLRWKTSYLVLRPHDVAFLLVYREKSNYVGATFQGKMCDANYAGGVVLHPRTISLESLAVILAQLLSLSMGITYDDINKCQCSGAVCIMNPEAIHFSGVKIFSNCSFEDFAHFISKQKSQCLHNQPRLDPFFKQQAVCGNAKLEAGEECDCGTEQDCALIGETCCDIATCRFKAGSNCAEGPCCENCLFMSKERMCRPSFEECDLPEYCNGSSASCPENHYVQTGHPCGLNQWICIDGVCMSGDKQCTDTFGKEVEFGPSECYSHLNSKTDVSGNCGISDSGYTQCEADNLQCGKLICKYVGKFLLQIPRATIIYANISGHLCIAVEFASDHADSQKMWIKDGTSCGSNKVCRNQRCVSSSYLGYDCTTDKCNDRGVCNNKKHCHCSASYLPPDCSVQSDLWPGGSIDSGNFPPVAIPARLPERRYIENIYHSKPMRWPFFLFIPFFIIFCVLIAIMVKVNFQRKKWRTEDYSSDEQPESESEPKG

SEQ ID NO: 2175 - protein, 579 aa, Homo sapiens
  Payload ID: 543;
  Gene Symbol: ADAM2;
  Gene Name: ADAM metallopeptidase domain 2;
  ENSP ID: ENSP00000369182
MWRVLFLLSGLGGLRMDSNFDSLPVQITVPEKIRSIIKEGIESQASYKIVIEGKPYTVNLMQKNFLPHNFRVYSYSGTGIMKPLDQDFQNFCHYQGYIEGYPKSVVMVSTCTGLRGVLQFENVSYGIEPLESSVGFEHVIYQVKHKKADVSLYNEKDIESRDLSFKLQSVEHPRTISLESLAVILAQLLSLSMGITYDDINKCQCSGAVCIMNPEAIHFSGVKIFSNCSFEDFAHFISKQKSQCLHNQPRLDPFFKQQAVCGNAKLEAGEECDCGTEQDCALIGETCCDIATCRFKAGSNCAEGPCCENCLFMSKERMCRPSFEECDLPEYCNGSSASCPENHYVQTGHPCGLNQWICIDGVCMSGDKQCTDTFGKEVEFGPSECYSHLNSKTDVSGNCGISDSGYTQCEADGHLCIAVEFASDHADSQKMWIKDGTSCGSNKVCRNQRCVSSSYLGYDCTTDKCNDRGVCNNKKHCHCSASYLPPDCSVQSDLWPGGSIDSGNFPPVAIPARLPERRYIENIYHSKPMRWPFFLFIPFFIIFCVLIAIMVKVNFQRKKWRTEDYSSDEQPESESEPKG

SEQ ID NO: 2176 - protein, 672 aa, Homo sapiens
  Payload ID: 543;
  Gene Symbol: ADAM2;
  Gene Name: ADAM metallopeptidase domain 2;
  ENSP ID: ENSP00000429352
MWRVLFLLSGLGGLRMDSNFDSLPVQITVPEKIRSIIKEGIESQASYKIVIEGKPYTVNLMQKNFLPHNFRVYSYSGTGIMKPLDQDFQNFCHYQGYIEGYPKSVVMVSTCTGLRGVLQFENVSYGIEPLESSVGFEHVIYQVKHKKADVSLYNEKDIESRDLSFKLQSVEPQQDFAKYIEMHVIVEKQLYNHMGSDTTVVAQKVFQLIGLTNAIFVSFNITIILSSLELWIDENKIATTGEANELLHTFLRWKTSYLVLRPHDVAFLLVYREKSNYVGATFQGKMCDANYAGGVVLHPRTISLESLAVILAQLLSLSMGITYDDINKCQCSGAVCIMNPEAIHFSGVKIFSNCSFEDFAHFISKQKSQCLHNQPRLDPFFKQQAVCGNAKLEAGEECDCGTEQDCALIGETCCDIATCRFKAGSNCAEGPCCENCLFMSKERMCRPSFEECDLPEYCNGSSASCPENHYVQTGHPCGLNQWICIDGVCMSGDKQCTDTFGKEVEFGPSECYSHLNSKTDVSGNCGISDSGYTQCEVCRNQRCVSSSYLGYDCTTDKCNDRGVCNNKKHCHCSASYLPPDCSVQSDLWPGGSIDSGNFPPVAIPARLPERRYIENIYHSKPMRWPFFLFIPFFIIFCVLIAIMVKVNFQRKKWRTEDYSSDEQPESESEPKG

SEQ ID NO: 2177 - protein, 672 aa, Homo sapiens; identical to SEQ ID NO: 2176
  Payload ID: 543;
  Gene Symbol: ADAM2;
  Gene Name: ADAM metallopeptidase domain 2;
  ENSP ID: ENSP00000478636

SEQ ID NO: 2178 - protein, 579 aa, Homo sapiens; identical to SEQ ID NO: 2175
  Payload ID: 543;
  Gene Symbol: ADAM2;
  Gene Name: ADAM metallopeptidase domain 2;
  ENSP ID: ENSP00000480574

SEQ ID NO: 2179 - protein, 735 aa, Homo sapiens; identical to SEQ ID NO: 2173
  Payload ID: 543;
  Gene Symbol: ADAM2;
  Gene Name: ADAM metallopeptidase domain 2;
  Uniprot ID:  Q99965;
  ENSP ID: ENSP00000482337

SEQ ID NO: 2180 - protein, 672 aa, Homo sapiens; identical to SEQ ID NO: 2176
  Payload ID: 543;
  Gene Symbol: ADAM2;
  Gene Name: ADAM metallopeptidase domain 2;
  ENSP ID: ENSP00000483607

SEQ ID NO: 2181 - protein, 716 aa, Homo sapiens; identical to SEQ ID NO: 2174
  Payload ID: 543;
  Gene Symbol: ADAM2;
  Gene Name: ADAM metallopeptidase domain 2;
  Uniprot ID:  Q99965;
  ENSP ID: ENSP00000484999

SEQ ID NO: 2182 - protein, 672 aa, Homo sapiens; identical to SEQ ID NO: 2176
  Payload ID: 543;
  Gene Symbol: ADAM2;
  Gene Name: ADAM metallopeptidase domain 2;
  ENSP ID: ENSP00000488853

SEQ ID NO: 2183 - protein, 776 aa, Homo sapiens
  Payload ID: 544;
  Gene Symbol: ADAM20;
  Gene Name: ADAM metallopeptidase domain 20;
  Uniprot ID:  O43506;
  ENSP ID: ENSP00000256389
MVQLHQDTDPQIPKGQPCTLNSSEGGARPAVPHTLFSSALDRWLHNDSFIMAVGEPLVHIRVTLLLLWFGMFLSISGHSQARPSQYFTSPEVVIPLKVISRGRGAKAPGWLSYSLRFGGQRYIVHMRVNKLLFAAHLPVFTYTEQHALLQDQPFIQDDCYYHGYVEGVPESLVALSTCSGGFLGMLQINDLVYEIKPISVSATFEHLVYKIDSDDTQFPPMRCGLTEEKIAHQMELQLSYNFTLKQSSFVGWWTHQRFVELVVVVDNIRYLFSQSNATTVQHEVFNVVNIVDSFYHPLEVDVILTGIDIWTASNPLPTSGDLDNVLEDFSIWKNYNLNNRLQHDVAHLFIKDTQGMKLGVAYVKGICQNPFNTGVDVFEDNRLVVFAITLGHELGHNLGMQHDTQWCVCELQWCIMHAYRKVTTKFSNCSYAQYWDSTISSGLCIQPPPYPGNIFRLKYCGNLVVEEGEECDCGTIRQCAKDPCCLLNCTLHPGAACAFGICCKDCKFLPSGTLCRQQVGECDLPEWCNGTSHQCPDDVYVQDGISCNVNAFCYEKTCNNHDIQCKEIFGQDARSASQSCYQEINTQGNRFGHCGIVGTTYVKCWTPDIMCGRVQCENVGVIPNLIEHSTVQQFHLNDTTCWGTDYHLGMAIPDIGEVKDGTVCGPEKICIRKKCASMVHLSQACQPKTCNMRGICNNKQHCHCNHEWAPPYCKDKGYGGSADSGPPPKNNMEGLNVMGKLRYLSLLCLLPLVAFLLFCLHVLFKKRTKSKEDEEG

SEQ ID NO: 2184 - protein, 722 aa, Homo sapiens
  Payload ID: 545;
  Gene Symbol: ADAM21;
  Gene Name: ADAM metallopeptidase domain 21;
  Uniprot ID:  Q9UKJ8;
  ENSP ID: ENSP00000474385
MAVDGTLVYIRVTLLLLWLGVFLSISGYCQAGPSQHFTSPEVVIPLKVISRGRSAKAPGWLSYSLRFGGQKHVVHMRVKKLLVSRHLPVFTYTDDRALLEDQLFIPDDCYYHGYVEAAPESLVVFSACFGGFRGVLKISGLTYEIEPIRHSATFEHLVYKINSNETQFPAMRCGLTEKEVARQQLEFEEAENSALEPKSAGDWWTHAWFLELVVVVNHDFFIYSQSNISKVQEDVFLVVNIVDSMYKQLGTYIILIGIEIWNQGNVFPMTSIEQVLNDFSQWKQISLSQLQHDAAHMFIKNSLISILGLAYVAGICRPPIDCGVDNFQGDTWSLFANTVAHELGHTLGMQHDEEFCFCGERGCIMNTFRVPAEKFTNCSYADFMKTTLNQGSCLHNPPRLGEIFMLKRCGNGVVEREEQCDCGSVQQCEQDACCLLNCTLRPGAACAFGLCCKDCKFMPSGELCRQEVNECDLPEWCNGTSHQCPEDRYVQDGIPCSDSAYCYQKRCNNHDQHCREIFGKDAKSASQNCYKEINSQGNRFGHCGINGTTYLKCHISDVFCGRVQCENVRDIPLLQDHFTLQHTHINGVTCWGIDYHLRMNISDIGEVKDGTVCGPGKICIHKKCVSLSVLSHVCLPETCNMKGICNNKHHCHCGYGWSPPYCQHRGYGGSIDSGPASAKRGVFLPLIVIPSLSVLTFLFTVGLLMYLRQCSGPKETKAHSSG

SEQ ID NO: 2185 - protein, 906 aa, Homo sapiens
  Payload ID: 546;
  Gene Symbol: ADAM22;
  Gene Name: ADAM metallopeptidase domain 22;
  Uniprot ID:  Q9P0K1;
  ENSP ID: ENSP00000265727
MQAAVAVSVPFLLLCVLGTCPPARCGQAGDASLMELEKRKENRFVERQSIVPLRLIYRSGGEDESRHDALDTRVRGDLGGPQLTHVDQASFQVDAFGTSFILDVVLNHDLLSSEYIERHIEHGGKTVEVKGGEHCYYQGHIRGNPDSFVALSTCHGLHGMFYDGNHTYLIEPEENDTTQEDFHFHSVYKSRLFEFSLDDLPSEFQQVNITPSKFILKPRPKRSKRQLRRYPRNVEEETKYIELMIVNDHLMFKKHRLSVVHTNTYAKSVVNMADLIYKDQLKTRIVLVAMETWATDNKFAISENPLITLREFMKYRRDFIKEKSDAVHLFSGSQFESSRSGAAYIGGICSLLKGGGVNEFGKTDLMAVTLAQSLAHNIGIISDKRKLASGECKCEDTWSGCIMGDTGYYLPKKFTQCNIEEYHDFLNSGGGACLFNKPSKLLDPPECGNGFIETGEECDCGTPAECVLEGAECCKKCTLTQDSQCSDGLCCKKCKFQPMGTVCREAVNDCDIRETCSGNSSQCAPNIHKMDGYSCDGVQGICFGGRCKTRDRQCKYIWGQKVTASDKYCYEKLNIEGTEKGNCGKDKDTWIQCNKRDVLCGYLLCTNIGNIPRLGELDGEITSTLVVQQGRTLNCSGGHVKLEEDVDLGYVEDGTPCGPQMMCLEHRCLPVASFNFSTCLSSKEGTICSGNGVCSNELKCVCNRHWIGSDCNTYFPHNDDAKTGITLSGNGVAGTNIIIGIIAGTILVLALILGITAWGYKNYREQRQLPQGDYVKKPGDGDSFYSDIPPGVSTNSASSSKKRSNGLSHSWSERIPDTKHISDICENGRPRSNSWQGNLGGNKKKIRGKRFRPRSNSTETLSPAKSPSSSTGSIASSRKYPYPMPPLPDEDKKVNRQSARLWETSI

SEQ ID NO: 2186 - protein, 859 aa, Homo sapiens
  Payload ID: 546;
  Gene Symbol: ADAM22;
  Gene Name: ADAM metallopeptidase domain 22;
  Uniprot ID:  Q9P0K1;
  ENSP ID: ENSP00000381260
MQAAVAVSVPFLLLCVLGTCPPARCGQAGDASLMELEKRKENRFVERQSIVPLRLIYRSGGEDESRHDALDTRVRGDLGGPQLTHVDQASFQVDAFGTSFILDVVLNHDLLSSEYIERHIEHGGKTVEVKGGEHCYYQGHIRGNPDSFVALSTCHGLHGMFYDGNHTYLIEPEENDTTQEDFHFHSVYKSRLFEFSLDDLPSEFQQVNITPSKFILKPRPKRSKRQLRRYPRNVEEETKYIELMIVNDHLMFKKHRLSVVHTNTYAKSVVNMADLIYKDQLKTRIVLVAMETWATDNKFAISENPLITLREFMKYRRDFIKEKSDAVHLFSGSQFESSRSGAAYIGGICSLLKGGGVNEFGKTDLMAVTLAQSLAHNIGIISDKRKLASGECKCEDTWSGCIMGDTGYYLPKKFTQCNIEEYHDFLNSGGGACLFNKPSKLLDPPECGNGFIETGEECDCGTPAECVLEGAECCKKCTLTQDSQCSDGLCCKKCKFQPMGTVCREAVNDCDIRETCSGNSSQCAPNIHKMDGYSCDGVQGICFGGRCKTRDRQCKYIWGQKVTASDKYCYEKLNIEGTEKGNCGKDKDTWIQCNKRDVLCGYLLCTNIGNIPRLGELDGEITSTLVVQQGRTLNCSGGHVKLEEDVDLGYVEDGTPCGPQMMCLEHRCLPVASFNFSTCLSSKEGTICSGNGVCSNELKCVCNRHWIGSDCNTYFPHNDDAKTGITLSGNGVAGTNIIIGIIAGTILVLALILGITAWGYKNYREQRQLPQGDYVKKPGDGDSFYSDIPPGVSTNSASSSKKRSNGLSHSWSERIPDTKHISDICENGRPRSNSWQGNLGGNKKKIRGKRFRPRSNSTE

SEQ ID NO: 2187 - protein, 804 aa, Homo sapiens
  Payload ID: 546;
  Gene Symbol: ADAM22;
  Gene Name: ADAM metallopeptidase domain 22;
  ENSP ID: ENSP00000381261
MELEKRKENRFVERQSIVPLRLIYRSGGEDESRHDALDTRVRGDLGGPQLTHVDQASFQVDAFGTSFILDVVLNHDLLSSEYIERHIEHGGKTVEVKGGEHCYYQGHIRGNPDSFVALSTCHGLHGMFYDGNHTYLIEPEENDTTQEDFHFHSVYKSRLFEFSLDDLPSEFQQVNITPSKFILKPRPKRSKRQLRRYPRNVEEETKYIELMIVNDHLMFKKHRLSVVHTNTYAKSVVNMADLIYKDQLKTRIVLVAMETWATDNKFAISENPLITLREFMKYRRDFIKEKSDAVHLFSGSQFESSRSGAAYIGGICSLLKGGGVNEFGKTDLMAVTLAQSLAHNIGIISDKRKLASGECKCEDTWSGCIMGDTGYYLPKKFTQCNIEEYHDFLNSGGGACLFNKPSKLLDPPECGNGFIETGEECDCGTPAECVLEGAECCKKCTLTQDSQCSDGLCCKKCKFQPMGTVCREAVNDCDIRETCSGNSSQCAPNIHKMDGYSCDGVQGICFGGRCKTRDRQCKYIWGQKVTASDKYCYEKLNIEGTEKGNCGKDKDTWIQCNKRDVLCGYLLCTNIGNIPRLGELDGEITSTLVVQQGRTLNCSGGHVKLEEDVDLGYVEDGTPCGPQMMCLEHRCLPVASFNFSTCLSSKEGTICSGNGVCSNELKCVCNRHWIGSDCNTYFPHNDDAKTGITLSGNGVAGTNIIIGIIAGTILVLALILGITAWGYKNYREQRQLPQGDYVKKPGDGDSFYSDIPPGVSTNSASSSKKRSNGLSHSWSERIPDTKHISDICENGRPRSNSWQG

SEQ ID NO: 2188 - protein, 870 aa, Homo sapiens
  Payload ID: 546;
  Gene Symbol: ADAM22;
  Gene Name: ADAM metallopeptidase domain 22;
  Uniprot ID:  Q9P0K1;
  ENSP ID: ENSP00000381262
MQAAVAVSVPFLLLCVLGTCPPARCGQAGDASLMELEKRKENRFVERQSIVPLRLIYRSGGEDESRHDALDTRVRGDLGGPQLTHVDQASFQVDAFGTSFILDVVLNHDLLSSEYIERHIEHGGKTVEVKGGEHCYYQGHIRGNPDSFVALSTCHGLHGMFYDGNHTYLIEPEENDTTQEDFHFHSVYKSRLFEFSLDDLPSEFQQVNITPSKFILKPRPKRSKRQLRRYPRNVEEETKYIELMIVNDHLMFKKHRLSVVHTNTYAKSVVNMADLIYKDQLKTRIVLVAMETWATDNKFAISENPLITLREFMKYRRDFIKEKSDAVHLFSGSQFESSRSGAAYIGGICSLLKGGGVNEFGKTDLMAVTLAQSLAHNIGIISDKRKLASGECKCEDTWSGCIMGDTGYYLPKKFTQCNIEEYHDFLNSGGGACLFNKPSKLLDPPECGNGFIETGEECDCGTPAECVLEGAECCKKCTLTQDSQCSDGLCCKKCKFQPMGTVCREAVNDCDIRETCSGNSSQCAPNIHKMDGYSCDGVQGICFGGRCKTRDRQCKYIWGQKVTASDKYCYEKLNIEGTEKGNCGKDKDTWIQCNKRDVLCGYLLCTNIGNIPRLGELDGEITSTLVVQQGRTLNCSGGHVKLEEDVDLGYVEDGTPCGPQMMCLEHRCLPVASFNFSTCLSSKEGTICSGNGVCSNELKCVCNRHWIGSDCNTYFPHNDDAKTGITLSGNGVAGTNIIIGIIAGTILVLALILGITAWGYKNYREQRSNGLSHSWSERIPDTKHISDICENGRPRSNSWQGNLGGNKKKIRGKRFRPRSNSTETLSPAKSPSSSTGSIASSRKYPYPMPPLPDEDKKVNRQSARLWETSI

SEQ ID NO: 2189 - protein, 899 aa, Homo sapiens
  Payload ID: 546;
  Gene Symbol: ADAM22;
  Gene Name: ADAM metallopeptidase domain 22;
  Uniprot ID:  Q9P0K1;
  ENSP ID: ENSP00000381267
MQAAVAVSVPFLLLCVLGTCPPARCGQAGDASLMELEKRKENRFVERQSIVPLRLIYRSGGEDESRHDALDTRVRGDLGGPQLTHVDQASFQVDAFGTSFILDVVLNHDLLSSEYIERHIEHGGKTVEVKGGEHCYYQGHIRGNPDSFVALSTCHGLHGMFYDGNHTYLIEPEENDTTQEDFHFHSVYKSRLFEFSLDDLPSEFQQVNITPSKFILKPRPKRSKRQLRRYPRNVEEETKYIELMIVNDHLMFKKHRLSVVHTNTYAKSVVNMADLIYKDQLKTRIVLVAMETWATDNKFAISENPLITLREFMKYRRDFIKEKSDAVHLFSGSQFESSRSGAAYIGGICSLLKGGGVNEFGKTDLMAVTLAQSLAHNIGIISDKRKLASGECKCEDTWSGCIMGDTGYYLPKKFTQCNIEEYHDFLNSGGGACLFNKPSKLLDPPECGNGFIETGEECDCGTPAECVLEGAECCKKCTLTQDSQCSDGLCCKKCKFQPMGTVCREAVNDCDIRETCSGNSSQCAPNIHKMDGYSCDGVQGICFGGRCKTRDRQCKYIWGQKVTASDKYCYEKLNIEGTEKGNCGKDKDTWIQCNKRDVLCGYLLCTNIGNIPRLGELDGEITSTLVVQQGRTLNCSGGHVKLEEDVDLGYVEDGTPCGPQMMCLEHRCLPVASFNFSTCLSSKEGTICSGNGVCSNELKCVCNRHWIGSDCNTYFPHNDDAKTGITLSGNGVAGTNIIIGIIAGTILVLALILGITAWGYKNYREQRSNGLSHSWSERIPDTKHISDICENGRPRSNSWQGNLGGNKKKIRGKRFRPRSNSTEYLNPWFKRDYNVAKWVEDVNKNTEGPYFRTLSPAKSPSSSTGSIASSRKYPYPMPPLPDEDKKVNRQSARLWETSI

SEQ ID NO: 2190 - protein, 342 aa, Homo sapiens
  Payload ID: 546;
  Gene Symbol: ADAM22;
  Gene Name: ADAM metallopeptidase domain 22;
  ENSP ID: ENSP00000391334
MQAAVAVSVPFLLLCVLGTCPPARCGQAGDASLMELEKRKENRFVERQSIVPLRLIYRSGGEDESRHDALDTRVRGDLGGPQLTHVDQASFQVDAFGTSFILDVVLNHDLLSSEYIERHIEHGGKTVEVKGGEHCYYQGHIRGNPDSFVALSTCHGLHGMFYDGNHTYLIEPEENDTTQEDFHFHSVYKSRLFEFSLDDLPSEFQQVNITPSKFILKPRPKRSKRQLRRYPRNVEEETKYIELMIVNDHLMFKKHRLSVVHTNTYAKSVVNMADLIYKDQLKTRIVLVAMETWATDNKFAISENPLITLREFMKYRRDFIKEKSDAVHLFSYVTSVMMYYFF

SEQ ID NO: 2191 - protein, 330 aa, Homo sapiens
  Payload ID: 546;
  Gene Symbol: ADAM22;
  Gene Name: ADAM metallopeptidase domain 22;
  ENSP ID: ENSP00000396233
EEDVDLGYVEDGTPCGPQMMCLEHRCLPVASFNFSTCLSSKEGTICSGNGVCSNELKCVCNRHWIGSDCNTYFPHNDDAKTGITLSGNGVAGTNIIIGIIAGTILVLALILGITAWGYKNYREQRQLPQGDYVKKPGDGDSFYSDIPPGVSTNSASSSKKRSNGLSHSWSERIPDTKHISDICENGRPRSNSWQGNLGGNKKKIRGKRFRPRSNSTEREPQAPEPGHSLAQTVPSQGISPGGSDSPQTGSLDHRYLNPWFKRDYNVAKWVEDVNKNTEGPYFRTLSPAKSPSSSTGSIASSRKYPYPMPPLPDEDKKVNRQSARLWETSI

SEQ ID NO: 2192 - protein, 264 aa, Homo sapiens
  Payload ID: 546;
  Gene Symbol: ADAM22;
  Gene Name: ADAM metallopeptidase domain 22;
  ENSP ID: ENSP00000412085
  MOD_RES (1)..(1): Any amino acid
XCNRHWIGSDCNTYFPHNDDAKTGITLSGNGVAGTNIIIGIIAGTILVLALILGITAWGYKNYREQRQLPQGDYVKKPGDGDSFYSDIPPGVSTNSASSSKKRSAFLSHFQISTCSITHYSISQNISLFCSRSNGLSHSWSERIPDTKHISDICENGRPRSNSWQGNLGGNKKKIRGKRFRPRSNSTEYLNPWFKRDYNVAKWVEDVNKNTEGPYFRTLSPAKSPSSSTGSIASSRKYPYPMPPLPDEDKKVNRQSARLWETSI

SEQ ID NO: 2193 - protein, 196 aa, Homo sapiens
  Payload ID: 546;
  Gene Symbol: ADAM22;
  Gene Name: ADAM metallopeptidase domain 22;
  ENSP ID: ENSP00000413899
MQAAVAVSVPFLLLCVLGTCPPARCGQAGDASLMELEKRKENRFVERQSIVPLRLIYRSGGEDESRHDALDTRVRGDLGGPQIQMFLKSESQKTIYQIQLTHVDQASFQVDAFGTSFILDVVLNHDLLSSEYIERHIEHGGKTVEVKGGEHCYYQGHIRGNPDSFVALSTCHGLHGMFYDGNHTYLIEPEENDTTQ

SEQ ID NO: 2194 - protein, 832 aa, Homo sapiens
  Payload ID: 547;
  Gene Symbol: ADAM23;
  Gene Name: ADAM metallopeptidase domain 23;
  Uniprot ID:  O75077;
  ENSP ID: ENSP00000264377
MKPPGSSSRQPPLAGCSLAGASCGPQRGPAGSVPASAPARTPPCRLLLVLLLLPPLAASSRPRAWGAAAPSAPHWNETAEKNLGVLADEDNTLQQNSSSNISYSNAMQKEITLPSRLIYYINQDSESPYHVLDTKARHQQKHNKAVHLAQASFQIEAFGSKFILDLILNNGLLSSDYVEIHYENGKPQYSKGGEHCYYHGSIRGVKDSKVALSTCNGLHGMFEDDTFVYMIEPLELVHDEKSTGRPHIIQKTLAGQYSKQMKNLTMERGDQWPFLSELQWLKRRKRAVNPSRGIFEEMKYLELMIVNDHKTYKKHRSSHAHTNNFAKSVVNLVDSIYKEQLNTRVVLVAVETWTEKDQIDITTNPVQMLHEFSKYRQRIKQHADAVHLISRVTFHYKRSSLSYFGGVCSRTRGVGVNEYGLPMAVAQVLSQSLAQNLGIQWEPSSRKPKCDCTESWGGCIMEETGVSHSRKFSKCSILEYRDFLQRGGGACLFNRPTKLFEPTECGNGYVEAGEECDCGFHVECYGLCCKKCSLSNGAHCSDGPCCNNTSCLFQPRGYECRDAVNECDITEYCTGDSGQCPPNLHKQDGYACNQNQGRCYNGECKTRDNQCQYIWGTKAAGSDKFCYEKLNTEGTEKGNCGKDGDRWIQCSKHDVFCGFLLCTNLTRAPRIGQLQGEIIPTSFYHQGRVIDCSGAHVVLDDDTDVGYVEDGTPCGPSMMCLDRKCLQIQALNMSSCPLDSKGKVCSGHGVCSNEATCICDFTWAGTDCSIRDPVRNLHPPKDEGPKGPSATNLIIGSIAGAILVAAIVLGGTGWGFKNVKKRRFDPTQQGPI

SEQ ID NO: 2195 - protein, 832 aa, Homo sapiens
  Payload ID: 547;
  Gene Symbol: ADAM23;
  Gene Name: ADAM metallopeptidase domain 23;
  ENSP ID: ENSP00000363536
MKPPGSSSRQPPLAGCSLAGASCGPQRGPAGSVPASAPARTPPCRLLLVLLLLPPLAASSRPRAWGAAAPSAPHWNETAEKNLGVLADEDNTLQQNSSSNISYSNAMQKEITLPSRLIYYINQDSESPYHVLDTKARHQQKHNKAVHLAQASFQIEAFGSKFILDLILNNGLLSSDYVEIHYENGKPQYSKGGEHCYYHGSIRGVKDSKVALSTCNGLHGMFEDDTFVYMIEPLELVHDEKSTGRPHIIQKTLAGQYSKQMKNLTMERGDQWPFLSELQWLKRRKRAVNPSRGIFEEMKYLELMIVNDHKTYKKHRSSHAHTNNFAKSVVNLVDSIYKEQLNTRVVLVAVETWTEKDQIDITTNPVQMLHEFSKYRQRIKQHADAVHLISRVTFHYKRSSLSYFGGVCSRTRGVGVNEYGLPMAVAQVLSQSLAQNLGIQWEPSSRKPKCDCTESWGGCIMEETGVSHSRKFSKCSILEYRDFLQRGGGACLFNRPTKLFEPTECGNGYVEAGEECDCGFHVECYGLCCKKCSLSNGAHCSDGPCCNNTSCLFQPRGYECRDAVNECDITEYCTGDSGQCPPNLHKQDGYACNQNQGRCYNGECKTRDNQCQYIWGTKAAGSDKFCYEKLNTEGTEKGNCGKDGDRWIQCSKHDVFCGFLLCTNLTRAPRIGQLQGEIIPTSFYHQGRVIDCSGAHVVLDDDTDVGYVEDGTPCGPSMMCLDRKCLQIQALNMSSCPLDSKGKVCSGHGVCSNEATCICDFTWAGTDCSIRDPVRNLHPPKDEGPKVNMATSRLIGAVAGTILALGVIFGGTGWGIENVKKRRFDPTQQGPI

SEQ ID NO: 2196 - protein, 107 aa, Homo sapiens
  Payload ID: 547;
  Gene Symbol: ADAM23;
  Gene Name: ADAM metallopeptidase domain 23;
  ENSP ID: ENSP00000406827
  MOD_RES (1)..(1): Any amino acid
XQIQALNMSSCPLDSKGKVCSGHGVCSNEATCICDFTWAGTDCSIRDPVRNLHPPKDEGPKEMSRREGSILLSKAPSESAALDGHRLALLDSGYDILAAVLLELLSL

SEQ ID NO: 2197 - protein, 775 aa, Homo sapiens
  Payload ID: 548;
  Gene Symbol: ADAM28;
  Gene Name: ADAM metallopeptidase domain 28;
  Uniprot ID:  Q9UKQ2;
  ENSP ID: ENSP00000265769
MLQGLLPVSLLLSVAVSAIKELPGVKKYEVVYPIRLHPLHKREAKEPEQQEQFETELKYKMTINGKIAVLYLKKNKNLLAPGYTETYYNSTGKEITTSPQIMDDCYYQGHILNEKVSDASISTCRGLRGYFSQGDQRYFIEPLSPIHRDGQEHALFKYNPDEKNYDSTCGMDGVLWAHDLQQNIALPATKLVKLKDRKVQEHEKYIEYYLVLDNGEFKRYNENQDEIRKRVFEMANYVNMLYKKLNTHVALVGMEIWTDKDKIKITPNASFTLENFSKWRGSVLSRRKRHDIAQLITATELAGTTVGLAFMSTMCSPYSVGVVQDHSDNLLRVAGTMAHEMGHNFGMFHDDYSCKCPSTICVMDKALSFYIPTDFSSCSRLSYDKFFEDKLSNCLFNAPLPTDIISTPICGNQLVEMGEDCDCGTSEECTNICCDAKTCKIKATFQCALGECCEKCQFKKAGMVCRPAKDECDLPEMCNGKSGNCPDDRFQVNGFPCHHGKGHCLMGTCPTLQEQCTELWGPGTEVADKSCYNRNEGGSKYGYCRRVDDTLIPCKANDTMCGKLFCQGGSDNLPWKGRIVTFLTCKTFDPEDTSQEIGMVANGTKCGDNKVCINAECVDIEKAYKSTNCSSKCKGHAVCDHELQCQCEEGWIPPDCDDSSVVFHFSIVVGVLFPMAVIFVVVAMVIRHQSSREKQKKDQRPLSTTGTRPHKQKRKPQMVKAVQPQEMSQMKPHVYDLPVEGNEPPASFHKDTNALPPTVFKDNPVSTPKDSNPKA

SEQ ID NO: 2198 - protein, 540 aa, Homo sapiens
  Payload ID: 548;
  Gene Symbol: ADAM28;
  Gene Name: ADAM metallopeptidase domain 28;
  Uniprot ID:  Q9UKQ2;
  ENSP ID: ENSP00000393699
MLQGLLPVSLLLSVAVSAIKELPGVKKYEVVYPIRLHPLHKREAKEPEQQEQFETELKYKMTINGKIAVLYLKKNKNLLAPGYTETYYNSTGKEITTSPQIMDDCYYQGHILNEKVSDASISTCRGLRGYFSQGDQRYFIEPLSPIHRDGQEHALFKYNPDEKNYDSTCGMDGVLWAHDLQQNIALPATKLVKLKDRKVQEHEKYIEYYLVLDNGEFKRYNENQDEIRKRVFEMANYVNMLYKKLNTHVALVGMEIWTDKDKIKITPNASFTLENFSKWRGSVLSRRKRHDIAQLITATELAGTTVGLAFMSTMCSPYSVGVVQDHSDNLLRVAGTMAHEMGHNFGMFHDDYSCKCPSTICVMDKALSFYIPTDFSSCSRLSYDKFFEDKLSNCLFNAPLPTDIISTPICGNQLVEMGEDCDCGTSEECTNICCDAKTCKIKATFQCALGECCEKCQFKKAGMVCRPAKDECDLPEMCNGKSGNCPDDRFQVNGFPCHHGKGHCLMGTCPTLQEQCTELWGPGRRTNPFPCACAKENHFR

SEQ ID NO: 2199 - protein, 387 aa, Homo sapiens
  Payload ID: 548;
  Gene Symbol: ADAM28;
  Gene Name: ADAM metallopeptidase domain 28;
  ENSP ID: ENSP00000429484
  MOD_RES (1)..(1): Any amino acid
XFYIPTDFSSCSRLSYDKFFEDKLSNCLFNAPLPTDIISTPICGNQLVEMGEDCDCGTSEECTNICCDAKTCKIKATFQCALGECCEKCQFKKAGMVCRPAKDECDLPEMCNGKSGNCPDDRFQVNGFPCHHGKGHCLMGTCPTLQEQCTELWGPGTEVADKSCYNRNEGGSKYGYCRRVDDTLIPCKANDTMCGKLFCQGGSDNLPWKGRIVTFLTCKTFDPEDTSQEIGMVANGTKCGDNKVCINAECVDIEKAYKSTNCSSKCKGHAVCDHELQCQCEEGWIPPDCDDSSVVFHFSIVVGVLFPMAVIFVVVAMVIRHQSSREKQKKDQRPLSTTGTRPHKQKRKPQMVKAVQPQEMSQMKPHVYDLPVEGNEPPASFDSNPKA

SEQ ID NO: 2200 - protein, 217 aa, Homo sapiens
  Payload ID: 548;
  Gene Symbol: ADAM28;
  Gene Name: ADAM metallopeptidase domain 28;
  ENSP ID: ENSP00000430085
MLQGLLPVSLLLSVAVSAIKELPGVKKYEVVYPIRLHPLHKREAKEPEQQEQFETELKYKMTINGKIAVLYLKKNKNLLAPGYTETYYNSTGKEITTSPQIMDDCYYQGHILNEKVSDASISTCRGLRGYFSQGDQRYFIEPLSPIHRDGQEHALFKYNPDEKNYDSTCGMDGVLWAHDLQQNIALPATKLVKLKDRKVQEHEKYIEYYLVLDNGEF

SEQ ID NO: 2201 - protein, 174 aa, Homo sapiens
  Payload ID: 548;
  Gene Symbol: ADAM28;
  Gene Name: ADAM metallopeptidase domain 28;
  ENSP ID: ENSP00000430094
  MOD_RES (1)..(1): Any amino acid
XKGRIVTFLTCKTFDPEDTSQEIGMVANGTKCGDNKVCINAECVDIEKAYKSTNCSSKCKGHAVCDHELQCQCEEGWIPPDCDDSSVVFHFSIVVGVLFPMAVIFVVVAMVIRHQSSREKQKKDQRPLSTTGTRPHKQKRKPQMVKAVQPQEVNYIVWAVITMAPLCVSLTLLS

SEQ ID NO: 2202 - protein, 58 aa, Homo sapiens
  Payload ID: 548;
  Gene Symbol: ADAM28;
  Gene Name: ADAM metallopeptidase domain 28;
  ENSP ID: ENSP00000431108
MLQGLLPVSLLLSVAVSAIKELPGVKKYEVVYPIRLHPLHKREAKEPEQQFLSSMKIS

SEQ ID NO: 2203 - protein, 820 aa, Homo sapiens
  Payload ID: 549;
  Gene Symbol: ADAM29;
  Gene Name: ADAM metallopeptidase domain 29;
  Uniprot ID:  Q9UKF5;
  ENSP ID: ENSP00000352177
MKMLLLLHCLGVFLSCSGHIQDEHPQYHSPPDVVIPVRITGTTRGMTPPGWLSYILPFGGQKHIIHIKVKKLLFSKHLPVFTYTDQGAILEDQPFVQNNCYYHGYVEGDPESLVSLSTCFGGFQGILQINDFAYEIKPLAFSTTFEHLVYKMDSEEKQFSTMRSGFMQNEITCRMEFEEIDNSTQKQSSYVGWWIHFRIVEIVVVIDNYLYIRYERNDSKLLEDLYVIVNIVDSILDVIGVKVLLFGLEIWTNKNLIVVDDVRKSVHLYCKWKSENITPRMQHDTSHLFTTLGLRGLSGIGAFRGMCTPHRSCAIVTFMNKTLGTFSIAVAHHLGHNLGMNHDEDTCRCSQPRCIMHEGNPPITKFSNCSYGDFWEYTVERTKCLLETVHTKDIFNVKRCGNGVVEEGEECDCGPLKHCAKDPCCLSNCTLTDGSTCAFGLCCKDCKFLPSGKVCRKEVNECDLPEWCNGTSHKCPDDFYVEDGIPCKERGYCYEKSCHDRNEQCRRIFGAGANTASETCYKELNTLGDRVGHCGIKNATYIKCNISDVQCGRIQCENVTEIPNMSDHTTVHWARFNDIMCWSTDYHLGMKGPDIGEVKDGTECGIDHICIHRHCVHITILNSNCSPAFCNKRGICNNKHHCHCNYLWDPPNCLIKGYGGSVDSGPPPKRKKKKKFCYLCILLLIVLFILLCCLYRLCKKSKPIKKQQDVQTPSAKEEEKIQRRPHELPPQSQPWVMPSQSQPPVTPSQSHPQVMPSQSQPPVTPSQSQPRVMPSQSQPPVMPSQSHPQLTPSQSQPPVTPSQRQPQLMPSQSQPPVTPS

SEQ ID NO: 2204 - protein, 820 aa, Homo sapiens; identical to SEQ ID NO: 2203
  Payload ID: 549;
  Gene Symbol: ADAM29;
  Gene Name: ADAM metallopeptidase domain 29;
  Uniprot ID:  Q9UKF5;
  ENSP ID: ENSP00000384229

SEQ ID NO: 2205 - protein, 820 aa, Homo sapiens; identical to SEQ ID NO: 2203
  Payload ID: 549;
  Gene Symbol: ADAM29;
  Gene Name: ADAM metallopeptidase domain 29;
  Uniprot ID:  Q9UKF5;
  ENSP ID: ENSP00000414544

SEQ ID NO: 2206 - protein, 44 aa, Homo sapiens
  Payload ID: 549;
  Gene Symbol: ADAM29;
  Gene Name: ADAM metallopeptidase domain 29;
  ENSP ID: ENSP00000422537
MKMLLLLHCLGVFLSCSGHIQDEHPQYHSPPDVVIPVRITGTTR

SEQ ID NO: 2207 - protein, 820 aa, Homo sapiens; identical to SEQ ID NO: 2203
  Payload ID: 549;
  Gene Symbol: ADAM29;
  Gene Name: ADAM metallopeptidase domain 29;
  Uniprot ID:  Q9UKF5;
  ENSP ID: ENSP00000423517

SEQ ID NO: 2208 - protein, 14 aa, Homo sapiens
  Payload ID: 549;
  Gene Symbol: ADAM29;
  Gene Name: ADAM metallopeptidase domain 29;
  ENSP ID: ENSP00000427370
MKMLLLLHCLGVFL

SEQ ID NO: 2209 - protein, 89 aa, Homo sapiens
  Payload ID: 549;
  Gene Symbol: ADAM29;
  Gene Name: ADAM metallopeptidase domain 29;
  ENSP ID: ENSP00000427674
MKMLLLLHCLGVFLSCSGHIQDEHPQYHSPPDVVIPVRITGTTRGMTPPGWLSYILPFGGQKHIIHIKVKKLLFSKHLPVFTYTDQGAI

SEQ ID NO: 2210 - protein, 820 aa, Homo sapiens; identical to SEQ ID NO: 2203
  Payload ID: 549;
  Gene Symbol: ADAM29;
  Gene Name: ADAM metallopeptidase domain 29;
  Uniprot ID:  Q9UKF5;
  ENSP ID: ENSP00000478469

SEQ ID NO: 2211 - protein, 820 aa, Homo sapiens; identical to SEQ ID NO: 2203
  Payload ID: 549;
  Gene Symbol: ADAM29;
  Gene Name: ADAM metallopeptidase domain 29;
  Uniprot ID:  Q9UKF5;
  ENSP ID: ENSP00000484862

SEQ ID NO: 2212 - protein, 790 aa, Homo sapiens
  Payload ID: 550;
  Gene Symbol: ADAM30;
  Gene Name: ADAM metallopeptidase domain 30;
  Uniprot ID:  Q9UKF2;
  ENSP ID: ENSP00000358407
MRSVQIFLSQCRLLLLLVPTMLLKSLGEDVIFHPEGEFDSYEVTIPEKLSFRGEVQGVVSPVSYLLQLKGKKHVLHLWPKRLLLPRHLRVFSFTEHGELLEDHPYIPKDCNYMGSVKESLDSKATISTCMGGLRGVFNIDAKHYQIEPLKASPSFEHVVYLLKKEQFGNQVCGLSDDEIEWQMAPYENKARLRDFPGSYKHPKYLELILLFDQSRYRFVNNNLSQVIHDAILLTGIMDTYFQDVRMRIHLKALEVWTDFNKIRVGYPELAEVLGRFVIYKKSVLNARLSSDWAHLYLQRKYNDALAWSFGKVCSLEYAGSVSTLLDTNILAPATWSAHELGHAVGMSHDEQYCQCRGRLNCIMGSGRTGFSNCSYISFFKHISSGATCLNNIPGLGYVLKRCGNKIVEDNEECDCGSTEECQKDRCCQSNCKLQPGANCSIGLCCHDCRFRPSGYVCRQEGNECDLAEYCDGNSSSCPNDVYKQDGTPCKYEGRCFRKGCRSRYMQCQSIFGPDAMEAPSECYDAVNLIGDQFGNCEITGIRNFKKCESANSICGRLQCINVETIPDLPEHTTIISTHLQAENLMCWGTGYHLSMKPMGIPDLGMINDGTSCGEGRVCFKKNCVNSSVLQFDCLPEKCNTRGVCNNRKNCHCMYGWAPPFCEEVGYGGSIDSGPPGLLRGAIPSSIWVVSIIMFRLILLILSVVFVFFRQVIGNHLKPKQEKMPLSKAKTEQEESKTKTVQEESKTKTGQEESEAKTGQEESKAKTGQEESKANIESKRPKAKSVKKQKK

SEQ ID NO: 2213 - protein, 787 aa, Homo sapiens
  Payload ID: 551;
  Gene Symbol: ADAM32;
  Gene Name: ADAM metallopeptidase domain 32;
  Uniprot ID:  Q8TC27;
  ENSP ID: ENSP00000369238
MFRLWLLLAGLCGLLASRPGFQNSLLQIVIPEKIQTNTNDSSEIEYEQISYIIPIDEKLYTVHLKQRYFLADNFMIYLYNQGSMNTYSSDIQTQCYYQGNIEGYPDSMVTLSTCSGLRGILQFENVSYGIEPLESAVEFQHVLYKLKNEDNDIAIFIDRSLKEQPMDDNIFISEKSEPAVPDLFPLYLEMHIVVDKTLYDYWGSDSMIVTNKVIEIVGLANSMFTQFKVTIVLSSLELWSDENKISTVGEADELLQKFLEWKQSYLNLRPHDIAYLLIYMDYPRYLGAVFPGTMCITRYSAGVALYPKEITLEAFAVIVTQMLALSLGISYDDPKKCQCSESTCIMNPEVVQSNGVKTFSSCSLRSFQNFISNVGVKCLQNKPQMQKKSPKPVCGNGRLEGNEICDCGTEAQCGPASCCDFRTCVLKDGAKCYKGLCCKDCQILQSGVECRPKAHPECDIAENCNGTSPECGPDITLINGLSCKNNKFICYDGDCHDLDARCESVFGKGSRNAPFACYEEIQSQSDRFGNCGRDRNNKYVFCGWRNLICGRLVCTYPTRKPFHQENGDVIYAFVRDSVCITVDYKLPRTVPDPLAVKNGSQCDIGRVCVNRECVESRIIKASAHVCSQQCSGHGVCDSRNKCHCSPGYKPPNCQIRSKGFSIFPEEDMGSIMERASGKTENTWLLGFLIALPILIVTTAIVLARKQLKKWFAKEEEFPSSESKSEGSTQTYASQSSSEGSTQTYASQTRSESSSQADTSKSKSEDSAEAYTSRSKSQDSTQTQSSSN

SEQ ID NO: 2214 - protein, 155 aa, Homo sapiens
  Payload ID: 551;
  Gene Symbol: ADAM32;
  Gene Name: ADAM metallopeptidase domain 32;
  ENSP ID: ENSP00000382727
MFRLWLLLAGLCGLLASRPGFQNSLLQIVIPEKIQTNTNDSSEIEYEQISYIIPIDEKLYTVHLKQRYFLADNFMIYLYNQGSMNTYSSDIQTQCYYQGNIEGYPDSMVTLSTCSGLRSLKEQPMDDNIFISEKSEPAVPDLFPLYLEMHIVVDK

SEQ ID NO: 2215 - protein, 688 aa, Homo sapiens
  Payload ID: 551;
  Gene Symbol: ADAM32;
  Gene Name: ADAM metallopeptidase domain 32;
  ENSP ID: ENSP00000405978
MNVRGAAPGVRASPRPWQFPTSQRLPAGSPEAAPCSASGCCWPGSAASWRQDPEQISYIIPIDEKLYTVHLKQRYFLADNFMIYLYNQGSMNTYSSDIQTQCYYQGNIEGYPDSMVTLSTCSGLRGILQFENVSYGIEPLESAVEFQHVLYKLKNEDNDIAIFIDRSLKEQPMDDNIFISEKSEPAVPDLFPLYLEMHIVVDKTLYDYWGSDSMIVTNKVIEIVGLANSMFTQFKVTIVLSSLELWSDENKISTVGEADELLQKFLEWKQSYLNLRPHDIAYLLIYMDYPRYLGAVFPGTMCITRYSAGVALQCGPASCCDFRTCVLKDGAKCYKGLCCKDCQILQSGVECRPKAHPECDIAENCNGTSPECGPDITLINGLSCKNNKFICYDGDCHDLDARCESVFGKGSRNAPFACYEEIQSQSDRFGNCGRDRNNKYVFCGWRNLICGRLVCTYPTRKPFHQENGDVIYAFVRDSVCITVDYKLPRTVPDPLAVKNGSQCDIGRVCVNRECVESRIIKASAHVCSQQCSGHGVCDSRNKCHCSPGYKPPNCQIRSKGFSIFPEEDMGSIMERASGKTENTWLLGFLIALPILIVTTAIVLARKQLKKWFAKEEEFPSSESKSEGSTQTYASQSSSEGSTQTYASQTRSESSSQADTSKSKSEDSAEAYTSRSKSQDSTQTQSSSN

SEQ ID NO: 2216 - protein, 172 aa, Homo sapiens
  Payload ID: 551;
  Gene Symbol: ADAM32;
  Gene Name: ADAM metallopeptidase domain 32;
  ENSP ID: ENSP00000427735
MQLALFKNMKSWHFILKSGSLFPSLECSHIWLNSFEKILETGLANMNIYLGFQNSLLQIVIPEKIQTNTNDSSEIEYEQISYIIPIDEKLYTVHLKQRYFLADNFMIYLYNQGSMNTYSSDIQTQCYYQGNIEGYPDSMVTLSTCSGLRGILQFENVSYGIEPLESAVEFQH

SEQ ID NO: 2217 - protein, 184 aa, Homo sapiens
  Payload ID: 551;
  Gene Symbol: ADAM32;
  Gene Name: ADAM metallopeptidase domain 32;
  ENSP ID: ENSP00000429066
MFRLWLLLAGLCGLLASRPGFQNSLLQIVIPEKIQTNTNDSSEIEYEQISYIIPIDEKLYTVHLKQRYFLADNFMIYLYNQGSMNTYSSDIQTQCYYQGNIEGYPDSMVTLSTCSGLRGILQFENVSYGIEPLESAVEFQHVLYKLKNEDNDIAIFIDRSLKEQPMDDNIFISEKYDYWGSDSM

SEQ ID NO: 2218 - protein, 629 aa, Homo sapiens
  Payload ID: 551;
  Gene Symbol: ADAM32;
  Gene Name: ADAM metallopeptidase domain 32;
  ENSP ID: ENSP00000429422
MFRLWLLLAGLCGLLASRPGFQNSLLQIVIPEKIQTNTNDSSEIEYEQISYIIPIDEKLYTVHLKQRYFLADNFMIYLYNQGSMNTYSSDIQTQCYYQGNIEGYPDSMVTLSTCSGLRGILQFENVSYGIEPLESAVEFQHVLYKLKNEDNDIAIFIDRSLKEQPMDDNIFISEKSEPAVPDLFPLYLEMHIVVDKTLYDYWGSDSMIVTNKVIEIVGLANSMFTQFKVTIVLSSLELWSDENKISTVGEADELLQKFLEWKQSYLNLRPHDIAYLLIYMDYPRYLGAVFPGTMCITRYSAGVALQCGPASCCDFRTCVLKDGAKCYKGLCCKDCQILQSGVECRPKAHPECDIAENCNGTSPECGPDITLINGLSCKNNKFICYDGDCHDLDARCESVFGKGSRNAPFACYEEIQSQSDRFGNCGRDRNNKYVFCGWRNLICGRLVCTYPTRKPFHQENGDVIYAFVRDSVCITVDYKLPRTVPDPLAVKNGSQCDIGRVCVNRECVESRIIKASAHVCSQQCSGHGVCDSRNKCHCSPGYKPPNCQIRSKGFSIFPEEDMGSIMERASGKTENTWLLGFLIALPILIVTTAIVLARKQLKKWFAKEEEFPSSESKSQDSTQTQSSSN

SEQ ID NO: 2219 - protein, 53 aa, Homo sapiens
  Payload ID: 551;
  Gene Symbol: ADAM32;
  Gene Name: ADAM metallopeptidase domain 32;
  ENSP ID: ENSP00000431050
MIYLYNQGSMNTYSSDIQTQCYYQGNIEGYPDSMVTLSTCSGLRGILQFENVS

SEQ ID NO: 2220 - protein, 629 aa, Homo sapiens
  Payload ID: 551;
  Gene Symbol: ADAM32;
  Gene Name: ADAM metallopeptidase domain 32;
  ENSP ID: ENSP00000483377
MFRLWLLLAGLCGLLASRPGFQNSLLQIVIPEKIQTNTNDSSEIEYEQISYIIPIDEKLYTVHLKQRYFLADNFMIYLYNQGSMNTYSSDIQTQCYYQGNIEGYPDSMVTLSTCSGLRGILQFENVSYGIEPLESAVEFQHVLYKLKNEDNDIAIFIDRSLKEQPMDDNIFISEKSEPAVPDLFPLYLEMHIVVDKTLYDYWGSDSMIVTNKVIEIVGLANSMFTQFKVTIVLSSLELWSDENKISTVGEADELLQKFLEWKQSYLNLRPHDIAYLLIYMDYPRYLGAVFPGTMCITRYSAGVALQCGPASCCDFRTCVLKDGAKCYKGLCCKDCQILQSGVECRPKAHPECDIAENCNGSSPECGPDITLINGLSCKNNKFICYDGDCHDLDARCESVFGKGSRNAPFACYEEIQSQSDRFGNCGRDRNNKYVFCGWRNLICGRLVCTYPTRKPFHQENGDVIYAFVRDSVCITVDYKLPRTVPDPLAVKNGSQCDIGRVCVNRECVESRIIKASAHVCSQQCSGHGVCDSRNKCHCSPGYKPPNCQIRSKGFSIFPEEDMGSIMERASGKTENTWLLGFLIALPILIVTTAIVLARKQLKKWFAKEEEFPSSESKSQDSTQTQSSSN

SEQ ID NO: 2221 - protein, 787 aa, Homo sapiens
  Payload ID: 551;
  Gene Symbol: ADAM32;
  Gene Name: ADAM metallopeptidase domain 32;
  Uniprot ID:  Q8TC27;
  ENSP ID: ENSP00000484817
MFRLWLLLAGLCGLLASRPGFQNSLLQIVIPEKIQTNTNDSSEIEYEQISYIIPIDEKLYTVHLKQRYFLADNFMIYLYNQGSMNTYSSDIQTQCYYQGNIEGYPDSMVTLSTCSGLRGILQFENVSYGIEPLESAVEFQHVLYKLKNEDNDIAIFIDRSLKEQPMDDNIFISEKSEPAVPDLFPLYLEMHIVVDKTLYDYWGSDSMIVTNKVIEIVGLANSMFTQFKVTIVLSSLELWSDENKISTVGEADELLQKFLEWKQSYLNLRPHDIAYLLIYMDYPRYLGAVFPGTMCITRYSAGVALYPKEITLEAFAVIVTQMLALSLGISYDDPKKCQCSESTCIMNPEVVQSNGVKTFSSCSLRSFQNFISNVGVKCLQNKPQMQKKSPKPVCGNGRLEGNEICDCGTEAQCGPASCCDFRTCVLKDGAKCYKGLCCKDCQILQSGVECRPKAHPECDIAENCNGSSPECGPDITLINGLSCKNNKFICYDGDCHDLDARCESVFGKGSRNAPFACYEEIQSQSDRFGNCGRDRNNKYVFCGWRNLICGRLVCTYPTRKPFHQENGDVIYAFVRDSVCITVDYKLPRTVPDPLAVKNGSQCDIGRVCVNRECVESRIIKASAHVCSQQCSGHGVCDSRNKCHCSPGYKPPNCQIRSKGFSIFPEEDMGSIMERASGKTENTWLLGFLIALPILIVTTAIVLARKQLKKWFAKEEEFPSSESKSEGSTQTYASQSSSEGSTQTYASQTRSESSSQADTSKSKSEDSAEAYTSRSKSQDSTQTQSSSN

SEQ ID NO: 2222 - protein, 155 aa, Homo sapiens; identical to SEQ ID NO: 2214
  Payload ID: 551;
  Gene Symbol: ADAM32;
  Gene Name: ADAM metallopeptidase domain 32;
  ENSP ID: ENSP00000487692

SEQ ID NO: 2223 - protein, 53 aa, Homo sapiens; identical to SEQ ID NO: 2219
  Payload ID: 551;
  Gene Symbol: ADAM32;
  Gene Name: ADAM metallopeptidase domain 32;
  ENSP ID: ENSP00000487983

SEQ ID NO: 2224 - protein, 54 aa, Homo sapiens
  Payload ID: 551;
  Gene Symbol: ADAM32;
  Gene Name: ADAM metallopeptidase domain 32;
  ENSP ID: ENSP00000488048
  MOD_RES (1)..(1): Any amino acid
XSKSEGSTQTYASQSSSEGSTQTYASQTRSESSSQADTSKSKSQDSTQTQSSSN

SEQ ID NO: 2225 - protein, 688 aa, Homo sapiens
  Payload ID: 551;
  Gene Symbol: ADAM32;
  Gene Name: ADAM metallopeptidase domain 32;
  ENSP ID: ENSP00000488417
MNVRGAAPGVRASPRPWQFPTSQRLPAGSPEAAPCSASGCCWPGSAASWRQDPEQISYIIPIDEKLYTVHLKQRYFLADNFMIYLYNQGSMNTYSSDIQTQCYYQGNIEGYPDSMVTLSTCSGLRGILQFENVSYGIEPLESAVEFQHVLYKLKNEDNDIAIFIDRSLKEQPMDDNIFISEKSEPAVPDLFPLYLEMHIVVDKTLYDYWGSDSMIVTNKVIEIVGLANSMFTQFKVTIVLSSLELWSDENKISTVGEADELLQKFLEWKQSYLNLRPHDIAYLLIYMDYPRYLGAVFPGTMCITRYSAGVALQCGPASCCDFRTCVLKDGAKCYKGLCCKDCQILQSGVECRPKAHPECDIAENCNGSSPECGPDITLINGLSCKNNKFICYDGDCHDLDARCESVFGKGSRNAPFACYEEIQSQSDRFGNCGRDRNNKYVFCGWRNLICGRLVCTYPTRKPFHQENGDVIYAFVRDSVCITVDYKLPRTVPDPLAVKNGSQCDIGRVCVNRECVESRIIKASAHVCSQQCSGHGVCDSRNKCHCSPGYKPPNCQIRSKGFSIFPEEDMGSIMERASGKTENTWLLGFLIALPILIVTTAIVLARKQLKKWFAKEEEFPSSESKSEGSTQTYASQSSSEGSTQTYASQTRSESSSQADTSKSKSEDSAEAYTSRSKSQDSTQTQSSSN

SEQ ID NO: 2226 - protein, 172 aa, Homo sapiens; identical to SEQ ID NO: 2216
  Payload ID: 551;
  Gene Symbol: ADAM32;
  Gene Name: ADAM metallopeptidase domain 32;
  ENSP ID: ENSP00000488605

SEQ ID NO: 2227 - protein, 184 aa, Homo sapiens; identical to SEQ ID NO: 2217
  Payload ID: 551;
  Gene Symbol: ADAM32;
  Gene Name: ADAM metallopeptidase domain 32;
  ENSP ID: ENSP00000488698

SEQ ID NO: 2228 - protein, 787 aa, Homo sapiens
  Payload ID: 552;
  Gene Symbol: ADAM33;
  Gene Name: ADAM metallopeptidase domain 33;
  Uniprot ID:  Q9BZ11;
  ENSP ID: ENSP00000322550
MGWRPRRARGTPLLLLLLLLLLWPVPGAGVLQGHIPGQPVTPHWVLDGQPWRTVSLEEPVSKPDMGLVALEAEGQELLLELEKNHRLLAPGYIETHYGPDGQPVVLAPNHTDHCHYQGRVRGFPDSWVVLCTCSGMSGLITLSRNASYYLRPWPPRGSKDFSTHEIFRMEQLLTWKGTCGHRDPGNKAGMTSLPGGPQSRGRREARRTRKYLELYIVADHTLFLTRHRNLNHTKQRLLEVANYVDQLLRTLDIQVALTGLEVWTERDRSRVTQDANATLWAFLQWRRGLWAQRPHDSAQLLTGRAFQGATVGLAPVEGMCRAESSGGVSTDHSELPIGAAATMAHEIGHSLGLSHDPDGCCVEAAAESGGCVMAAATGHPFPRVFSACSRRQLRAFFRKGGGACLSNAPDPGLPVPPALCGNGFVEAGEECDCGPGQECRDLCCFAHNCSLRPGAQCAHGDCCVRCLLKPAGALCRQAMGDCDLPEFCTGTSSHCPPDVYLLDGSPCARGSGYCWDGACPTLEQQCQQLWGPGSHPAPEACFQVVNSAGDAHGNCGQDSEGHFLPCAGRDALCGKLQCQGGKPSLLAPHMVPVDSTVHLDGQEVTCRGALALPSAQLDLLGLGLVEPGTQCGPRMVCNSNHNCHCAPGWAPPFCDKPGFGGSMDSGPVQAENHDTFLLAMLLSVLLPLLPGAGLAWCCYRLPGAHLQRCSWGCRRDPACSGPKDGPHRDHPLGGVHPMELGPTATGQPWPLDPENSHEPSSHPEKPLPAVSPDPQADQVQMPRSCLW

SEQ ID NO: 2229 - protein, 813 aa, Homo sapiens
  Payload ID: 552;
  Gene Symbol: ADAM33;
  Gene Name: ADAM metallopeptidase domain 33;
  Uniprot ID:  Q9BZ11;
  ENSP ID: ENSP00000348912
MGWRPRRARGTPLLLLLLLLLLWPVPGAGVLQGHIPGQPVTPHWVLDGQPWRTVSLEEPVSKPDMGLVALEAEGQELLLELEKNHRLLAPGYIETHYGPDGQPVVLAPNHTDHCHYQGRVRGFPDSWVVLCTCSGMSGLITLSRNASYYLRPWPPRGSKDFSTHEIFRMEQLLTWKGTCGHRDPGNKAGMTSLPGGPQSRGRREARRTRKYLELYIVADHTLFLTRHRNLNHTKQRLLEVANYVDQLLRTLDIQVALTGLEVWTERDRSRVTQDANATLWAFLQWRRGLWAQRPHDSAQLLTGRAFQGATVGLAPVEGMCRAESSGGVSTDHSELPIGAAATMAHEIGHSLGLSHDPDGCCVEAAAESGGCVMAAATGHPFPRVFSACSRRQLRAFFRKGGGACLSNAPDPGLPVPPALCGNGFVEAGEECDCGPGQECRDLCCFAHNCSLRPGAQCAHGDCCVRCLLKPAGALCRQAMGDCDLPEFCTGTSSHCPPDVYLLDGSPCARGSGYCWDGACPTLEQQCQQLWGPGSHPAPEACFQVVNSAGDAHGNCGQDSEGHFLPCAGRDALCGKLQCQGGKPSLLAPHMVPVDSTVHLDGQEVTCRGALALPSAQLDLLGLGLVEPGTQCGPRMVCQSRRCRKNAFQELQRCLTACHSHGVCNSNHNCHCAPGWAPPFCDKPGFGGSMDSGPVQAENHDTFLLAMLLSVLLPLLPGAGLAWCCYRLPGAHLQRCSWGCRRDPACSGPKDGPHRDHPLGGVHPMELGPTATGQPWPLDPENSHEPSSHPEKPLPAVSPDPQADQVQMPRSCLW

SEQ ID NO: 2230 - protein, 812 aa, Homo sapiens
  Payload ID: 552;
  Gene Symbol: ADAM33;
  Gene Name: ADAM metallopeptidase domain 33;
  ENSP ID: ENSP00000369190
MGWRPRRARGTPLLLLLLLLLLWPVPGAGVLQGHIPGQPVTPHWVLDGQPWRTVSLEEPVSKPDMGLVALEAEGQELLLELEKNHRLLAPGYIETHYGPDGQPVVLAPNHTDHCHYQGRVRGFPDSWVVLCTCSGMSGLITLSRNASYYLRPWPPRGSKDFSTHEIFRMEQLLTWKGTCGHRDPGNKAGMTSLPGGPQSRGRREARRTRKYLELYIVADHTLFLTRHRNLNHTKQRLLEVANYVDQLLRTLDIQVALTGLEVWTERDRSRVTQDANATLWAFLQWRRGLWAQRPHDSAQLLTGRAFQGATVGLAPVEGMCRAESSGGVSTDHSELPIGAAATMAHEIGHSLGLSHDPDGCCVEAAAESGGCVMAAATGHPFPRVFSACSRRQLRAFFRKGGGACLSNAPDPGLPVPPALCGNGFVEAGEECDCGPGQECRDLCCFAHNCSLRPGAQCAHGDCCVRCLLKPAGALCRQAMGDCDLPEFCTGTSSHCPPDVYLLDGSPCARGSGYCWDGACPTLEQQCQQLWGPGSHPAPEACFQVVNSAGDAHGNCGQDSEGHFLPCAGRDALCGKLQCQGGKPSLLAPHMVPVDSTVHLDGQEVTCRGALALPSAQLDLLGLGLVEPGTQCGPRMVCQSRRCRKNAFQELQRCLTACHSHGVCNSNHNCHCAPGWAPPFCDKPGFGGSMDSGPVQAENHDTFLLAMLLSVLLPLLPGAGLAWCCYRLPGAHLQRCSWGCRRDPACSGPKDGPHRDHPLGGVHPMELGPTATGQPWPLDPENSHEPSSHPEKPLPAVSPDPQDQVQMPRSCLW

SEQ ID NO: 2231 - protein, 138 aa, Homo sapiens
  Payload ID: 552;
  Gene Symbol: ADAM33;
  Gene Name: ADAM metallopeptidase domain 33;
  ENSP ID: ENSP00000483343
MGWRPRRARGTPLLLLLLLLLLWPVPGAGVLQGHIPGQPVTPHWVLDGQPWRTVSLEEPVSKPDMGLVALEAEGQELLLELEKNHRLLAPGYIETHYGPDGQPVVLAPNHTVRCFHGLWDAPPEVPPHHSYPYSSLHS

SEQ ID NO: 2232 - protein, 692 aa, Homo sapiens
  Payload ID: 552;
  Gene Symbol: ADAM33;
  Gene Name: ADAM metallopeptidase domain 33;
  ENSP ID: ENSP00000484600
MGWRPRRARGTPLLLLLLLLLLWPVPGAGVLQGHIPGQPVTPHWVLDGQPWRTVSLEEPVSKPDMGLVALEAEGQELLLELEKNHRLLAPGYIETHYGPDGQPVVLAPNHTDHCHYQGRVRGFPDSWVVLCTCSGMSGLITLSRNASYYLRPWPPRGSKDFSTHEIFRMEQLLTWKGTCGHRDPGNKAGMTSLPGGPQSRGRREARRTRKYLELYIVADHTLFLTRHRNLNHTKQRLLEVANYVDQLLRTLDIQVALTGLEVWTERDRSRRQLRAFFRKGGGACLSNAPDPGLPVPPALCGNGFVEAGEECDCGPGQECRDLCCFAHNCSLRPGAQCAHGDCCVRCLLKPAGALCRQAMGDCDLPEFCTGTSSHCPPDVYLLDGSPCARGSGYCWDGACPTLEQQCQQLWGPGSHPAPEACFQVVNSAGDAHGNCGQDSEGHFLPCAGRDALCGKLQCQGGKPSLLAPHMVPVDSTVHLDGQEVTCRGALALPSAQLDLLGLGLVEPGTQCGPRMVCQSRRCRKNAFQELQRCLTACHSHGVCNSNHNCHCAPGWAPPFCDKPGFGGSMDSGPVQAENHDTFLLAMLLSVLLPLLPGAGLAWCCYRLPGAHLQRCSWGCRRDPACSGPKDGPHRDHPLGGVHPMELGPTATGQPWPLDPENSHEPSSHPEKPLPAVSPDPQDQVQMPRSCLW

SEQ ID NO: 2233 - protein, 754 aa, Homo sapiens
  Payload ID: 553;
  Gene Symbol: ADAM7;
  Gene Name: ADAM metallopeptidase domain 7;
  Uniprot ID:  Q9H2U9;
  ENSP ID: ENSP00000175238
MLPGCIFLMILLIPQVKEKFILGVEGQQLVRPKKLPLIQKRDTGHTHDDDILKTYEEELLYEIKLNRKTLVLHLLRSREFLGSNYSETFYSMKGEAFTRHPQIMDHCFYQGSIVHEYDSAASISTCNGLRGFFRINDQRYLIEPVKYSDEGEHLVFKYNLRVPYGANYSCTELNFTRKTVPGDNESEEDSKIKGIHDEKYVELFIVADDTVYRRNGHPHNKLRNRIWGMVNFVNMIYKTLNIHVTLVGIEIWTHEDKIELYSNIETTLLRFSFWQEKILKTRKDFDHVVLLSGKWLYSHVQGISYPGGMCLPYYSTSIIKDLLPDTNIIANRMAHQLGHNLGMQHDEFPCTCPSGKCVMDSDGSIPALKFSKCSQNQYHQYLKDYKPTCMLNIPFPYNFHDFQFCGNKKLDEGEECDCGPAQECTNPCCDAHTCVLKPGFTCAEGECCESCQIKKAGSICRPAKDECDFPEMCTGHSPACPKDQFRVNGFPCKNSEGYCFMGKCPTREDQCSELFDDEAIESHDICYKMNTKGNKFGYCKNKENRFLPCEEKDVRCGKIYCTGGELSSLLGEDKTYHLKDPQKNATVKCKTIFLYHDSTDIGLVASGTKCGEGMVCNNGECLNMEKVYISTNCPSQCNENPVDGHGLQCHCEEGQAPVACEETLHVTNITILVVVLVLVIVGIGVLILLVRYRKCIKLKQVQSPPTETLGVENKGYFGDEQQIRTEPILPEIHFLNKPASKDSRGIADPNQSAK

SEQ ID NO: 2234 - protein, 776 aa, Homo sapiens
  Payload ID: 553;
  Gene Symbol: ADAM7;
  Gene Name: ADAM metallopeptidase domain 7;
  ENSP ID: ENSP00000370166
MLPGCIFLMILLIPQVKEKFILGVEGQQLVRPKKLPLIQKRDTGHTHDDDILKTYEEELLYEIKLNRKTLVLHLLRSREFLGSNYSETFYSMKGEAFTRHPQIMDHCFYQGSIVHEYDSAASISTCNGLRGFFRINDQRYLIEPVKYSDEGEHLVFKYNLRVPYGANYSCTELNFTRKTVPGDNESEEDSKIKGIHDEKYVELFIVADDTVYRRNGHPHNKLRNRIWGMVNFVNMIYKTLNIHVTLVGIEIWTHEDKIELYSNIETTLLRFSFWQEKILKTRKDFDHVVLLSGKWLYSHVQGISYPGGMCLPYYSTSIIKDLLPDTNIIANRMAHQLGHNLGMQHDEFPCTCPSGKCVMDSDGSIPALKFSKCSQNQYHQYLKDYKPTCMLNIPFPYNFHDFQFCGNKKLDEGEECDCGPAQECTNPCCDAHTCVLKPGFTCAEGECCESCQIKKAGSICRPAKDECDFPEMCTGHSPACPKDQFRVNGFPCKNSEGYCFMGKCPTREDQCSELFDDEAIESHDICYKMNTKGNKFGYCKNKENRFLPCEEKDVRCGKIYCTGGELSSLLGEDKTYHLKDPQKNATVKCKTIFLYHDSTDIGLVASGTKCGEGMVCNNGECLNMEKVYISTNCPSQCNENPVDGHGLQCHCEEGQAPVACEETLHVTNITILVVVLVLVIVGIGVLILLVRYRKCIKLKQVQSPPTETLGVENKGYFGDEQQIRTEPILPEIHFLNQRTPESLESLPTSFSSPHYITLKPASKDSRGIADPNQSAK

SEQ ID NO: 2235 - protein, 210 aa, Homo sapiens
  Payload ID: 553;
  Gene Symbol: ADAM7;
  Gene Name: ADAM metallopeptidase domain 7;
  Uniprot ID:  Q9H2U9;
  ENSP ID: ENSP00000393073
MLPGCIFLMILLIPQVKEKFILGVEGQQLVRPKKLPLIQKRDTGHTHDDDILKTYEEELLYEIKLNRKTLVLHLLRSREFLGSNYSETFYSMKGEAFTRHPQIMDHCFYQGSIVHEYDSAASISTCNGLRGFFRINDQRYLIEPVKYSDEGEHLVFKYNLRVPYGANYSCTELNFTRKTVPGDNESEEDSKIKVSTLLLSLPQMKHLLFS

SEQ ID NO: 2236 - protein, 516 aa, Homo sapiens
  Payload ID: 553;
  Gene Symbol: ADAM7;
  Gene Name: ADAM metallopeptidase domain 7;
  ENSP ID: ENSP00000430400
MVNFVNMIYKTLNIHVTLVGIEIWTHEDKIELYSNIETTLLRFSFWQEKILKTRKDFDHVVLLSGKWLYSHVQGISYPGGMCLPYYSTSIIKDLLPDTNIIANRMAHQLGHNLGMQHDEFPCTCPSGKCVMDSDGSIPALKFSKCSQNQYHQYLKDYKPTCMLNIPFPYNFHDFQFCGNKKLDEGEECDCGPAQECTNPCCDAHTCVLKPGFTCAEGECCESCQIKKAGSICRPAKDECDFPEMCTGHSPACPKDQFRVNGFPCKNSEGYCFMGKCPTREDQCSELFDDEAIESHDICYKMNTKGNKFGYCKNKENRFLPCEEKDVRCGKIYCTGGELSSLLGEDKTYHLKDPQKNATVKCKTIFLYHDSTDIGLVASGTKCGEGMVCNNGECLNMEKVYISTNCPSQCNENPVDGHGLQCHCEEGQAPVACEETLHVTNITILVVVLVLVIVGIGVLILLVRYRKCIKLKQVQSPPTETLGVENKGYFGDEQQIRTEPILPEIHFLNHLLYGRHQ

SEQ ID NO: 2237 - protein, 109 aa, Homo sapiens
  Payload ID: 554;
  Gene Symbol: ADAM8;
  Gene Name: ADAM metallopeptidase domain 8;
  ENSP ID: ENSP00000452994
MRGLGLWLLGAMMLPGPAPREGELRPWGHRAQLHPPPAEEQGPAGLRLHRDLYGCQWLRGDGAASRAGPLLLPGPRRGVPGLSRQPQHLCRPQGFLPGGVRPAPDRAPG

SEQ ID NO: 2238 - protein, 733 aa, Homo sapiens
  Payload ID: 554;
  Gene Symbol: ADAM8;
  Gene Name: ADAM metallopeptidase domain 8;
  Uniprot ID:  P78325;
  ENSP ID: ENSP00000453043
MRGLGLWLLGAMMLPGPAPREGELRPWGHRAQLHPPPAEEQGPAGLRLHRDLYGCQWLRGDGAASRAGPLLLPGPRRGVPGLSRQPQHLCRPQVGSDLHLIEPLDEGGEGGRHAVYQAEHLLQTAGTCGVSDDSLGSLLGPRTAAVFRPRPGDSLPSRETRYVELYVVVDNAEFQMLGSEAAVRHRVLEVVNHVDKLYQKLNFRVVLVGLEIWNSQDRFHVSPDPSVTLENLLTWQARQRTRRHLHDNVQLITGVDFTGTTVGFARVSAMCSHSSGAVNQDHSKNPVGVACTMAHEMGHNLGMDHDENVQGCRCQERFEAGRCIMAGSIGSSFPRMFSDCSQAYLESFLERPQSVCLANAPDLSHLVGGPVCGNLFVERGEQCDCGPPEDCRNRCCNSTTCQLAEGAQCAHGTCCQECKVKPAGELCRPKKDMCDLEEFCDGRHPECPEDAFQENGTPCSGGYCYNGACPTLAQQCQAFWGPGGQAAEESCFSYDILPGCKASRYRADMCGVLQCKGGQQPLGRAICIVDVCHALTTEDGTAYEPVPEGTRCGPEKVCNHKQECHCHAGWAPPHCAKLLTEVHAASGSLPVFVVVVLVLLAVVLVTLAGIIVYRKARSRILSRNVAPKTTMGRSNPLFHQAASRVPAKGGAPAPSRGPQELVPTTHPGQPARHPASSVALKRPPPAPPVTVSSPPFPVPVYTRQAPKQGAVGPKVALKPPIQRKQGAGAPTAP

SEQ ID NO: 2239 - protein, 824 aa, Homo sapiens
  Payload ID: 554;
  Gene Symbol: ADAM8;
  Gene Name: ADAM metallopeptidase domain 8;
  Uniprot ID:  P78325;
  ENSP ID: ENSP00000453302
MRGLGLWLLGAMMLPAIAPSRPWALMEQYEVVLPWRLPGPRVRRALPSHLGLHPERVSYVLGATGHNFTLHLRKNRDLLGSGYTETYTAANGSEVTEQPRGQDHCFYQGHVEGYPDSAASLSTCAGLRGFFQVGSDLHLIEPLDEGGEGGRHAVYQAEHLLQTAGTCGVSDDSLGSLLGPRTAAVFRPRPGDSLPSRETRYVELYVVVDNAEFQMLGSEAAVRHRVLEVVNHVDKLYQKLNFRVVLVGLEIWNSQDRFHVSPDPSVTLENLLTWQARQRTRRHLHDNVQLITGVDFTGTTVGFARVSAMCSHSSGAVNQDHSKNPVGVACTMAHEMGHNLGMDHDENVQGCRCQERFEAGRCIMAGSIGSSFPRMFSDCSQAYLESFLERPQSVCLANAPDLSHLVGGPVCGNLFVERGEQCDCGPPEDCRNRCCNSTTCQLAEGAQCAHGTCCQECKVKPAGELCRPKKDMCDLEEFCDGRHPECPEDAFQENGTPCSGGYCYNGACPTLAQQCQAFWGPGGQAAEESCFSYDILPGCKASRYRADMCGVLQCKGGQQPLGRAICIVDVCHALTTEDGTAYEPVPEGTRCGPEKVCWKGRCQDLHVYRSSNCSAQCHNHGVCNHKQECHCHAGWAPPHCAKLLTEVHAASGSLPVFVVVVLVLLAVVLVTLAGIIVYRKARSRILSRNVAPKTTMGRSNPLFHQAASRVPAKGGAPAPSRGPQELVPTTHPGQPARHPASSVALKRPPPAPPVTVSSPPFPVPVYTRQAPKQVIKPTFAPPVPPVKPGAGAANPGPAEGAVGPKVALKPPIQRKQGAGAPTAP

SEQ ID NO: 2240 - protein, 245 aa, Homo sapiens
  Payload ID: 554;
  Gene Symbol: ADAM8;
  Gene Name: ADAM metallopeptidase domain 8;
  ENSP ID: ENSP00000453735
MRGLGLWLLGAMMLPAIAPSRPWALMEQYEVVLPWRLPGPRVRRALPSHLGGQFRPQPCPYLSIRGTYYRPARCPGLIQPVAQLRLSQSSAGRAPACTWGLEMQWSSRRLCRHHQGLHPERVSYVLGATGHNFTLHLRKNRDLLGSGYTETYTAANGSEVTEQPRGQDHCFYQGHVEGYPDSAASLSTCAGLRGFFQVGSDLHLIEPLDEGGEGGRHAVYQAEHLLQTAGTCGVSDDSLGSLLGP

SEQ ID NO: 2241 - protein, 742 aa, Homo sapiens
  Payload ID: 554;
  Gene Symbol: ADAM8;
  Gene Name: ADAM metallopeptidase domain 8;
  Uniprot ID:  P78325;
  ENSP ID: ENSP00000453855
MRGLGLWLLGAMMLPAIAPSRPWALMEQYEVVLPWRLPGPRVRRALPSHLGLHPERVSYVLGATGHNFTLHLRKNRDLLGSGYTETYTAANGSEVTEQPRGQDHCFYQGHVEGYPDSAASLSTCAGLRGFFQVGSDLHLIEPLDEGGEGGRHAVYQAEHLLQTAGTCGVSDDSLGSLLGPRTAAVFRPRPGDSLPSRETRYVELYVVVDNAEFQMLGSEAAVRHRVLEVVNHVDKLYQKLNFRVVLVGLEIWNSQDRFHVSPDPSVTLENLLTWQARQRTRRHLHDNVQLITGVDFTGTTVGFARVSAMCSHSSGAVNQDHSKNPVGVACTMAHEMGHNLGMDHDENVQGCRCQERFEAGRCIMAGSIGSSFPRMFSDCSQAYLESFLERPQSVCLANAPDLSHLVGGPVCGNLFVERGEQCDCGPPEDCRNRCCNSTTCQLAEGAQCAHGTCCQECKVKPAGELCRPKKDMCDLEEFCDGRHPECPEDAFQENGTPCSGGYCYNGACPTLAQQCQAFWGPGGQAAEESCFSYDILPGCKASRYRADMCGVLQCKGGQQPLGRAICIVDVCHALTTEDGTAYEPVPEGTRCGPEKVCWKGRCQDLHVYRSSNCSAQCHNHGVCNHKQECHCHAGWAPPHCAKLLTEVHAGCQPRAGQGRGSSPIQGPPRAGPHHPPGPARPTPGLLGGSEEAAPCSSGHCVQPTLPSSCLHPAGTKAGHQANVRTPSAPSQTRGWCGQPWSS

SEQ ID NO: 2242 - protein, 655 aa, Homo sapiens
  Payload ID: 555;
  Gene Symbol: ADAM9;
  Gene Name: ADAM metallopeptidase domain 9;
  Uniprot ID:  Q13443;
  ENSP ID: ENSP00000369249
MGSGARFPSGTLRVRWLLLLGLVGPVLGAARPGFQQTSHLSSYEIITPWRLTRERREAPRPYSKQVSYVIQAEGKEHIIHLERNKDLLPEDFVVYTYNKEGTLITDHPNIQNHCHYRGYVEGVHNSSIALSDCFGLRGLLHLENASYGIEPLQNSSHFEHIIYRMDDVYKEPLKCGVSNKDIEKETAKDEEEEPPSMTQLLRRRRAVLPQTRYVELFIVVDKERYDMMGRNQTAVREEMILLANYLDSMYIMLNIRIVLVGLEIWTNGNLINIVGGAGDVLGNFVQWREKFLITRRRHDSAQLVLKKGFGGTAGMAFVGTVCSRSHAGGINVFGQITVETFASIVAHELGHNLGMNHDDGRDCSCGAKSCIMNSGASGSRNFSSCSAEDFEKLTLNKGGNCLLNIPKPDEAYSAPSCGNKLVDAGEECDCGTPKECELDPCCEGSTCKLKSFAECAYGDCCKDCRFLPGGTLCRGKTSECDVPEYCNGSSQFCQPDVFIQNGYPCQNNKAYCYNGMCQYYDAQCQVIFGSKAKAAPKDCFIEVNSKGDRFGNCGFSGNEYKKCATGNALCGKLQCENVQEIPVFGIVPAIIQTPSRGTKCWGVDFQLGSDVPDPGMVNEGTKCGAGKICRNFQCVDASVLNYDCDVQKKCHGHGK

SEQ ID NO: 2243 - protein, 128 aa, Homo sapiens
  Payload ID: 555;
  Gene Symbol: ADAM9;
  Gene Name: ADAM metallopeptidase domain 9;
  ENSP ID: ENSP00000417066
MGSGARFPSGTLRVRWLLLLGLVGPVLGAARPGFQQTSHLSSYEIITPWRLTRERREAPRPYSKQVSYVIQAEGKEHIIHLERNKDLLPEDFVVYTYNKEGTLITDHPNIQVMYFSLDPIANFKTIII

SEQ ID NO: 2244 - protein, 712 aa, Homo sapiens
  Payload ID: 555;
  Gene Symbol: ADAM9;
  Gene Name: ADAM metallopeptidase domain 9;
  ENSP ID: ENSP00000418437
MGSGARFPSGTLRVRWLLLLGLVGPVLGAARPGFQQTSHLSSYEIITPWRLTRERREAPRPYSKQVSYVIQAEGKEHIIHLERNKDLLPEDFVVYTYNKEGTLITDHPNIQNHCHYRGYVEGVHNSSIALSDCFGLRGLLHLENASYGIEPLQNSSHFEHIIYRMDDVYKEPLKCGVSNKDIEKETAKDEEEEPPSMTQLLRRRRAVLPQTRYVELFIVVDKERYDMMGRNQTAVREEMILLANYLDSMYIMLNIRIVLVGLEIWTNGNLINIVGGAGDVLGNFVQWREKFLITRRRHDSAQLVLKKGFGGTAGMAFVGTVCSRSHAGGINVFGQITVETFASIVAHELGHNLGMNHDDGRDCSCGAKSCIMNSGASGSRNFSSCSAEDFEKLTLNKGGNCLLNIPKPDEAYSAPSCGNKLVDAGEECDCGTPKECELDPCCEGSTCKLKSFAECAYGDCCKDCRFLPGGTLCRGKTSECDVPEYCNGSSQFCQPDVFIQNGYPCQNNKAYCYNGMCQYYDAQCQVIFGSKAKAAPKDCFIEVNSKGDRFGNCGFSGNEYKKCATGNALCGKLQCENVQEIPVFGIVPAIIQTPSRGTKCWGVDFQLGSDVPDPGMVNEGTKCGAGKICRNFQCVDASVLNYDCDVQKKCHGHGVCNSNKNCHCENGWAPPNCETKGYGGSVDSGPTYNGQMAKIKQTLLDSRGVFLDMFLQ

SEQ ID NO: 2245 - protein, 628 aa, Homo sapiens
  Payload ID: 555;
  Gene Symbol: ADAM9;
  Gene Name: ADAM metallopeptidase domain 9;
  ENSP ID: ENSP00000418737
MGSGARFPSGTLRVRWLLLLGLVGPVLGAARPGFQQTSHLSSYEIITPWRLTRERREAPRPYSKQVSYVIQAEGKEHIIHLERNKDLLPEDFVVYTYNKEGTLITDHPNIQNHCHYRGYVEGVHNSSIALSDCFGLRGLLHLENASYGIEPLQNSSHFEHIIYRMDDVYKEPLKCGVSNKDIEKETAKDEEEEPPSMTQLLRRRRAVLPQTRYVELFIVVDKERYDMMGRNQTAVREEMILLANYLDSMYIMLNIRIVLVGLEIWTNGNLINIVGGAGDVLGNFVQWREKFLITRRRHDSAQLVLKKGFGGTAGMAFVGTVCSRSHAGGINVFGQITVETFASIVAHELGHNLGMNHDDGRDCSCGAKSCIMNSGASGSRNFSSCSAEDFEKLTLNKGGNCLLNIPKPDEAYSAPSCGNKLVDAGEECDCGTPKECELDPCCEGSTCKLKSFAECAYGDCCKDCRFLPGGTLCRGKTSECDVPEYCNGSSQFCQPDVFIQNGYPCQNNKAYCYNGMCQYYDAQCQVIFGSKAKAAPKDCFIEVNSKGDRFGNCGFSGNEYKKCATGNALCGKLQCENVQEIPVFGIVPAIIQTPSRGTKCWGVDFQLGSDVPDPGMVNEGTKCGAGKK

SEQ ID NO: 2246 - protein, 819 aa, Homo sapiens
  Payload ID: 555;
  Gene Symbol: ADAM9;
  Gene Name: ADAM metallopeptidase domain 9;
  Uniprot ID:  Q13443;
  ENSP ID: ENSP00000419446
MGSGARFPSGTLRVRWLLLLGLVGPVLGAARPGFQQTSHLSSYEIITPWRLTRERREAPRPYSKQVSYVIQAEGKEHIIHLERNKDLLPEDFVVYTYNKEGTLITDHPNIQNHCHYRGYVEGVHNSSIALSDCFGLRGLLHLENASYGIEPLQNSSHFEHIIYRMDDVYKEPLKCGVSNKDIEKETAKDEEEEPPSMTQLLRRRRAVLPQTRYVELFIVVDKERYDMMGRNQTAVREEMILLANYLDSMYIMLNIRIVLVGLEIWTNGNLINIVGGAGDVLGNFVQWREKFLITRRRHDSAQLVLKKGFGGTAGMAFVGTVCSRSHAGGINVFGQITVETFASIVAHELGHNLGMNHDDGRDCSCGAKSCIMNSGASGSRNFSSCSAEDFEKLTLNKGGNCLLNIPKPDEAYSAPSCGNKLVDAGEECDCGTPKECELDPCCEGSTCKLKSFAECAYGDCCKDCRFLPGGTLCRGKTSECDVPEYCNGSSQFCQPDVFIQNGYPCQNNKAYCYNGMCQYYDAQCQVIFGSKAKAAPKDCFIEVNSKGDRFGNCGFSGNEYKKCATGNALCGKLQCENVQEIPVFGIVPAIIQTPSRGTKCWGVDFQLGSDVPDPGMVNEGTKCGAGKICRNFQCVDASVLNYDCDVQKKCHGHGVCNSNKNCHCENGWAPPNCETKGYGGSVDSGPTYNEMNTALRDGLLVFFFLIVPLIVCAIFIFIKRDQLWRSYFRKKRSQTYESDGKNQANPSRQPGSVPRHVSPVTPPREVPIYANRFAVPTYAAKQPQQFPSRPPPPQPKVSSQGNLIPARPAPAPPLYSSLT

SEQ ID NO: 2247 - protein, 147 aa, Homo sapiens
  Payload ID: 555;
  Gene Symbol: ADAM9;
  Gene Name: ADAM metallopeptidase domain 9;
  ENSP ID: ENSP00000420257
MGSGARFPSGTLRVRWLLLLGLVGPVLGAARPGFQQTSHLSSYEIITPWRLTRERREAPRPYSKQVSYVIQAEGKEHIIHLERNKDLLPEDFVVYTYNKEGTLITDHPNIQRCGPLCIREQSTPGDRAGQNTQNNWQMSNLAFCVYY

SEQ ID NO: 2248 - protein, 53 aa, Homo sapiens
  Payload ID: 555;
  Gene Symbol: ADAM9;
  Gene Name: ADAM metallopeptidase domain 9;
  ENSP ID: ENSP00000488700
PIYANRFAVPTYAAKQPQQFPSRPPPPQPKVSSQGNLIPARPAPAPPLYSSLT

SEQ ID NO: 2249 - protein, 344 aa, Homo sapiens
  Payload ID: 556;
  Gene Symbol: ADAMTS13;
  Gene Name: ADAM metallopeptidase with thrombospondin type 1, motif 13;
  ENSP ID: ENSP00000485845
MHQRHPRARCPPLCVAGILACGFLLGCWGPSHFQQSCLQALEPQAVSSYLSPGAPLKGRPPSPGFQRQRQRQRRAAGGILHLELLVAVGPDVFQAHQEDTERYVLTNLNIGAELLRDPSLGAQFRVHLVKMVILTEPEGAPNITANLTSSLLSVCGWSQTINPEDDTDPGHADLVLYITRFDLELPDGNRQVRGVTQLGGACSPTWSCLITEDTGFDLGVTIAHEIGHSFGLEHDGAPGSGCGPSGHVMASDGAAPRAGLAWSPCSRRQLLSLLRPVPPSPLPLLATHLCAGRSLSLGPSQEPAPGGGRGPRTPVPTHKRPRFQTLPSSCPLLRPASSRCTPRD

SEQ ID NO: 2250 - protein, 1340 aa, Homo sapiens
  Payload ID: 556;
  Gene Symbol: ADAMTS13;
  Gene Name: ADAM metallopeptidase with thrombospondin type 1, motif 13;
  ENSP ID: ENSP00000485989
MHQRHPRARCPPLCVAGILACGFLLGCWGPSHFQQSCLQALEPQAVSSYLSPGAPLKGRPPSPGFQRQRQRQRRAAGGILHLELLVAVGPDVFQAHQEDTERYVLTNLNIGAELLRDPSLGAQFRVHLVKMVILTEPEGAPNITANLTSSLLSVCGWSQTINPEDDTDPGHADLVLYITRFDLELPDGNRQVRGVTQLGGACSPTWSCLITEDTGFDLGVTIAHEIGHSFGLEHDGAPGSGCGPSGHVMASDGAAPRAGLAWSPCSRRQLLSLLSANEQCRVAFGPKAVACTFAREHLDMCQALSCHTDPLDQSSCSRLLVPLLDGTECGVEKWCSKGRCRSLVELTPIAAVHGRWSSWGPRSPCSRSCGGGVVTRRRQCNNPRPAFGGRACVGADLQAEMCNTQACEKTQLEFMSQQCARTDGQPLRSSPGGASFYHWGAAVPHSQGDALCRHMCRAIGESFIMKRGDSFLDGTRCMPSGPREDGTLSLCVSGSCRTFGCDGRMDSQQVWDRCQVCGGDNSTCSPRKGSFTAGRAREYVTFLTVTPNLTSVYIANHRPLFTHLAVRIGGRYVVAGKMSISPNTTYPSLLEDGRVEYRVALTEDRLPRLEEIRIWGPLQEDADIQVYRRYGEEYGNLTRPDITFTYFQPKPRQAWVWAAVRGPCSVSCGAGLRWVNYSCLDQARKELVETVQCQGSQQPPAWPEACVLEPCPPYWAVGDFGPCSASCGGGLRERPVRCVEAQGSLLKTLPPARCRAGAQQPAVALETCNPQPCPARWEVSEPSSCTSAGGAGLALENETCVPGADGLEAPVTEGPGSVDEKLPAPEPCVGMSCPPGWGHLDATSAGEKAPSPWGSIRTGAQAAHVWTPAAGSCSVSCGRGLMELRFLCMDSALRVPVQEELCGLASKPGSRREVCQAVPCPARWQYKLAACSVSCGRGVVRRILYCARAHGEDDGEEILLDTQCQGLPRPEPQEACSLEPCPPRWKVMSLGPCSASCGLGTARRSVACVQLDQGQDVEVDEAACAALVRPEASVPCLIADCTYRWHVGTWMECSVSCGDGIQRRRDTCLGPQAQAPVPADFCQHLPKPVTVRGCWAGPCVGQGACGRQHLEPTGTIDMRGPGQADCAVAIGRPLGEVVTLRVLESSLNCSAGDMLLLWGRLTWRKMCRKLLDMTFSSKTNTLVVRQRCGRPGGGVLLRYGSQLAPETFYRECDMQLFGPWGEIVSPSLSPATSNAGGCRLFINVAPHARIAIHALATNMGAGTEGANASYILIRDTHSLRTTAFHGQQVLYWESESSQAEMEFSEGFLKAQASLRGQYWTLQSWVPEMQDPQSWKGKEGT

SEQ ID NO: 2251 - protein, 344 aa, Homo sapiens; identical to SEQ ID NO: 2249
  Payload ID: 556;
  Gene Symbol: ADAMTS13;
  Gene Name: ADAM metallopeptidase with thrombospondin type 1, motif 13;
  ENSP ID: ENSP00000486060

SEQ ID NO: 2252 - protein, 1427 aa, Homo sapiens
  Payload ID: 556;
  Gene Symbol: ADAMTS13;
  Gene Name: ADAM metallopeptidase with thrombospondin type 1, motif 13;
  ENSP ID: ENSP00000486201
MHQRHPRARCPPLCVAGILACGFLLGCWGPSHFQQSCLQALEPQAVSSYLSPGAPLKGRPPSPGFQRQRQRQRRAAGGILHLELLVAVGPDVFQAHQEDTERYVLTNLNIGAELLRDPSLGAQFRVHLVKMVILTEPEGAPNITANLTSSLLSVCGWSQTINPEDDTDPGHADLVLYITRFDLELPDGNRQVRGVTQLGGACSPTWSCLITEDTGFDLGVTIAHEIGHSFGLEHDGAPGSGCGPSGHVMASDGAAPRAGLAWSPCSRRQLLSLLSAGRARCVWDPPRPQPGSAGHPPDAQPGLYYSANEQCRVAFGPKAVACTFAREHLDMCQALSCHTDPLDQSSCSRLLVPLLDGTECGVEKWCSKGRCRSLVELTPIAAVHGRWSSWGPRSPCSRSCGGGVVTRRRQCNNPRPAFGGRACVGADLQAEMCNTQACEKTQLEFMSQQCARTDGQPLRSSPGGASFYHWGAAVPHSQGDALCRHMCRAIGESFIMKRGDSFLDGTRCMPSGPREDGTLSLCVSGSCRTFGCDGRMDSQQVWDRCQVCGGDNSTCSPRKGSFTAGRAREYVTFLTVTPNLTSVYIANHRPLFTHLAVRIGGRYVVAGKMSISPNTTYPSLLEDGRVEYRVALTEDRLPRLEEIRIWGPLQEDADIQVYRRYGEEYGNLTRPDITFTYFQPKPRQAWVWAAVRGPCSVSCGAGLRWVNYSCLDQARKELVETVQCQGSQQPPAWPEACVLEPCPPYWAVGDFGPCSASCGGGLRERPVRCVEAQGSLLKTLPPARCRAGAQQPAVALETCNPQPCPARWEVSEPSSCTSAGGAGLALENETCVPGADGLEAPVTEGPGSVDEKLPAPEPCVGMSCPPGWGHLDATSAGEKAPSPWGSIRTGAQAAHVWTPAAGSCSVSCGRGLMELRFLCMDSALRVPVQEELCGLASKPGSRREVCQAVPCPARWQYKLAACSVSCGRGVVRRILYCARAHGEDDGEEILLDTQCQGLPRPEPQEACSLEPCPPRWKVMSLGPCSASCGLGTARRSVACVQLDQGQDVEVDEAACAALVRPEASVPCLIADCTYRWHVGTWMECSVSCGDGIQRRRDTCLGPQAQAPVPADFCQHLPKPVTVRGCWAGPCVGQGTPSLVPHEEAAAPGRTTATPAGASLEWSQARGLLFSPAPQPRRLLPGPQENSVQSSACGRQHLEPTGTIDMRGPGQADCAVAIGRPLGEVVTLRVLESSLNCSAGDMLLLWGRLTWRKMCRKLLDMTFSSKTNTLVVRQRCGRPGGGVLLRYGSQLAPETFYRECDMQLFGPWGEIVSPSLSPATSNAGGCRLFINVAPHARIAIHALATNMGAGTEGANASYILIRDTHSLRTTAFHGQQVLYWESESSQAEMEFSEGFLKAQASLRGQYWTLQSWVPEMQDPQSWKGKEGT

SEQ ID NO: 2253 - protein, 276 aa, Homo sapiens
  Payload ID: 556;
  Gene Symbol: ADAMTS13;
  Gene Name: ADAM metallopeptidase with thrombospondin type 1, motif 13;
  ENSP ID: ENSP00000486371
MHQRHPRARCPPLCVAGILACGFLLGCWGPSHFQQSCLQALEPQAVSSYLSPGAPLKGRPPSPGFQRQRQRQRRAAGGILHLELLVAVGPDVFQAHQEDTERYVLTNLNIGAELLRDPSLGAQFRVHLVKMVILTEPEGAPNITANLTSSLLSVCGWSQTINPEDDTDPGHADLVLYITRFDLELPDGNRQVRGVTQLGGACSPTWSCLITEDTGFDLGVTIAHEIGHRICARPSPATQTRWTKAAAAASSFLSWMGQNVAWRSGAPRVAAAPWWS

SEQ ID NO: 2254 - protein, 1371 aa, Homo sapiens
  Payload ID: 556;
  Gene Symbol: ADAMTS13;
  Gene Name: ADAM metallopeptidase with thrombospondin type 1, motif 13;
  ENSP ID: ENSP00000486734
MHQRHPRARCPPLCVAGILACGFLLGCWGPSHFQQSCLQALEPQAVSSYLSPGAPLKGRPPSPGFQRQRQRQRRAAGGILHLELLVAVGPDVFQAHQEDTERYVLTNLNIGAELLRDPSLGAQFRVHLVKMVILTEPEGAPNITANLTSSLLSVCGWSQTINPEDDTDPGHADLVLYITRFDLELPDGNRQVRGVTQLGGACSPTWSCLITEDTGFDLGVTIAHEIGHSFGLEHDGAPGSGCGPSGHVMASDGAAPRAGLAWSPCSRRQLLSLLSAGRARCVWDPPRPQPGSAGHPPDAQPGLYYSANEQCRVAFGPKAVACTFAREHLDMCQALSCHTDPLDQSSCSRLLVPLLDGTECGVEKWCSKGRCRSLVELTPIAAVHGRWSSWGPRSPCSRSCGGGVVTRRRQCNNPRPAFGGRACVGADLQAEMCNTQACEKTQLEFMSQQCARTDGQPLRSSPGGASFYHWGAAVPHSQGDALCRHMCRAIGESFIMKRGDSFLDGTRCMPSGPREDGTLSLCVSGSCRTFGCDGRMDSQQVWDRCQVCGGDNSTCSPRKGSFTAGRAREYVTFLTVTPNLTSVYIANHRPLFTHLAVRIGGRYVVAGKMSISPNTTYPSLLEDGRVEYRVALTEDRLPRLEEIRIWGPLQEDADIQVYRRYGEEYGNLTRPDITFTYFQPKPRQAWVWAAVRGPCSVSCGAGLRWVNYSCLDQARKELVETVQCQGSQQPPAWPEACVLEPCPPYWAVGDFGPCSASCGGGLRERPVRCVEAQGSLLKTLPPARCRAGAQQPAVALETCNPQPCPARWEVSEPSSCTSAGGAGLALENETCVPGADGLEAPVTEGPGSVDEKLPAPEPCVGMSCPPGWGHLDATSAGEKAPSPWGSIRTGAQAAHVWTPAAGSCSVSCGRGLMELRFLCMDSALRVPVQEELCGLASKPGSRREVCQAVPCPARWQYKLAACSVSCGRGVVRRILYCARAHGEDDGEEILLDTQCQGLPRPEPQEACSLEPCPPRWKVMSLGPCSASCGLGTARRSVACVQLDQGQDVEVDEAACAALVRPEASVPCLIADCTYRWHVGTWMECSVSCGDGIQRRRDTCLGPQAQAPVPADFCQHLPKPVTVRGCWAGPCVGQGACGRQHLEPTGTIDMRGPGQADCAVAIGRPLGEVVTLRVLESSLNCSAGDMLLLWGRLTWRKMCRKLLDMTFSSKTNTLVVRQRCGRPGGGVLLRYGSQLAPETFYRECDMQLFGPWGEIVSPSLSPATSNAGGCRLFINVAPHARIAIHALATNMGAGTEGANASYILIRDTHSLRTTAFHGQQVLYWESESSQAEMEFSEGFLKAQASLRGQYWTLQSWVPEMQDPQSWKGKEGT

SEQ ID NO: 2255 - protein, 444 aa, Homo sapiens
  Payload ID: 556;
  Gene Symbol: ADAMTS13;
  Gene Name: ADAM metallopeptidase with thrombospondin type 1, motif 13;
  ENSP ID: ENSP00000487185
MASDGAAPRAGLAWSPCSRRQLLSLLSAGRARCVWDPPRPQPGSAGHPPDAQPGLYYSANEQCRVAFGPKAVACTFAREHLDMCQALSCHTDPLDQSSCSRLLVPLLDGTECGVEKWCSKGRCRSLVELTPIAAVHGRWSSWGPRSPCSRSCGGGVVTRRRQCNNPRPAFGGRACVGADLQAEMCNTQACEKTQLEFMSQQCARTDGQPLRSSPGGASFYHWGAAVPHSQGDALCRHMCRAIGESFIMKRGDSFLDGTRCMPSGPREDGTLSLCVSGSCRTFGCDGRMDSQQVWDRCQVCGGDNSTCSPRKGSFTAGRAREYVTFLTVTPNLTSVYIANHRPLFTHLAVRIGGRYVVAGKMSISPNTTYPSLLEDGRVEYRVALTEDRLPRLEEIRIWGPLQEDADIQVGGVRAQLMHISWWSRPGLGERDLCARGRWPGGSSD

SEQ ID NO: 2256 - protein, 223 aa, Homo sapiens
  Payload ID: 556;
  Gene Symbol: ADAMTS13;
  Gene Name: ADAM metallopeptidase with thrombospondin type 1, motif 13;
  ENSP ID: ENSP00000487509
MRGPGQADCAVAIGRPLGEVVTLRVLESSLNCSAGDMLLLWGRLTWRKMCRKLLDMTFSSKTNTLVVRQRCGRPGGGVLLRYGSQLAPETFYRECDMQLFGPWGEIVSPSLSPATSNAGGCRLFINVAPHARIAIHALATNMGAGTEGANASYILIRDTHSLRTTAFHGQQVLYWESESSQAEMEFSEGFLKAQASLRGQYWTLQSWVPEMQDPQSWKGKEGT

SEQ ID NO: 2257 - protein, 967 aa, Homo sapiens
  Payload ID: 557;
  Gene Symbol: ADAMTS1;
  Gene Name: ADAM metallopeptidase with thrombospondin type 1 motif, 1;
  Uniprot ID:  Q9UHI8;
  ENSP ID: ENSP00000284984
MQRAVPEGFGRRKLGSDMGNAERAPGSRSFGPVPTLLLLAAALLAVSDALGRPSEEDEELVVPELERAPGHGTTRLRLHAFDQQLDLELRPDSSFLAPGFTLQNVGRKSGSETPLPETDLAHCFYSGTVNGDPSSAAALSLCEGVRGAFYLLGEAYFIQPLPAASERLATAAPGEKPPAPLQFHLLRRNRQGDVGGTCGVVDDEPRPTGKAETEDEDEGTEGEDEGAQWSPQDPALQGVGQPTGTGSIRKKRFVSSHRYVETMLVADQSMAEFHGSGLKHYLLTLFSVAARLYKHPSIRNSVSLVVVKILVIHDEQKGPEVTSNAALTLRNFCNWQKQHNPPSDRDAEHYDTAILFTRQDLCGSQTCDTLGMADVGTVCDPSRSCSVIEDDGLQAAFTTAHELGHVFNMPHDDAKQCASLNGVNQDSHMMASMLSNLDHSQPWSPCSAYMITSFLDNGHGECLMDKPQNPIQLPGDLPGTSYDANRQCQFTFGEDSKHCPDAASTCSTLWCTGTSGGVLVCQTKHFPWADGTSCGEGKWCINGKCVNKTDRKHFDTPFHGSWGMWGPWGDCSRTCGGGVQYTMRECDNPVPKNGGKYCEGKRVRYRSCNLEDCPDNNGKTFREEQCEAHNEFSKASFGSGPAVEWIPKYAGVSPKDRCKLICQAKGIGYFFVLQPKVVDGTPCSPDSTSVCVQGQCVKAGCDRIIDSKKKFDKCGVCGGNGSTCKKISGSVTSAKPGYHDIITIPTGATNIEVKQRNQRGSRNNGSFLAIKAADGTYILNGDYTLSTLEQDIMYKGVVLRYSGSSAALERIRSFSPLKEPLTIQVLTVGNALRPKIKYTYFVKKKKESFNAIPTFSAWVIEEWGECSKSCELGWQRRLVECRDINGQPASECAKEVKPASTRPCADHPCPQWQLGEWSSCSKTCGKGYKKRSLKCLSHDGGVLSHESCDPLKKPKHFIDFCTMAECS

SEQ ID NO: 2258 - protein, 200 aa, Homo sapiens
  Payload ID: 557;
  Gene Symbol: ADAMTS1;
  Gene Name: ADAM metallopeptidase with thrombospondin type 1 motif, 1;
  ENSP ID: ENSP00000403404
  MOD_RES (1)..(1): Any amino acid
XCRSFLLRPSLCAVLILQFFLFHHFGTGSIRKKRFVSSHRYVETMLVADQSMAEFHGSGLKHYLLTLFSVAARLYKHPSIRNSVSLVVVKILVIHDEQKGPEVTSNAALTLRNFCNWQKQHNPPSDRDAEHYDTAILFTRQDLCGSQTCDTLGMADVGTVCDPSRSCSVIEDDGLQAAFTTAHELGHVFNMPHDDAKQCA

SEQ ID NO: 2259 - protein, 171 aa, Homo sapiens
  Payload ID: 557;
  Gene Symbol: ADAMTS1;
  Gene Name: ADAM metallopeptidase with thrombospondin type 1 motif, 1;
  ENSP ID: ENSP00000429557
MLVADQSMAEFHGSGLKHYLLTLFSVAARLYKHPSIRNSVSLVVVKILVIHDEQKGPEVTSNAALTLRNFCNWQKQHNPPSDRDAEHYDTAILFTRQDLCGSQTCDTLGMADVGTVCDPSRSCSVIEDDGLQAAFTTAHELGHVFNMPHDDAKQCASLNGVNQDSHMMASM

SEQ ID NO: 2260 - protein, 128 aa, Homo sapiens
  Payload ID: 557;
  Gene Symbol: ADAMTS1;
  Gene Name: ADAM metallopeptidase with thrombospondin type 1 motif, 1;
  ENSP ID: ENSP00000431065
MVTWEGTGSIRKKRFVSSHRYVETMLVADQSMAEFHGSGLKHYLLTLFSVAARLYKHPSIRNSVSLVVVKILVIHDEQKGPEVTSNAALTLRNFCNWQKQHNPPSDRDAEHYDTAILFTRQDLCGSQT

SEQ ID NO: 2261 - protein, 1103 aa, Homo sapiens
  Payload ID: 558;
  Gene Symbol: ADAMTS10;
  Gene Name: ADAM metallopeptidase with thrombospondin type 1 motif, 10;
  ENSP ID: ENSP00000270328
MAPACQILRWALALGLGLMFEVTHAFRSQDEFLSSLESYEIAFPTRVDHNGALLAFSPPPPRRQRRGTGATAESRLFYKVASPSTHFLLNLTRSSRLLAGHVSVEYWTREGLAWQRAARPHCLYAGHLQGQASSSHVAISTCGGLHGLIVADEEEYLIEPLHGGPKGSRSPEESGPHVVYKRSSLRHPHLDTACGVRDEKPWKGRPWWLRTLKPPPARPLGNETERGQPGLKRSVSRERYVETLVVADKMMVAYHGRRDVEQYVLAIMNIVAKLFQDSSLGSTVNILVTRLILLTEDQPTLEITHHAGKSLDSFCKWQKSIVNHSGHGNAIPENGVANHDTAVLITRYDICIYKNKPCGTLGLAPVGGMCERERSCSVNEDIGLATAFTIAHEIGHTFGMNHDGVGNSCGARGQDPAKLMAAHITMKTNPFVWSSCSRDYITSFLDSGLGLCLNNRPPRQDFVYPTVAPGQAYDADEQCRFQHGVKSRQCKYGEVCSELWCLSKSNRCITNSIPAAEGTLCQTHTIDKGWCYKRVCVPFGSRPEGVDGAWGPWTPWGDCSRTCGGGVSSSSRHCDSPRPTIGGKYCLGERRRHRSCNTDDCPPGSQDFREVQCSEFDSIPFRGKFYKWKTYRGGGVKACSLTCLAEGFNFYTERAAAVVDGTPCRPDTVDICVSGECKHVGCDRVLGSDLREDKCRVCGGDGSACETIEGVFSPASPGAGYEDVVWIPKGSVHIFIQDLNLSLSHLALKGDQESLLLEGLPGTPQPHRLPLAGTTFQLRQGPDQVQSLEALGPINASLIVMVLARTELPALRYRFNAPIARDSLPPYSWHYAPWTKCSAQCAGGSQVQAVECRNQLDSSAVAPHYCSAHSKLPKRQRACNTEPCPPDWVVGNWSLCSRSCDAGVRSRSVVCQRRVSAAEEKALDDSACPQPRPPVLEACHGPTCPPEWAALDWSECTPSCGPGLRHRVVLCKSADHRATLPPAHCSPAAKPPATMRCNLRRCPPARWVAGEWGECSAQCGVGQRQRSVRCTSHTGQASHECTEALRPPTTQQCEAKCDSPTPGDGPEECKDVNKVAYCPLVLKFQFCSRAYFRQMCCKTCHGH

SEQ ID NO: 2262 - protein, 126 aa, Homo sapiens
  Payload ID: 558;
  Gene Symbol: ADAMTS10;
  Gene Name: ADAM metallopeptidase with thrombospondin type 1 motif, 10;
  ENSP ID: ENSP00000469516
MGPTSVLRAGLTPSCLPPPSGATNGSVSPLGRAQRVWTEPGGRGLHGATAAGPVAAACPLLAVTATAPGQPSGASTVWVREGGTAPATRMTVPLAPRTSEKCSVLNLTASLSVGNSTSGKRTGEGA

SEQ ID NO: 2263 - protein, 289 aa, Homo sapiens
  Payload ID: 558;
  Gene Symbol: ADAMTS10;
  Gene Name: ADAM metallopeptidase with thrombospondin type 1 motif, 10;
  ENSP ID: ENSP00000469559
MAPACQILRWALALGLGLMFEVTHAFRSQDEFLSSLESYEIAFPTRVDHNGALLAFSPPPPRRQRRGTGATAESRLFYKVASPSTHFLLNLTRSSRLLAGHVSVEYWTREGLAWQRAARPHCLYAGHLQGQASSSHVAISTCGGLHGLIVADEEEYLIEPLHGGPKGSRSPEESGPHVVYKRSSLRHPHLDTACGVRDEKPWKGRPWWLRTLKPPPARPLGNETERGQPGLKRSVSRERYVETLVVADKMMVAYHGRRDVEQYVLAIMNIVRLPNFSRTRVWEAPLTSS

SEQ ID NO: 2264 - protein, 289 aa, Homo sapiens; identical to SEQ ID NO: 2263
  Payload ID: 558;
  Gene Symbol: ADAMTS10;
  Gene Name: ADAM metallopeptidase with thrombospondin type 1 motif, 10;
  ENSP ID: ENSP00000469901

SEQ ID NO: 2265 - protein, 590 aa, Homo sapiens
  Payload ID: 558;
  Gene Symbol: ADAMTS10;
  Gene Name: ADAM metallopeptidase with thrombospondin type 1 motif, 10;
  Uniprot ID:  Q9H324;
  ENSP ID: ENSP00000470501
MGPTSVLRAGLTPSCLPPPSGATNGSVSPLGRAQRVWTEPGGRGLHGATAAGPVAAACPLLAVTATAPGQPSGASTVWVREGGTAPATRMTVPLAPRTSEKCSVLNLTASLSVGNSTSGKRTGEACSLTCLAEGFNFYTERAAAVVDGTPCRPDTVDICVSGECKHVGCDRVLGSDLREDKCRVCGGDGSACETIEGVFSPASPGAGYEDVVWIPKGSVHIFIQDLNLSLSHLALKGDQESLLLEGLPGTPQPHRLPLAGTTFQLRQGPDQVQSLEALGPINASLIVMVLARTELPALRYRFNAPIARDSLPPYSWHYAPWTKCSAQCAGGSQVQAVECRNQLDSSAVAPHYCSAHSKLPKRQRACNTEPCPPDWVVGNWSLCSRSCDAGVRSRSVVCQRRVSAAEEKALDDSACPQPRPPVLEACHGPTCPPEWAALDWSECTPSCGPGLRHRVVLCKSADHRATLPPAHCSPAAKPPATMRCNLRRCPPARWVAGEWGECSAQCGVGQRQRSVRCTSHTGQASHECTEALRPPTTQQCEAKCDSPTPGDGPEECKDVNKVAYCPLVLKFQFCSRAYFRQMCCKTCHGH

SEQ ID NO: 2266 - protein, 1103 aa, Homo sapiens; identical to SEQ ID NO: 2261
  Payload ID: 558;
  Gene Symbol: ADAMTS10;
  Gene Name: ADAM metallopeptidase with thrombospondin type 1 motif, 10;
  ENSP ID: ENSP00000471851

SEQ ID NO: 2267 - protein, 1509 aa, Homo sapiens
  Payload ID: 559;
  Gene Symbol: ADAMTS12;
  Gene Name: ADAM metallopeptidase with thrombospondin type 1 motif, 12;
  Uniprot ID:  P58397;
  ENSP ID: ENSP00000344847
MPCAQRSWLANLSVVAQLLNFGALCYGRQPQPGPVRFPDRRQEHFIKGLPEYHVVGPVRVDASGHFLSYGLHYPITSSRRKRDLDGSEDWVYYRISHEEKDLFFNLTVNQGFLSNSYIMEKRYGNLSHVKMMASSAPLCHLSGTVLQQGTRVGTAALSACHGLTGFFQLPHGDFFIEPVKKHPLVEGGYHPHIVYRRQKVPETKEPTCGLKDSVNISQKQELWREKWERHNLPSRSLSRRSISKERWVETLVVADTKMIEYHGSENVESYILTIMNMVTGLFHNPSIGNAIHIVVVRLILLEEEEQGLKIVHHAEKTLSSFCKWQKSINPKSDLNPVHHDVAVLLTRKDICAGFNRPCETLGLSHLSGMCQPHRSCNINEDSGLPLAFTIAHELGHSFGIQHDGKENDCEPVGRHPYIMSRQLQYDPTPLTWSKCSEEYITRFLDRGWGFCLDDIPKKKGLKSKVIAPGVIYDVHHQCQLQYGPNATFCQEVENVCQTLWCSVKGFCRSKLDAAADGTQCGEKKWCMAGKCITVGKKPESIPGGWGRWSPWSHCSRTCGAGVQSAERLCNNPEPKFGGKYCTGERKRYRLCNVHPCRSEAPTFRQMQCSEFDTVPYKNELYHWFPIFNPGYVDIGLIPKGARDIRVMEIEGAGNFLAIRSEDPEKYYLNGGFIIQWNGNYKLAGTVFQYDRKGDLEKLMATGPTNESVWIQLLFQVTNPGIKYEYTIQKDGLDNDVEQQMYFWQYGHWTECSVTCGTGIRRQTAHCIKKGRGMVKATFCDPETQPNGRQKKCHEKACPPRWWAGEWEACSATCGPHGEKKRTVLCIQTMVSDEQALPPTDCQHLLKPKTLLSCNRDILCPSDWTVGNWSECSVSCGGGVRIRSVTCAKNHDEPCDVTRKPNSRALCGLQQCPSSRRVLKPNKGTISNGKNPPTLKPVPPPTSRPRMLTTPTGPESMSTSTPAISSPSPTTASKEGDLGGKQWQDSSTQPELSSRYLISTGSTSQPILTSQSLSIQPSEENVSSSDTGPTSEGGLVATTTSGSGLSSSRNPITWPVTPFYNTLTKGPEMEIHSGSGEEREQPEDKDESNPVIWTKIRVPGNDAPVESTEMPLAPPLTPDLSRESWWPPFSTVMEGLLPSQRPTTSETGTPRVEGMVTEKPANTLLPLGGDHQPEPSGKTANRNHLKLPNNMNQTKSSEPVLTEEDATSLITEGFLLNASNYKQLTNGHGSAHWIVGNWSECSTTCGLGAYWRRVECSTQMDSDCAAIQRPDPAKRCHLRPCAGWKVGNWSKCSRNCSGGFKIREIQCVDSRDHRNLRPFHCQFLAGIPPPLSMSCNPEPCEAWQVEPWSQCSRSCGGGVQERGVFCPGGLCDWTKRPTSTMSCNEHLCCHWATGNWDLCSTSCGGGFQKRTVQCVPSEGNKTEDQDQCLCDHKPRPPEFKKCNQQACKKSADLLCTKDKLSASFCQTLKAMKKCSVPTVRAECCFSCPQTHITHTQRQRRQRLLQKSKEL

SEQ ID NO: 2268 - protein, 232 aa, Homo sapiens
  Payload ID: 559;
  Gene Symbol: ADAMTS12;
  Gene Name: ADAM metallopeptidase with thrombospondin type 1 motif, 12;
  ENSP ID: ENSP00000421638
MPCAQRSWLANLSVVAQLLNFGALCYGRQPQPGPVRFPDRRQEHFIKGLPEYHVVGPVRVDASGHFLSYGLHYPITSSRRKRDLDGSEDWVYYRISHEEKDLFFNLTVNQGFLSNSYIMEKRYGNLSHVKMMASSAPLCHLSGTVLQQGTRVGTAALSACHGLTGFFQLPHGDFFIEPVKKHPLVEGGYHPHIVYRRQKVPETKEPTCGLKGIVTHMSSWVEESVLFFWLFY

SEQ ID NO: 2269 - protein, 1594 aa, Homo sapiens
  Payload ID: 559;
  Gene Symbol: ADAMTS12;
  Gene Name: ADAM metallopeptidase with thrombospondin type 1 motif, 12;
  Uniprot ID:  P58397;
  ENSP ID: ENSP00000422554
MPCAQRSWLANLSVVAQLLNFGALCYGRQPQPGPVRFPDRRQEHFIKGLPEYHVVGPVRVDASGHFLSYGLHYPITSSRRKRDLDGSEDWVYYRISHEEKDLFFNLTVNQGFLSNSYIMEKRYGNLSHVKMMASSAPLCHLSGTVLQQGTRVGTAALSACHGLTGFFQLPHGDFFIEPVKKHPLVEGGYHPHIVYRRQKVPETKEPTCGLKDSVNISQKQELWREKWERHNLPSRSLSRRSISKERWVETLVVADTKMIEYHGSENVESYILTIMNMVTGLFHNPSIGNAIHIVVVRLILLEEEEQGLKIVHHAEKTLSSFCKWQKSINPKSDLNPVHHDVAVLLTRKDICAGFNRPCETLGLSHLSGMCQPHRSCNINEDSGLPLAFTIAHELGHSFGIQHDGKENDCEPVGRHPYIMSRQLQYDPTPLTWSKCSEEYITRFLDRGWGFCLDDIPKKKGLKSKVIAPGVIYDVHHQCQLQYGPNATFCQEVENVCQTLWCSVKGFCRSKLDAAADGTQCGEKKWCMAGKCITVGKKPESIPGGWGRWSPWSHCSRTCGAGVQSAERLCNNPEPKFGGKYCTGERKRYRLCNVHPCRSEAPTFRQMQCSEFDTVPYKNELYHWFPIFNPAHPCELYCRPIDGQFSEKMLDAVIDGTPCFEGGNSRNVCINGICKMVGCDYEIDSNATEDRCGVCLGDGSSCQTVRKMFKQKEGSGYVDIGLIPKGARDIRVMEIEGAGNFLAIRSEDPEKYYLNGGFIIQWNGNYKLAGTVFQYDRKGDLEKLMATGPTNESVWIQLLFQVTNPGIKYEYTIQKDGLDNDVEQQMYFWQYGHWTECSVTCGTGIRRQTAHCIKKGRGMVKATFCDPETQPNGRQKKCHEKACPPRWWAGEWEACSATCGPHGEKKRTVLCIQTMVSDEQALPPTDCQHLLKPKTLLSCNRDILCPSDWTVGNWSECSVSCGGGVRIRSVTCAKNHDEPCDVTRKPNSRALCGLQQCPSSRRVLKPNKGTISNGKNPPTLKPVPPPTSRPRMLTTPTGPESMSTSTPAISSPSPTTASKEGDLGGKQWQDSSTQPELSSRYLISTGSTSQPILTSQSLSIQPSEENVSSSDTGPTSEGGLVATTTSGSGLSSSRNPITWPVTPFYNTLTKGPEMEIHSGSGEEREQPEDKDESNPVIWTKIRVPGNDAPVESTEMPLAPPLTPDLSRESWWPPFSTVMEGLLPSQRPTTSETGTPRVEGMVTEKPANTLLPLGGDHQPEPSGKTANRNHLKLPNNMNQTKSSEPVLTEEDATSLITEGFLLNASNYKQLTNGHGSAHWIVGNWSECSTTCGLGAYWRRVECSTQMDSDCAAIQRPDPAKRCHLRPCAGWKVGNWSKCSRNCSGGFKIREIQCVDSRDHRNLRPFHCQFLAGIPPPLSMSCNPEPCEAWQVEPWSQCSRSCGGGVQERGVFCPGGLCDWTKRPTSTMSCNEHLCCHWATGNWDLCSTSCGGGFQKRTVQCVPSEGNKTEDQDQCLCDHKPRPPEFKKCNQQACKKSADLLCTKDKLSASFCQTLKAMKKCSVPTVRAECCFSCPQTHITHTQRQRRQRLLQKSKEL

SEQ ID NO: 2270 - protein, 163 aa, Homo sapiens
  Payload ID: 559;
  Gene Symbol: ADAMTS12;
  Gene Name: ADAM metallopeptidase with thrombospondin type 1 motif, 12;
  ENSP ID: ENSP00000486213
MPCAQRSWLANLSVVAQLLNFGALCYGRQPQPGPVRFPDRRQEHFIKGLPEYHVVGPVRVDASGHFLSYGLHYPITSSRRKRDLDGSEDWVYYRISHEEKDLFFNLTVNQGFLSNSYIMEKRYGNLSHVKMMASSAPLCHLSGTVLQQGTRVGTAALSACHGL

SEQ ID NO: 2271 - protein, 163 aa, Homo sapiens; identical to SEQ ID NO: 2270
  Payload ID: 559;
  Gene Symbol: ADAMTS12;
  Gene Name: ADAM metallopeptidase with thrombospondin type 1 motif, 12;
  ENSP ID: ENSP00000486915

SEQ ID NO: 2272 - protein, 1371 aa, Homo sapiens; identical to SEQ ID NO: 2254
  Payload ID: 560;
  Gene Symbol: ADAMTS13;
  Gene Name: ADAM metallopeptidase with thrombospondin type 1 motif, 13;
  Uniprot ID:  Q76LX8;
  ENSP ID: ENSP00000347927

SEQ ID NO: 2273 - protein, 1340 aa, Homo sapiens; identical to SEQ ID NO: 2250
  Payload ID: 560;
  Gene Symbol: ADAMTS13;
  Gene Name: ADAM metallopeptidase with thrombospondin type 1 motif, 13;
  Uniprot ID:  Q76LX8;
  ENSP ID: ENSP00000348997

SEQ ID NO: 2274 - protein, 223 aa, Homo sapiens; identical to SEQ ID NO: 2256
  Payload ID: 560;
  Gene Symbol: ADAMTS13;
  Gene Name: ADAM metallopeptidase with thrombospondin type 1 motif, 13;
  ENSP ID: ENSP00000360978

SEQ ID NO: 2275 - protein, 344 aa, Homo sapiens; identical to SEQ ID NO: 2249
  Payload ID: 560;
  Gene Symbol: ADAMTS13;
  Gene Name: ADAM metallopeptidase with thrombospondin type 1 motif, 13;
  ENSP ID: ENSP00000360979

SEQ ID NO: 2276 - protein, 444 aa, Homo sapiens; identical to SEQ ID NO: 2255
  Payload ID: 560;
  Gene Symbol: ADAMTS13;
  Gene Name: ADAM metallopeptidase with thrombospondin type 1 motif, 13;
  ENSP ID: ENSP00000360984

SEQ ID NO: 2277 - protein, 1427 aa, Homo sapiens; identical to SEQ ID NO: 2252
  Payload ID: 560;
  Gene Symbol: ADAMTS13;
  Gene Name: ADAM metallopeptidase with thrombospondin type 1 motif, 13;
  Uniprot ID:  Q76LX8;
  ENSP ID: ENSP00000360997

SEQ ID NO: 2278 - protein, 344 aa, Homo sapiens; identical to SEQ ID NO: 2249
  Payload ID: 560;
  Gene Symbol: ADAMTS13;
  Gene Name: ADAM metallopeptidase with thrombospondin type 1 motif, 13;
  ENSP ID: ENSP00000435274

SEQ ID NO: 2279 - protein, 276 aa, Homo sapiens; identical to SEQ ID NO: 2253
  Payload ID: 560;
  Gene Symbol: ADAMTS13;
  Gene Name: ADAM metallopeptidase with thrombospondin type 1 motif, 13;
  ENSP ID: ENSP00000435305

SEQ ID NO: 2280 - protein, 1223 aa, Homo sapiens
  Payload ID: 561;
  Gene Symbol: ADAMTS14;
  Gene Name: ADAM metallopeptidase with thrombospondin type 1 motif, 14;
  Uniprot ID:  Q8WXS8;
  ENSP ID: ENSP00000362303
MAPLRALLSYLLPLHCALCAAAGSRTPELHLSGKLSDYGVTVPCSTDFRGRFLSHVVSGPAAASAGSMVVDTPPTLPRHSSHLRVARSPLHPGGTLWPGRVGRHSLYFNVTVFGKELHLRLRPNRRLVVPGSSVEWQEDFRELFRQPLRQECVYTGGVTGMPGAAVAISNCDGLAGLIRTDSTDFFIEPLERGQQEKEASGRTHVVYRREAVQQEWAEPDGDLHNEAFGLGDLPNLLGLVGDQLGDTERKRRHAKPGSYSIEVLLVVDDSVVRFHGKEHVQNYVLTLMNIVDEIYHDESLGVHINIALVRLIMVGYRQSLSLIERGNPSRSLEQVCRWAHSQQRQDPSHAEHHDHVVFLTRQDFGPSGYAPVTGMCHPLRSCALNHEDGFSSAFVIAHETGHVLGMEHDGQGNGCADETSLGSVMAPLVQAAFHRFHWSRCSKLELSRYLPSYDCLLDDPFDPAWPQPPELPGINYSMDEQCRFDFGSGYQTCLAFRTFEPCKQLWCSHPDNPYFCKTKKGPPLDGTECAPGKWCFKGHCIWKSPEQTYGQDGGWSSWTKFGSCSRSCGGGVRSRSRSCNNPSPAYGGRLCLGPMFEYQVCNSEECPGTYEDFRAQQCAKRNSYYVHQNAKHSWVPYEPDDDAQKCELICQSADTGDVVFMNQVVHDGTRCSYRDPYSVCARGECVPVGCDKEVGSMKADDKCGVCGGDNSHCRTVKGTLGKASKQAGALKLVQIPAGARHIQIEALEKSPHRIVVKNQVTGSFILNPKGKEATSRTFTAMGLEWEDAVEDAKESLKTSGPLPEAIAILALPPTEGGPRSSLAYKYVIHEDLLPLIGSNNVLLEEMDTYEWALKSWAPCSKACGGGIQFTKYGCRRRRDHHMVQRHLCDHKKRPKPIRRRCNQHPCSQPVWVTEEWGACSRSCGKLGVQTRGIQCLLPLSNGTHKVMPAKACAGDRPEARRPCLRVPCPAQWRLGAWSQCSATCGEGIQQRQVVCRTNANSLGHCEGDRPDTVQVCSLPACGGNHQNSTVRADVWELGTPEGQWVPQSEPLHPINKISSTEPCTGDRSVFCQMEVLDRYCSIPGYHRLCCVSCIKKASGPNPGPDPGPTSLPPFSTPGSPLPGPQDPADAAEPPGKPTGSEDHQHGRATQLPGALDTSSPGTQHPFAPETPIPGASWSISPTTPGGLPWGWTQTPTPVPEDKGQPGEDLRHPGTSLPAASPVT

SEQ ID NO: 2281 - protein, 1226 aa, Homo sapiens
  Payload ID: 561;
  Gene Symbol: ADAMTS14;
  Gene Name: ADAM metallopeptidase with thrombospondin type 1 motif, 14;
  Uniprot ID:  Q8WXS8;
  ENSP ID: ENSP00000362304
MAPLRALLSYLLPLHCALCAAAGSRTPELHLSGKLSDYGVTVPCSTDFRGRFLSHVVSGPAAASAGSMVVDTPPTLPRHSSHLRVARSPLHPGGTLWPGRVGRHSLYFNVTVFGKELHLRLRPNRRLVVPGSSVEWQEDFRELFRQPLRQECVYTGGVTGMPGAAVAISNCDGLAGLIRTDSTDFFIEPLERGQQEKEASGRTHVVYRREAVQQEWAEPDGDLHNEAFGLGDLPNLLGLVGDQLGDTERKRRHAKPGSYSIEVLLVVDDSVVRFHGKEHVQNYVLTLMNIVDEIYHDESLGVHINIALVRLIMVGYRQSLSLIERGNPSRSLEQVCRWAHSQQRQDPSHAEHHDHVVFLTRQDFGPSGMQGYAPVTGMCHPLRSCALNHEDGFSSAFVIAHETGHVLGMEHDGQGNGCADETSLGSVMAPLVQAAFHRFHWSRCSKLELSRYLPSYDCLLDDPFDPAWPQPPELPGINYSMDEQCRFDFGSGYQTCLAFRTFEPCKQLWCSHPDNPYFCKTKKGPPLDGTECAPGKWCFKGHCIWKSPEQTYGQDGGWSSWTKFGSCSRSCGGGVRSRSRSCNNPSPAYGGRLCLGPMFEYQVCNSEECPGTYEDFRAQQCAKRNSYYVHQNAKHSWVPYEPDDDAQKCELICQSADTGDVVFMNQVVHDGTRCSYRDPYSVCARGECVPVGCDKEVGSMKADDKCGVCGGDNSHCRTVKGTLGKASKQAGALKLVQIPAGARHIQIEALEKSPHRIVVKNQVTGSFILNPKGKEATSRTFTAMGLEWEDAVEDAKESLKTSGPLPEAIAILALPPTEGGPRSSLAYKYVIHEDLLPLIGSNNVLLEEMDTYEWALKSWAPCSKACGGGIQFTKYGCRRRRDHHMVQRHLCDHKKRPKPIRRRCNQHPCSQPVWVTEEWGACSRSCGKLGVQTRGIQCLLPLSNGTHKVMPAKACAGDRPEARRPCLRVPCPAQWRLGAWSQCSATCGEGIQQRQVVCRTNANSLGHCEGDRPDTVQVCSLPACGGNHQNSTVRADVWELGTPEGQWVPQSEPLHPINKISSTEPCTGDRSVFCQMEVLDRYCSIPGYHRLCCVSCIKKASGPNPGPDPGPTSLPPFSTPGSPLPGPQDPADAAEPPGKPTGSEDHQHGRATQLPGALDTSSPGTQHPFAPETPIPGASWSISPTTPGGLPWGWTQTPTPVPEDKGQPGEDLRHPGTSLPAASPVT

SEQ ID NO: 2282 - protein, 950 aa, Homo sapiens
  Payload ID: 562;
  Gene Symbol: ADAMTS15;
  Gene Name: ADAM metallopeptidase with thrombospondin type 1 motif, 15;
  Uniprot ID:  Q8TE58;
  ENSP ID: ENSP00000299164
MLLLGILTLAFAGRTAGGSEPEREVVVPIRLDPDINGRRYYWRGPEDSGDQGLIFQITAFQEDFYLHLTPDAQFLAPAFSTEHLGVPLQGLTGGSSDLRRCFYSGDVNAEPDSFAAVSLCGGLRGAFGYRGAEYVISPLPNASAPAAQRNSQGAHLLQRRGVPGGPSGDPTSRCGVASGWNPAILRALDPYKPRRAGFGESRSRRRSGRAKRFVSIPRYVETLVVADESMVKFHGADLEHYLLTLLATAARLYRHPSILNPINIVVVKVLLLRDRDSGPKVTGNAALTLRNFCAWQKKLNKVSDKHPEYWDTAILFTRQDLCGATTCDTLGMADVGTMCDPKRSCSVIEDDGLPSAFTTAHELGHVFNMPHDNVKVCEEVFGKLRANHMMSPTLIQIDRANPWSACSAAIITDFLDSGHGDCLLDQPSKPISLPEDLPGASYTLSQQCELAFGVGSKPCPYMQYCTKLWCTGKAKGQMVCQTRHFPWADGTSCGEGKLCLKGACVERHNLNKHRVDGSWAKWDPYGPCSRTCGGGVQLARRQCTNPTPANGGKYCEGVRVKYRSCNLEPCPSSASGKSFREEQCEAFNGYNHSTNRLTLAVAWVPKYSGVSPRDKCKLICRANGTGYFYVLAPKVVDGTLCSPDSTSVCVQGKCIKAGCDGNLGSKKRFDKCGVCGGDNKSCKKVTGLFTKPMHGYNFVVAIPAGASSIDIRQRGYKGLIGDDNYLALKNSQGKYLLNGHFVVSAVERDLVVKGSLLRYSGTGTAVESLQASRPILEPLTVEVLSVGKMTPPRVRYSFYLPKEPREDKSSHPKDPRGPSVLHNSVLSLSNQVEQPDDRPPARWVAGSWGPCSASCGSGLQKRAVDCRGSAGQRTVPACDAAHRPVETQACGEPCPTWELSAWSPCSKSCGRGFQRRSLKCVGHGGRLLARDQCNLHRKPQELDFCVLRPC

SEQ ID NO: 2283 - protein, 1224 aa, Homo sapiens
  Payload ID: 563;
  Gene Symbol: ADAMTS16;
  Gene Name: ADAM metallopeptidase with thrombospondin type 1 motif, 16;
  Uniprot ID:  Q8TE57;
  ENSP ID: ENSP00000274181
MKPRARGWRGLAALWMLLAQVAEQAPACAMGPAAAAPGSPSVPRPPPPAERPGWMEKGEYDLVSAYEVDHRGDYVSHEIMHHQRRRRAVPVSEVESLHLRLKGSRHDFHMDLRTSSSLVAPGFIVQTLGKTGTKSVQTLPPEDFCFYQGSLRSHRNSSVALSTCQGLSGMIRTEEADYFLRPLPSHLSWKLGRAAQGSSPSHVLYKRSTEPHAPGASEVLVTSRTWELAHQPLHSSDLRLGLPQKQHFCGRRKKYMPQPPKEDLFILPDEYKSCLRHKRSLLRSHRNEELNVETLVVVDKKMMQNHGHENITTYVLTILNMVSALFKDGTIGGNINIAIVGLILLEDEQPGLVISHHADHTLSSFCQWQSGLMGKDGTRHDHAILLTGLDICSWKNEPCDTLGFAPISGMCSKYRSCTINEDTGLGLAFTIAHESGHNFGMIHDGEGNMCKKSEGNIMSPTLAGRNGVFSWSPCSRQYLHKFLSTAQAICLADQPKPVKEYKYPEKLPGELYDANTQCKWQFGEKAKLCMLDFKKDICKALWCHRIGRKCETKFMPAAEGTICGHDMWCRGGQCVKYGDEGPKPTHGHWSDWSSWSPCSRTCGGGVSHRSRLCTNPKPSHGGKFCEGSTRTLKLCNSQKCPRDSVDFRAAQCAEHNSRRFRGRHYKWKPYTQVEDQDLCKLYCIAEGFDFFFSLSNKVKDGTPCSEDSRNVCIDGICERVGCDNVLGSDAVEDVCGVCNGNNSACTIHRGLYTKHHHTNQYYHMVTIPSGARSIRIYEMNVSTSYISVRNALRRYYLNGHWTVDWPGRYKFSGTTFDYRRSYNEPENLIATGPTNETLIVELLFQGRNPGVAWEYSMPRLGTEKQPPAQPSYTWAIVRSECSVSCGGGQMTVREGCYRDLKFQVNMSFCNPKTRPVTGLVPCKVSACPPSWSVGNWSACSRTCGGGAQSRPVQCTRRVHYDSEPVPASLCPQPAPSSRQACNSQSCPPAWSAGPWAECSHTCGKGWRKRAVACKSTNPSARAQLLPDAVCTSEPKPRMHEACLLQRCHKPKKLQWLVSAWSQCSVTCERGTQKRFLKCAEKYVSGKYRELASKKCSHLPKPSLELERACAPLPCPRHPPFAAAGPSRGSWFASPWSQCTASCGGGVQTRSVQCLAGGRPASGCLLHQKPSASLACNTHFCPIAEKKDAFCKDYFHWCYLVPQHGMCSHKFYGKQCCKTCSKSNL

SEQ ID NO: 2284 - protein, 570 aa, Homo sapiens
  Payload ID: 563;
  Gene Symbol: ADAMTS16;
  Gene Name: ADAM metallopeptidase with thrombospondin type 1 motif, 16;
  ENSP ID: ENSP00000421631
MKPRARGWRGLAALWMLLAQVAEQAPACAMGPAAAAPGSPSVPRPPPPAERPGWMEKGEYDLVSAYEVDHRGDYVSHEIMHHQRRRRAVPVSEVESLHLRLKGSRHDFHMDLRTSSSLVAPGFIVQTLGKTGTKSVQTLPPEDFCFYQGSLRSHRNSSVALSTCQGLSGMIRTEEADYFLRPLPSHLSWKLGRAAQGSSPSHVLYKRSTEPHAPGASEVLVTSRTWELAHQPLHSSDLRLGLPQKQHFCGRRKKYMPQPPKEDLFILPDEYKSCLRHKRSLLRSHRNEELNVETLVVVDKKMMQNHGHENITTYVLTILNMVSALFKDGTIGGNINIAIVGLILLEDEQPGLVISHHADHTLSSFCQWQSGLMGKDGTRHDHAILLTGLDICSWKNEPCDTLGFAPISGMCSKYRSCTINEDTGLGLAFTIAHESGHNFGMIHDGEGNMCKKSEGNIMSPTLAGRNGVFSWSPCSRQYLHKFLSTAQAICLADQPKPVKEYKYPEKLPGELYDANTQCKWQFGEKAKLCMLDFKKDICKALWCHRIGRKCETKFMPAAEGTICGHDMVRS

SEQ ID NO: 2285 - protein, 1095 aa, Homo sapiens
  Payload ID: 564;
  Gene Symbol: ADAMTS17;
  Gene Name: ADAM metallopeptidase with thrombospondin type 1 motif, 17;
  Uniprot ID:  Q8TE56;
  ENSP ID: ENSP00000268070
MCDGALLPPLVLPVLLLLVWGLDPGTAVGDAAADVEVVLPWRVRPDDVHLPPLPAAPGPRRRRRPRTPPAAPRARPGERALLLHLPAFGRDLYLQLRRDLRFLSRGFEVEEAGAARRRGRPAELCFYSGRVLGHPGSLVSLSACGAAGGLVGLIQLGQEQVLIQPLNNSQGPFSGREHLIRRKWSLTPSPSAEAQRPEQLCKVLTEKKKPTWGRPSRDWRERRNAIRLTSEHTVETLVVADADMVQYHGAEAAQRFILTVMNMVYNMFQHQSLGIKINIQVTKLVLLRQRPAKLSIGHHGERSLESFCHWQNEEYGGARYLGNNQVPGGKDDPPLVDAAVFVTRTDFCVHKDEPCDTVGIAYLGGVCSAKRKCVLAEDNGLNLAFTIAHELGHNLGMNHDDDHSSCAGRSHIMSGEWVKGRNPSDLSWSSCSRDDLENFLKSKVSTCLLVTDPRSQHTVRLPHKLPGMHYSANEQCQILFGMNATFCRNMEHLMCAGLWCLVEGDTSCKTKLDPPLDGTECGADKWCRAGECVSKTPIPEHVDGDWSPWGAWSMCSRTCGTGARFRQRKCDNPPPGPGGTHCPGASVEHAVCENLPCPKGLPSFRDQQCQAHDRLSPKKKGLLTAVVVDDKPCELYCSPLGKESPLLVADRVLDGTPCGPYETDLCVHGKCQKIGCDGIIGSAAKEDRCGVCSGDGKTCHLVKGDFSHARGTALKDSGKGSINSDWKIELPGEFQIAGTTVRYVRRGLWEKISAKGPTKLPLHLMVLLFHDQDYGIHYEYTVPVNRTAENQSEPEKPQDSLFIWTHSGWEGCSVQCGGGERRTIVSCTRIVNKTTTLVNDSDCPQASRPEPQVRRCNLHPCQSRWVAGPWSPCSATCEKGFQHREVTCVYQLQNGTHVATRPLYCPGPRPAAVQSCEGQDCLSIWEASEWSQCSASCGKGVWKRTVACTNSQGKCDASTRPRAEEACEDYSGCYEWKTGDWSTCSSTCGKGLQSRVVQCMHKVTGRHGSECPALSKPAPYRQCYQEVCNDRINANTITSPRLAALTYKCTRDQWTVYCRVIREKNLCQDMRWYQRCCQTCRDFYANKMRQPPPNS

SEQ ID NO: 2286 - protein, 68 aa, Homo sapiens
  Payload ID: 564;
  Gene Symbol: ADAMTS17;
  Gene Name: ADAM metallopeptidase with thrombospondin type 1 motif, 17;
  ENSP ID: ENSP00000453604
MCDGALLPPLVLPVLLLLVWGLDPGTGWPHSAWAGAGANPAPQQLPGPIQWTRTSDQAQMVLDPQPFC

SEQ ID NO: 2287 - protein, 214 aa, Homo sapiens
  Payload ID: 564;
  Gene Symbol: ADAMTS17;
  Gene Name: ADAM metallopeptidase with thrombospondin type 1 motif, 17;
  ENSP ID: ENSP00000456161
  MOD_RES (1)..(1): Any amino acid
XELYCSPLGKESPLLVADRVLDGTPCGPYETDLCVHGKCQKIGCDGIIGSAAKEDRCGVCSGDGKTCHLVKGDFSHARGTGYIEAAVIPAGARRIRVVEDKPAHSFLALKDSGKGSINSDWKIELPGEFQIAGTTVRYVRRGLWEKISAKGPTKLPLHLMVLLFHDQDYGIHYEYTVPVNRTAENQSEPEKPQDSLFIWTHSGWEGCSVQCGGG

SEQ ID NO: 2288 - protein, 120 aa, Homo sapiens
  Payload ID: 564;
  Gene Symbol: ADAMTS17;
  Gene Name: ADAM metallopeptidase with thrombospondin type 1 motif, 17;
  ENSP ID: ENSP00000458005
  MOD_RES (1)..(1): Any amino acid
XGRPAELCFYSGRVLGHPGSLVSLSACGAAGGLVGLIQLGQEQVLIQPLNNSQGPFSGREHLIRRKWSLTPSPSAEAQRPEQLCKVLTVPQCLGLTWEDLKSGGWSDLEVPHSCVWPGGG

SEQ ID NO: 2289 - protein, 1221 aa, Homo sapiens
  Payload ID: 565;
  Gene Symbol: ADAMTS18;
  Gene Name: ADAM metallopeptidase with thrombospondin type 1 motif, 18;
  Uniprot ID:  Q8TE60;
  ENSP ID: ENSP00000282849
MECALLLACAFPAAGSGPPRGLAGLGRVAKALQLCCLCCASVAAALASDSSSGASGLNDDYVFVTPVEVDSAGSYISHDILHNGRKKRSAQNARSSLHYRFSAFGQELHLELKPSAILSSHFIVQVLGKDGASETQKPEVQQCFYQGFIRNDSSSSVAVSTCAGLSGLIRTRKNEFLISPLPQLLAQEHNYSSPAGHHPHVLYKRTAEEKIQRYRGYPGSGRNYPGYSPSHIPHASQSRETEYHHRRLQKQHFCGRRKKYAPKPPTEDTYLRFDEYGSSGRPRRSAGKSQKGLNVETLVVADKKMVEKHGKGNVTTYILTVMNMVSGLFKDGTIGSDINVVVVSLILLEQEPGGLLINHHADQSLNSFCQWQSALIGKNGKRHDHAILLTGFDICSWKNEPCDTLGFAPISGMCSKYRSCTINEDTGLGLAFTIAHESGHNFGMIHDGEGNPCRKAEGNIMSPTLTGNNGVFSWSSCSRQYLKKFLSTPQAGCLVDEPKQAGQYKYPDKLPGQIYDADTQCKWQFGAKAKLCSLGFVKDICKSLWCHRVGHRCETKFMPAAEGTVCGLSMWCRQGQCVKFGELGPRPIHGQWSAWSKWSECSRTCGGGVKFQERHCNNPKPQYGGLFCPGSSRIYQLCNINPCNENSLDFRAQQCAEYNSKPFRGWFYQWKPYTKVEEEDRCKLYCKAENFEFFFAMSGKVKDGTPCSPNKNDVCIDGVCELVGCDHELGSKAVSDACGVCKGDNSTCKFYKGLYLNQHKANEYYPVVLIPAGARSIEIQELQVSSSYLAVRSLSQKYYLTGGWSIDWPGEFPFAGTTFEYQRSFNRPERLYAPGPTNETLVFEILMQGKNPGIAWKYALPKVMNGTPPATKRPAYTWSIVQSECSVSCGGGYINVKAICLRDQNTQVNSSFCSAKTKPVTEPKICNAFSCPAYWMPGEWSTCSKACAGGQQSRKIQCVQKKPFQKEEAVLHSLCPVSTPTQVQACNSHACPPQWSLGPWSQCSKTCGRGVRKRELLCKGSAAETLPESQCTSLPRPELQEGCVLGRCPKNSRLQWVASSWSECSATCGLGVRKREMKCSEKGFQGKLITFPERRCRNIKKPNLDLEETCNRRACPAHPVYNMVAGWYSLPWQQCTVTCGGGVQTRSVHCVQQGRPSSSCLLHQKPPVLRACNTNFCPAPEKREDPSCVDFFNWCHLVPQHGVCNHKFYGKQCCKSCTRKI

SEQ ID NO: 2290 - protein, 274 aa, Homo sapiens
  Payload ID: 565;
  Gene Symbol: ADAMTS18;
  Gene Name: ADAM metallopeptidase with thrombospondin type 1 motif, 18;
  ENSP ID: ENSP00000392540
MECALLLACAFPAAGSGPPRGLAGLGRVAKALQLCCLCCASVAAALASDSSSGASGLNDDYVFVTPVEVDSAGSYISHDILHNGRKKRSAQNARSSLHYRFSAFGQELHLELKPSAILSSHFIVQVLGKDGASETQKPEVQQCFYQGFIRNDSSSSVAVSTCAGLSGLIRTRKNEFLISPLPQLLAQEHNYSSPAGHHPHVLYKRTAEEKIQRYRGYPGSGRNYPGYSPSHIPHASQSRETEYHHRRLQKQHFCGRRKKCICSQASHRGHLSKV

SEQ ID NO: 2291 - protein, 62 aa, Homo sapiens
  Payload ID: 565;
  Gene Symbol: ADAMTS18;
  Gene Name: ADAM metallopeptidase with thrombospondin type 1 motif, 18;
  ENSP ID: ENSP00000454368
  MOD_RES (1)..(1): Any amino acid
XQGRPSSSCLLHQKPPVLRACNTNFCPAPEKRDSAGSQLPCCDGPQAVHEEGLRFPDNHWAM

SEQ ID NO: 2292 - protein, 185 aa, Homo sapiens
  Payload ID: 565;
  Gene Symbol: ADAMTS18;
  Gene Name: ADAM metallopeptidase with thrombospondin type 1 motif, 18;
  ENSP ID: ENSP00000457395
  MOD_RES (1)..(1): Any amino acid
XVDSAGSYISHDILHNGRKKRSAQNARSSLHYRFSAFGQELHLELKPSAILSSHFIVQVLGKDGASETQKPEVQQCFYQGFIRNDSSSSVAVSTCAGLLLAQEHNYSSPAGHHPHVLYKRTAEEKIQRYRGYPGSGRNYPGYSPSHIPHASQSRETEYHHRRLQKQHFCGRRKKCICSQASHRGH

SEQ ID NO: 2293 - protein, 1207 aa, Homo sapiens
  Payload ID: 566;
  Gene Symbol: ADAMTS19;
  Gene Name: ADAM metallopeptidase with thrombospondin type 1 motif, 19;
  Uniprot ID:  Q8TE59;
  ENSP ID: ENSP00000274487
MRLTHICCCCLLYQLGFLSNGIVSELQFAPDREEWEVVFPALWRREPVDPAGGSGGSADPGWVRGVGGGGSARAQAAGSSREVRSVAPVPLEEPVEGRSESRLRPPPPSEGEEDEELESQELPRGSSGAAALSPGAPASWQPPPPPQPPPSPPPAQHAEPDGDEVLLRIPAFSRDLYLLLRRDGRFLAPRFAVEQRPNPGPGPTGAASAPQPPAPPDAGCFYTGAVLRHPGSLASFSTCGGGLMGFIQLNEDFIFIEPLNDTMAITGHPHRVYRQKRSMEEKVTEKSALHSHYCGIISDKGRPRSRKIAESGRGKRYSYKLPQEYNIETVVVADPAMVSYHGADAARRFILTILNMVFNLFQHKSLSVQVNLRVIKLILLHETPPELYIGHHGEKMLESFCKWQHEEFGKKNDIHLEMSTNWGEDMTSVDAAILITRKDFCVHKDEPCDTVGIAYLSGMCSEKRKCIIAEDNGLNLAFTIAHEMGHNMGINHDNDHPSCADGLHIMSGEWIKGQNLGDVSWSRCSKEDLERFLRSKASNCLLQTNPQSVNSVMVPSKLPGMTYTADEQCQILFGPLASFCQEMQHVICTGLWCKVEGEKECRTKLDPPMDGTDCDLGKWCKAGECTSRTSAPEHLAGEWSLWSPCSRTCSAGISSRERKCPGLDSEARDCNGPRKQYRICENPPCPAGLPGFRDWQCQAYSVRTSSPKHILQWQAVLDEEKPCALFCSPVGKEQPILLSEKVMDGTSCGYQGLDICANGRCQKVGCDGLLGSLAREDHCGVCNGNGKSCKIIKGDFNHTRGAGYVEVLVIPAGARRIKVVEEKPAHSYLALRDAGKQSINSDWKIEHSGAFNLAGTTVHYVRRGLWEKISAKGPTTAPLHLLVLLFQDQNYGLHYEYTIPSDPLPENQSSKAPEPLFMWTHTSWEDCDATCGGGERKTTVSCTKIMSKNISIVDNEKCKYLTKPEPQIRKCNEQPCQTRWMMTEWTPCSRTCGKGMQSRQVACTQQLSNGTLIRARERDCIGPKPASAQRCEGQDCMTVWEAGVWSECSVKCGKGIRHRTVRCTNPRKKCVLSTRPREAEDCEDYSKCYVWRMGDWSKCSITCGKGMQSRVIQCMHKITGRHGNECFSSEKPAAYRPCHLQPCNEKINVNTITSPRLAALTFKCLGDQWPVYCRVIREKNLCQDMRWYQRCCETCRDFYAQKLQQKS

SEQ ID NO: 2294 - protein, 145 aa, Homo sapiens
  Payload ID: 566;
  Gene Symbol: ADAMTS19;
  Gene Name: ADAM metallopeptidase with thrombospondin type 1 motif, 19;
  ENSP ID: ENSP00000422491
  MOD_RES (1)..(1): Any amino acid
XDAGCFYTGAVLRHPGSLASFSTCGGGLMGFIQLNEDFIFIEPLNDTMAITGHPHRVYRQKRSMEEKVTEKSALHSHYCGIISDKGRPRSRKIAESGRGKRYSYKLPQEYNIETVVVADPAMVSYHGADAARRFILTILNMVGKL

SEQ ID NO: 2295 - protein, 31 aa, Homo sapiens
  Payload ID: 566;
  Gene Symbol: ADAMTS19;
  Gene Name: ADAM metallopeptidase with thrombospondin type 1 motif, 19;
  ENSP ID: ENSP00000423537
MRLTHICCCCLLYQLGFLSNGIVSDGIYTAQ

SEQ ID NO: 2296 - protein, 1211 aa, Homo sapiens
  Payload ID: 567;
  Gene Symbol: ADAMTS2;
  Gene Name: ADAM metallopeptidase with thrombospondin type 1 motif, 2;
  Uniprot ID:  O95450;
  ENSP ID: ENSP00000251582
MDPPAGAARRLLCPALLLLLLLLPPPLLPPPPPPANARLAAAADPPGGPLGHGAERILAVPVRTDAQGRLVSHVVSAATSRAGVRARRAAPVRTPSFPGGNEEEPGSHLFYNVTVFGRDLHLRLRPNARLVAPGATMEWQGEKGTTRVEPLLGSCLYVGDVAGLAEASSVALSNCDGLAGLIRMEEEEFFIEPLEKGLAAQEAEQGRVHVVYRRPPTSPPLGGPQALDTGASLDSLDSLSRALGVLEEHANSSRRRARRHAADDDYNIEVLLGVDDSVVQFHGKEHVQKYLLTLMNIVNEIYHDESLGAHINVVLVRIILLSYGKSMSLIEIGNPSQSLENVCRWAYLQQKPDTGHDEYHDHAIFLTRQDFGPSGMQGYAPVTGMCHPVRSCTLNHEDGFSSAFVVAHETGHVLGMEHDGQGNRCGDEVRLGSIMAPLVQAAFHRFHWSRCSQQELSRYLHSYDCLLDDPFAHDWPALPQLPGLHYSMNEQCRFDFGLGYMMCTAFRTFDPCKQLWCSHPDNPYFCKTKKGPPLDGTMCAPGKHCFKGHCIWLTPDILKRDGSWGAWSPFGSCSRTCGTGVKFRTRQCDNPHPANGGRTCSGLAYDFQLCSRQDCPDSLADFREEQCRQWDLYFEHGDAQHHWLPHEHRDAKERCHLYCESRETGEVVSMKRMVHDGTRCSYKDAFSLCVRGDCRKVGCDGVIGSSKQEDKCGVCGGDNSHCKVVKGTFTRSPKKHGYIKMFEIPAGARHLLIQEVDATSHHLAVKNLETGKFILNEENDVDASSKTFIAMGVEWEYRDEDGRETLQTMGPLHGTITVLVIPVGDTRVSLTYKYMIHEDSLNVDDNNVLEEDSVVYEWALKKWSPCSKPCGGGSQFTKYGCRRRLDHKMVHRGFCAALSKPKAIRRACNPQECSQPVWVTGEWEPCSQTCGRTGMQVRSVRCIQPLHDNTTRSVHAKHCNDARPESRRACSRELCPGRWRAGPWSQCSVTCGNGTQERPVLCRTADDSFGICQEERPETARTCRLGPCPRNISDPSKKSYVVQWLSRPDPDSPIRKISSKGHCQGDKSIFCRMEVLSRYCSIPGYNKLCCKSCNLYNNLTNVEGRIEPPPGKHNDIDVFMPTLPVPTVAMEVRPSPSTPLEVPLNASSTNATEDHPETNAVDEPYKIHGLEDEVQPPNLIPRRPSPYEKTRNQRIQELIDEMRKKEMLGKF

SEQ ID NO: 2297 - protein, 566 aa, Homo sapiens
  Payload ID: 567;
  Gene Symbol: ADAMTS2;
  Gene Name: ADAM metallopeptidase with thrombospondin type 1 motif, 2;
  Uniprot ID:  O95450;
  ENSP ID: ENSP00000274609
MDPPAGAARRLLCPALLLLLLLLPPPLLPPPPPPANARLAAAADPPGGPLGHGAERILAVPVRTDAQGRLVSHVVSAATSRAGVRARRAAPVRTPSFPGGNEEEPGSHLFYNVTVFGRDLHLRLRPNARLVAPGATMEWQGEKGTTRVEPLLGSCLYVGDVAGLAEASSVALSNCDGLAGLIRMEEEEFFIEPLEKGLAAQEAEQGRVHVVYRRPPTSPPLGGPQALDTGASLDSLDSLSRALGVLEEHANSSRRRARRHAADDDYNIEVLLGVDDSVVQFHGKEHVQKYLLTLMNIVNEIYHDESLGAHINVVLVRIILLSYGKSMSLIEIGNPSQSLENVCRWAYLQQKPDTGHDEYHDHAIFLTRQDFGPSGMQGYAPVTGMCHPVRSCTLNHEDGFSSAFVVAHETGHVLGMEHDGQGNRCGDEVRLGSIMAPLVQAAFHRFHWSRCSQQELSRYLHSYDCLLDDPFAHDWPALPQLPGLHYSMNEQCRFDFGLGYMMCTAFRTFDPCKQLWCSHPDNPYFCKTKKGPPLDGTMCAPGKFRPGAVAHACYPSTLGGQGRWIA

SEQ ID NO: 2298 - protein, 1910 aa, Homo sapiens
  Payload ID: 568;
  Gene Symbol: ADAMTS20;
  Gene Name: ADAM metallopeptidase with thrombospondin type 1 motif, 20;
  Uniprot ID:  P59510;
  ENSP ID: ENSP00000374071
MWVAKWLTGLLYHLSLFITRSWEVDFHPRQEALVRTLTSYEVVIPERVNEFGEVFPQSHHFSRQKRSSEALEPMPFRTHYRFTAYGQLFQLNLTADASFLAAGYTEVHLGTPERGAWESDAGPSDLRHCFYRGQVNSQEDYKAVVSLCGGLTGTFKGQNGEYFLEPIMKADGNEYEDGHNKPHLIYRQDLNNSFLQTLKYCSVSESQIKETSLPFHTYSNMNEDLNVMKERVLGHTSKNVPLKDERRHSRKKRLISYPRYIEIMVTADAKVVSAHGSNLQNYILTLMSIVATIYKDPSIGNLIHIVVVKLVMIHREEEGPVINFDGATTLKNFCSWQQTQNDLDDVHPSHHDTAVLITREDICSSKEKCNMLGLSYLGTICDPLQSCFINEEKGLISAFTIAHELGHTLGVQHDDNPRCKEMKVTKYHVMAPALSFHMSPWSWSNCSRKYVTEFLDTGYGECLLDKPDEEIYNLPSELPGSRYDGNKQCELAFGPGSQMCPHINICMHLWCTSTEKLHKGCFTQHVPPADGTDCGPGMHCRHGLCVNKETETRPVNGEWGPWEPYSSCSRTCGGGIESATRRCNRPEPRNGGNYCVGRRMKFRSCNTDSCPKGTQDFREKQCSDFNGKHLDISGIPSNVRWLPRYSGIGTKDRCKLYCQVAGTNYFYLLKDMVEDGTPCGTETHDICVQGQCMAAGCDHVLNSSAKIDKCGVCGGDNSSCKTITGVFNSSHYGYNVVVKIPAGATNVDIRQYSYSGQPDDSYLALSDAEGNFLFNGNFLLSTSKKEINVQGTRTVIEYSGSNNAVERINSTNRQEKELILQVLCVGNLYNPDVHYSFNIPLEERSDMFTWDPYGPWEGCTKMCQGLQRRNITCIHKSDHSVVSDKECDHLPLPSFVTQSCNTDCELRWHVIGKSECSSQCGQGYRTLDIHCMKYSIHEGQTVQVDDHYCGDQLKPPTQELCHGNCVFTRWHYSEWSQCSRSCGGGERSRESYCMNNFGHRLADNECQELSRVTRENCNEFSCPSWAASEWSECLVTCGKGTKQRQVWCQLNVDHLSDGFCNSSTKPESLSPCELHTCASWQVGPWGPCTTTCGHGYQMRDVKCVNELASAVLEDTECHEASRPSDRQSCVLTPCSFISKLETALLPTVLIKKMAQWRHGSWTPCSVSCGRGTQARYVSCRDALDRIADESYCAHLPRPAEIWDCFTPCGEWQAGDWSPCSASCGHGKTTRQVLCMNYHQPIDENYCDPEVRPLMEQECSLAACPPAHSHFPSSPVQPSYYLSTNLPLTQKLEDNENQVVHPSVRGNQWRTGPWGSCSSSCSGGLQHRAVVCQDENGQSASYCDAASKPPELQQCGPGPCPQWNYGNWGECSQTCGGGIKSRLVICQFPNGQILEDHNCEIVNKPPSVIQCHMHACPADVSWHQEPWTSCSASCGKGRKYREVFCIDQFQRKLEDTNCSQVQKPPTHKACRSVRCPSWKANSWNECSVTCGSGVQQRDVYCRLKGVGQVVEEMCDQSTRPCSQRRCWSQDCVQHKGMERGRLNCSTSCERKDSHQRMECTDNQIRQVNEIVYNSSTISLTSKNCRNPPCNYIVVTADSSQCANNCGFSYRQRITYCTEIPSTKKHKLHRLRPIVYQECPVVPSSQVYQCINSCLHLATWKVGKWSKCSVTCGIGIMKRQVKCITKHGLSSDLCLNHLKPGAQKKCYANDCKSFTTCKEIQVKNHIRKDGDYYLNIKGRIIKIYCADMYLENPKEYLTLVQGEENFSEVYGFRLKNPYQCPFNGSRREDCECDNGHLAAGYTVFSKIRIDLTSMQIKTTDLLFSKTIFGNAVPFATAGDCYSAFRCPQGQFSINLSGTGMKISSTAKWLTQGSYTSVSIRRSEDGTRFFGKCGGYCGKCLPHMTTGLPIQVI

SEQ ID NO: 2299 - protein, 1504 aa, Homo sapiens [sequence omitted]

SEQ ID NO: 2300 - protein, 634 aa, Homo sapiens
  Payload ID: 568;
  Gene Symbol: ADAMTS20;
  Gene Name: ADAM metallopeptidase with thrombospondin type 1 motif, 20;
  ENSP ID: ENSP00000447427
YSFNIPLEERSDMFTWDPYGPWEGCTKMCQGLQRRNITCIHKSDHSVVSDKECDHLPLPSFVTQSCNTDCELRWHVIGKSECSSQCGQGYRTLDIHCMKYSIHEGQTVQVDDHYCGDQLKPPTQELCHGNCVFTRWHYSEWSQCSRSCGGGERSRESYCMNNFGHRLADNECQELSRVTRENCNEFSCPSWAASEWSECLVTCGKGTKQRQVWCQLNVDHLSDGFCNSSTKPESLSPCELHTCASWQVGPWGPCTTTCGHGYQMRDVKCVNELASAVLEDTECHEASRPSDRQCSVSCGRGTQARYVSCRDALDRIADESYCAHLPRPAEIWDCFTPCGEWQAGDWSPCSASCGHGKTTRQVLCMNYHQPIDENYCDPEVRPLMEQECSLAACPPAHSHFPSSPVQPSYYLSTNLPLTQKLEDNENQVVHPSVRGNQWRTGPWGSCSSSCSGGLQHRAVVCQDENGQSASYCDAASKPPELQQCGPGPCPQWNYGNWGECSQTCGGGIKSRLVICQFPNGQILEDHNCEIVNKPPSVIQCHMHACPADVSWHQEPWTSEDLKVKLLPQRTIILWELMKNIFCHGKHSHMYLINVVTDHLLYPRHCDPETIETYFLSLWSLQFTWGDLKYYKNSL

SEQ ID NO: 2301 - protein, 1504 aa, Homo sapiens
  Payload ID: 568;
  Gene Symbol: ADAMTS20;
  Gene Name: ADAM metallopeptidase with thrombospondin type 1 motif, 20;
  ENSP ID: ENSP00000448341
MWVAKWLTGLLYHLSLFITRSWEVDFHPRQEALVRTLTSYEVVIPERVNEFGEVFPQSHHFSRQKRSSEALEPMPFRTHYRFTAYGQLFQLNLTADASFLAAGYTEVHLGTPERGAWESDAGPSDLRHCFYRGQVNSQEDYKAVVSLCGGLTGTFKGQNGEYFLEPIMKADGNEYEDGHNKPHLIYRQDLNNSFLQTLKYCSVSESQIKETSLPFHTYSNMNEDLNVMKERVLGHTSKNVPLKDERRHSRKKRLISYPRYIEIMVTADAKVVSAHGSNLQNYILTLMSIVATIYKDPSIGNLIHIVVVKLVMIHREEEGPVINFDGATTLKNFCSWQQTQNDLDDVHPSHHDTAVLITREDICSSKEKCNMLGLSYLGTICDPLQSCFINEEKGLISAFTIAHELGHTLGVQHDDNPRCKEMKVTKYHVMAPALSFHMSPWSWSNCSRKYVTEFLDTGYGECLLDKPDEEIYNLPSELPGSRYDGNKQCELAFGPGSQMCPHINICMHLWCTSTEKLHKGCFTQHVPPADGTDCGPGMHCRHGLCVNKETETRPVNGEWGPWEPYSSCSRTCGGGIESATRRCNRPEPRNGGNYCVGRRMKFRSCNTDSCPKGTQDFREKQCSDFNGKHLDISGIPSNVRWLPRYSGIGTKDRCKLYCQVAGTNYFYLLKDMVEDGTPCGTETHDICVQGQCMAAGCDHVLNSSAKIDKCGVCGGDNSSCKTITGVFNSSHYGYNVVVKIPAGATNVDIRQYSYSGQPDDSYLALSDAEGNFLFNGNFLLSTSKKEINVQGTRTVIEYSGSNNAVERINSTNRQEKELILQVLCVGNLYNPDVHYSFNIPLEERSDMFTWDPYGPWEGCTKMCQGLQRRNITCIHKSDHSVVSDKECDHLPLPSFVTQSCNTDCELRWHVIGKSECSSQCGQGYRTLDIHCMKYSIHEGQTVQVDDHYCGDQLKPPTQELCHGNCVFTRWHYSEWSQCSRSCGGGERSRESYCMNNFGHRLADNECQELSRVTRENCNEFSCPSWAASEWSECLVTCGKGTKQRQVWCQLNVDHLSDGFCNSSTKPESLSPCELHTCASWQVGPWGPCTTTCGHGYQMRDVKCVNELASAVLEDTECHEASRPSDRQSCVLTPCSFISKLETALLPTVLIKKMAQWRHGSWTPCSVSCGRGTQARYVSCRDALDRIADESYCAHLPRPAEIWDCFTPCGEWQAGDWSPCSASCGHGKTTRQVLCMNYHQPIDENYCDPEVRPLMEQECSLAACPPAHSHFPSSPVQPSYYLSTNLPLTQKLEDNENQVVHPSVRGNQWRTGPWGSCSSSCSGGLQHRAVVCQDENGQSASYCDAASKPPELQQCGPGPCPQWNYGNWGECSQTCGGGIKSRLVICQFPNGQILEDHNCEIVNKPPSVIQCHMHACPADVSWHQEPWTSEDLKVKLLPQRTIILWELMKNIFCHGKHSHMYLINVVTDHLLYPRHCDPETIETYFLSLWSLQFTWGDLKYYKNSL

SEQ ID NO: 2302 - protein, 1205 aa, Homo sapiens
  Payload ID: 569;
  Gene Symbol: ADAMTS3;
  Gene Name: ADAM metallopeptidase with thrombospondin type 1 motif, 3;
  Uniprot ID:  O15072;
  ENSP ID: ENSP00000286657
MVLLSLWLIAAALVEVRTSADGQAGNEEMVQIDLPIKRYREYELVTPVSTNLEGRYLSHTLSASHKKRSARDVSSNPEQLFFNITAFGKDFHLRLKPNTQLVAPGAVVEWHETSLVPGNITDPINNHQPGSATYRIRRTEPLQTNCAYVGDIVDIPGTSVAISNCDGLAGMIKSDNEEYFIEPLERGKQMEEEKGRIHVVYKRSAVEQAPIDMSKDFHYRESDLEGLDDLGTVYGNIHQQLNETMRRRRHAGENDYNIEVLLGVDDSVVRFHGKEHVQNYLLTLMNIVNEIYHDESLGVHINVVLVRMIMLGYAKSISLIERGNPSRSLENVCRWASQQQRSDLNHSEHHDHAIFLTRQDFGPAGMQGYAPVTGMCHPVRSCTLNHEDGFSSAFVVAHETGHVLGMEHDGQGNRCGDETAMGSVMAPLVQAAFHRYHWSRCSGQELKRYIHSYDCLLDDPFDHDWPKLPELPGINYSMDEQCRFDFGVGYKMCTAFRTFDPCKQLWCSHPDNPYFCKTKKGPPLDGTECAAGKWCYKGHCMWKNANQQKQDGNWGSWTKFGSCSRTCGTGVRFRTRQCNNPMPINGGQDCPGVNFEYQLCNTEECQKHFEDFRAQQCQQRNSHFEYQNTKHHWLPYEHPDPKKRCHLYCQSKETGDVAYMKQLVHDGTHCSYKDPYSICVRGECVKVGCDKEIGSNKVEDKCGVCGGDNSHCRTVKGTFTRTPRKLGYLKMFDIPPGARHVLIQEDEASPHILAIKNQATGHYILNGKGEEAKSRTFIDLGVEWDYNIEDDIESLHTDGPLHDPVIVLIIPQENDTRSSLTYKYIIHEDSVPTINSNNVIQEELDTFEWALKSWSQCSKPCGGGFQYTKYGCRRKSDNKMVHRSFCEANKKPKPIRRMCNIQECTHPLWVAEEWEHCTKTCGSSGYQLRTVRCLQPLLDGTNRSVHSKYCMGDRPESRRPCNRVPCPAQWKTGPWSECSVTCGEGTEVRQVLCRAGDHCDGEKPESVRACQLPPCNDEPCLGDKSIFCQMEVLARYCSIPGYNKLCCESCSKRSSTLPPPYLLEAAETHDDVISNPSDLPRSLVMPTSLVPYHSETPAKKMSLSSISSVGGPNAYAAFRPNSKPDGANLRQRSAQQAGSKTVRLVTVPSSPPTKRVHLSSASQMAAASFFAASDSIGASSQARTSKKDGKIIDNRRPTRSSTLER

SEQ ID NO: 2303 - protein, 1205 aa, Homo sapiens; identical to SEQ ID NO: 2302
  Payload ID: 569;
  Gene Symbol: ADAMTS3;
  Gene Name: ADAM metallopeptidase with thrombospondin type 1 motif, 3;
  Uniprot ID:  O15072;
  ENSP ID: ENSP00000480055

SEQ ID NO: 2304 - protein, 339 aa, Homo sapiens
  Payload ID: 570;
  Gene Symbol: ADAMTS4;
  Gene Name: ADAM metallopeptidase with thrombospondin type 1 motif, 4;
  ENSP ID: ENSP00000356974
MSQTGSHPGRGLAGRWLWGAQPCLLLPIVPLSWLVWLLLLLLASLLPSARLASPLPREEEIVFPEKLNGSVLPGSGAPARLLCRLQAFGETLLLELEQDSGVQVEGLTVQYLGQAPELLGGAEPGTYLTGTINGDPESVASLHWDGGALLGVLQYRGAELHLQPLEGGTPNSAGGPGAHILRRKSPASGQGPMCNVKAPLGSPSPRPRRAKRFASLSRFVETLVVADDKMAAFHGAGLKRYLLTVMAAAAKAFKHPSIRNPVSLVVTRLVILGSGEEGPQVGPSAAQTLRSFCAWQRGLNTPEDSDPDHFDTAILFTRQVRPQSAPQAMHCTILRSATT

SEQ ID NO: 2305 - protein, 837 aa, Homo sapiens
  Payload ID: 570;
  Gene Symbol: ADAMTS4;
  Gene Name: ADAM metallopeptidase with thrombospondin type 1 motif, 4;
  Uniprot ID:  O75173;
  ENSP ID: ENSP00000356975
MSQTGSHPGRGLAGRWLWGAQPCLLLPIVPLSWLVWLLLLLLASLLPSARLASPLPREEEIVFPEKLNGSVLPGSGAPARLLCRLQAFGETLLLELEQDSGVQVEGLTVQYLGQAPELLGGAEPGTYLTGTINGDPESVASLHWDGGALLGVLQYRGAELHLQPLEGGTPNSAGGPGAHILRRKSPASGQGPMCNVKAPLGSPSPRPRRAKRFASLSRFVETLVVADDKMAAFHGAGLKRYLLTVMAAAAKAFKHPSIRNPVSLVVTRLVILGSGEEGPQVGPSAAQTLRSFCAWQRGLNTPEDSDPDHFDTAILFTRQDLCGVSTCDTLGMADVGTVCDPARSCAIVEDDGLQSAFTAAHELGHVFNMLHDNSKPCISLNGPLSTSRHVMAPVMAHVDPEEPWSPCSARFITDFLDNGYGHCLLDKPEAPLHLPVTFPGKDYDADRQCQLTFGPDSRHCPQLPPPCAALWCSGHLNGHAMCQTKHSPWADGTPCGPAQACMGGRCLHMDQLQDFNIPQAGGWGPWGPWGDCSRTCGGGVQFSSRDCTRPVPRNGGKYCEGRRTRFRSCNTEDCPTGSALTFREEQCAAYNHRTDLFKSFPGPMDWVPRYTGVAPQDQCKLTCQAQALGYYYVLEPRVVDGTPCSPDSSSVCVQGRCIHAGCDRIIGSKKKFDKCMVCGGDGSGCSKQSGSFRKFRYGYNNVVTIPAGATHILVRQQGNPGHRSIYLALKLPDGSYALNGEYTLMPSPTDVVLPGAVSLRYSGATAASETLSGHGPLAQPLTLQVLVAGNPQDTRLRYSFFVPRPTPSTPRPTPQDWLHRRAQILEILRRRPWAGRK

SEQ ID NO: 2306 - protein, 930 aa, Homo sapiens
  Payload ID: 571;
  Gene Symbol: ADAMTS5;
  Gene Name: ADAM metallopeptidase with thrombospondin type 1 motif, 5;
  Uniprot ID:  Q9UNA0;
  ENSP ID: ENSP00000284987
MLLGWASLLLCAFRLPLAAVGPAATPAQDKAGQPPTAAAAAQPRRRQGEEVQERAEPPGHPHPLAQRRRSKGLVQNIDQLYSGGGKVGYLVYAGGRRFLLDLERDGSVGIAGFVPAGGGTSAPWRHRSHCFYRGTVDGSPRSLAVFDLCGGLDGFFAVKHARYTLKPLLRGPWAEEEKGRVYGDGSARILHVYTREGFSFEALPPRASCETPASTPEAHEHAPAHSNPSGRAALASQLLDQSALSPAGGSGPQTWWRRRRRSISRARQVELLLVADASMARLYGRGLQHYLLTLASIANRLYSHASIENHIRLAVVKVVVLGDKDKSLEVSKNAATTLKNFCKWQHQHNQLGDDHEEHYDAAILFTREDLCGHHSCDTLGMADVGTICSPERSCAVIEDDGLHAAFTVAHEIGHLLGLSHDDSKFCEETFGSTEDKRLMSSILTSIDASKPWSKCTSATITEFLDDGHGNCLLDLPRKQILGPEELPGQTYDATQQCNLTFGPEYSVCPGMDVCARLWCAVVRQGQMVCLTKKLPAVEGTPCGKGRICLQGKCVDKTKKKYYSTSSHGNWGSWGSWGQCSRSCGGGVQFAYRHCNNPAPRNNGRYCTGKRAIYRSCSLMPCPPNGKSFRHEQCEAKNGYQSDAKGVKTFVEWVPKYAGVLPADVCKLTCRAKGTGYYVVFSPKVTDGTECRLYSNSVCVRGKCVRTGCDGIIGSKLQYDKCGVCGGDNSSCTKIVGTFNKKSKGYTDVVRIPEGATHIKVRQFKAKDQTRFTAYLALKKKNGEYLINGKYMISTSETIIDINGTVMNYSGWSHRDDFLHGMGYSATKEILIVQILATDPTKPLDVRYSFFVPKKSTPKVNSVTSHGSNKVGSHTSQPQWVTGPWLACSRTCDTGWHTRTVQCQDGNRKLAKGCPLSQRPSAFKQCLLKKC

SEQ ID NO: 2307 - protein, 1117 aa, Homo sapiens
  Payload ID: 572;
  Gene Symbol: ADAMTS6;
  Gene Name: ADAM metallopeptidase with thrombospondin type 1 motif, 6;
  Uniprot ID:  Q9UKP5;
  ENSP ID: ENSP00000370443
MEILWKTLTWILSLIMASSEFHSDHRLSYSSQEEFLTYLEHYQLTIPIRVDQNGAFLSFTVKNDKHSRRRRSMDPIDPQQAVSKLFFKLSAYGKHFHLNLTLNTDFVSKHFTVEYWGKDGPQWKHDFLDNCHYTGYLQDQRSTTKVALSNCVGLHGVIATEDEEYFIEPLKNTTEDSKHFSYENGHPHVIYKKSALQQRHLYDHSHCGVSDFTRSGKPWWLNDTSTVSYSLPINNTHIHHRQKRSVSIERFVETLVVADKMMVGYHGRKDIEHYILSVMNIVAKLYRDSSLGNVVNIIVARLIVLTEDQPNLEINHHADKSLDSFCKWQKSILSHQSDGNTIPENGIAHHDNAVLITRYDICTYKNKPCGTLGLASVAGMCEPERSCSINEDIGLGSAFTIAHEIGHNFGMNHDGIGNSCGTKGHEAAKLMAAHITANTNPFSWSACSRDYITSFLDSGRGTCLDNEPPKRDFLYPAVAPGQVYDADEQCRFQYGATSRQCKYGEVCRELWCLSKSNRCVTNSIPAAEGTLCQTGNIEKGWCYQGDCVPFGTWPQSIDGGWGPWSLWGECSRTCGGGVSSSLRHCDSPAPSGGGKYCLGERKRYRSCNTDPCPLGSRDFREKQCADFDNMPFRGKYYNWKPYTGGGVKPCALNCLAEGYNFYTERAPAVIDGTQCNADSLDICINGECKHVGCDNILGSDAREDRCRVCGGDGSTCDAIEGFFNDSLPRGGYMEVVQIPRGSVHIEVREVAMSKNYIALKSEGDDYYINGAWTIDWPRKFDVAGTAFHYKRPTDEPESLEALGPTSENLIVMVLLQEQNLGIRYKFNVPITRTGSGDNEVGFTWNHQPWSECSATCAGGVQRQEVVCKRLDDNSIVQNNYCDPDSKPPENQRACNTEPCPPEWFIGDWLECSKTCDGGMRTRAVLCIRKIGPSEEETLDYSGCLTHRPVEKEPCNNQSCPPQWVALDWSECTPKCGPGFKHRIVLCKSSDLSKTFPAAQCPEESKPPVRIRCSLGRCPPPRWVTGDWGQCSAQCGLGQQMRTVQCLSYTGQASSDCLETVRPPSMQQCESKCDSTPISNTEECKDVNKVAYCPLVLKFKFCSRAYFRQMCCKTCQGH

SEQ ID NO: 2308 - protein, 292 aa, Homo sapiens
  Payload ID: 572;
  Gene Symbol: ADAMTS6;
  Gene Name: ADAM metallopeptidase with thrombospondin type 1 motif, 6;
  Uniprot ID:  Q9UKP5;
  ENSP ID: ENSP00000424377
MEILWKTLTWILSLIMASSEFHSDHRLSYSSQEEFLTYLEHYQLTIPIRVDQNGAFLSFTVKNDKHSRRRRSMDPIDPQQAVSKLFFKLSAYGKHFHLNLTLNTDFVSKHFTVEYWGKDGPQWKHDFLDNCHYTGYLQDQRSTTKVALSNCVGLHGVIATEDEEYFIEPLKNTTEDSKHFSYENGHPHVIYKKSALQQRHLYDHSHCGVSDFTRSGKPWWLNDTSTVSYSLPINNTHIHHRQKRSVSIERFVETLVVADKMMVGYHGRKDIEHYILSVMNIVRLPNFTVIPA

SEQ ID NO: 2309 - protein, 1686 aa, Homo sapiens
  Payload ID: 573;
  Gene Symbol: ADAMTS7;
  Gene Name: ADAM metallopeptidase with thrombospondin type 1 motif, 7;
  Uniprot ID:  Q9UKP4;
  ENSP ID: ENSP00000373472
MPGGPSPRSPAPLLRPLLLLLCALAPGAPGPAPGRATEGRAALDIVHPVRVDAGGSFLSYELWPRALRKRDVSVRRDAPAFYELQYRGRELRFNLTANQHLLAPGFVSETRRRGGLGRAHIRAHTPACHLLGEVQDPELEGGLAAISACDGLKGVFQLSNEDYFIEPLDSAPARPGHAQPHVVYKRQAPERLAQRGDSSAPSTCGVQVYPELESRRERWEQRQQWRRPRLRRLHQRSVSKEKWVETLVVADAKMVEYHGQPQVESYVLTIMNMVAGLFHDPSIGNPIHITIVRLVLLEDEEEDLKITHHADNTLKSFCKWQKSINMKGDAHPLHHDTAILLTRKDLCAAMNRPCETLGLSHVAGMCQPHRSCSINEDTGLPLAFTVAHELGHSFGIQHDGSGNDCEPVGKRPFIMSPQLLYDAAPLTWSRCSRQYITRFLDRGWGLCLDDPPAKDIIDFPSVPPGVLYDVSHQCRLQYGAYSAFCEDMDNVCHTLWCSVGTTCHSKLDAAVDGTRCGENKWCLSGECVPVGFRPEAVDGGWSGWSAWSICSRSCGMGVQSAERQCTQPTPKYKGRYCVGERKRFRLCNLQACPAGRPSFRHVQCSHFDAMLYKGQLHTWVPVVNDVNPCELHCRPANEYFAEKLRDAVVDGTPCYQVRASRDLCINGICKNVGCDFEIDSGAMEDRCGVCHGNGSTCHTVSGTFEEAEGLGYVDVGLIPAGAREIRIQEVAEAANFLALRSEDPEKYFLNGGWTIQWNGDYQVAGTTFTYARRGNWENLTSPGPTKEPVWIQLLFQESNPGVHYEYTIHREAGGHDEVPPPVFSWHYGPWTKCTVTCGRGVQRQNVYCLERQAGPVDEEHCDPLGRPDDQQRKCSEQPCPARWWAGEWQLCSSSCGPGGLSRRAVLCIRSVGLDEQSALEPPACEHLPRPPTETPCNRHVPCPATWAVGNWSQCSVTCGEGTQRRNVLCTNDTGVPCDEAQQPASEVTCSLPLCRWPLGTLGPEGSGSGSSSHELFNEADFIPHHLAPRPSPASSPKPGTMGNAIEEEAPELDLPGPVFVDDFYYDYNFINFHEDLSYGPSEEPDLDLAGTGDRTPPPHSHPAAPSTGSPVPATEPPAAKEEGVLGPWSPSPWPSQAGRSPPPPSEQTPGNPLINFLPEEDTPIGAPDLGLPSLSWPRVSTDGLQTPATPESQNDFPVGKDSQSQLPPPWRDRTNEVFKDDEEPKGRGAPHLPPRPSSTLPPLSPVGSTHSSPSPDVAELWTGGTVAWEPALEGGLGPVDSELWPTVGVASLLPPPIAPLPEMKVRDSSLEPGTPSFPTPGPGSWDLQTVAVWGTFLPTTLTGLGHMPEPALNPGPKGQPESLSPEVPLSSRLLSTPAWDSPANSHRVPETQPLAPSLAEAGPPADPLVVRNAGWQAGNWSECSTTCGLGAVWRPVRCSSGRDEDCAPAGRPQPARRCHLRPCATWHSGNWSKCSRSCGGGSSVRDVQCVDTRDLRPLRPFHCQPGPAKPPAHRPCGAQPCLSWYTSSWRECSEACGGGEQQRLVTCPEPGLCEEALRPNTTRPCNTHPCTQWVVGPWGQCSGPCGGGVQRRLVKCVNTQTGLPEEDSDQCGHEAWPESSRPCGTEDCEPVEPPRCERDRLSFGFCETLRLLGRCQLPTIRTQCCRSCSPPSHGAPSRGHQRVARR

SEQ ID NO: 2310 - protein, 889 aa, Homo sapiens
  Payload ID: 574;
  Gene Symbol: ADAMTS8;
  Gene Name: ADAM metallopeptidase with thrombospondin type 1 motif, 8;
  Uniprot ID:  Q9UP79;
  ENSP ID: ENSP00000257359
MLPAPAAPRWPPLLLLLLLLLPLARGAPARPAAGGQASELVVPTRLPGSAGELALHLSAFGKGFVLRLAPDDSFLAPEFKIERLGGSGRATGGERGLRGCFFSGTVNGEPESLAAVSLCRGLSGSFLLDGEEFTIQPQGAGGSLAQPHRLQRWGPAGARPLPRGPEWEVETGEGQRQERGDHQEDSEEESQEEEAEGASEPPPPLGATSRTKRFVSEARFVETLLVADASMAAFYGADLQNHILTLMSVAARIYKHPSIKNSINLMVVKVLIVEDEKWGPEVSDNGGLTLRNFCNWQRRFNQPSDRHPEHYDTAILLTRQNFCGQEGLCDTLGVADIGTICDPNKSCSVIEDEGLQAAHTLAHELGHVLSMPHDDSKPCTRLFGPMGKHHVMAPLFVHLNQTLPWSPCSAMYLTELLDGGHGDCLLDAPAAALPLPTGLPGRMALYQLDQQCRQIFGPDFRHCPNTSAQDVCAQLWCHTDGAEPLCHTKNGSLPWADGTPCGPGHLCSEGSCLPEEEVERPKPVADGGWAPWGPWGECSRTCGGGVQFSHRECKDPEPQNGGRYCLGRRAKYQSCHTEECPPDGKSFREQQCEKYNAYNYTDMDGNLLQWVPKYAGVSPRDRCKLFCRARGRSEFKVFEAKVIDGTLCGPETLAICVRGQCVKAGCDHVVDSPRKLDKCGVCGGKGNSCRKVSGSLTPTNYGYNDIVTIPAGATNIDVKQRSHPGVQNDGNYLALKTADGQYLLNGNLAISAIEQDILVKGTILKYSGSIATLERLQSFRPLPEPLTVQLLTVPGEVFPPKVKYTFFVPNDVDFSMQSSKERATTNIIQPLLHAQWVLGDWSECSSTCGAGWQRRTVECRDPSGQASATCNKALKPEDAKPCESQLCPL

SEQ ID NO: 2311 - protein, 1907 aa, Homo sapiens
  Payload ID: 575;
  Gene Symbol: ADAMTS9;
  Gene Name: ADAM metallopeptidase with thrombospondin type 1 motif, 9;
  Uniprot ID:  Q9P2N4;
  ENSP ID: ENSP00000295903
MQFVSWATLLTLLVRDLAEMGSPDAAAAVRKDRLHPRQVKLLETLSEYEIVSPIRVNALGEPFPTNVHFKRTRRSINSATDPWPAFASSSSSSTSSQAHYRLSAFGQQFLFNLTANAGFIAPLFTVTLLGTPGVNQTKFYSEEEAELKHCFYKGYVNTNSEHTAVISLCSGMLGTFRSHDGDYFIEPLQSMDEQEDEEEQNKPHIIYRRSAPQREPSTGRHACDTSEHKNRHSKDKKKTRARKWGERINLAGDVAALNSGLATEAFSAYGNKTDNTREKRTHRRTKRFLSYPRFVEVLVVADNRMVSYHGENLQHYILTLMSIDGPSISFNAQTTLKNFCQWQHSKNSPGGIHHDTAVLLTRQDICRAHDKCDTLGLAELGTICDPYRSCSISEDSGLSTAFTIAHELGHVFNMPHDDNNKCKEEGVKSPQHVMAPTLNFYTNPWMWSKCSRKYITEFLDTGYGECLLNEPESRPYPLPVQLPGILYNVNKQCELIFGPGSQVCPYMMQCRRLWCNNVNGVHKGCRTQHTPWADGTECEPGKHCKYGFCVPKEMDVPVTDGSWGSWSPFGTCSRTCGGGIKTAIRECNRPEPKNGGKYCVGRRMKFKSCNTEPCLKQKRDFRDEQCAHFDGKHFNINGLLPNVRWVPKYSGILMKDRCKLFCRVAGNTAYYQLRDRVIDGTPCGQDTNDICVQGLCRQAGCDHVLNSKARRDKCGVCGGDNSSCKTVAGTFNTVHYGYNTVVRIPAGATNIDVRQHSFSGETDDDNYLALSSSKGEFLLNGNFVVTMAKREIRIGNAVVEYSGSETAVERINSTDRIEQELLLQVLSVGKLYNPDVRYSFNIPIEDKPQQFYWNSHGPWQACSKPCQGERKRKLVCTRESDQLTVSDQRCDRLPQPGHITEPCGTDCDLRWHVASRSECSAQCGLGYRTLDIYCAKYSRLDGKTEKVDDGFCSSHPKPSNREKCSGECNTGGWRYSAWTECSKSCDGGTQRRRAICVNTRNDVLDDSKCTHQEKVTIQRCSEFPCPQWKSGDWSECLVTCGKGHKHRQVWCQFGEDRLNDRMCDPETKPTSMQTCQQPECASWQAGPWGQCSVTCGQGYQLRAVKCIIGTYMSVVDDNDCNAATRPTDTQDCELPSCHPPPAAPETRRSTYSAPRTQWRFGSWTPCSATCGKGTRMRYVSCRDENGSVADESACATLPRPVAKEECSVTPCGQWKALDWSSCSVTCGQGRATRQVMCVNYSDHVIDRSECDQDYIPETDQDCSMSPCPQRTPDSGLAQHPFQNEDYRPRSASPSRTHVLGGNQWRTGPWGACSSTCAGGSQRRVVVCQDENGYTANDCVERIKPDEQRACESGPCPQWAYGNWGECTKLCGGGIRTRLVVCQRSNGERFPDLSCEILDKPPDREQCNTHACPHDAAWSTGPWSSCSVSCGRGHKQRNVYCMAKDGSHLESDYCKHLAKPHGHRKCRGGRCPKWKAGAWSQCSVSCGRGVQQRHVGCQIGTHKIARETECNPYTRPESERDCQGPRCPLYTWRAEEWQECTKTCGEGSRYRKVVCVDDNKNEVHGARCDVSKRPVDRESCSLQPCEYVWITGEWSECSVTCGKGYKQRLVSCSEIYTGKENYEYSYQTTINCPGTQPPSVHPCYLRDCPVSATWRVGNWGSCSVSCGVGVMQRSVQCLTNEDQPSHLCHTDLKPEERKTCRNVYNCELPQNCKEVKRLKGASEDGEYFLMIRGKLLKIFCAGMHSDHPKEYVTLVHGDSENFSEVYGHRLHNPTECPYNGSRRDDCQCRKDYTAAGFSSFQKIRIDLTSMQIITTDLQFARTSEGHPVPFATAGDCYSAAKCPQGRFSINLYGTGLSLTESARWISQGNYAVSDIKKSPDGTRVVGKCGGYCGKCTPSSGTGLEVRVL

SEQ ID NO: 2312 - protein, 991 aa, Homo sapiens
  Payload ID: 575;
  Gene Symbol: ADAMTS9;
  Gene Name: ADAM metallopeptidase with thrombospondin type 1 motif, 9;
  ENSP ID: ENSP00000417521
  MOD_RES (1)..(1): Any amino acid
XECSAQCGLGYRTLDIYCAKYSRLDGKTEKVDDGFCSSHPKPSNREKCSGECNTGGWRYSAWTECSKSCDGGTQRRRAICVNTRNDVLDDSKCTHQEKVTIQRCSEFPCPQWKSGDWSECLVTCGKGHKHRQVWCQFGEDRLNDRMCDPETKPTSMQTCQQPECASWQAGPWGQCSVTCGQGYQLRAVKCIIGTYMSVVDDNDCNAATRPTDTQDCELPSCHPPPAAPETRRSTYSAPRTQWRFGSWTPCSATCGKGTRMRYVSCRDENGSVADESACATLPRPVAKEECSVTPCGQWKALDWSSCSVTCGQGRATRQVMCVNYSDHVIDRSECDQDYIPETDQDCSMSPCPQRTPDSGLAQHPFQNEDYRPRSASPSRTHVLGGNQWRTGPWGACSSTCAGGSQRRVVVCQDENGYTANDCVERIKPDEQRACESGPCPQWAYGNWGECTKLCGGGIRTRLVVCQRSNGERFPDLSCEILDKPPDREQCNTHACPHDAAWSTGPWSSCSVSCGRGHKQRNVYCMAKDGSHLESDYCKHLAKPHGHRKCRGGRCPKWKAGAWSQCSVSCGRGVQQRHVGCQIGTHKIARETECNPYTRPESERDCQGPRCPLYTWRAEEWQECTKTCGEGSRYRKVVCVDDNKNEVHGARCDVSKRPVDRESCSLQPCEYVWITGEWSECSVTCGKGYKQRLVSCSEIYTGKENYEYSYQTTINCPGTQPPSVHPCYLRDCPVSATWRVGNWGSCSVSCGVGVMQRSVQCLTNEDQPSHLCHTDLKPEERKTCRNVYNCELPQNCKEVKRLKGASEDGEYFLMIRGKLLKIFCAGMHSDHPKEYVTLVHGDSENFSEVYGHRLHNPTECPYNGSRRDDCQCRKDYTAAGFSSFQKIRIDLTSMQIITTDLQFARTSEGHPVPFATAGDCYSAAKCPQGRFSINLYGTGLSLTESARWISQGNYAVSDIKKSPDGTRVVGKCGGYCGKCTPSSGTGLEVRVL

SEQ ID NO: 2313 - protein, 1935 aa, Homo sapiens
  Payload ID: 575;
  Gene Symbol: ADAMTS9;
  Gene Name: ADAM metallopeptidase with thrombospondin type 1 motif, 9;
  Uniprot ID:  Q9P2N4;
  ENSP ID: ENSP00000418735
MQFVSWATLLTLLVRDLAEMGSPDAAAAVRKDRLHPRQVKLLETLSEYEIVSPIRVNALGEPFPTNVHFKRTRRSINSATDPWPAFASSSSSSTSSQAHYRLSAFGQQFLFNLTANAGFIAPLFTVTLLGTPGVNQTKFYSEEEAELKHCFYKGYVNTNSEHTAVISLCSGMLGTFRSHDGDYFIEPLQSMDEQEDEEEQNKPHIIYRRSAPQREPSTGRHACDTSEHKNRHSKDKKKTRARKWGERINLAGDVAALNSGLATEAFSAYGNKTDNTREKRTHRRTKRFLSYPRFVEVLVVADNRMVSYHGENLQHYILTLMSIVASIYKDPSIGNLINIVIVNLIVIHNEQDGPSISFNAQTTLKNFCQWQHSKNSPGGIHHDTAVLLTRQDICRAHDKCDTLGLAELGTICDPYRSCSISEDSGLSTAFTIAHELGHVFNMPHDDNNKCKEEGVKSPQHVMAPTLNFYTNPWMWSKCSRKYITEFLDTGYGECLLNEPESRPYPLPVQLPGILYNVNKQCELIFGPGSQVCPYMMQCRRLWCNNVNGVHKGCRTQHTPWADGTECEPGKHCKYGFCVPKEMDVPVTDGSWGSWSPFGTCSRTCGGGIKTAIRECNRPEPKNGGKYCVGRRMKFKSCNTEPCLKQKRDFRDEQCAHFDGKHFNINGLLPNVRWVPKYSGILMKDRCKLFCRVAGNTAYYQLRDRVIDGTPCGQDTNDICVQGLCRQAGCDHVLNSKARRDKCGVCGGDNSSCKTVAGTFNTVHYGYNTVVRIPAGATNIDVRQHSFSGETDDDNYLALSSSKGEFLLNGNFVVTMAKREIRIGNAVVEYSGSETAVERINSTDRIEQELLLQVLSVGKLYNPDVRYSFNIPIEDKPQQFYWNSHGPWQACSKPCQGERKRKLVCTRESDQLTVSDQRCDRLPQPGHITEPCGTDCDLRWHVASRSECSAQCGLGYRTLDIYCAKYSRLDGKTEKVDDGFCSSHPKPSNREKCSGECNTGGWRYSAWTECSKSCDGGTQRRRAICVNTRNDVLDDSKCTHQEKVTIQRCSEFPCPQWKSGDWSECLVTCGKGHKHRQVWCQFGEDRLNDRMCDPETKPTSMQTCQQPECASWQAGPWGQCSVTCGQGYQLRAVKCIIGTYMSVVDDNDCNAATRPTDTQDCELPSCHPPPAAPETRRSTYSAPRTQWRFGSWTPCSATCGKGTRMRYVSCRDENGSVADESACATLPRPVAKEECSVTPCGQWKALDWSSCSVTCGQGRATRQVMCVNYSDHVIDRSECDQDYIPETDQDCSMSPCPQRTPDSGLAQHPFQNEDYRPRSASPSRTHVLGGNQWRTGPWGACSSTCAGGSQRRVVVCQDENGYTANDCVERIKPDEQRACESGPCPQWAYGNWGECTKLCGGGIRTRLVVCQRSNGERFPDLSCEILDKPPDREQCNTHACPHDAAWSTGPWSSCSVSCGRGHKQRNVYCMAKDGSHLESDYCKHLAKPHGHRKCRGGRCPKWKAGAWSQCSVSCGRGVQQRHVGCQIGTHKIARETECNPYTRPESERDCQGPRCPLYTWRAEEWQECTKTCGEGSRYRKVVCVDDNKNEVHGARCDVSKRPVDRESCSLQPCEYVWITGEWSECSVTCGKGYKQRLVSCSEIYTGKENYEYSYQTTINCPGTQPPSVHPCYLRDCPVSATWRVGNWGSCSVSCGVGVMQRSVQCLTNEDQPSHLCHTDLKPEERKTCRNVYNCELPQNCKEVKRLKGASEDGEYFLMIRGKLLKIFCAGMHSDHPKEYVTLVHGDSENFSEVYGHRLHNPTECPYNGSRRDDCQCRKDYTAAGFSSFQKIRIDLTSMQIITTDLQFARTSEGHPVPFATAGDCYSAAKCPQGRFSINLYGTGLSLTESARWISQGNYAVSDIKKSPDGTRVVGKCGGYCGKCTPSSGTGLEVRVL

SEQ ID NO: 2314 - protein, 488 aa, Homo sapiens
  Payload ID: 575;
  Gene Symbol: ADAMTS9;
  Gene Name: ADAM metallopeptidase with thrombospondin type 1 motif, 9;
  ENSP ID: ENSP00000419217
MQFVSWATLLTLLVRDLAEMGSPDAAAAVRKDRLHPRQVKLLETLSEYEIVSPIRVNALGEPFPTNVHFKRTRRSINSATDPWPAFASSSSSSTSSQAHYRLSAFGQQFLFNLTANAGFIAPLFTVTLLGTPGVNQTKFYSEEEAELKHCFYKGYVNTNSEHTAVISLCSGMLGTFRSHDGDYFIEPLQSMDEQEDEEEQNKPHIIYRRSAPQREPSTGRHACDTSEHKNRHSKDKKKTRARKWGERINLAGDVAALNSGLATEAFSAYGNKTDNTREKRTHRRTKRFLSYPRFVEVLVVADNRMVSYHGENLQHYILTLMSIVASIYKDPSIGNLINIVIVNLIVIHNEQDGPSISFNAQTTLKNFCQWQHSKNSPGGIHHDTAVLLTRQDICRAHDKCDTLGLAELGTICDPYRSCSISEDSGLSTAFTIAHELGHVFNMPHDDNNKCKEEGVKSPQHVMAPTLNFYTNPWMWSKCSRKYITEFLE

SEQ ID NO: 2315 - protein, 69 aa, Homo sapiens
  Payload ID: 575;
  Gene Symbol: ADAMTS9;
  Gene Name: ADAM metallopeptidase with thrombospondin type 1 motif, 9;
  ENSP ID: ENSP00000478086
AKCPQGRFSINLYGTGLSLTESARWISQGNYAVSDIKKSPDGTRVVGKCGGYCGKCTPSSGTGLEVRVL

SEQ ID NO: 2316 - protein, 470 aa, Homo sapiens
  Payload ID: 576;
  Gene Symbol: ADAMDEC1;
  Gene Name: ADAM-like, decysin 1;
  Uniprot ID:  O15204;
  ENSP ID: ENSP00000256412
MLRGISQLPAVATMSWVLLPVLWLIVQTQAIAIKQTPELTLHEIVCPKKLHILHKREIKNNQTEKHGKEERYEPEVQYQMILNGEEIILSLQKTKHLLGPDYTETLYSPRGEEITTKPENMEHCYYKGNILNEKNSVASISTCDGLRGYFTHHHQRYQIKPLKSTDEKEHAVFTSNQEEQDPANHTCGVKSTDGKQGPIRISRSLKSPEKEDFLRAQKYIDLYLVLDNAFYKNYNENLTLIRSFVFDVMNLLNVIYNTIDVQVALVGMEIWSDGDKIKVVPSASTTFDNFLRWHSSNLGKKIHDHAQLLSGISFNNRRVGLAASNSLCSPSSVAVIEAKKKNNVALVGVMSHELGHVLGMPDVPFNTKCPSGSCVMNQYLSSKFPKDFSTSCRAHFERYLLSQKPKCLLQAPIPTNIMTTPVCGNHLLEVGEDCDCGSPKECTNLCCEALTCKLKPGTDCGGDAPNHTTE

SEQ ID NO: 2317 - protein, 391 aa, Homo sapiens
  Payload ID: 576;
  Gene Symbol: ADAMDEC1;
  Gene Name: ADAM-like, decysin 1;
  Uniprot ID:  O15204;
  ENSP ID: ENSP00000428993
MILNGEEIILSLQKTKHLLGPDYTETLYSPRGEEITTKPENMEHCYYKGNILNEKNSVASISTCDGLRGYFTHHHQRYQIKPLKSTDEKEHAVFTSNQEEQDPANHTCGVKSTDGKQGPIRISRSLKSPEKEDFLRAQKYIDLYLVLDNAFYKNYNENLTLIRSFVFDVMNLLNVIYNTIDVQVALVGMEIWSDGDKIKVVPSASTTFDNFLRWHSSNLGKKIHDHAQLLSGISFNNRRVGLAASNSLCSPSSVAVIEAKKKNNVALVGVMSHELGHVLGMPDVPFNTKCPSGSCVMNQYLSSKFPKDFSTSCRAHFERYLLSQKPKCLLQAPIPTNIMTTPVCGNHLLEVGEDCDCGSPKECTNLCCEALTCKLKPGTDCGGDAPNHTTE

SEQ ID NO: 2318 - protein, 41 aa, Homo sapiens
  Payload ID: 576;
  Gene Symbol: ADAMDEC1;
  Gene Name: ADAM-like, decysin 1;
  ENSP ID: ENSP00000431008
MLRGISQLPAVATMSWVLLPVLWLIVQTQASNCAWPKVSIQ

SEQ ID NO: 2319 - protein, 683 aa, Homo sapiens
  Payload ID: 577;
  Gene Symbol: ADAMTSL1;
  Gene Name: ADAMTS-like 1;
  Uniprot ID:  Q8N6G6;
  ENSP ID: ENSP00000276935
MECCRRATPGTLLLFLAFLLLSSRTARSEEDRDGLWDAWGPWSECSRTCGGGASYSLRRCLSSKSCEGRNIRYRTCSNVDCPPEAGDFRAQQCSAHNDVKHHGQFYEWLPVSNDPDNPCSLKCQAKGTTLVVELAPKVLDGTRCYTESLDMCISGLCQIVGCDHQLGSTVKEDNCGVCNGDGSTCRLVRGQYKSQLSATKSDDTVVAIPYGSRHIRLVLKGPDHLYLETKTLQGTKGENSLSSTGTFLVDNSSVDFQKFPDKEILRMAGPLTADFIVKIRNSGSADSTVQFIFYQPIIHRWRETDFFPCSATCGGGYQLTSAECYDLRSNRVVADQYCHYYPENIKPKPKLQECNLDPCPASDGYKQIMPYDLYHPLPRWEATPWTACSSSCGGGIQSRAVSCVEEDIQGHVTSVEEWKCMYTPKMPIAQPCNIFDCPKWLAQEWSPCTVTCGQGLRYRVVLCIDHRGMHTGGCSPKTKPHIKEECIVPTPCYKPKEKLPVEAKLPWFKQAQELEEGAAVSEEPSFIPEAWSACTVTCGVGTQVRIVRCQVLLSFSQSVADLPIDECEGPKPASQRACYAGPCSGEIPEFNPDETDGLFGGLQDFDELYDWEYEGFTKCSESCGGGVQEAVVSCLNKQTREPAEENLCVTSRRPPQLLKSCNLDPCPARSSIDSAWNACNVLC

SEQ ID NO: 2320 - protein, 525 aa, Homo sapiens
  Payload ID: 577;
  Gene Symbol: ADAMTSL1;
  Gene Name: ADAMTS-like 1;
  Uniprot ID:  Q8N6G6;
  ENSP ID: ENSP00000327887
MECCRRATPGTLLLFLAFLLLSSRTARSEEDRDGLWDAWGPWSECSRTCGGGASYSLRRCLSSKSCEGRNIRYRTCSNVDCPPEAGDFRAQQCSAHNDVKHHGQFYEWLPVSNDPDNPCSLKCQAKGTTLVVELAPKVLDGTRCYTESLDMCISGLCQIVGCDHQLGSTVKEDNCGVCNGDGSTCRLVRGQYKSQLSATKSDDTVVAIPYGSRHIRLVLKGPDHLYLETKTLQGTKGENSLSSTGTFLVDNSSVDFQKFPDKEILRMAGPLTADFIVKIRNSGSADSTVQFIFYQPIIHRWRETDFFPCSATCGGGYQLTSAECYDLRSNRVVADQYCHYYPENIKPKPKLQECNLDPCPASDGYKQIMPYDLYHPLPRWEATPWTACSSSCGGGIQSRAVSCVEEDIQGHVTSVEEWKCMYTPKMPIAQPCNIFDCPKWLAQEWSPCTVTCGQGLRYRVVLCIDHRGMHTGGCSPKTKPHIKEECIVPTPCYKPKEKLPVEAKLPWFKQAQELEEGAAVSEEPS

SEQ ID NO: 2321 - protein, 150 aa, Homo sapiens
  Payload ID: 577;
  Gene Symbol: ADAMTSL1;
  Gene Name: ADAMTS-like 1;
  ENSP ID: ENSP00000369911
TSPLGTQLVLDPGNSALLGCPIKGHPVPNITWFHGGQPIVTATGLTHHILAAGQILQVANLSGGSQGEFSCLAQNEAGVLMQKASLVIQDYWWSVDRLATCSASCGNRGVQQPRLRCLLNSTEVNPAHCAGKVRPAVQPIACNRRDCPSR

SEQ ID NO: 2322 - protein, 463 aa, Homo sapiens
  Payload ID: 577;
  Gene Symbol: ADAMTSL1;
  Gene Name: ADAMTS-like 1;
  Uniprot ID:  Q8N6G6;
  ENSP ID: ENSP00000369918
MSGVFCFFFFFLGVPEAEVTWFRNKSKLGSPHHLHEGSLLLTNVSSSDQGLYSCRAANLHGELTESTQLLILDPPQVPTQLEDIRALLAATGPNLPSVLTSPLGTQLVLDPGNSALLGCPIKGHPVPNITWFHGGQPIVTATGLTHHILAAGQILQVANLSGGSQGEFSCLAQNEAGVLMQKASLVIQDYWWSVDRLATCSASCGNRGVQQPRLRCLLNSTEVNPAHCAGKVRPAVQPIACNRRDCPSRWMVTSWSACTRSCGGGVQTRRVTCQKLKASGISTPVSNDMCTQVAKRPVDTQACNQQLCVEWAFSSWGQCNGPCIGPHLAVQHRQVFCQTRDGITLPSEQCSALPRPVSTQNCWSEACSVHWRVSLWTLCTATCGNYGFQSRRVECVHARTNKAVPEHLCSWGPRPANWQRCNITPCENMECRDTTRYCEKVKQLKLCQLSQFKSRCCGTCGKA

SEQ ID NO: 2323 - protein, 1762 aa, Homo sapiens
  Payload ID: 577;
  Gene Symbol: ADAMTSL1;
  Gene Name: ADAMTS-like 1;
  Uniprot ID:  Q8N6G6;
  ENSP ID: ENSP00000369921
MECCRRATPGTLLLFLAFLLLSSRTARSEEDRDGLWDAWGPWSECSRTCGGGASYSLRRCLSSKSCEGRNIRYRTCSNVDCPPEAGDFRAQQCSAHNDVKHHGQFYEWLPVSNDPDNPCSLKCQAKGTTLVVELAPKVLDGTRCYTESLDMCISGLCQIVGCDHQLGSTVKEDNCGVCNGDGSTCRLVRGQYKSQLSATKSDDTVVAIPYGSRHIRLVLKGPDHLYLETKTLQGTKGENSLSSTGTFLVDNSSVDFQKFPDKEILRMAGPLTADFIVKIRNSGSADSTVQFIFYQPIIHRWRETDFFPCSATCGGGYQLTSAECYDLRSNRVVADQYCHYYPENIKPKPKLQECNLDPCPASDGYKQIMPYDLYHPLPRWEATPWTACSSSCGGGIQSRAVSCVEEDIQGHVTSVEEWKCMYTPKMPIAQPCNIFDCPKWLAQEWSPCTVTCGQGLRYRVVLCIDHRGMHTGGCSPKTKPHIKEECIVPTPCYKPKEKLPVEAKLPWFKQAQELEEGAAVSEEPSFIPEAWSACTVTCGVGTQVRIVRCQVLLSFSQSVADLPIDECEGPKPASQRACYAGPCSGEIPEFNPDETDGLFGGLQDFDELYDWEYEGFTKCSESCGGGVQEAVVSCLNKQTREPAEENLCVTSRRPPQLLKSCNLDPCPARWEIGKWSPCSLTCGVGLQTRDVFCSHLLSREMNETVILADELCRQPKPSTVQACNRFNCPPAWYPAQWQPCSRTCGGGVQKREVLCKQRMADGSFLELPETFCSASKPACQQACKKDDCPSEWLLSDWTECSTSCGEGTQTRSAICRKMLKTGLSTVVNSTLCPPLPFSSSIRPCMLATCARPGRPSTKHSPHIAAARKVYIQTRRQRKLHFVVGGFAYLLPKTAVVLRCPARRVRKPLITWEKDGQHLISSTHVTVAPFGYLKIHRLKPSDAGVYTCSAGPAREHFVIKLIGGNRKLVARPLSPRSEEEVLAGRKGGPKEALQTHKHQNGIFSNGSKAEKRGLAANPGSRYDDLVSRLLEQGGWPGELLASWEAQDSAERNTTSEEDPGAEQVLLHLPFTMVTEQRRLDDILGNLSQQPEELRDLYSKHLVAQLAQEIFRSHLEHQDTLLKPSERRTSPVTLSPHKHVSGFSSSLRTSSTGDAGGGSRRPHRKPTILRKISAAQQLSASEVVTHLGQTVALASGTLSVLLHCEAIGHPRPTISWARNGEEVQFSDRILLQPDDSLQILAPVEADVGFYTCNATNALGYDSVSIAVTLAGKPLVKTSRMTVINTEKPAVTVDIGSTIKTVQGVNVTINCQVAGVPEAEVTWFRNKSKLGSPHHLHEGSLLLTNVSSSDQGLYSCRAANLHGELTESTQLLILDPPQVPTQLEDIRALLAATGPNLPSVLTSPLGTQLVLDPGNSALLGCPIKGHPVPNITWFHGGQPIVTATGLTHHILAAGQILQVANLSGGSQGEFSCLAQNEAGVLMQKASLVIQDYWWSVDRLATCSASCGNRGVQQPRLRCLLNSTEVNPAHCAGKVRPAVQPIACNRRDCPSRWMVTSWSACTRSCGGGVQTRRVTCQKLKASGISTPVSNDMCTQVAKRPVDTQACNQQLCVEWAFSSWGQCNGPCIGPHLAVQHRQVFCQTRDGITLPSEQCSALPRPVSTQNCWSEACSVHWRVSLWTLCTATCGNYGFQSRRVECVHARTNKAVPEHLCSWGPRPANWQRCNITPCENMECRDTTRYCEKVKQLKLCQLSQFKSRCCGTCGKA

SEQ ID NO: 2324 - protein, 439 aa, Homo sapiens
  Payload ID: 577;
  Gene Symbol: ADAMTSL1;
  Gene Name: ADAMTS-like 1;
  Uniprot ID:  Q8N6G6;
  ENSP ID: ENSP00000369940
MECCRRATPGTLLLFLAFLLLSSRTARSEEDRDGLWDAWGPWSECSRTCGGGASYSLRRCLSSKSCEGRNIRYRTCSNVDCPPEAGDFRAQQCSAHNDVKHHGQFYEWLPVSNDPDNPCSLKCQAKGTTLVVELAPKVLDGTRCYTESLDMCISGLCQIVGCDHQLGSTVKEDNCGVCNGDGSTCRLVRGQYKSQLSATKSDDTVVAIPYGSRHIRLVLKGPDHLYLETKTLQGTKGENSLSSTGTFLVDNSSVDFQKFPDKEILRMAGPLTADFIVKIRNSGSADSTVQFIFYQPIIHRWRETDFFPCSATCGGGYQLTSAECYDLRSNRVVADQYCHYYPENIKPKPKLQECNLDPCPARWEATPWTACSSSCGGGIQSRAVSCVEEDIQGHVTSVEEWKCMYTPKMPIAQPCNIFDCPKWLAQEWSPVTVPSFFVH

SEQ ID NO: 2325 - protein, 219 aa, Homo sapiens
  Payload ID: 577;
  Gene Symbol: ADAMTSL1;
  Gene Name: ADAMTS-like 1;
  ENSP ID: ENSP00000369944
MECCRRATPGTLLLFLAFLLLSSRTARSEEDRDGLWDAWGPWSECSRTCGGGASYSLRRCLSSKSCEGRNIRYRTCSNVDCPPEAGDFRAQQCSAHNDVKHHGQFYEWLPVSNDPDNPCSLKCQAKGTTLVVELAPKVLDGTRCYTESLDMCISGLCQIVGCDHQLGSTVKEDNCGVCNGDGSTCRLVRGQYKSQLSATKCKTHRDGRPLDLLTYPLLA

SEQ ID NO: 2326 - protein, 275 aa, Homo sapiens
  Payload ID: 577;
  Gene Symbol: ADAMTSL1;
  Gene Name: ADAMTS-like 1;
  ENSP ID: ENSP00000373362
MSGVFCFFFFFLGVPEAEVTWFRNKSKLGSPHHLHEGSLLLTNVSSSDQGLYSCRAANLHGELTESTQLLILDPPQVPTQLEDIRALLAATGPNLPSVLTSPLGTQLVLDPGNSALLGCPIKGHPVPNITWFHGGQPIVTATGLTHHILAAGQILQVANLSGGSQGEFSCLAQNEAGVLMQKASLVIQVQWALHRASPSCATQTSLLPDTGWHHLTIRAVQCSSEACEHPELLVRGLQCTLESQPVDPVHSYLWQLRLPVPACGVCACPHQQGSA

SEQ ID NO: 2327 - protein, 185 aa, Homo sapiens
  Payload ID: 577;
  Gene Symbol: ADAMTSL1;
  Gene Name: ADAMTS-like 1;
  ENSP ID: ENSP00000401157
MECCRRATPGTLLLFLAFLLLSSRTARSEEDRDGLWDAWGPWSECSRTCGGGASYSLRRCLSSKSCEGRNIRYRTCSNVDCPPEAGDFRAQQCSAHNDVKHHGQFYEWLPVSNDPDNPCSLKCQAKGTTLVVELAPKVLDGTRCYTESLDMCISGLCQVSADLFSFNLSRGFQCLCVNGLHSLTL

SEQ ID NO: 2328 - protein, 258 aa, Homo sapiens
  Payload ID: 577;
  Gene Symbol: ADAMTSL1;
  Gene Name: ADAMTS-like 1;
  Uniprot ID:  Q8N6G6;
  ENSP ID: ENSP00000440472
MSGVFCFFFFFLGVPEAEVTWFRNKSKLGSPHHLHEGSLLLTNVSSSDQGLYSCRAANLHGELTESTQLLILDPPQVPTQLEDIRALLAATGPNLPSVLTSPLGTQLVLDPGNSALLGCPIKGHPVPNITWFHGGQPIVTATGLTHHILAAGQILQVANLSGGSQGEFSCLAQNEAGVLMQKASLVIQDYWWSVDRLATCSASCGNRGVQQPRLRCLLNSTEVNPAHCAGKVRPAVQPIACNRRDCPSRAMGLASGLT

SEQ ID NO: 2329 - protein, 951 aa, Homo sapiens
  Payload ID: 578;
  Gene Symbol: ADAMTSL2;
  Gene Name: ADAMTS-like 2;
  Uniprot ID:  Q86TH1;
  ENSP ID: ENSP00000346478
MDGRWQCSCWAWFLLVLAVVAGDTVSTGSTDNSPTSNSLEGGTDATAFWWGEWTKWTACSRSCGGGVTSQERHCLQQRRKSVPGPGNRTCTGTSKRYQLCRVQECPPDGRSFREEQCVSFNSHVYNGRTHQWKPLYPDDYVHISSKPCDLHCTTVDGQRQLMVPARDGTSCKLTDLRGVCVSGKCEPIGCDGVLFSTHTLDKCGICQGDGSSCTHVTGNYRKGNAHLGYSLVTHIPAGARDIQIVERKKSADVLALADEAGYYFFNGNYKVDSPKNFNIAGTVVKYRRPMDVYETGIEYIVAQGPTNQGLNVMVWNQNGKSPSITFEYTLLQPPHESRPQPIYYGFSESAESQGLDGAGLMGFVPHNGSLYGQASSERLGLDNRLFGHPGLDMELGPSQGQETNEVCEQAGGGACEGPPRGKGFRDRNVTGTPLTGDKDDEEVDTHFASQEFFSANAISDQLLGAGSDLKDFTLNETVNSIFAQGAPRSSLAESFFVDYEENEGAGPYLLNGSYLELSSDRVANSSSEAPFPNVSTSLLTSAGNRTHKARTRPKARKQGVSPADMYRWKLSSHEPCSATCTTGVMSAYAMCVRYDGVEVDDSYCDALTRPEPVHEFCAGRECQPRWETSSWSECSRTCGEGYQFRVVRCWKMLSPGFDSSVYSDLCEAAEAVRPEERKTCRNPACGPQWEMSEWSECTAKCGERSVVTRDIRCSEDEKLCDPNTRPVGEKNCTGPPCDRQWTVSDWGPCSGSCGQGRTIRHVYCKTSDGRVVPESQCQMETKPLAIHPCGDKNCPAHWLAQDWERCNTTCGRGVKKRLVLCMELANGKPQTRSGPECGLAKKPPEESTCFERPCFKWYTSPWSECTKTCGVGVRMRDVKCYQGTDIVRGCDPLVKPVGRQACDLQPCPTEPPDDSCQDQPGTNCALAIKVNLCGHWYYSKACCRSCRPPHS

SEQ ID NO: 2330 - protein, 951 aa, Homo sapiens; identical to SEQ ID NO: 2329
  Payload ID: 578;
  Gene Symbol: ADAMTSL2;
  Gene Name: ADAMTS-like 2;
  Uniprot ID:  Q86TH1;
  ENSP ID: ENSP00000376780

SEQ ID NO: 2331 - protein, 1060 aa, Homo sapiens
  Payload ID: 578;
  Gene Symbol: ADAMTSL2;
  Gene Name: ADAMTS-like 2;
  ENSP ID: ENSP00000376781
MLFEVGEGGGAGEEGKGRGRPGRSLCTHAAPARTAHLAPSALRSARPFLWEDNLLTRSQGLPDNHDQLVPDNLEAWALAGPRGLFPKRTLVIWKRIGAGLVVTVALLPRMDGRWQCSCWAWFLLVLAVVAGDTVSTGSTDNSPTSNSLEGGTDATAFWWGEWTKWTACSRSCGGGVTSQERHCLQQRRKSVPGPGNRTCTGTSKRYQLCRVQECPPDGRSFREEQCVSFNSHVYNGRTHQWKPLYPDDYVHISSKPCDLHCTTVDGQRQLMVPARDGTSCKLTDLRGVCVSGKCEPIGCDGVLFSTHTLDKCGICQGDGSSCTHVTGNYRKGNAHLGYSLVTHIPAGARDIQIVERKKSADVLALADEAGYYFFNGNYKVDSPKNFNIAGTVVKYRRPMDVYETGIEYIVAQGPTNQGLNVMVWNQNGKSPSITFEYTLLQPPHESRPQPIYYGFSESAESQGLDGAGLMGFVPHNGSLYGQASSERLGLDNRLFGHPGLDMELGPSQGQETNEVCEQAGGGACEGPPRGKGFRDRNVTGTPLTGDKDDEEVDTHFASQEFFSANAISDQLLGAGSDLKDFTLNETVNSIFAQGAPRSSLAESFFVDYEENEGAGPYLLNGSYLELSSDRVANSSSEAPFPNVSTSLLTSAGNRTHKARTRPKARKQGVSPADMYRWKLSSHEPCSATCTTGVMSAYAMCVRYDGVEVDDSYCDALTRPEPVHEFCAGRECQPRWETSSWSECSRTCGEGYQFRVVRCWKMLSPGFDSSVYSDLCEAAEAVRPEERKTCRNPACGPQWEMSEWSECTAKCGERSVVTRDIRCSEDEKLCDPNTRPVGEKNCTGPPCDRQWTVSDWGPCSGSCGQGRTIRHVYCKTSDGRVVPESQCQMETKPLAIHPCGDKNCPAHWLAQDWERCNTTCGRGVKKRLVLCMELANGKPQTRSGPECGLAKKPPEESTCFERPCFKWYTSPWSECTKTCGVGVRMRDVKCYQGTDIVRGCDPLVKPVGRQACDLQPCPTEPPDDSCQDQPGTNCALAIKVNLCGHWYYSKACCRSCRPPHS

SEQ ID NO: 2332 - protein, 1691 aa, Homo sapiens
  Payload ID: 579;
  Gene Symbol: ADAMTSL3;
  Gene Name: ADAMTS-like 3;
  Uniprot ID:  P82987;
  ENSP ID: ENSP00000286744
MASWTSPWWVLIGMVFMHSPLPQTTAEKSPGAYFLPEFALSPQGSFLEDTTGEQFLTYRYDDQTSRNTRSDEDKDGNWDAWGDWSDCSRTCGGGASYSLRRCLTGRNCEGQNIRYKTCSNHDCPPDAEDFRAQQCSAYNDVQYQGHYYEWLPRYNDPAAPCALKCHAQGQNLVVELAPKVLDGTRCNTDSLDMCISGICQAVGCDRQLGSNAKEDNCGVCAGDGSTCRLVRGQSKSHVSPEKREENVIAVPLGSRSVRITVKGPAHLFIESKTLQGSKGEHSFNSPGVFLVENTTVEFQRGSERQTFKIPGPLMADFIFKTRYTAAKDSVVQFFFYQPISHQWRQTDFFPCTVTCGGGYQLNSAECVDIRLKRVVPDHYCHYYPENVKPKPKLKECSMDPCPSSDGFKEIMPYDHFQPLPRWEHNPWTACSVSCGGGIQRRSFVCVEESMHGEILQVEEWKCMYAPKPKVMQTCNLFDCPKWIAMEWSQCTVTCGRGLRYRVVLCINHRGEHVGGCNPQLKLHIKEECVIPIPCYKPKEKSPVEAKLPWLKQAQELEETRIATEEPTFIPEPWSACSTTCGPGVQVREVKCRVLLTFTQTETELPEEECEGPKLPTERPCLLEACDESPASRELDIPLPEDSETTYDWEYAGFTPCTATCVGGHQEAIAVCLHIQTQQTVNDSLCDMVHRPPAMSQACNTEPCPPRWHVGSWGPCSATCGVGIQTRDVYCLHPGETPAPPEECRDEKPHALQACNQFDCPPGWHIEEWQQCSRTCGGGTQNRRVTCRQLLTDGSFLNLSDELCQGPKASSHKSCARTDCPPHLAVGDWSKCSVSCGVGIQRRKQVCQRLAAKGRRIPLSEMMCRDLPGLPLVRSCQMPECSKIKSEMKTKLGEQGPQILSVQRVYIQTREEKRINLTIGSRAYLLPNTSVIIKCPVRRFQKSLIQWEKDGRCLQNSKRLGITKSGSLKIHGLAAPDIGVYRCIAGSAQETVVLKLIGTDNRLIARPALREPMREYPGMDHSEANSLGVTWHKMRQMWNNKNDLYLDDDHISNQPFLRALLGHCSNSAGSTNSWELKNKQFEAAVKQGAYSMDTAQFDELIRNMSQLMETGEVSDDLASQLIYQLVAELAKAQPTHMQWRGIQEETPPAAQLRGETGSVSQSSHAKNSGKLTFKPKGPVLMRQSQPPSISFNKTINSRIGNTVYITKRTEVINILCDLITPSEATYTWTKDGTLLQPSVKIILDGTGKIQIQNPTRKEQGIYECSVANHLGSDVESSSVLYAEAPVILSVERNITKPEHNHLSVVVGGIVEAALGANVTIRCPVKGVPQPNITWLKRGGSLSGNVSLLFNGSLLLQNVSLENEGTYVCIATNALGKAVATSVLHLLERRWPESRIVFLQGHKKYILQATNTRTNSNDPTGEPPPQEPFWEPGNWSHCSATCGHLGARIQRPQCVMANGQEVSEALCDHLQKPLAGFEPCNIRDCPARWFTSVWSQCSVSCGEGYHSRQVTCKRTKANGTVQVVSPRACAPKDRPLGRKPCFGHPCVQWEPGNRCPGRCMGRAVRMQQRHTACQHNSSDSNCDDRKRPTLRRNCTSGACDVCWHTGPWKPCTAACGRGFQSRKVDCIHTRSCKPVAKRHCVQKKKPISWRHCLGPSCDRDCTDTTHYCMFVKHLNLCSLDRYKQRCCQSCQEG

SEQ ID NO: 2333 - protein, 1682 aa, Homo sapiens
  Payload ID: 579;
  Gene Symbol: ADAMTSL3;
  Gene Name: ADAMTS-like 3;
  Uniprot ID:  P82987;
  ENSP ID: ENSP00000456313
MASWTSPWWVLIGMVFMHSPLPQTTAEKSPGAYFLPEFALSPQGSFLEDTTGEQFLTYRYDDQTSRNTRSDEDKDGNWDAWGDWSDCSRTCGGGASYSLRRCLTGRNCEGQNIRYKTCSNHDCPPDAEDFRAQQCSAYNDVQYQGHYYEWLPRYNDPAAPCALKCHAQGQNLVVELAPKVLDGTRCNTDSLDMCISGICQAVGCDRQLGSNAKEDNCGVCAGDGSTCRLVRGQSKSHVSPEKREENVIAVPLGSRSVRITVKGPAHLFIESKTLQGSKGEHSFNSPGVFLVENTTVEFQRGSERQTFKIPGPLMADFIFKTRYTAAKDSVVQFFFYQPISHQWRQTDFFPCTVTCGGGYQLNSAECVDIRLKRVVPDHYCHYYPENVKPKPKLKECSMDPCPSSDGFKEIMPYDHFQPLPRWEHNPWTACSVSCGGGIQRRSFVCVEESMHGEILQVEEWKCMYAPKPKVMQTCNLFDCPKWIAMEWSQCTVTCGRGLRYRVVLCINHRGEHVGGCNPQLKLHIKEECVIPIPCYKPKEKSPVEAKLPWLKQAQELEETRIATEEPTFIPEPWSACSTTCGPGVQVREVKCRVLLTFTQTETELPEEECEGPKLPTERPCLLEACDESPASRELDIPLPEDSETTYDWEYAGFTPCTATCVGGHQEAIAVCLHIQTQQTVNDSLCDMVHRPPAMSQACNTEPCPPRWHVGSWGPCSATCGVGIQTRDVYCLHPGETPAPPEECRDEKPHALQACNQFDCPPGWHIEEWQQCSRTCGGGTQNRRVTCRQLLTDGSFLNLSDELCQGPKASSHKSCARTDCPPHLAVGDWSKCSVSCGVGIQRRKQVCQRLAAKGRRIPLSEMMCRDLPGLPLVRSCQMPECSKIKSEMKTKLGEQGPQILSVQRVYIQTREEKRINLTIGSRAYLLPNTSVIIKCPVRRFQKSLIQWEKDGRCLQNSKRLGITKSGSLKIHGLAAPDIGVYRCIAGSAQETVVLKLIGTDNRLIARPALREPMREYPGMDHSEANSLGVTWHKMRQMWNNKNDLYLDDDHISNQPFLRALLGHCSNSAGSTNSWELKNKQFEAAVKQGAYSMDTAQFDELIRNMSQLMETGEVSDDLASQLIYQLVAELAKAQPTHMQWRGIQEETPPAAQLRGETGSVSQSSHAKNSGKLTFKPKGPVLMRQSQPPSISFNKTINSRIGNTVYITKRTEVINILCDLITPSEATYTWTKDGTLLQPSVKIILDGTGKIQIQNPTRKEQGIYECSVANHLGSDVESSSVLYAEAPVILSVERNITKPEHNHLSVVVGGIVEAALGANVTIRCPVKGVPQPNITWLKRGGSLSGNVSLLFNGSLLLQNVSLENEGTYVCIATNALGKAVATSVLHLLERRWPESRIVFLQGHKKYILQATNTRTNSNDPTGEPPPQEPFWEPGNWSHCSATCGHLGARIQRPQCVMANGQEVSEALCDHLQKPLAGFEPCNIRDCPARWFTSVWSQCSVSCGEGYHSRQVTCKRTKANGTVQVVSPRACAPKDRPLGRKPCFGHPCVQWEPGNRCPGRCMGRAVRMQQRHTACQHNSSDSNCDDRKRPTLRRNCTSGACDVCWHTGPWKPCTAACGRGFQSRKVDCIHTRSCKPVAKRHCVQKKKPISWRHCLGPSCDSTYTSQTATNKGAASHVKRDKPLEGS

SEQ ID NO: 2334 - protein, 1074 aa, Homo sapiens
  Payload ID: 580;
  Gene Symbol: ADAMTSL4;
  Gene Name: ADAMTS-like 4;
  Uniprot ID:  Q6UY14;
  ENSP ID: ENSP00000271643
MENWTGRPWLYLLLLLSLPQLCLDQEVLSGHSLQTPTEEGQGPEGVWGPWVQWASCSQPCGVGVQRRSRTCQLPTVQLHPSLPLPPRPPRHPEALLPRGQGPRPQTSPETLPLYRTQSRGRGGPLRGPASHLGREETQEIRAARRSRLRDPIKPGMFGYGRVPFALPLHRNRRHPRSPPRSELSLISSRGEEAIPSPTPRAEPFSANGSPQTELPPTELSVHTPSPQAEPLSPETAQTEVAPRTRPAPLRHHPRAQASGTEPPSPTHSLGEGGFFRASPQPRRPSSQGWASPQVAGRRPDPFPSVPRGRGQQGQGPWGTGGTPHGPRLEPDPQHPGAWLPLLSNGPHASSLWSLFAPSSPIPRCSGESEQLRACSQAPCPPEQPDPRALQCAAFNSQEFMGQLYQWEPFTEVQGSQRCELNCRPRGFRFYVRHTEKVQDGTLCQPGAPDICVAGRCLSPGCDGILGSGRRPDGCGVCGGDDSTCRLVSGNLTDRGGPLGYQKILWIPAGALRLQIAQLRPSSNYLALRGPGGRSIINGNWAVDPPGSYRAGGTVFRYNRPPREEGKGESLSAEGPTTQPVDVYMIFQEENPGVFYQYVISSPPPILENPTPEPPVPQLQPEILRVEPPLAPAPRPARTPGTLQRQVRIPQMPAPPHPRTPLGSPAAYWKRVGHSACSASCGKGVWRPIFLCISRESGEELDERSCAAGARPPASPEPCHGTPCPPYWEAGEWTSCSRSCGPGTQHRQLQCRQEFGGGGSSVPPERCGHLPRPNITQSCQLRLCGHWEVGSPWSQCSVRCGRGQRSRQVRCVGNNGDEVSEQECASGPPQPPSREACDMGPCTTAWFHSDWSSKCSAECGTGIQRRSVVCLGSGAALGPGQGEAGAGTGQSCPTGSRPPDMRACSLGPCERTWRWYTGPWGECSSECGSGTQRRDIICVSKLGTEFNVTSPSNCSHLPRPPALQPCQGQACQDRWFSTPWSPCSRSCQGGTQTREVQCLSTNQTLSTRCPPQLRPSRKRPCNSQPCSQRPDDQCKDSSPHCPLVVQARLCVYPYYTATCCRSCAHVLERSPQDPS

SEQ ID NO: 2335 - protein, 1074 aa, Homo sapiens; identical to SEQ ID NO: 2334
  Payload ID: 580;
  Gene Symbol: ADAMTSL4;
  Gene Name: ADAMTS-like 4;
  Uniprot ID:  Q6UY14;
  ENSP ID: ENSP00000358034

SEQ ID NO: 2336 - protein, 1097 aa, Homo sapiens
  Payload ID: 580;
  Gene Symbol: ADAMTSL4;
  Gene Name: ADAMTS-like 4;
  Uniprot ID:  Q6UY14;
  ENSP ID: ENSP00000358035
MENWTGRPWLYLLLLLSLPQLCLDQEVLSGHSLQTPTEEGQGPEGVWGPWVQWASCSQPCGVGVQRRSRTCQLPTVQLHPSLPLPPRPPRHPEALLPRGQGPRPQTSPETLPLYRTQSRGRGGPLRGPASHLGREETQEIRAARRSRLRDPIKPGMFGYGRVPFALPLHRNRRHPRSPPRSELSLISSRGEEAIPSPTPRAEPFSANGSPQTELPPTELSVHTPSPQAEPLSPETAQTEVAPRTRPAPLRHHPRAQASGTEPPSPTHSLGEGGFFRASPQPRRPSSQGWASPQVAGRRPDPFPSVPRGRGQQGQGPWGTGGTPHGPRLEPDPQHPGAWLPLLSNGPHASSLWSLFAPSSPIPRCSGESEQLRACSQAPCPPEQPDPRALQCAAFNSQEFMGQLYQWEPFTEAPLLPLRHAFFLLPGAGSGDSTGVQGSQRCELNCRPRGFRFYVRHTEKVQDGTLCQPGAPDICVAGRCLSPGCDGILGSGRRPDGCGVCGGDDSTCRLVSGNLTDRGGPLGYQKILWIPAGALRLQIAQLRPSSNYLALRGPGGRSIINGNWAVDPPGSYRAGGTVFRYNRPPREEGKGESLSAEGPTTQPVDVYMIFQEENPGVFYQYVISSPPPILENPTPEPPVPQLQPEILRVEPPLAPAPRPARTPGTLQRQVRIPQMPAPPHPRTPLGSPAAYWKRVGHSACSASCGKGVWRPIFLCISRESGEELDERSCAAGARPPASPEPCHGTPCPPYWEAGEWTSCSRSCGPGTQHRQLQCRQEFGGGGSSVPPERCGHLPRPNITQSCQLRLCGHWEVGSPWSQCSVRCGRGQRSRQVRCVGNNGDEVSEQECASGPPQPPSREACDMGPCTTAWFHSDWSSKCSAECGTGIQRRSVVCLGSGAALGPGQGEAGAGTGQSCPTGSRPPDMRACSLGPCERTWRWYTGPWGECSSECGSGTQRRDIICVSKLGTEFNVTSPSNCSHLPRPPALQPCQGQACQDRWFSTPWSPCSRSCQGGTQTREVQCLSTNQTLSTRCPPQLRPSRKRPCNSQPCSQRPDDQCKDSSPHCPLVVQARLCVYPYYTATCCRSCAHVLERSPQDPS

SEQ ID NO: 2337 - protein, 877 aa, Homo sapiens
  Payload ID: 580;
  Gene Symbol: ADAMTSL4;
  Gene Name: ADAMTS-like 4;
  Uniprot ID:  Q6UY14;
  ENSP ID: ENSP00000358037
MENWTGRPWLYLLLLLSLPQLCLDQEVLSGHSLQTPTEEGQGPEGVWGPWVQWASCSQPCGVGVQRRSRTCQLPTVQLHPSLPLPPRPPRHPEALLPRGQGPRPQTSPETLPLYRTQSRGRGGPLRGPASHLGREETQEIRAARRSRLRDPIKPGMFGYGRVPFALPLHRNRRHPRSPPRSELSLISSRGEEAIPSPTPRAEPFSANGSPQTELPPTELSVHTPSPQAEPLSPETAQTEVAPRTRPAPLRHHPRAQASGTEPPSPTHSLGEGGFFRASPQPRRPSSQGWASPQVAGRRPDPFPSVPRGRGQQGQGPWGTGGTPHGPRLEPDPQHPGAWLPLLSNGPHASSLWSLFAPSSPIPRCSGESEQLRACSQAPCPPEQPDPRALQCAAFNSQEFMGQLYQWEPFTEVQGSQRCELNCRPRGFRFYVRHTEKVQDGTLCQPGAPDICVAGRCLSPGCDGILGSGRRPDGCGVCGGDDSTCRLVSGNLTDRGGPLGYQKILWIPAGALRLQIAQLRPSSNYLALRGPGGRSIINGNWAVDPPGSYRAGGTVFRYNRPPREEGKGESLSAEGPTTQPVDVYMIFQEENPGVFYQYVISSPPPILENPTPEPPVPQLQPEILRVEPPLAPAPRPARTPGTLQRQVRIPQMPAPPHPRTPLGSPAAYWKRVGHSACSASCGKGVWRPIFLCISRESGEELDERSCAAGARPPASPEPCHGTPCPPYWEAGEWTSCSRSCGPGTQHRQLQCRQEFGGGGSSVPPERCGHLPRPNITQSCQLRLCGHWEVGSPWSQCSVRCGRGQRSRQVRCVGNNGDEVSEQECASGPPQPPSREACDMGPCTTAWFHSDWSSKVSPEPPAISCILGNHAQDTSAFPA

SEQ ID NO: 2338 - protein, 435 aa, Homo sapiens
  Payload ID: 580;
  Gene Symbol: ADAMTSL4;
  Gene Name: ADAMTS-like 4;
  ENSP ID: ENSP00000477897
MGSLALAGVLMAVESVGVMILPVALFRGTSLTEGAPWAIRRSCGFQREPCGSRLPSSGLAPTTWHFVALGAGPINGNWAVDPPGSYRAGGTVFRYNRPPREEGKGESLSAEGPTTQPVDVYMIFQEENPGVFYQYVISSPPPILENPTPEPPVPQLQPEILRVEPPLAPAPRPARTPGTLQRQVRIPQMPAPPHPRTPLGSPAAYWKRVGHSACSASCGKGVWRPIFLCISRESGEELDERSCAAGARPPASPEPCHGTPCPPYWEAGEWTSCSRSCGPGTQHRQLQCRQEFGGGGSSVPPERCGHLPRPNITQSCQLRLCGHWEVGSPWSQCSVRCGRGQRSRQVRCVGNNGDEVSEQECASGPPQPPSREACDMGPCTTAWFHSDWSSKCSAECGTGIQRRSVVCLGSGAALGPGQGEAGAGTGQSCPTGSRP

SEQ ID NO: 2339 - protein, 471 aa, Homo sapiens
  Payload ID: 581;
  Gene Symbol: ADAMTSL5;
  Gene Name: ADAMTS-like 5;
  ENSP ID: ENSP00000327608
MDSAPLFPRPHLFQNLLLFLWALLNCGLGVSAQGPGEWTPWVSWTRCSSSCGRGVSVRSRRCLRLPGEEPCWGDSHEYRLCQLPDCPPGAVPFRDLQCALYNGRPVLGTQKTYQWVPFHGAPNQCDLNCLAEGHAFYHSFGRVLDGTACSPGAQGVCVAGRCLSAGCDGLLGSGALEDRCGRCGGANDSCLFVQRVFRDAGAFAGYWNVTLIPEGARHIRVEHRSRNHLALMGGDGRYVLNGHWVVSPPGTYEAAGTHVVYTRDTGPQETLQAAGPTSHDLLLQVLLQEPNPGIEFEFWLPRERYSPFQARVQALGWPLRQPQPRGVEPQPPAAPAVTPAQTPTLAPDPCPPCPDTRGRAHRLLHYCGSDFVFQARVLGHHHQAQETRYEVRIQLVYKNRSPLRAREYVWAPGHCPCPMLAPHRDYLMAVQRLVSPDGTQDQLLLPHAGYARPWSPAEDSRIRLTARRCPG

SEQ ID NO: 2340 - protein, 131 aa, Homo sapiens
  Payload ID: 581;
  Gene Symbol: ADAMTSL5;
  Gene Name: ADAMTS-like 5;
  ENSP ID: ENSP00000378850
MGGDGRYVLNGHWVVSPPGTYEAAGTHVVYTRDTGPQETLQAAGPTSHDLLLQVLLQEPNPGIEFEFWLPRERYSPFQARVQALGWPLRQPQPRGVEPQPPAAPAVTPAQTPTLAPGPSAGPPPPGPGDPL

SEQ ID NO: 2341 - protein, 135 aa, Homo sapiens
  Payload ID: 581;
  Gene Symbol: ADAMTSL5;
  Gene Name: ADAMTS-like 5;
  ENSP ID: ENSP00000466231
RHIRVEHRSRNHLGILGSLMGGDGRYVLNGHWVVSPPGTYEAAGTHVVYTRDTGPQETLQAAGPTSHDLLLQVLLQEPNPGIEFEFWLPRERYSPFQARVQALGWPLRQPQPRGVEPQPPAAPAVTPAQTPTLAP

SEQ ID NO: 2342 - protein, 141 aa, Homo sapiens
  Payload ID: 581;
  Gene Symbol: ADAMTSL5;
  Gene Name: ADAMTS-like 5;
  ENSP ID: ENSP00000479786
MGKLRPGRVEWLASGHTERPHLFQNLLLFLWALLNCGLGVSAQGPGEWTPWVSWTRCSSSCGRGVSVRSRRCLRLPGEEPCWGDSHEYRLCQLPDCPPGAVPFRDLQCALYNGRPVLGTQKTYQWVPFHGAPNQCDLNCLA

SEQ ID NO: 2343 - protein, 210 aa, Homo sapiens
  Payload ID: 581;
  Gene Symbol: ADAMTSL5;
  Gene Name: ADAMTS-like 5;
  ENSP ID: ENSP00000482683
MGKLRPGRVEWLASGHTERPHLFQNLLLFLWALLNCGLGVSAQGPGEWTPWVSWTRCSSSCGRGVSVRSRRCLRLPGEEPCWGDSHEYRLCQLPDCPPGAVPFRDLQCALYNGRPVLGTQKTYQWVPFHGAPNQCDLNCLAEGHAFYHSFGRVLDGTACSPGAQGVCVAGRCLSAGCDGLLGSGALEDRCGRCGGANDSCLFVQRVFRDA

SEQ ID NO: 2344 - protein, 130 aa, Homo sapiens
  Payload ID: 581;
  Gene Symbol: ADAMTSL5;
  Gene Name: ADAMTS-like 5;
  ENSP ID: ENSP00000484344
MGKLRPGRVEWLASGHTERPHLFQNLLLFLWALLNCGLGVSAQGPGEWTPWVSWTRCSSSCGRGVSVRSRRCLRLPGEEPCWGDSHEYRLCQLPDCPPGAVPFRDLQCALYNGRPVLGTQKTYQWVPFHG

SEQ ID NO: 2345 - protein, 709 aa, Homo sapiens
  Payload ID: 582;
  Gene Symbol: APPL1;
  Gene Name: adaptor prt, phosphotyr interaction, PH domain and leu zipper containing 1;
  Uniprot ID:  Q9UKG1;
  ENSP ID: ENSP00000288266
MPGIDKLPIEETLEDSPQTRSLLGVFEEDATAISNYMNQLYQAMHRIYDAQNELSAATHLTSKLLKEYEKQRFPLGGDDEVMSSTLQQFSKVIDELSSCHAVLSTQLADAMMFPITQFKERDLKEILTLKEVFQIASNDHDAAINRYSRLSKKRENDKVKYEVTEDVYTSRKKQHQTMMHYFCALNTLQYKKKIALLEPLLGYMQAQISFFKMGSENLNEQLEEFLANIGTSVQNVRREMDSDIETMQQTIEDLEVASDPLYVPDPDPTKFPVNRNLTRKAGYLNARNKTGLVSSTWDRQFYFTQGGNLMSQARGDVAGGLAMDIDNCSVMAVDCEDRRYCFQITSFDGKKSSILQAESKKDHEEWICTINNISKQIYLSENPEETAARVNQSALEAVTPSPSFQQRHESLRPAAGQSRPPTARTSSSGSLGSESTNLAALSLDSLVAPDTPIQFDIISPVCEDQPGQAKAFGQGGRRTNPFGESGGSTKSETEDSILHQLFIVRFLGSMEVKSDDHPDVVYETMRQILAARAIHNIFRMTESHLLVTCDCLKLIDPQTQVTRLTFPLPCVVLYATHQENKRLFGFVLRTSSGRSESNLSSVCYIFESNNEGEKICDSVGLAKQIALHAELDRRASEKQKEIERVKEKQQKELNKQKQIEKDLEEQSRLIAASSRPNQASSEGQFVVLSSSQSEESDLGEGGKKRESEA

SEQ ID NO: 2346 - protein, 133 aa, Homo sapiens
  Payload ID: 582;
  Gene Symbol: APPL1;
  Gene Name: adaptor prt, phosphotyr interaction, PH domain and leu zipper containing 1;
  ENSP ID: ENSP00000406095
MTRSLLGVFEEDATAISNYMNQLYQAMHRIYDAQNELSAATHLTSKLLKEYEKQRFPLGGDDEVMSSTLQQFSKVIDELSSCHAVLSTQLADAMMFPITQFKERDLKEILTLKEVFQIASNDHDAAINRYSRL

SEQ ID NO: 2347 - protein, 114 aa, Homo sapiens
  Payload ID: 582;
  Gene Symbol: APPL1;
  Gene Name: adaptor prt, phosphotyr interaction, PH domain and leu zipper containing 1;
  ENSP ID: ENSP00000419644
MPGIDKLPIEETLEDSPQTRSLLGVFEEDATAISNYMNQLYQAMHRIYDAQNELSAATHLTSKLLKEYEKQLSSCHAVLSTQLADAMMFPITQFKERDLKEILTLKEVFQIASN

SEQ ID NO: 2348 - protein, 664 aa, Homo sapiens
  Payload ID: 583;
  Gene Symbol: APPL2;
  Gene Name: adaptor prt, phosphotyr interaction, PH domain and leu zipper containing 2;
  Uniprot ID:  Q8NEU8;
  ENSP ID: ENSP00000258530
MPAVDKLLLEEALQDSPQTRSLLSVFEEDAGTLTDYTNQLLQAMQRVYGAQNEMCLATQQLSKQLLAYEKQNFALGKGDEEVISTLHYFSKVVDELNLLHTELAKQLADTMVLPIIQFREKDLTEVSTLKDLFGLASNEHDLSMAKYSRLPKKKENEKVKTEVGKEVAAARRKQHLSSLQYYCALNALQYRKQMAMMEPMIGFAHGQINFFKKGAEMFSKRMDSFLSSVADMVQSIQVELEAEAEKMRVSQQELLSVDESVYTPDSDVAAPQINRNLIQKAGYLNLRNKTGLVTTTWERLYFFTQGGNLMCQPRGAVAGGLIQDLDNCSVMAVDCEDRRYCFQITTPNGKSGIILQAESRKENEEWICAINNISRQIYLTDNPEAVAIKLNQTALQAVTPITSFGKKQESSCPSQNLKNSEMENENDKIVPKATASLPEAEELIAPGTPIQFDIVLPATEFLDQNRGSRRTNPFGETEDESFPEAEDSLLQQMFIVRFLGSMAVKTDSTTEVIYEAMRQVLAARAIHNIFRMTESHLMVTSQSLRLIDPQTQVSRANFELTSVTQFAAHQENKRLVGFVIRVPESTGEESLSTYIFESNSEGEKICYAINLGKEIIEVQKDPEALAQLMLSIPLTNDGKYVLLNDQPDDDDGNPNEHRGAESEA

SEQ ID NO: 2349 - protein, 621 aa, Homo sapiens
  Payload ID: 583;
  Gene Symbol: APPL2;
  Gene Name: adaptor prt, phosphotyr interaction, PH domain and leu zipper containing 2;
  Uniprot ID:  Q8NEU8;
  ENSP ID: ENSP00000444472
MQRVYGAQNEMCLATQQLSKQLLAYEKQNFALGKGDEEVISTLHYFSKVVDELNLLHTELAKQLADTMVLPIIQFREKDLTEVSTLKDLFGLASNEHDLSMAKYSRLPKKKENEKVKTEVGKEVAAARRKQHLSSLQYYCALNALQYRKQMAMMEPMIGFAHGQINFFKKGAEMFSKRMDSFLSSVADMVQSIQVELEAEAEKMRVSQQELLSVDESVYTPDSDVAAPQINRNLIQKAGYLNLRNKTGLVTTTWERLYFFTQGGNLMCQPRGAVAGGLIQDLDNCSVMAVDCEDRRYCFQITTPNGKSGIILQAESRKENEEWICAINNISRQIYLTDNPEAVAIKLNQTALQAVTPITSFGKKQESSCPSQNLKNSEMENENDKIVPKATASLPEAEELIAPGTPIQFDIVLPATEFLDQNRGSRRTNPFGETEDESFPEAEDSLLQQMFIVRFLGSMAVKTDSTTEVIYEAMRQVLAARAIHNIFRMTESHLMVTSQSLRLIDPQTQVSRANFELTSVTQFAAHQENKRLVGFVIRVPESTGEESLSTYIFESNSEGEKICYAINLGKEIIEVQKDPEALAQLMLSIPLTNDGKYVLLNDQPDDDDGNPNEHRGAESEA

SEQ ID NO: 2350 - protein, 188 aa, Homo sapiens
  Payload ID: 583;
  Gene Symbol: APPL2;
  Gene Name: adaptor prt, phosphotyr interaction, PH domain and leu zipper containing 2;
  ENSP ID: ENSP00000446510
DIVLPATEFLDQNRGSRRTNPFGETEDESFPEAEVKTDSTTEVIYEAMRQVLAARAIHNIFRMTESHLMVTSQSLRLIDPQTQVSRANFELTSVTQFAAHQENKRLVGFVIRVPESTGEESLSTYIFESNSEGEKICYAINLGKEIIEVQKDPEALAQLMLSIPLTNDGKYVLLNDQPDDDDGNPNEH

SEQ ID NO: 2351 - protein, 670 aa, Homo sapiens
  Payload ID: 583;
  Gene Symbol: APPL2;
  Gene Name: adaptor prt, phosphotyr interaction, PH domain and leu zipper containing 2;
  Uniprot ID:  Q8NEU8;
  ENSP ID: ENSP00000446917
MPAVDKLLLEEALQDSPQTRSLLSVFEEDAGTLTDYTNQLLQAMQRVYGAQNEMCLATQQLSKQLLAYEKQNFALGKGDEEVISTLHYFSKVVDELNLLHTELAKQLADTMVLPIIQFREKDLTEVSTLKDLFGLASNDVCLFLEHDLSMAKYSRLPKKKENEKVKTEVGKEVAAARRKQHLSSLQYYCALNALQYRKQMAMMEPMIGFAHGQINFFKKGAEMFSKRMDSFLSSVADMVQSIQVELEAEAEKMRVSQQELLSVDESVYTPDSDVAAPQINRNLIQKAGYLNLRNKTGLVTTTWERLYFFTQGGNLMCQPRGAVAGGLIQDLDNCSVMAVDCEDRRYCFQITTPNGKSGIILQAESRKENEEWICAINNISRQIYLTDNPEAVAIKLNQTALQAVTPITSFGKKQESSCPSQNLKNSEMENENDKIVPKATASLPEAEELIAPGTPIQFDIVLPATEFLDQNRGSRRTNPFGETEDESFPEAEDSLLQQMFIVRFLGSMAVKTDSTTEVIYEAMRQVLAARAIHNIFRMTESHLMVTSQSLRLIDPQTQVSRANFELTSVTQFAAHQENKRLVGFVIRVPESTGEESLSTYIFESNSEGEKICYAINLGKEIIEVQKDPEALAQLMLSIPLTNDGKYVLLNDQPDDDDGNPNEHRGAESEA

SEQ ID NO: 2352 - protein, 61 aa, Homo sapiens
  Payload ID: 583;
  Gene Symbol: APPL2;
  Gene Name: adaptor prt, phosphotyr interaction, PH domain and leu zipper containing 2;
  ENSP ID: ENSP00000447520
MQRVYGAQNEMCLATQQLSKQLLAYEKQNFALGKGDEEVISTLHYFSKVVDELNLLHTELA

SEQ ID NO: 2353 - protein, 107 aa, Homo sapiens
  Payload ID: 583;
  Gene Symbol: APPL2;
  Gene Name: adaptor prt, phosphotyr interaction, PH domain and leu zipper containing 2;
  ENSP ID: ENSP00000447828
MSLLQPGPVFPSGNSENSDLTVLPNHICSKILSFSTFANHYFSCLLQICYAINLGKEIIEVQKDPEALAQLMLSIPLTNDGKYVLLNDQPDDDDGNPNEHRGAESEA

SEQ ID NO: 2354 - protein, 39 aa, Homo sapiens
  Payload ID: 583;
  Gene Symbol: APPL2;
  Gene Name: adaptor prt, phosphotyr interaction, PH domain and leu zipper containing 2;
  ENSP ID: ENSP00000448569
MVLPIIQFREKDLTEVSTLKDLFGLASNAGCLRKRRMRR

SEQ ID NO: 2355 - protein, 235 aa, Homo sapiens
  Payload ID: 583;
  Gene Symbol: APPL2;
  Gene Name: adaptor prt, phosphotyr interaction, PH domain and leu zipper containing 2;
  ENSP ID: ENSP00000449410
MPAVDKLLLEEALQDSPQTRSLLSVFEEDAGTLTDYTNQLLQAMQRVYGAQNEMCLATQQLSKQLLAYEKQNFALGKGDEEVISTLHYFSKVVDELNLLHTELAKQLADTMVLPIIQFREKDLTEVSTLKDLFGLASNEHDLSMAKYSRLPKKKENEKVKTEVGKEVAAARRKQHLSSLQYYCALNALQYRKQMAMMEPMIGFAHGQINFFKKGAEMFSKRMDSFLSSVADMVQR

SEQ ID NO: 2356 - protein, 144 aa, Homo sapiens
  Payload ID: 583;
  Gene Symbol: APPL2;
  Gene Name: adaptor prt, phosphotyr interaction, PH domain and leu zipper containing 2;
  ENSP ID: ENSP00000449767
MPAVDKLLLEEALQDSPQNEMCLATQQLSKQLLAYEKQNFALGKGDEEVISTLHYFSKVVDELNLLHTELAKQLADTMVLPIIQFREKDLTEVSTLKDLFGLASNEHDLSMAKYSRLPKKKENEKVKTEVGKEVAAARRKQHLS

SEQ ID NO: 2357 - protein, 302 aa, Homo sapiens
  Payload ID: 584;
  Gene Symbol: AP1AR;
  Gene Name: adaptor-related prt complex 1 associated regulatory prt;
  Uniprot ID:  Q63HQ0;
  ENSP ID: ENSP00000274000
MGNCCWTQCFGLLRKEAGRLQRVGGGGGSKYFRTCSRGEHLTIEFENLVESDEGESPGSSHRPLTEEEIVDLRERHYDSIAEKQKDLDKKIQKELALQEEKLRLEEEALYAAQREAARAAKQRKLLEQERQRIVQQYHPSNNGEYQSSGPEDDFESCLRNMKSQYEVFRSSRLSSDATVLTPNTESSCDLMTKTKSTSGNDDSTSLDLEWEDEEGMNRMLPMRERSKTEEDILRAALKYSNKKTGSNPTSASDDSNGLEWENDFVSAEMDDNGNSEYSGFVNPVLELSDSGIRHSDTDQQTR

SEQ ID NO: 2358 - protein, 269 aa, Homo sapiens
  Payload ID: 584;
  Gene Symbol: AP1AR;
  Gene Name: adaptor-related prt complex 1 associated regulatory prt;
  Uniprot ID:  Q63HQ0;
  ENSP ID: ENSP00000309023
MGNCCWTQCFGLLRKEAGRLQRVGGGGGSKYFRTCSRGEHLTIEFENLVESDEGESPGSSHRPLTEEEIVDLRERHYDSIAEKQKDLDKKIQKEQERQRIVQQYHPSNNGEYQSSGPEDDFESCLRNMKSQYEVFRSSRLSSDATVLTPNTESSCDLMTKTKSTSGNDDSTSLDLEWEDEEGMNRMLPMRERSKTEEDILRAALKYSNKKTGSNPTSASDDSNGLEWENDFVSAEMDDNGNSEYSGFVNPVLELSDSGIRHSDTDQQTR

SEQ ID NO: 2359 - protein, 76 aa, Homo sapiens
  Payload ID: 584;
  Gene Symbol: AP1AR;
  Gene Name: adaptor-related prt complex 1 associated regulatory prt;
  ENSP ID: ENSP00000422529
  MOD_RES (1)..(1): Any amino acid
XGEYQSSGPEDDFESCLRNMKSQYEVFRSSRLSSDATVLTPNTESSCDLMTKTKSTSGNDDSTSLDLEWEDEEGIL

SEQ ID NO: 2360 - protein, 919 aa, Homo sapiens
  Payload ID: 585;
  Gene Symbol: AP1B1;
  Gene Name: adaptor-related prt complex 1, beta 1 subunit;
  Uniprot ID:  Q10567;
  ENSP ID: ENSP00000319361
MTDSKYFTTTKKGEIFELKAELNSDKKEKKKEAVKKVIASMTVGKDVSALFPDVVNCMQTDNLELKKLVYLYLMNYAKSQPDMAIMAVNTFVKDCEDPNPLIRALAVRTMGCIRVDKITEYLCEPLRKCLKDEDPYVRKTAAVCVAKLHDINAQLVEDQGFLDTLKDLISDSNPMVVANAVAALSEIAESHPSSNLLDLNPQSINKLLTALNECTEWGQIFILDCLANYMPKDDREAQSICERVTPRLSHANSAVVLSAVKVLMKFMEMLSKDLDYYGTLLKKLAPPLVTLLSAEPELQYVALRNINLIVQKRPEILKHEMKVFFVKYNDPIYVKLEKLDIMIRLASQANIAQVLAELKEYATEVDVDFVRKAVRAIGRCAIKVEQSAERCVSTLLDLIQTKVNYVVQEAIVVIKDIFRKYPNKYESVIATLCENLDSLDEPEARAAMIWIVGEYAERIDNADELLESFLEGFHDESTQVQLQLLTAIVKLFLKKPTETQELVQQVLSLATQDSDNPDLRDRGYIYWRLLSTDPVAAKEVVLAEKPLISEETDLIEPTLLDELICYIGTLASVYHKPPSAFVEGGRGVVHKSLPPRTASSESAESPETAPTGAPPGEQPDVIPAQGDLLGDLLNLDLGPPVSGPPLATSSVQMGAVDLLGGGLDSLIGGTNFVAPPTAAVPANLGAPIGSGLSDLFDLTSGVGTLSGSYVAPKAVGSISMDLQLTNKALQVMTDFAIQFNRNSFGLAPAAPLQVHAPLSPNQTVEISLPLSTVGSVMKMEPLNNLQVAVKNNIDVFYFSTLYPLHILFVEDGKMDRQMFLATWKDIPNENEAQFQIRDCPLNAEAASSKLQSSNIFTVAKRNVEGQDMLYQSLKLTNGIWVLAELRIQPGNPSCTLSLKCRAPEVSQHVYQAYETILKN

SEQ ID NO: 2361 - protein, 949 aa, Homo sapiens
  Payload ID: 585;
  Gene Symbol: AP1B1;
  Gene Name: adaptor-related prt complex 1, beta 1 subunit;
  Uniprot ID:  Q10567;
  ENSP ID: ENSP00000350199
MTDSKYFTTTKKGEIFELKAELNSDKKEKKKEAVKKVIASMTVGKDVSALFPDVVNCMQTDNLELKKLVYLYLMNYAKSQPDMAIMAVNTFVKDCEDPNPLIRALAVRTMGCIRVDKITEYLCEPLRKCLKDEDPYVRKTAAVCVAKLHDINAQLVEDQGFLDTLKDLISDSNPMVVANAVAALSEIAESHPSSNLLDLNPQSINKLLTALNECTEWGQIFILDCLANYMPKDDREAQSICERVTPRLSHANSAVVLSAVKVLMKFMEMLSKDLDYYGTLLKKLAPPLVTLLSAEPELQYVALRNINLIVQKRPEILKHEMKVFFVKYNDPIYVKLEKLDIMIRLASQANIAQVLAELKEYATEVDVDFVRKAVRAIGRCAIKVEQSAERCVSTLLDLIQTKVNYVVQEAIVVIKDIFRKYPNKYESVIATLCENLDSLDEPEARAAMIWIVGEYAERIDNADELLESFLEGFHDESTQVQLQLLTAIVKLFLKKPTETQELVQQVLSLATQDSDNPDLRDRGYIYWRLLSTDPVAAKEVVLAEKPLISEETDLIEPTLLDELICYIGTLASVYHKPPSAFVEGGRGVVHKSLPPRTASSESAESPETAPTGAPPGEQPDVIPAQGDLLGDLLNLDLGPPVSGPPLATSSVQMGAVDLLGGGLDSLMGDEPEGIGGTNFVAPPTAAVPANLGAPIGSGLSDLFDLTSGVGTLSGSYVAPKAVWLPAMKAKGLEISGTFTRQVGSISMDLQLTNKALQVMTDFAIQFNRNSFGLAPAAPLQVHAPLSPNQTVEISLPLSTVGSVMKMEPLNNLQVAVKNNIDVFYFSTLYPLHILFVEDGKMDRQMFLATWKDIPNENEAQFQIRDCPLNAEAASSKLQSSNIFTVAKRNVEGQDMLYQSLKLTNGIWVLAELRIQPGNPSCTDLELSLKCRAPEVSQHVYQAYETILKN

SEQ ID NO: 2362 - protein, 949 aa, Homo sapiens; identical to SEQ ID NO: 2361
  Payload ID: 585;
  Gene Symbol: AP1B1;
  Gene Name: adaptor-related prt complex 1, beta 1 subunit;
  Uniprot ID:  Q10567;
  ENSP ID: ENSP00000384194

SEQ ID NO: 2363 - protein, 939 aa, Homo sapiens
  Payload ID: 585;
  Gene Symbol: AP1B1;
  Gene Name: adaptor-related prt complex 1, beta 1 subunit;
  Uniprot ID:  Q10567;
  ENSP ID: ENSP00000386071
MTDSKYFTTTKKGEIFELKAELNSDKKEKKKEAVKKVIASMTVGKDVSALFPDVVNCMQTDNLELKKLVYLYLMNYAKSQPDMAIMAVNTFVKDCEDPNPLIRALAVRTMGCIRVDKITEYLCEPLRKCLKDEDPYVRKTAAVCVAKLHDINAQLVEDQGFLDTLKDLISDSNPMVVANAVAALSEIAESHPSSNLLDLNPQSINKLLTALNECTEWGQIFILDCLANYMPKDDREAQSICERVTPRLSHANSAVVLSAVKVLMKFMEMLSKDLDYYGTLLKKLAPPLVTLLSAEPELQYVALRNINLIVQKRPEILKHEMKVFFVKYNDPIYVKLEKLDIMIRLASQANIAQVLAELKEYATEVDVDFVRKAVRAIGRCAIKVEQSAERCVSTLLDLIQTKVNYVVQEAIVVIKDIFRKYPNKYESVIATLCENLDSLDEPEARAAMIWIVGEYAERIDNADELLESFLEGFHDESTQVQLQLLTAIVKLFLKKPTETQELVQQVLSLATQDSDNPDLRDRGYIYWRLLSTDPVAAKEVVLAEKPLISEETDLIEPTLLDELICYIGTLASVYHKPPSAFVEGGRGVVHKSLPPRTASSESAESPETAPTGAPPGEQPDVIPAQGDLLGDLLNLDLGPPVSGPPLATSSVQMGAVDLLGGGLDSLIGGTNFVAPPTAAVPANLGAPIGSGLSDLFDLTSGVGTLSGSYVAPKAVWLPAMKAKGLEISGTFTRQVGSISMDLQLTNKALQVMTDFAIQFNRNSFGLAPAAPLQVHAPLSPNQTVEISLPLSTVGSVMKMEPLNNLQVAVKNNIDVFYFSTLYPLHILFVEDGKMDRQMFLATWKDIPNENEAQFQIRDCPLNAEAASSKLQSSNIFTVAKRNVEGQDMLYQSLKLTNGIWVLAELRIQPGNPSCTLSLKCRAPEVSQHVYQAYETILKN

SEQ ID NO: 2364 - protein, 939 aa, Homo sapiens; identical to SEQ ID NO: 2363
  Payload ID: 585;
  Gene Symbol: AP1B1;
  Gene Name: adaptor-related prt complex 1, beta 1 subunit;
  Uniprot ID:  Q10567;
  ENSP ID: ENSP00000387612

SEQ ID NO: 2365 - protein, 173 aa, Homo sapiens
  Payload ID: 585;
  Gene Symbol: AP1B1;
  Gene Name: adaptor-related prt complex 1, beta 1 subunit;
  ENSP ID: ENSP00000392735
  MOD_RES (1)..(1): Any amino acid
XDIMIRLASQANIAQAPASSLPWAFYLEQEAESHSPRESVYIHCPGVFQQIAPSGAPAPSFLFGPQVLAELKEYATEVDVDFVRKAVRAIGRCAIKVEQSAERCVSTLLDLIQTKVNYVVQEAIVVIKDIFRKYPNKYESVIATLCENLDSLDEPEARAAMIWIVGEYAERID

SEQ ID NO: 2366 - protein, 578 aa, Homo sapiens
  Payload ID: 585;
  Gene Symbol: AP1B1;
  Gene Name: adaptor-related prt complex 1, beta 1 subunit;
  ENSP ID: ENSP00000400022
MTDSKYFTTTKKGEIFELKAELNSDKKEKKKEAVKKVIASMTVGKDVSALFPDVVNCMQTDNLELKKLVYLYLMNYAKSQPDMAIMAVNTFVKDCEDPNPLIRALAVRTMGCIRVDKITEYLCEPLRKCLKDEDPYVRKTAAVCVAKLHDINAQLVEDQGFLDTLKDLISDSNPMVVANAVAALSEIAESHPSSNLLDLNPQSINKLLTALNECTEWGQIFILDCLANYMPKDDREAQSICERVTPRLSHANSAVVLSAVKVLMKFMEMLSKDLDYYGTLLKKLAPPLVTLLSAEPELQYVALRNINLIVQKRPEILKHEMKVFFVKYNDPIYVKLEKLDIMIRLASQANIAQVLAELKEYATEVDVDFVRKAVRAIGRCAIKVEQSAERCVSTLLDLIQTKVNYVVQEAIVVIKDIFRKYPNKYESVIATLCENLDSLDEPEARAAMIWIVGEYAERIDNADELLESFLEGFHDESTQVQLQLLTAIVKLFLKKPTETQELVQQVLSLATQDSDNPDLRDRGYIYWRLLSTDPVAAKEVVLAEKPLISEETDLIEPTLLDELICYIGTLASVYHKPP

SEQ ID NO: 2367 - protein, 939 aa, Homo sapiens; identical to SEQ ID NO: 2363
  Payload ID: 585;
  Gene Symbol: AP1B1;
  Gene Name: adaptor-related prt complex 1, beta 1 subunit;
  Uniprot ID:  Q10567;
  ENSP ID: ENSP00000400065

SEQ ID NO: 2368 - protein, 822 aa, Homo sapiens
  Payload ID: 586;
  Gene Symbol: AP1G1;
  Gene Name: adaptor-related prt complex 1, gamma 1 subunit;
  Uniprot ID:  O43747;
  ENSP ID: ENSP00000299980
MPAPIRLRELIRTIRTARTQAEEREMIQKECAAIRSSFREEDNTYRCRNVAKLLYMHMLGYPAHFGQLECLKLIASQKFTDKRIGYLGAMLLLDERQDVHLLMTNCIKNDLNHSTQFVQGLALCTLGCMGSSEMCRDLAGEVEKLLKTSNSYLRKKAALCAVHVIRKVPELMEMFLPATKNLLNEKNHGVLHTSVVLLTEMCERSPDMLAHFRKLVPQLVRILKNLIMSGYSPEHDVSGISDPFLQVRILRLLRILGRNDDDSSEAMNDILAQVATNTETSKNVGNAILYETVLTIMDIKSESGLRVLAINILGRFLLNNDKNIRYVALTSLLKTVQTDHNAVQRHRSTIVDCLKDLDVSIKRRAMELSFALVNGNNIRGMMKELLYFLDSCEPEFKADCASGIFLAAEKYAPSKRWHIDTIMRVLTTAGSYVRDDAVPNLIQLITNSVEMHAYTVQRLYKAILGDYSQQPLVQVAAWCIGEYGDLLVSGQCEEEEPIQVTEDEVLDILESVLISNMSTSVTRGYALTAIMKLSTRFTCTVNRIKKVVSIYGSSIDVELQQRAVEYNALFKKYDHMRSALLERMPVMEKVTTNGPTEIVQTNGETEPAPLETKPPPSGPQPTSQANDLLDLLGGNDITPVIPTAPTSKPSSAGGELLDLLGDINLTGAPAAAPAPASVPQISQPPFLLDGLSSQPLFNDIAAGIPSITAYSKNGLKIEFTFERSNTNPSVTVITIQASNSTELDMTDFVFQAAVPKTFQLQLLSPSSSIVPAFNTGTITQVIKVLNPQKQQLRMRIKLTYNHKGSAMQDLAEVNNFPPQSWQ

SEQ ID NO: 2369 - protein, 825 aa, Homo sapiens
  Payload ID: 586;
  Gene Symbol: AP1G1;
  Gene Name: adaptor-related prt complex 1, gamma 1 subunit;
  Uniprot ID:  O43747;
  ENSP ID: ENSP00000377148
MPAPIRLRELIRTIRTARTQAEEREMIQKECAAIRSSFREEDNTYRCRNVAKLLYMHMLGYPAHFGQLECLKLIASQKFTDKRIGYLGAMLLLDERQDVHLLMTNCIKNDLNHSTQFVQGLALCTLGCMGSSEMCRDLAGEVEKLLKTSNSYLRKKAALCAVHVIRKVPELMEMFLPATKNLLNEKNHGVLHTSVVLLTEMCERSPDMLAHFRKNEKLVPQLVRILKNLIMSGYSPEHDVSGISDPFLQVRILRLLRILGRNDDDSSEAMNDILAQVATNTETSKNVGNAILYETVLTIMDIKSESGLRVLAINILGRFLLNNDKNIRYVALTSLLKTVQTDHNAVQRHRSTIVDCLKDLDVSIKRRAMELSFALVNGNNIRGMMKELLYFLDSCEPEFKADCASGIFLAAEKYAPSKRWHIDTIMRVLTTAGSYVRDDAVPNLIQLITNSVEMHAYTVQRLYKAILGDYSQQPLVQVAAWCIGEYGDLLVSGQCEEEEPIQVTEDEVLDILESVLISNMSTSVTRGYALTAIMKLSTRFTCTVNRIKKVVSIYGSSIDVELQQRAVEYNALFKKYDHMRSALLERMPVMEKVTTNGPTEIVQTNGETEPAPLETKPPPSGPQPTSQANDLLDLLGGNDITPVIPTAPTSKPSSAGGELLDLLGDINLTGAPAAAPAPASVPQISQPPFLLDGLSSQPLFNDIAAGIPSITAYSKNGLKIEFTFERSNTNPSVTVITIQASNSTELDMTDFVFQAAVPKTFQLQLLSPSSSIVPAFNTGTITQVIKVLNPQKQQLRMRIKLTYNHKGSAMQDLAEVNNFPPQSWQ

SEQ ID NO: 2370 - protein, 176 aa, Homo sapiens
  Payload ID: 586;
  Gene Symbol: AP1G1;
  Gene Name: adaptor-related prt complex 1, gamma 1 subunit;
  ENSP ID: ENSP00000405836
MPAPIRLRELIRTIRTARTQAEEREMIQKECAAIRSSFREEDNTYRCRNVAKLLYMHMLGYPAHFGQLECLKLIASQKFTDKRIGYLGAMLLLDERQDVHLLMTNCIKNDLNHSTQFVQGLALCTLGCMGSSEMCRDLAGEVEKLLKTSNSYLRKKEMIYKQTNVTGYILGGIPNS

SEQ ID NO: 2371 - protein, 247 aa, Homo sapiens
  Payload ID: 586;
  Gene Symbol: AP1G1;
  Gene Name: adaptor-related prt complex 1, gamma 1 subunit;
  ENSP ID: ENSP00000454219
MRSALLERMPVMEKVTTNGPTEIVQTNGETEPAPLETKPPPSGPQPTSQANDLLDLLGGNDITPVIPTAPTSKPSSAGGELLDLLGDINLTGAPAAAPAPASVPQISQPPFLLDGLSSQPLFNDIAAGIPSITAYSKNGLKIEFTFERSNTNPSVTVITIQASNSTELDMTDFVFQAAVPKTFQLQLLSPSSSIVPAFNTGTITQVIKVLNPQKQQLRMRIKLTYNHKGSAMQDLAEVNNFPPQSWQ

SEQ ID NO: 2372 - protein, 822 aa, Homo sapiens; identical to SEQ ID NO: 2368
  Payload ID: 586;
  Gene Symbol: AP1G1;
  Gene Name: adaptor-related prt complex 1, gamma 1 subunit;
  Uniprot ID:  O43747;
  ENSP ID: ENSP00000454523

SEQ ID NO: 2373 - protein, 144 aa, Homo sapiens
  Payload ID: 586;
  Gene Symbol: AP1G1;
  Gene Name: adaptor-related prt complex 1, gamma 1 subunit;
  ENSP ID: ENSP00000454713
MPAPIRLRELIRTIRTARTQAEEREMIQKECAAIRSSFREEDNTYRCRNVAKLLYMHMLGYPAHFGQLECLKLIASQKFTDKRIGYLGAMLLLDERQDVHLLMTNCIKNDLNHSTQFVQGLALCTLGCMGSSEMCRDLAGEVEK

SEQ ID NO: 2374 - protein, 53 aa, Homo sapiens
  Payload ID: 586;
  Gene Symbol: AP1G1;
  Gene Name: adaptor-related prt complex 1, gamma 1 subunit;
  ENSP ID: ENSP00000454717
MPAPIRLRELIRTIRTARTQAEEREMIQKECAAIRSSFREEDNTYRCRNVAKL

SEQ ID NO: 2375 - protein, 58 aa, Homo sapiens
  Payload ID: 586;
  Gene Symbol: AP1G1;
  Gene Name: adaptor-related prt complex 1, gamma 1 subunit;
  ENSP ID: ENSP00000454932
SEAMNDILAQVATNTETSKNVGNAILYETVLTIMDIKSESGLRICGSDIFVEDCTDRS

SEQ ID NO: 2376 - protein, 236 aa, Homo sapiens
  Payload ID: 586;
  Gene Symbol: AP1G1;
  Gene Name: adaptor-related prt complex 1, gamma 1 subunit;
  ENSP ID: ENSP00000454970
MPAPIRLRELIRTIRTARTQAEEREMIQKECAAIRSSFREEDNTYRCRNVAKLLYMHMLGYPAHFGQLECLKLIASQKFTDKRIGYLGAMLLLDERQDVHLLMTNCIKNDLNHSTQFVQGLALCTLGCMGSSEMCRDLAGEVEKLLKTSNSYLRKKAALCAVHVIRKVPELMEMFLPATKNLLNEKNHGVLHTSVVLLTEMCERSPDMLAHFRKVACAPISSYFKEPHHVRIFTRT

SEQ ID NO: 2377 - protein, 26 aa, Homo sapiens
  Payload ID: 586;
  Gene Symbol: AP1G1;
  Gene Name: adaptor-related prt complex 1, gamma 1 subunit;
  ENSP ID: ENSP00000455400
MPAPIRLRELIRTIRTARTQAEEREM

SEQ ID NO: 2378 - protein, 187 aa, Homo sapiens
  Payload ID: 586;
  Gene Symbol: AP1G1;
  Gene Name: adaptor-related prt complex 1, gamma 1 subunit;
  ENSP ID: ENSP00000456058
MPAPIRLRELIRTIRTARTQAEEREMIQKECAAIRSSFREEDNTYRCRNVAKLLYMHMLGYPAHFGQLECLKLIASQKFTDKRIGYLGAMLLLDERQDVHLLMTNCIKNDLNHSTQFVQGLALCTLGCMGSSEMCRDLAGEVEKLLKTSNSYLRKKAALCAVHVIRKVPELMEMFLPATKNLLNEKN

SEQ ID NO: 2379 - protein, 139 aa, Homo sapiens
  Payload ID: 586;
  Gene Symbol: AP1G1;
  Gene Name: adaptor-related prt complex 1, gamma 1 subunit;
  ENSP ID: ENSP00000456316
MPAPIRLRELIRTIRTARTQAEEREMIQKECAAIRSSFREEDNTYRCRNVAKLLYMHMLGYPAHFGQLECLKLIASQKFTDKRIGYLGAMLLLDERQDVHLLMTNCIKNDLNHSTQFVQGLALCTLGCMGSSEMCRDLA

SEQ ID NO: 2380 - protein, 85 aa, Homo sapiens
  Payload ID: 586;
  Gene Symbol: AP1G1;
  Gene Name: adaptor-related prt complex 1, gamma 1 subunit;
  ENSP ID: ENSP00000456493
MPAPIRLRELIRTIRTARTQAEEREMIQKECAAIRSSFREEDNTYRCRNVAKLLYMHMLGYPAHFGQLECLKLIASQKFTDKRIG

SEQ ID NO: 2381 - protein, 208 aa, Homo sapiens
  Payload ID: 586;
  Gene Symbol: AP1G1;
  Gene Name: adaptor-related prt complex 1, gamma 1 subunit;
  ENSP ID: ENSP00000457726
MPAPIRLRELIRTIRTARTQAEEREMIQKECAAIRSSFREEDNTYRCRNVAKLLYMHMLGYPAHFGQLECLKLIASQKFTDKRIGYLGAMLLLDERQDVHLLMTNCIKNDLNHSTQFVQGLALCTLGCMGSSEMCRDLAGEVEKLLKTSNSYLRKKAALCAVHVIRKVPELMEMFLPATKNLLNEKNHGNVIWMTCLFMRHSSIFTVF

SEQ ID NO: 2382 - protein, 91 aa, Homo sapiens
  Payload ID: 586;
  Gene Symbol: AP1G1;
  Gene Name: adaptor-related prt complex 1, gamma 1 subunit;
  ENSP ID: ENSP00000457927
MPAPIRLRELIRTIRTARTQAEEREMIQKECAAIRSSFREEDNTYRCRNVAKLLYMHMLGYPAHFGQLECLKLIASQKFTDKRIGYLGAML

SEQ ID NO: 2383 - protein, 785 aa, Homo sapiens
  Payload ID: 587;
  Gene Symbol: AP1G2;
  Gene Name: adaptor-related prt complex 1, gamma 2 subunit;
  Uniprot ID:  O75843;
  ENSP ID: ENSP00000312442
MVVPSLKLQDLIEEIRGAKTQAQEREVIQKECAHIRASFRDGDPVHRHRQLAKLLYVHMLGYPAHFGQMECLKLIASSRFTDKRVGYLGAMLLLDERHDAHLLITNSIKNDLSQGIQPVQGLALCTLSTMGSAEMCRDLAPEVEKLLLQPSPYVRKKAILTAVHMIRKVPELSSVFLPPCAQLLHERHHGILLGTITLITELCERSPAALRHFRKVVPQLVHILRTLVTMGYSTEHSISGVSDPFLQVQILRLLRILGRNHEESSETMNDLLAQVATNTDTSRNAGNAVLFETVLTIMDIRSAAGLRVLAVNILGRFLLNSDRNIRYVALTSLLRLVQSDHSAVQRHRPTVVECLRETDASLSRRALELSLALVNSSNVRAMMQELQAFLESCPPDLRADCASGILLAAERFAPTKRWHIDTILHVLTTAGTHVRDDAVANLTQLIGGAQELHAYSVRRLYNALAEDISQQPLVQVAAWCIGEYGDLLLAGNCEEIEPLQVDEEEVLALLEKVLQSHMSLPATRGYALTALMKLSTRLCGDNNRIRQVVSIYGSCLDVELQQRAVEYDTLFRKYDHMRAAILEKMPLVERDGPQADEEAKESKEAAQLSEAAPVPTEPQASQLLDLLDLLDGASGDVQHPPHLDPSPGGALVHLLDLPCVPPPPAPIPDLKVFEREGVQLNLSFIRPPENPALLLITITATNFSEGDVTHFICQAAVPKSLQLQLQAPSGNTVPARGGLPITQLFRILNPNKAPLRLKLRLTYDHFHQSVQEIFEVNNLPVESWQ

SEQ ID NO: 2384 - protein, 785 aa, Homo sapiens; identical to SEQ ID NO: 2383
  Payload ID: 587;
  Gene Symbol: AP1G2;
  Gene Name: adaptor-related prt complex 1, gamma 2 subunit;
  Uniprot ID:  O75843;
  ENSP ID: ENSP00000380309

SEQ ID NO: 2385 - protein, 143 aa, Homo sapiens
  Payload ID: 587;
  Gene Symbol: AP1G2;
  Gene Name: adaptor-related prt complex 1, gamma 2 subunit;
  ENSP ID: ENSP00000450588
  MOD_RES (1)..(1): Any amino acid
XAGNAVLFETVLTIMDIRSAAGLRVLAVNILGRFLLNSDRNIRYVALTSLLRLVQSDHSAVQRHRPTVVECLRETDASLSRRALELSLALVNSSNVRAMMQELQAFLESCPPDLRADCASGILLAAERHHPACADNGGHPCAG

SEQ ID NO: 2386 - protein, 197 aa, Homo sapiens
  Payload ID: 587;
  Gene Symbol: AP1G2;
  Gene Name: adaptor-related prt complex 1, gamma 2 subunit;
  ENSP ID: ENSP00000450805
EEVLALLEKVLQSHMSLPATRGYALTALMKLSTRLCGDNKAAILEKMPLVERDGPQADEEAKESKEAAQLSEAAPVPTEPQASQLLDLLDLLDGASGDVQHPPHLDPSPGGALVHLLDLPCVPPPPAPIPDLKVFEREGVQLNLSFIRPPENPALLLITITATNFSEGDVTHFICQAAVPKSLQLQLQAPSGNTVPA

SEQ ID NO: 2387 - protein, 68 aa, Homo sapiens
  Payload ID: 587;
  Gene Symbol: AP1G2;
  Gene Name: adaptor-related prt complex 1, gamma 2 subunit;
  ENSP ID: ENSP00000450888
MVVPSLKLQDLIEEIRGAKTQAQEREVIQKECAHIRASFRDGDPVHRHRQLAKLLYVHMLGYPAHFGQ

SEQ ID NO: 2388 - protein, 68 aa, Homo sapiens; identical to SEQ ID NO: 2387
  Payload ID: 587;
  Gene Symbol: AP1G2;
  Gene Name: adaptor-related prt complex 1, gamma 2 subunit;
  ENSP ID: ENSP00000451343

SEQ ID NO: 2389 - protein, 136 aa, Homo sapiens
  Payload ID: 587;
  Gene Symbol: AP1G2;
  Gene Name: adaptor-related prt complex 1, gamma 2 subunit;
  ENSP ID: ENSP00000451504
MVVPSLKLQDLIEEIRGAKTQAQEREVIQKECAHIRASFRDGDPVHRHRQLAKLLYVHMLGYPAHFGQMECLKLIASSRFTDKRVGYLGAMLLLDERHDAHLLITNSIKNDLSQGIQPVQGLALCTLSTMGSAEMC

SEQ ID NO: 2390 - protein, 200 aa, Homo sapiens
  Payload ID: 587;
  Gene Symbol: AP1G2;
  Gene Name: adaptor-related prt complex 1, gamma 2 subunit;
  ENSP ID: ENSP00000452153
MVVPSLKLQDLIEEIRGAKTQAQEREVIQKECAHIRASFRDGDPVHRHRQLAKLLYVHMLGYPAHFGQMECLKLIASSRFTDKRVGYLGAMLLLDERHDAHLLITNSIKNDLSQGIQPVQGLALCTLSTMGSAEMCRDLAPEVEKLLLQPSPYVRKKAILTAVHMIRKVPELSSVFLPPCAQLLHERHHGILLGTITLIT

SEQ ID NO: 2391 - protein, 423 aa, Homo sapiens
  Payload ID: 588;
  Gene Symbol: AP1M1;
  Gene Name: adaptor-related prt complex 1, mu 1 subunit;
  Uniprot ID:  Q9BXS5;
  ENSP ID: ENSP00000291439
MSASAVYVLDLKGKVLICRNYRGDVDMSEVEHFMPILMEKEEEGMLSPILAHGGVRFMWIKHNNLYLVATSKKNACVSLVFSFLYKVVQVFSEYFKELEEESIRDNFVIIYELLDELMDFGYPQTTDSKILQEYITQEGHKLETGAPRPPATVTNAVSWRSEGIKYRKNEVFLDVIESVNLLVSANGNVLRSEIVGSIKMRVFLSGMPELRLGLNDKVLFDNTGRGKSKSVELEDVKFHQCVRLSRFENDRTISFIPPDGEFELMSYRLNTHVKPLIWIESVIEKHSHSRIEYMIKAKSQFKRRSTANNVEIHIPVPNDADSPKFKTTVGSVKWVPENSEIVWSIKSFPGGKEYLMRAHFGLPSVEAEDKEGKPPISVKFEIPYFTTSGIQVRYLKIIEKSGYQALPWVRYITQNGDYQLRTQ

SEQ ID NO: 2392 - protein, 435 aa, Homo sapiens
  Payload ID: 588;
  Gene Symbol: AP1M1;
  Gene Name: adaptor-related prt complex 1, mu 1 subunit;
  Uniprot ID:  Q9BXS5;
  ENSP ID: ENSP00000388996
MSASAVYVLDLKGKVLICRNYRGDVDMSEVEHFMPILMEKEEEGMLSPILAHGGVRFMWIKHNNLYLVATSKKNACVSLVFSFLYKVVQVFSEYFKELEEESIRDNFVIIYELLDELMDFGYPQTTDSKILQEYITQEGHKLETGAPRPPATVTNAVSWRSEGIKYRKNEVFLDVIESVNLLGKYPGVGWLGHTVSANGNVLRSEIVGSIKMRVFLSGMPELRLGLNDKVLFDNTGRGKSKSVELEDVKFHQCVRLSRFENDRTISFIPPDGEFELMSYRLNTHVKPLIWIESVIEKHSHSRIEYMIKAKSQFKRRSTANNVEIHIPVPNDADSPKFKTTVGSVKWVPENSEIVWSIKSFPGGKEYLMRAHFGLPSVEAEDKEGKPPISVKFEIPYFTTSGIQVRYLKIIEKSGYQALPWVRYITQNGDYQLRTQ

SEQ ID NO: 2393 - protein, 370 aa, Homo sapiens
  Payload ID: 588;
  Gene Symbol: AP1M1;
  Gene Name: adaptor-related prt complex 1, mu 1 subunit;
  ENSP ID: ENSP00000411498
MSASAVYVLDLKGKVLICRNYRGDVDMSEVEHFMPILMEKEEEGMLSPILAHGGVRFMWIKHNNLYLVATSKKNACVSLVFSFLYKVVQVFSEYFKELEEESIRDNFVIIYELLDELMDFGYPQTTDSKILQEYITQEGHKLETGAPRPPATVTNAVSWRSEGIKYRKNEVFLDVIESVNLLVSANGNVLRSEIVGSIKMRVFLSGMPELRLGLNDKVLFDNTGRGKSKSVELEDVKFHQCVRLSRFENDRTISFIPPDGEFELMSYRLNTHVKPLIWIESVIEKHSHSRIEYMIKGGKEYLMRAHFGLPSVEAEDKEGKPPISVKFEIPYFTTSGIQVRYLKIIEKSGYQALPWVRYITQNGDYQLRTQ

SEQ ID NO: 2394 - protein, 351 aa, Homo sapiens
  Payload ID: 588;
  Gene Symbol: AP1M1;
  Gene Name: adaptor-related prt complex 1, mu 1 subunit;
  ENSP ID: ENSP00000465224
MSASAVYVLDLKGKVLRVFSEYFKELEEESIRDNFVIIYELLDELMDFGYPQTTDSKILQEYITQEGHKLETGAPRPPATVTNAVSWRSEGIKYRKNEVFLDVIESVNLLVSANGNVLRSEIVGSIKMRVFLSGMPELRLGLNDKVLFDNTGRGKSKSVELEDVKFHQCVRLSRFENDRTISFIPPDGEFELMSYRLNTHVKPLIWIESVIEKHSHSRIEYMIKAKSQFKRRSTANNVEIHIPVPNDADSPKFKTTVGSVKWVPENSEIVWSIKSFPGGKEYLMRAHFGLPSVEAEDKEGKPPISVKFEIPYFTTSGIQVRYLKIIEKSGYQALPWVRYITQNGDYQLRTQ

SEQ ID NO: 2395 - protein, 136 aa, Homo sapiens
  Payload ID: 588;
  Gene Symbol: AP1M1;
  Gene Name: adaptor-related prt complex 1, mu 1 subunit;
  ENSP ID: ENSP00000466858
MSASAVYVLDLKGKVLICRNYRGDVDMSEVEHFMPILMEKEEEGMLSPILAHGGVRFMWIKHNNLYLVATSKKNACVSLVFSFLYKVVQVFSEYFKELEEESIRDNFVIIYELLDELMDFGYPQTTDSKILQEYIT

SEQ ID NO: 2396 - protein, 125 aa, Homo sapiens
  Payload ID: 588;
  Gene Symbol: AP1M1;
  Gene Name: adaptor-related prt complex 1, mu 1 subunit;
  ENSP ID: ENSP00000467417
MSEVEHFMPILMEKEEEGMLSPILAHGGVRFMWIKHNNLYLVATSKKNACVSLVFSFLYKVVQVFSEYFKELEEESIRDNFVIIYELLDELMDFGYPQTTDSKILQEYITQEGHKLETGAPRPPA

SEQ ID NO: 2397 - protein, 64 aa, Homo sapiens
  Payload ID: 588;
  Gene Symbol: AP1M1;
  Gene Name: adaptor-related prt complex 1, mu 1 subunit;
  ENSP ID: ENSP00000467721
MSEVEHFMPILMEKEEEGMLSPILAHGGVRFMWIKHNNLYLVATSKKNACVSLVFSFLYKVVQV

SEQ ID NO: 2398 - protein, 176 aa, Homo sapiens
  Payload ID: 588;
  Gene Symbol: AP1M1;
  Gene Name: adaptor-related prt complex 1, mu 1 subunit;
  ENSP ID: ENSP00000468015
  MOD_RES (1)..(1): Any amino acid
XSRFENDRTISFIPPDGEFELMSYRLNTHVKPLIWIESVIEKHSHSRIEYMIKAKSQFKRRSTANNVEIHIPVPNDADSPKFKTTVGSVKWVPENSEIVWSIKSFPGGKEYLMRAHFGLPSVEAEDKEGKPPISVKFEIPYFTTSGIQMLSLSQISIDPPGEVGFGERRQPQTFSH

SEQ ID NO: 2399 - protein, 105 aa, Homo sapiens
  Payload ID: 588;
  Gene Symbol: AP1M1;
  Gene Name: adaptor-related prt complex 1, mu 1 subunit;
  ENSP ID: ENSP00000468140
MSEVEHFMPILMEKEEEGMLSPILAHGGVRFMWIKHNNLYLVATSKKNACVSLVFSFLYKVVQVFSEYFKELEEESIRDNFVIIYELLDELMDFGYPQTTDSKIL

SEQ ID NO: 2400 - protein, 128 aa, Homo sapiens
  Payload ID: 588;
  Gene Symbol: AP1M1;
  Gene Name: adaptor-related prt complex 1, mu 1 subunit;
  ENSP ID: ENSP00000482949
NLYLVATSKKNACVSLVFSFLYKVVQVFSEYFKELEEESIRDNFVIIYELLDELMDFGYPQTTDSKILQEYITQEGHKLETGAPRPPATVTNAVSWRSEGIKYRKNEVFLDVIESVNLLVGLFSFLLL

SEQ ID NO: 2401 - protein, 423 aa, Homo sapiens
  Payload ID: 589;
  Gene Symbol: AP1M2;
  Gene Name: adaptor-related prt complex 1, mu 2 subunit;
  Uniprot ID:  Q9Y6Q5;
  ENSP ID: ENSP00000250244
MSASAVFILDVKGKPLISRNYKGDVAMSKIEHFMPLLVQREEEGALAPLLSHGQVHFLWIKHSNLYLVATTSKNANASLVYSFLYKTIEVFCEYFKELEEESIRDNFVIVYELLDELMDFGFPQTTDSKILQEYITQQSNKLETGKSRVPPTVTNAVSWRSEGIKYKKNEVFIDVIESVNLLVNANGSVLLSEIVGTIKLKVFLSGMPELRLGLNDRVLFELTGRSKNKSVELEDVKFHQCVRLSRFDNDRTISFIPPDGDFELMSYRLSTQVKPLIWIESVIEKFSHSRVEIMVKAKGQFKKQSVANGVEISVPVPSDADSPRFKTSVGSAKYVPERNVVIWSIKSFPGGKEYLMRAHFGLPSVEKEEVEGRPPIGVKFEIPYFTVSGIQVRYMKIIEKSGYQALPWVRYITQSGDYQLRTS

SEQ ID NO: 2402 - protein, 245 aa, Homo sapiens
  Payload ID: 589;
  Gene Symbol: AP1M2;
  Gene Name: adaptor-related prt complex 1, mu 2 subunit;
  ENSP ID: ENSP00000465193
AVFILDVKGKVFCEYFKELEEESIRDNFVIVYELLDELMDFGFPQTTDSKILQEYITQQSNKLETGKSRVPPTVTNAVSWRSEGIKYKKNEVFIDVIESVNLLVNANGSVLLSEIVGTIKLKVFLSGMPELRLGLNDRVLFELTGRSKNKSVELEDVKFHQCVRLSRFDNDRTISFIPPDGDFELMSYRLSTQVKPLIWIESVIEKFSHSRVEIMVKAKGQFKKQSVANGVEISVPVPSDADSPR

SEQ ID NO: 2403 - protein, 44 aa, Homo sapiens
  Payload ID: 589;
  Gene Symbol: AP1M2;
  Gene Name: adaptor-related prt complex 1, mu 2 subunit;
  ENSP ID: ENSP00000465488
  MOD_RES (1)..(1): Any amino acid
XNVVIWSIKSFPVRYMKIIEKSGYQALPWVRYITQSGDYQLRTS

SEQ ID NO: 2404 - protein, 425 aa, Homo sapiens
  Payload ID: 589;
  Gene Symbol: AP1M2;
  Gene Name: adaptor-related prt complex 1, mu 2 subunit;
  Uniprot ID:  Q9Y6Q5;
  ENSP ID: ENSP00000465685
MSASAVFILDVKGKPLISRNYKGDVAMSKIEHFMPLLVQREEEGALAPLLSHGQVHFLWIKHSNLYLVATTSKNANASLVYSFLYKTIEVFCEYFKELEEESIRDNFVIVYELLDELMDFGFPQTTDSKILQEYITQQSNKLETGKSRVPPTVTNAVSWRSEGIKYKKNEVFIDVIESVNLLVNANGSVLLSEIVGTIKLKVFLSGMPELRLGLNDRVLFELTGLSGSKNKSVELEDVKFHQCVRLSRFDNDRTISFIPPDGDFELMSYRLSTQVKPLIWIESVIEKFSHSRVEIMVKAKGQFKKQSVANGVEISVPVPSDADSPRFKTSVGSAKYVPERNVVIWSIKSFPGGKEYLMRAHFGLPSVEKEEVEGRPPIGVKFEIPYFTVSGIQVRYMKIIEKSGYQALPWVRYITQSGDYQLRTS

SEQ ID NO: 2405 - protein, 128 aa, Homo sapiens
  Payload ID: 589;
  Gene Symbol: AP1M2;
  Gene Name: adaptor-related prt complex 1, mu 2 subunit;
  ENSP ID: ENSP00000465865
EISVPVPSDADSPRFKTSVGSAKYVPERNVVIWSIKSFPGGKEYLMRAHFGLPSVEKEEVEGRPPIGVKFEIPYFTVSGIQVRYMKIIEKSGYQALPWVRYITQSGGWERNSLCFPRPWSFPHPPDFI

SEQ ID NO: 2406 - protein, 299 aa, Homo sapiens
  Payload ID: 589;
  Gene Symbol: AP1M2;
  Gene Name: adaptor-related prt complex 1, mu 2 subunit;
  ENSP ID: ENSP00000466494
MSASAVFILDVKGKPLISRNYKGDVAMSKIEHFMPLLVQREEEGALAPLLSHGQVHFLWIKHSNLYCIHPTWCPWRWVWGLSAMVAAQAKRGWAEDRSCTAHLCGLGWGAGAGRDEGGGKGQGGGSGSVFHLLLHKWHLFLNLAAPVVATTSKNANASLVYSFLYKTIEVFCEYFKELEEESIRDNFVIVYELLDELMDFGFPQTTDSKILQEYITQQSNKLETGKSRVPPTVTNAVSWRSEGIKYKKNEVFIDVIESVNLLVNANGSVLLSEIVGTIKLKVFLSGMPELRLGLNDRVL

SEQ ID NO: 2407 - protein, 38 aa, Homo sapiens
  Payload ID: 589;
  Gene Symbol: AP1M2;
  Gene Name: adaptor-related prt complex 1, mu 2 subunit;
  ENSP ID: ENSP00000467406
MSASAVFILDVKGKRDPAMLPKLVSNSWPQGILLPWSS

SEQ ID NO: 2408 - protein, 239 aa, Homo sapiens
  Payload ID: 589;
  Gene Symbol: AP1M2;
  Gene Name: adaptor-related prt complex 1, mu 2 subunit;
  ENSP ID: ENSP00000467498
MSKIEHFMPLLVQREEEGALAPLLSHGQVHFLWIKHSNLYLVATTSKNANASLVYSFLYKTIEVFCEYFKELEEESIRDNFVIVYELLDELMDFGFPQTTDSKILQEYITQQSNKLETGKSRVPPTVTNAVSWRSEGIKYKKNEVFIDVIESVNLLVNANGSVLLSEIVGTIKLKVFLSGMPELRLGLNDRVLFELTGRSKNKSVELEDVKFHQCVRLSRFDNDRTISFIPPDGDFELM

SEQ ID NO: 2409 - protein, 103 aa, Homo sapiens
  Payload ID: 589;
  Gene Symbol: AP1M2;
  Gene Name: adaptor-related prt complex 1, mu 2 subunit;
  ENSP ID: ENSP00000468260
FKTSVGSAKYVPERNVVIWSIKSFPGGKEYLMRAHFGLPSVEKEEVEGRPPIGVKFEIPYFTVSGIQVRYMKIIEKSGYQALPWVRYITQSGGKAAQLLGTMG

SEQ ID NO: 2410 - protein, 158 aa, Homo sapiens
  Payload ID: 590;
  Gene Symbol: AP1S1;
  Gene Name: adaptor-related prt complex 1, sigma 1 subunit;
  Uniprot ID:  P61966;
  ENSP ID: ENSP00000336666
MMRFMLLFSRQGKLRLQKWYLATSDKERKKMVRELMQVVLARKPKMCSFLEWRDLKVVYKRYASLYFCCAIEGQDNELITLELIHRYVELLDKYFGSVCELDIIFNFEKAYFILDEFLMGGDVQDTSKKSVLKAIEQADLLQEEDESPRSVLEEMGLA

SEQ ID NO: 2411 - protein, 191 aa, Homo sapiens
  Payload ID: 590;
  Gene Symbol: AP1S1;
  Gene Name: adaptor-related prt complex 1, sigma 1 subunit;
  ENSP ID: ENSP00000399902
  MOD_RES (1)..(1): Any amino acid
XAKREGRGKRGAWAAPAGVLGGRPRGEPPCLPSGPQRPPLPRRMRFMLLFSRQGKLRLQKWYLATSDKERKKMVRELMQVVLARKPKMCSFLEWRDLKVVYKRYASLYFCCAIEGQDNELITLELIHRYVELLDKYFGSVCELDIIFNFEKAYFILDEFLMGGDVQDTSKKSVLKAIEQADLLQEEDESPR

SEQ ID NO: 2412 - protein, 158 aa, Homo sapiens; identical to SEQ ID NO: 2410
  Payload ID: 590;
  Gene Symbol: AP1S1;
  Gene Name: adaptor-related prt complex 1, sigma 1 subunit;
  Uniprot ID:  P61966;
  ENSP ID: ENSP00000410780

SEQ ID NO: 2413 - protein, 157 aa, Homo sapiens
  Payload ID: 591;
  Gene Symbol: AP1S2;
  Gene Name: adaptor-related prt complex 1, sigma 2 subunit;
  Uniprot ID:  P56377;
  ENSP ID: ENSP00000328789
MQFMLLFSRQGKLRLQKWYVPLSDKEKKKITRELVQTVLARKPKMCSFLEWRDLKIVYKRYASLYFCCAIEDQDNELITLEIIHRYVELLDKYFGSVCELDIIFNFEKAYFILDEFLLGGEVQETSKKNVLKAIEQADLLQEEAETPRSVLEEIGLT

SEQ ID NO: 2414 - protein, 160 aa, Homo sapiens
  Payload ID: 591;
  Gene Symbol: AP1S2;
  Gene Name: adaptor-related prt complex 1, sigma 2 subunit;
  ENSP ID: ENSP00000369645
MQFMLLFSRQGKLRLQKWYVPLSDKEKKKITRELVQTVLARKPKMCSFLEWRDLKIVYKRYASLYFCCAIEDQDNELITLEIIHRYVELLDKYFGSVCELDIIFNFEKAYFILDEFLLGGEVQETSKKNVLKAIEQADLLQEKTETMYHSKSFIGFKKAY

SEQ ID NO: 2415 - protein, 146 aa, Homo sapiens
  Payload ID: 591;
  Gene Symbol: AP1S2;
  Gene Name: adaptor-related prt complex 1, sigma 2 subunit;
  ENSP ID: ENSP00000389474
  MOD_RES (1)..(1): Any amino acid
XRQGKLRLQKWYVPLSDKEKKKITRELVQTVLARKPKMCSFLEWRDLKIVYKRYASLYFCCAIEDQDNELITLEIIHRYVELLDKYFGSVCELDIIFNFEKAYFILDEFLLGGEVQETSKKNVLKAIEQADLLQEPRHEYFNVPVY

SEQ ID NO: 2416 - protein, 153 aa, Homo sapiens
  Payload ID: 591;
  Gene Symbol: AP1S2;
  Gene Name: adaptor-related prt complex 1, sigma 2 subunit;
  ENSP ID: ENSP00000403498
  MOD_RES (1)..(1): Any amino acid
XLLFSRQGKLRLQKWYVPLSDKEKKKITRELVQTVLARKPKMCSFLEWRDLKIVYKRYASLYFCCAIEDQDNELITLEIIHRYVELLDKYFGSVCELDIIFNFEKAYFILDEFLLGGEVQETSKKNVLKAIEQADLLQESQNEEWGGLSEDIL

SEQ ID NO: 2417 - protein, 160 aa, Homo sapiens
  Payload ID: 591;
  Gene Symbol: AP1S2;
  Gene Name: adaptor-related prt complex 1, sigma 2 subunit;
  ENSP ID: ENSP00000444957
MQFMLLFSRQGKLRLQKWYVPLSDKEKKKITRELVQTVLARKPKMCSFLEWRDLKIVYKRYASLYFCCAIEDQDNELITLEIIHRYVELLDKYFGSVCELDIIFNFEKAYFILDEFLLGGEVQETSKKNVLKAIEQADLLQEDAKEAETPRSVLEEIGLT

SEQ ID NO: 2418 - protein, 81 aa, Homo sapiens
  Payload ID: 592;
  Gene Symbol: AP1S3;
  Gene Name: adaptor-related prt complex 1, sigma 3 subunit;
  ENSP ID: ENSP00000333888
MIHFILLFSRQGKLRLQKWYITLPDKERKKITREIVQIILSRGHRTSSFVDWKELKLVYKRSVSWILSLILKRLISSWTSL

SEQ ID NO: 2419 - protein, 63 aa, Homo sapiens
  Payload ID: 592;
  Gene Symbol: AP1S3;
  Gene Name: adaptor-related prt complex 1, sigma 3 subunit;
  ENSP ID: ENSP00000379890
MIHFILLFSRQGKLRLQKWYITLPDKERKKITREIVQIILSRGHRTSSFVDWKELKLVYKRCL

SEQ ID NO: 2420 - protein, 154 aa, Homo sapiens
  Payload ID: 592;
  Gene Symbol: AP1S3;
  Gene Name: adaptor-related prt complex 1, sigma 3 subunit;
  Uniprot ID:  Q96PC3;
  ENSP ID: ENSP00000379891
MIHFILLFSRQGKLRLQKWYITLPDKERKKITREIVQIILSRGHRTSSFVDWKELKLVYKRYASLYFCCAIENQDNELLTLEIVHRYVELLDKYFGNVCELDIIFNFEKAYFILDEFIIGGEIQETSKKIAVKAIEDSDMLQETMEEYMNKPTF

SEQ ID NO: 2421 - protein, 137 aa, Homo sapiens
  Payload ID: 592;
  Gene Symbol: AP1S3;
  Gene Name: adaptor-related prt complex 1, sigma 3 subunit;
  ENSP ID: ENSP00000387199
MIHFILLFSRQGKLRLQKWYITLPDKERKKITREIVQIILSRGHRTSSFVDWKELKLVYKRYASLYFCCAIENQDNELLTLEIVHRYVELLDKYFGNEFNCWFLLMRLLSVLDSWSTPALNSEVPQLATITPDFCLF

SEQ ID NO: 2422 - protein, 154 aa, Homo sapiens
  Payload ID: 592;
  Gene Symbol: AP1S3;
  Gene Name: adaptor-related prt complex 1, sigma 3 subunit;
  Uniprot ID:  Q96PC3;
  ENSP ID: ENSP00000388738
MIHFILLFSRQGKLRLQKWYITLPDKERKKITREIVQIILSRGHRTSSFVDWKELKLVYKRYASLYFCCAIENQDNELLTLEIVHRYVELLDKYFGNVCELDIIFNFEKAYFILDEFIIGGEIQETSKKIAVKAIEDSDMLQEVSTVSQTMGER

SEQ ID NO: 2423 - protein, 164 aa, Homo sapiens
  Payload ID: 592;
  Gene Symbol: AP1S3;
  Gene Name: adaptor-related prt complex 1, sigma 3 subunit;
  Uniprot ID:  Q96PC3;
  ENSP ID: ENSP00000397155
MIHFILLFSRQGKLRLQKWYITLPDKERKKITREIVQIILSRGHRTSSFVDWKELKLVYKRYASLYFCCAIENQDNELLTLEIVHRYVELLDKYFGNVCELDIIFNFEKAYFILDEFIIGGEIQETSKKIAVKAIEDSDMLQENRLSPRGRDCSEPRSCHCTLA

SEQ ID NO: 2424 - protein, 56 aa, Homo sapiens
  Payload ID: 592;
  Gene Symbol: AP1S3;
  Gene Name: adaptor-related prt complex 1, sigma 3 subunit;
  ENSP ID: ENSP00000399738
MISFLDEERLGGGGGDCIFVGKTVSRLLNVCELDIIFNFEKAYFILDEFIIGGEIQ

SEQ ID NO: 2425 - protein, 104 aa, Homo sapiens
  Payload ID: 592;
  Gene Symbol: AP1S3;
  Gene Name: adaptor-related prt complex 1, sigma 3 subunit;
  Uniprot ID:  Q96PC3;
  ENSP ID: ENSP00000401705
MIHFILLFSRQGKLRLQKWYITLPDKERKKITREIVQIILSRGHRTSSFVDWKELKLVYKRYASLYFCCAIENQDNELLTLEIVHRYVELLDKYFGNTWPFARA

SEQ ID NO: 2426 - protein, 955 aa, Homo sapiens
  Payload ID: 593;
  Gene Symbol: AP2A1;
  Gene Name: adaptor-related prt complex 2, alpha 1 subunit;
  Uniprot ID:  O95782;
  ENSP ID: ENSP00000346246
MPAVSKGDGMRGLAVFISDIRNCKSKEAEIKRINKELANIRSKFKGDKALDGYSKKKYVCKLLFIFLLGHDIDFGHMEAVNLLSSNKYTEKQIGYLFISVLVNSNSELIRLINNAIKNDLASRNPTFMCLALHCIANVGSREMGEAFAADIPRILVAGDSMDSVKQSAALCLLRLYKASPDLVPMGEWTARVVHLLNDQHMGVVTAAVSLITCLCKKNPDDFKTCVSLAVSRLSRIVSSASTDLQDYTYYFVPAPWLSVKLLRLLQCYPPPEDAAVKGRLVECLETVLNKAQEPPKSKKVQHSNAKNAILFETISLIIHYDSEPNLLVRACNQLGQFLQHRETNLRYLALESMCTLASSEFSHEAVKTHIDTVINALKTERDVSVRQRAADLLYAMCDRSNAKQIVSEMLRYLETADYAIREEIVLKVAILAEKYAVDYSWYVDTILNLIRIAGDYVSEEVWYRVLQIVTNRDDVQGYAAKTVFEALQAPACHENMVKVGGYILGEFGNLIAGDPRSSPPVQFSLLHSKFHLCSVATRALLLSTYIKFINLFPETKATIQGVLRAGSQLRNADVELQQRAVEYLTLSSVASTDVLATVLEEMPPFPERESSILAKLKRKKGPGAGSALDDGRRDPSSNDINGGMEPTPSTVSTPSPSADLLGLRAAPPPAAPPASAGAGNLLVDVFDGPAAQPSLGPTPEEAFLSPGPEDIGPPIPEADELLNKFVCKNNGVLFENQLLQIGVKSEFRQNLGRMYLFYGNKTSVQFQNFSPTVVHPGDLQTQLAVQTKRVAAQVDGGAQVQQVLNIECLRDFLTPPLLSVRFRYGGAPQALTLKLPVTINKFFQPTEMAAQDFFQRWKQLSLPQQEAQKIFKANHPMDAEVTKAKLLGFGSALLDNVDPNPENFVGAGIIQTKALQVGCLLRLEPNAQAQMYRLTLRTSKEPVSRHLCELLAQQF

SEQ ID NO: 2427 - protein, 977 aa, Homo sapiens
  Payload ID: 593;
  Gene Symbol: AP2A1;
  Gene Name: adaptor-related prt complex 2, alpha 1 subunit;
  Uniprot ID:  O95782;
  ENSP ID: ENSP00000351926
MPAVSKGDGMRGLAVFISDIRNCKSKEAEIKRINKELANIRSKFKGDKALDGYSKKKYVCKLLFIFLLGHDIDFGHMEAVNLLSSNKYTEKQIGYLFISVLVNSNSELIRLINNAIKNDLASRNPTFMCLALHCIANVGSREMGEAFAADIPRILVAGDSMDSVKQSAALCLLRLYKASPDLVPMGEWTARVVHLLNDQHMGVVTAAVSLITCLCKKNPDDFKTCVSLAVSRLSRIVSSASTDLQDYTYYFVPAPWLSVKLLRLLQCYPPPEDAAVKGRLVECLETVLNKAQEPPKSKKVQHSNAKNAILFETISLIIHYDSEPNLLVRACNQLGQFLQHRETNLRYLALESMCTLASSEFSHEAVKTHIDTVINALKTERDVSVRQRAADLLYAMCDRSNAKQIVSEMLRYLETADYAIREEIVLKVAILAEKYAVDYSWYVDTILNLIRIAGDYVSEEVWYRVLQIVTNRDDVQGYAAKTVFEALQAPACHENMVKVGGYILGEFGNLIAGDPRSSPPVQFSLLHSKFHLCSVATRALLLSTYIKFINLFPETKATIQGVLRAGSQLRNADVELQQRAVEYLTLSSVASTDVLATVLEEMPPFPERESSILAKLKRKKGPGAGSALDDGRRDPSSNDINGGMEPTPSTVSTPSPSADLLGLRAAPPPAAPPASAGAGNLLVDVFDGPAAQPSLGPTPEEAFLSELEPPAPESPMALLADPAPAADPGPEDIGPPIPEADELLNKFVCKNNGVLFENQLLQIGVKSEFRQNLGRMYLFYGNKTSVQFQNFSPTVVHPGDLQTQLAVQTKRVAAQVDGGAQVQQVLNIECLRDFLTPPLLSVRFRYGGAPQALTLKLPVTINKFFQPTEMAAQDFFQRWKQLSLPQQEAQKIFKANHPMDAEVTKAKLLGFGSALLDNVDPNPENFVGAGIIQTKALQVGCLLRLEPNAQAQMYRLTLRTSKEPVSRHLCELLAQQF

SEQ ID NO: 2428 - protein, 57 aa, Homo sapiens
  Payload ID: 593;
  Gene Symbol: AP2A1;
  Gene Name: adaptor-related prt complex 2, alpha 1 subunit;
  ENSP ID: ENSP00000472492
  MOD_RES (1)..(1): Any amino acid
XPAVSKGDGMRGLAVFISDIRNCKSKEAEIKRINKELANIRSKFKGDKALDGYKEPR

SEQ ID NO: 2429 - protein, 940 aa, Homo sapiens
  Payload ID: 594;
  Gene Symbol: AP2A2;
  Gene Name: adaptor-related prt complex 2, alpha 2 subunit;
  Uniprot ID:  O94973;
  ENSP ID: ENSP00000327694
MPAVSKGDGMRGLAVFISDIRNCKSKEAEIKRINKELANIRSKFKGDKALDGYSKKKYVCKLLFIFLLGHDIDFGHMEAVNLLSSNRYTEKQIGYLFISVLVNSNSELIRLINNAIKNDLASRNPTFMGLALHCIASVGSREMAEAFAGEIPKVLVAGDTMDSVKQSAALCLLRLYRTSPDLVPMGDWTSRVVHLLNDQHLGVVTAATSLITTLAQKNPEEFKTSVSLAVSRLSRIVTSASTDLQDYTYYFVPAPWLSVKLLRLLQCYPPPEDPAVRGRLTECLETILNKAQEPPKSKKVQHSNAKNAVLFEAISLIIHHDSEPNLLVRACNQLGQFLQHRETNLRYLALESMCTLASSEFSHEAVKTHIETVINALKTERDVSVRQRAVDLLYAMCDRSNAPQIVAEMLSYLETADYSIREEIVLKVAILAEKYAVDYTWYVDTILNLIRIAGDYVSEEVWYRVIQIVINRDDVQGYAAKTVFEALQAPACHENLVKVGGYILGEFGNLIAGDPRSSPLIQFHLLHSKFHLCSVPTRALLLSTYIKFVNLFPEVKPTIQDVLRSDSQLRNADVELQQRAVEYLRLSTVASTDILATVLEEMPPFPERESSILAKLKKKKGPSTVTDLEDTKRDRSVDVNGGPEPAPASTSAVSTPSPSADLLGLGAAPPAPAGPPPSSGGSGLLVDVFSDSASVVAPLAPGSEDNFARFVCKNNGVLFENQLLQIGLKSEFRQNLGRMFIFYGNKTSTQFLNFTPTLICSDDLQPNLNLQTKPVDPTVEGGAQVQQVVNIECVSDFTEAPVLNIQFRYGGTFQNVSVQLPITLNKFFQPTEMASQDFFQRWKQLSNPQQEVQNIFKAKHPMDTEVTKAKIIGFGSALLEEVDPNPANFVGAGIIHTKTTQIGCLLRLEPNLQAQMYRLTLRTSKEAVSQRLCELLSAQF

SEQ ID NO: 2430 - protein, 939 aa, Homo sapiens
  Payload ID: 594;
  Gene Symbol: AP2A2;
  Gene Name: adaptor-related prt complex 2, alpha 2 subunit;
  Uniprot ID:  O94973;
  ENSP ID: ENSP00000413234
MPAVSKGDGMRGLAVFISDIRNCKSKEAEIKRINKELANIRSKFKGDKALDGYSKKKYVCKLLFIFLLGHDIDFGHMEAVNLLSSNRYTEKQIGYLFISVLVNSNSELIRLINNAIKNDLASRNPTFMGLALHCIASVGSREMAEAFAGEIPKVLVAGDTMDSVKQSAALCLLRLYRTSPDLVPMGDWTSRVVHLLNDQHLGVVTAATSLITTLAQKNPEEFKTSVSLAVSRLSRIVTSASTDLQDYTYYFVPAPWLSVKLLRLLQCYPPPDPAVRGRLTECLETILNKAQEPPKSKKVQHSNAKNAVLFEAISLIIHHDSEPNLLVRACNQLGQFLQHRETNLRYLALESMCTLASSEFSHEAVKTHIETVINALKTERDVSVRQRAVDLLYAMCDRSNAPQIVAEMLSYLETADYSIREEIVLKVAILAEKYAVDYTWYVDTILNLIRIAGDYVSEEVWYRVIQIVINRDDVQGYAAKTVFEALQAPACHENLVKVGGYILGEFGNLIAGDPRSSPLIQFHLLHSKFHLCSVPTRALLLSTYIKFVNLFPEVKPTIQDVLRSDSQLRNADVELQQRAVEYLRLSTVASTDILATVLEEMPPFPERESSILAKLKKKKGPSTVTDLEDTKRDRSVDVNGGPEPAPASTSAVSTPSPSADLLGLGAAPPAPAGPPPSSGGSGLLVDVFSDSASVVAPLAPGSEDNFARFVCKNNGVLFENQLLQIGLKSEFRQNLGRMFIFYGNKTSTQFLNFTPTLICSDDLQPNLNLQTKPVDPTVEGGAQVQQVVNIECVSDFTEAPVLNIQFRYGGTFQNVSVQLPITLNKFFQPTEMASQDFFQRWKQLSNPQQEVQNIFKAKHPMDTEVTKAKIIGFGSALLEEVDPNPANFVGAGIIHTKTTQIGCLLRLEPNLQAQMYRLTLRTSKEAVSQRLCELLSAQF

SEQ ID NO: 2431 - protein, 656 aa, Homo sapiens
  Payload ID: 594;
  Gene Symbol: AP2A2;
  Gene Name: adaptor-related prt complex 2, alpha 2 subunit;
  Uniprot ID:  O94973;
  ENSP ID: ENSP00000431630
MPAVSKGDGMRGLAVFISDIRNCKSKEAEIKRINKELANIRSKFKGDKALDGYSKKKYVCKLLFIFLLGHDIDFGHMEAVNLLSSNRYTEKQIGYLFISVLVNSNSELIRLINNAIKNDLASRNPTFMGLALHCIASVGSREMAEAFAGEIPKVLVAGDTMDSVKQSAALCLLRLYRTSPDLVPMGDWTSRVVHLLNDQHLGVVTAATSLITTLAQKNPEEFKTSVSLAVSRLSRIVTSASTDLQDYTYYFVPAPWLSVKLLRLLQCYPPPEDPAVRGRLTECLETILNKAQEPPKSKKVQHSNAKNAVLFEAISLIIHHDSEPNLLVRACNQLGQFLQHRETNLRYLALESMCTLASSEFSHEAVKTHIETVINALKTERDVSVRQRAVDLLYAMCDRSNAPQIVAEMLSYLETADYSIREEIVLKVAILAEKYAVDYTWYVDTILNLIRIAGDYVSEEVWYRVIQIVINRDDVQGYAAKTVFEALQAPACHENLVKVGGYILGEFGNLIAGDPRSSPLIQFHLLHSKFHLCSVPTRALLLSTYIKFVNLFPEVKPTIQDVLRSDSQLRNADVELQQRAVEYLRLSTVASTDILATVLEEMPPFPERESSILAKLKKKKGPSTVTDLEDTKRDRSVDVNGGPEPAPASTSAVVCL

SEQ ID NO: 2432 - protein, 184 aa, Homo sapiens
  Payload ID: 594;
  Gene Symbol: AP2A2;
  Gene Name: adaptor-related prt complex 2, alpha 2 subunit;
  ENSP ID: ENSP00000433498
EFFLPRLVVTASGTPWFSSQCFPSGSSEGKSKEAEIKRINKELANIRSKFKGDKALDGYSKKKYVCKLLFIFLLGHDIDFGHMEAVNLLSSNRYTEKQIGYLFISVLVNSNSELIRLINNAIKNDLASRNPTFMGLALHCIASVGSREMAEAFAGEIPKVLVAGDTMDSVKQSAALCLLRLYRT

SEQ ID NO: 2433 - protein, 90 aa, Homo sapiens
  Payload ID: 594;
  Gene Symbol: AP2A2;
  Gene Name: adaptor-related prt complex 2, alpha 2 subunit;
  ENSP ID: ENSP00000434432
MEAVNLLSSNRYTEKQIGYLFISVLVNSNSELIRLINNAIKNDLASRNPTFMGLALHCIASVGSREMAEAFAGEIPKVLVAGDTMDSVKQ

SEQ ID NO: 2434 - protein, 60 aa, Homo sapiens
  Payload ID: 594;
  Gene Symbol: AP2A2;
  Gene Name: adaptor-related prt complex 2, alpha 2 subunit;
  ENSP ID: ENSP00000434553
MEAVNLLSSNRYTEKQIGYLFISVLVNSNSELIRLINNAIKNDLASRNPTFMGLALHCIA

SEQ ID NO: 2435 - protein, 138 aa, Homo sapiens
  Payload ID: 594;
  Gene Symbol: AP2A2;
  Gene Name: adaptor-related prt complex 2, alpha 2 subunit;
  ENSP ID: ENSP00000434563
MLVQFFQRTLDSLLLLGKSKEAEIKRINKELANIRSKFKGDKALDGYSKKKYVCKLLFIFLLGHDIDFGHMEAVNLLSSNRYTEKQIGYLFISVLVNSNSELIRLINNAIKNDLASRNPTFMGLALHCIASVGSREMA

SEQ ID NO: 2436 - protein, 185 aa, Homo sapiens
  Payload ID: 594;
  Gene Symbol: AP2A2;
  Gene Name: adaptor-related prt complex 2, alpha 2 subunit;
  ENSP ID: ENSP00000435756
VRVWPRRIEEIACKSKEAEIKRINKELANIRSKFKGDKALDGYSKKKYVCKLLFIFLLGHDIDFGHMEAVNLLSSNRYTEKQIGYLFISVLVNSNSELIRLINNAIKNDLASRNPTFMGLALHCIASVGSREMAEAFAGEIPKVLVAGDTMDSVKQSAALCLLRLYRTSPDLVPMGDWTSRVVHL

SEQ ID NO: 2437 - protein, 62 aa, Homo sapiens
  Payload ID: 594;
  Gene Symbol: AP2A2;
  Gene Name: adaptor-related prt complex 2, alpha 2 subunit;
  ENSP ID: ENSP00000435863
MEAVNLLSSNRYTEKQIGYLFISVLVNSNSELIRLINNAIKNDLASRNPTFMGLALHCIASV

SEQ ID NO: 2438 - protein, 378 aa, Homo sapiens
  Payload ID: 594;
  Gene Symbol: AP2A2;
  Gene Name: adaptor-related prt complex 2, alpha 2 subunit;
  ENSP ID: ENSP00000436059
MPAVSKGDGMRGLAVFISDIRNCKSKEAEIKRINKELANIRSKFKGDKALDGYSKKKYVCKLLFIFLLGHDIDFGHMEAVNLLSSNRYTEKQIGYLFISVLVNSNSELIRLINNAIKNDLASRNPTFMGLALHCIASVGSREMAEAFAGEIPKVLVAGDTMDSVKQSAALCLLRLYRTSPDLVPMGDWTSRVVHLLNDQHLGVVTAATSLITTLAQKNPEEFKTSVSLAVSRLSRIVTSASTDLQDYTYYFVPAPWLSVKLLRLLQCYPPPDPAVRGRLTECLETILNKAQEPPKSKKVQHSNAKNAVLFEAISLIIHHDRCVGCLCTGSRCAQVRKPFLRDYVNCSQRSFSPEDGRPGSCVLCCLRLCRLSSWPSCR

SEQ ID NO: 2439 - protein, 125 aa, Homo sapiens
  Payload ID: 594;
  Gene Symbol: AP2A2;
  Gene Name: adaptor-related prt complex 2, alpha 2 subunit;
  ENSP ID: ENSP00000437228
MDSVKQSAALCLLRLYRTSPDLVPMGDWTSRVVHLLNDQHLGVVTAATSLITTLAQKNPEEFKTSVSLAVSRLSRIVTSASTDLQDYTYYFVPAPWLSVKLLRLLQCYPPPDPAVRGRLTECLET

SEQ ID NO: 2440 - protein, 356 aa, Homo sapiens
  Payload ID: 594;
  Gene Symbol: AP2A2;
  Gene Name: adaptor-related prt complex 2, alpha 2 subunit;
  ENSP ID: ENSP00000485693
  MOD_RES (1)..(1): Any amino acid
XKSKEAEIKRINKELANIRSKFKGDKALDGYSKKKYVCKLLFIFLLGHDIDFGHMEAVNLLSSNRYTEKQIGYLFISVLVNSNSELIRLINNAIKNDLASRNPTFMGLALHCIASVGSREMAEAFAGEIPKVLVAGDTMDSVKQSAALCLLRLYRTSPDLVPMGDWTSRVVHLLNDQHLGVVTAATSLITTLAQKNPEEFKTSVSLAVSRLSRIVTSASTDLQDYTYYFVPAPWLSVKLLRLLQCYPPPDPAVRGRLTECLETILNKAQEPPKSKKVQHSNAKNAVLFEAISLIIHHDRCVGCLCTGSRCAQVRKPFLRDYVNCSQRSFSPEDGRPGSCVLCCLRLCRLSSWLSCR

SEQ ID NO: 2441 - protein, 90 aa, Homo sapiens; identical to SEQ ID NO: 2433
  Payload ID: 594;
  Gene Symbol: AP2A2;
  Gene Name: adaptor-related prt complex 2, alpha 2 subunit;
  ENSP ID: ENSP00000485814

SEQ ID NO: 2442 - protein, 90 aa, Homo sapiens; identical to SEQ ID NO: 2433
  Payload ID: 594;
  Gene Symbol: AP2A2;
  Gene Name: adaptor-related prt complex 2, alpha 2 subunit;
  ENSP ID: ENSP00000485960

SEQ ID NO: 2443 - protein, 634 aa, Homo sapiens
  Payload ID: 594;
  Gene Symbol: AP2A2;
  Gene Name: adaptor-related prt complex 2, alpha 2 subunit;
  ENSP ID: ENSP00000485977
  MOD_RES (1)..(1): Any amino acid
XKSKEAEIKRINKELANIRSKFKGDKALDGYSKKKYVCKLLFIFLLGHDIDFGHMEAVNLLSSNRYTEKQIGYLFISVLVNSNSELIRLINNAIKNDLASRNPTFMGLALHCIASVGSREMAEAFAGEIPKVLVAGDTMDSVKQSAALCLLRLYRTSPDLVPMGDWTSRVVHLLNDQHLGVVTAATSLITTLAQKNPEEFKTSVSLAVSRLSRIVTSASTDLQDYTYYFVPAPWLSVKLLRLLQCYPPPEDPAVRGRLTECLETILNKAQEPPKSKKVQHSNAKNAVLFEAISLIIHHDSEPNLLVRACNQLGQFLQHRETNLRYLALESMCTLASSEFSHEAVKTHIETVINALKTERDVSVRQRAVDLLYAMCDRSNAPQIVAEMLSYLETADYSIREEIVLKVAILAEKYAVDYTWYVDTILNLIRIAGDYVSEEVWYRVIQIVINRDDVQGYAAKTVFEALQAPACHENLVKVGGYILGEFGNLIAGDPRSSPLIQFHLLHSKFHLCSVPTRALLLSTYIKFVNLFPEVKPTIQDVLRSDSQLRNADVELQQRAVEYLRLSTVASTDILATVLEEMPPFPERESSILAKLKKKKGPSTVTDLEDTKRDRSVDVNGGPEPAPASTSAVVCL

SEQ ID NO: 2444 - protein, 60 aa, Homo sapiens; identical to SEQ ID NO: 2434
  Payload ID: 594;
  Gene Symbol: AP2A2;
  Gene Name: adaptor-related prt complex 2, alpha 2 subunit;
  ENSP ID: ENSP00000486035

SEQ ID NO: 2445 - protein, 156 aa, Homo sapiens
  Payload ID: 594;
  Gene Symbol: AP2A2;
  Gene Name: adaptor-related prt complex 2, alpha 2 subunit;
  ENSP ID: ENSP00000486155
  MOD_RES (1)..(1): Any amino acid
XKSKEAEIKRINKELANIRSKFKGDKALDGYSKKKYVCKLLFIFLLGHDIDFGHMEAVNLLSSNRYTEKQIGYLFISVLVNSNSELIRLINNAIKNDLASRNPTFMGLALHCIASVGSREMAEAFAGEIPKVLVAGDTMDSVKQSAALCLLRLYRT

SEQ ID NO: 2446 - protein, 173 aa, Homo sapiens
  Payload ID: 594;
  Gene Symbol: AP2A2;
  Gene Name: adaptor-related prt complex 2, alpha 2 subunit;
  ENSP ID: ENSP00000486169
  MOD_RES (1)..(1): Any amino acid
XKSKEAEIKRINKELANIRSKFKGDKALDGYSKKKYVCKLLFIFLLGHDIDFGHMEAVNLLSSNRYTEKQIGYLFISVLVNSNSELIRLINNAIKNDLASRNPTFMGLALHCIASVGSREMAEAFAGEIPKVLVAGDTMDSVKQSAALCLLRLYRTSPDLVPMGDWTSRVVHL

SEQ ID NO: 2447 - protein, 138 aa, Homo sapiens; identical to SEQ ID NO: 2435
  Payload ID: 594;
  Gene Symbol: AP2A2;
  Gene Name: adaptor-related prt complex 2, alpha 2 subunit;
  ENSP ID: ENSP00000486204

SEQ ID NO: 2448 - protein, 356 aa, Homo sapiens
  Payload ID: 594;
  Gene Symbol: AP2A2;
  Gene Name: adaptor-related prt complex 2, alpha 2 subunit;
  ENSP ID: ENSP00000486729
  MOD_RES (1)..(1): Any amino acid
XKSKEAEIKRINKELANIRSKFKGDKALDGYSKKKYVCKLLFIFLLGHDIDFGHMEAVNLLSSNRYTEKQIGYLFISVLVNSNSELIRLINNAIKNDLASRNPTFMGLALHCIASVGSREMAEAFAGEIPKVLVAGDTMDSVKQSAALCLLRLYRTSPDLVPMGDWTSRVVHLLNDQHLGVVTAATSLITTLAQKNPEEFKTSVSLAVSRLSRIVTSASTDLQDYTYYFVPAPWLSVKLLRLLQCYPPPDPAVRGRLTECLETILNKAQEPPKSKKVQHSNAKNAVLFEAISLIIHHDRCVGCLCTGSRCAQVRKPFLRDYVNCSQRSFSPEDGRPGSCVLCCLRLCRLSSWPSCR

SEQ ID NO: 2449 - protein, 173 aa, Homo sapiens; identical to SEQ ID NO: 2446
  Payload ID: 594;
  Gene Symbol: AP2A2;
  Gene Name: adaptor-related prt complex 2, alpha 2 subunit;
  ENSP ID: ENSP00000486890
  MOD_RES (1)..(1): Any amino acid

SEQ ID NO: 2450 - protein, 138 aa, Homo sapiens; identical to SEQ ID NO: 2435
  Payload ID: 594;
  Gene Symbol: AP2A2;
  Gene Name: adaptor-related prt complex 2, alpha 2 subunit;
  ENSP ID: ENSP00000486895

SEQ ID NO: 2451 - protein, 62 aa, Homo sapiens; identical to SEQ ID NO: 2437
  Payload ID: 594;
  Gene Symbol: AP2A2;
  Gene Name: adaptor-related prt complex 2, alpha 2 subunit;
  ENSP ID: ENSP00000486964

SEQ ID NO: 2452 - protein, 125 aa, Homo sapiens; identical to SEQ ID NO: 2439
  Payload ID: 594;
  Gene Symbol: AP2A2;
  Gene Name: adaptor-related prt complex 2, alpha 2 subunit;
  ENSP ID: ENSP00000486996

SEQ ID NO: 2453 - protein, 140 aa, Homo sapiens
  Payload ID: 594;
  Gene Symbol: AP2A2;
  Gene Name: adaptor-related prt complex 2, alpha 2 subunit;
  ENSP ID: ENSP00000487022
AFAGEIPKVLVAGDTMDSVKQSAALCLLRLYRTSPDLVPMGDWTSRVVHLLNDQHLGVVTAATSLITTLAQKNPEEFKTSVSLAVSRLSRIVTSASTDLQDYTYYFVPAPWLSVKLLRLLQCYPPPDPAVRGRLTECLET

SEQ ID NO: 2454 - protein, 917 aa, Homo sapiens
  Payload ID: 594;
  Gene Symbol: AP2A2;
  Gene Name: adaptor-related prt complex 2, alpha 2 subunit;
  ENSP ID: ENSP00000487149
  MOD_RES (1)..(1): Any amino acid
XKSKEAEIKRINKELANIRSKFKGDKALDGYSKKKYVCKLLFIFLLGHDIDFGHMEAVNLLSSNRYTEKQIGYLFISVLVNSNSELIRLINNAIKNDLASRNPTFMGLALHCIASVGSREMAEAFAGEIPKVLVAGDTMDSVKQSAALCLLRLYRTSPDLVPMGDWTSRVVHLLNDQHLGVVTAATSLITTLAQKNPEEFKTSVSLAVSRLSRIVTSASTDLQDYTYYFVPAPWLSVKLLRLLQCYPPPDPAVRGRLTECLETILNKAQEPPKSKKVQHSNAKNAVLFEAISLIIHHDSEPNLLVRACNQLGQFLQHRETNLRYLALESMCTLASSEFSHEAVKTHIETVINALKTERDVSVRQRAVDLLYAMCDRSNAPQIVAEMLSYLETADYSIREEIVLKVAILAEKYAVDYTWYVDTILNLIRIAGDYVSEEVWYRVIQIVINRDDVQGYAAKTVFEALQAPACHENLVKVGGYILGEFGNLIAGDPRSSPLIQFHLLHSKFHLCSVPTRALLLSTYIKFVNLFPEVKPTIQDVLRSDSQLRNADVELQQRAVEYLRLSTVASTDILATVLEEMPPFPERESSILAKLKKKKGPSTVTDLEDTKRDRSVDVNGGPEPAPASTSAVSTPSPSADLLGLGAAPPAPAGPPPSSGGSGLLVDVFSDSASVVAPLAPGSEDNFARFVCKNNGVLFENQLLQIGLKSEFRQNLGRMFIFYGNKTSTQFLNFTPTLICSDDLQPNLNLQTKPVDPTVEGGAQVQQVVNIECVSDFTEAPVLNIQFRYGGTFQNVSVQLPITLNKFFQPTEMASQDFFQRWKQLSNPQQEVQNIFKAKHPMDTEVTKAKIIGFGSALLEEVDPNPANFVGAGIIHTKTTQIGCLLRLEPNLQAQMYRLTLRTSKEAVSQRLCELLSAQF

SEQ ID NO: 2455 - protein, 62 aa, Homo sapiens; identical to SEQ ID NO: 2437
  Payload ID: 594;
  Gene Symbol: AP2A2;
  Gene Name: adaptor-related prt complex 2, alpha 2 subunit;
  ENSP ID: ENSP00000487205

SEQ ID NO: 2456 - protein, 156 aa, Homo sapiens; identical to SEQ ID NO: 2445
  Payload ID: 594;
  Gene Symbol: AP2A2;
  Gene Name: adaptor-related prt complex 2, alpha 2 subunit;
  ENSP ID: ENSP00000487264
  MOD_RES (1)..(1): Any amino acid

SEQ ID NO: 2457 - protein, 634 aa, Homo sapiens; identical to SEQ ID NO: 2443
  Payload ID: 594;
  Gene Symbol: AP2A2;
  Gene Name: adaptor-related prt complex 2, alpha 2 subunit;
  ENSP ID: ENSP00000487282
  MOD_RES (1)..(1): Any amino acid

SEQ ID NO: 2458 - protein, 60 aa, Homo sapiens; identical to SEQ ID NO: 2434
  Payload ID: 594;
  Gene Symbol: AP2A2;
  Gene Name: adaptor-related prt complex 2, alpha 2 subunit;
  ENSP ID: ENSP00000487352

SEQ ID NO: 2459 - protein, 917 aa, Homo sapiens; identical to SEQ ID NO: 2454
  Payload ID: 594;
  Gene Symbol: AP2A2;
  Gene Name: adaptor-related prt complex 2, alpha 2 subunit;
  ENSP ID: ENSP00000487425
  MOD_RES (1)..(1): Any amino acid

SEQ ID NO: 2460 - protein, 164 aa, Homo sapiens
  Payload ID: 595;
  Gene Symbol: AP2B1;
  Gene Name: adaptor-related prt complex 2, beta 1 subunit;
  ENSP ID: ENSP00000464966
SEVLAELKEYATEVDVDFVRKAVRAIGRCAIKVEQSAERCVSTLLDLIQTKVNYVVQEAIVVIRDIFRKYPNKYESIIATLCENLDSLDEPDARAAMIWIVGEYAERIDNADELLESFLEGFHDESTQVQLTLLTAIVKLFLKKPSETQELVQQVLSLATQLKK

SEQ ID NO: 2461 - protein, 80 aa, Homo sapiens
  Payload ID: 595;
  Gene Symbol: AP2B1;
  Gene Name: adaptor-related prt complex 2, beta 1 subunit;
  ENSP ID: ENSP00000465357
MTDSKYFTTNKKGEIFELKAELNNEKKEKRKEAVKKVIAAMTVGKDVSSLFPDVVNCMQTDNLELKKLVYLYLMNYAKSQ

SEQ ID NO: 2462 - protein, 63 aa, Homo sapiens
  Payload ID: 595;
  Gene Symbol: AP2B1;
  Gene Name: adaptor-related prt complex 2, beta 1 subunit;
  ENSP ID: ENSP00000465848
MTDSKYFTTNKKGEIFELKAELNNEKKEKRKEAVKKVIAAMTVGKDVRCCSSEVNFCYFSFVC

SEQ ID NO: 2463 - protein, 181 aa, Homo sapiens
  Payload ID: 595;
  Gene Symbol: AP2B1;
  Gene Name: adaptor-related prt complex 2, beta 1 subunit;
  ENSP ID: ENSP00000466580
DLIEPTLLDELICHIGSLASVYHKPPNAFVEGSHGIHRKHLPIHHGSTDAGDSPVGTTTATNLEQPQVIPSQGDLLGDLLNLDLGPPVNVPQVSSMQMGAVDLLGGGLDSLPQKLFTVQFSSAYSEIERYPRNQDEKKLKPLFLLWIRMWLNIYSLRESRFLFREHHKEDLNLPVWKKMSF

SEQ ID NO: 2464 - protein, 132 aa, Homo sapiens
  Payload ID: 595;
  Gene Symbol: AP2B1;
  Gene Name: adaptor-related prt complex 2, beta 1 subunit;
  ENSP ID: ENSP00000466812
MTDSKYFTTNKKGEIFELKAELNNEKKEKRKEAVKKVIAAMTVGKDVSSLFPDVVNCMQTDNLELKKLVYLYLMNYAKSQPDMAIMAVNSFVKDCEDPNPLIRALAVRTMGCIRVDKITEYLCEPLRKCLKD

SEQ ID NO: 2465 - protein, 63 aa, Homo sapiens; identical to SEQ ID NO: 2462
  Payload ID: 595;
  Gene Symbol: AP2B1;
  Gene Name: adaptor-related prt complex 2, beta 1 subunit;
  ENSP ID: ENSP00000467382

SEQ ID NO: 2466 - protein, 151 aa, Homo sapiens
  Payload ID: 595;
  Gene Symbol: AP2B1;
  Gene Name: adaptor-related prt complex 2, beta 1 subunit;
  ENSP ID: ENSP00000468183
MTDSKYFTTNKKGEIFELKAELNNEKKEKRKEAVKKVIAAMTVGKDVSSLFPDVVNCMQTDNLELKKLVYLYLMNYAKSQPDMAIMAVNSFVKDCEDPNPLIRALAVRTMGCIRVDKITEYLCEPLRKCLKDEDPYVRKTAAVCVAKLHDI

SEQ ID NO: 2467 - protein, 63 aa, Homo sapiens; identical to SEQ ID NO: 2462
  Payload ID: 595;
  Gene Symbol: AP2B1;
  Gene Name: adaptor-related prt complex 2, beta 1 subunit;
  ENSP ID: ENSP00000468813

SEQ ID NO: 2468 - protein, 677 aa, Homo sapiens
  Payload ID: 595;
  Gene Symbol: AP2B1;
  Gene Name: adaptor-related prt complex 2, beta 1 subunit;
  ENSP ID: ENSP00000478115
MTDSKYFTTNKKGEIFELKAELNNEKKEKRKEAVKKVIAAMTVGKDVSSLFPDVVNCMQTDNLELKKLVYLYLMNYAKSQPDMAIMAVNSFVKDCEDPNPLIRALAVRTMGCIRVDKITEYLCEPLRKCLKDEDPYVRKTAAVCVAKLHDINAQMVEDQGFLDSLRDLIADSNPMVVANAVAALSEISESHPNSNLLDLNPQNINKLLTALNECTEWGQIFILDCLSNYNPKDDREAQSICERVTPRLSHANSAVVLSAVKVLMKFLELLPKDSDYYNMLLKKLAPPLVTLLSGEPEVQYVALRNINLIVQKRPEILKQEIKVFFVKYNDPIYVKLEKLDIMIRLASQANIAQVLAELKEYATEVDVDFVRKAVRAIGRCAIKVEQSAERCVSTLLDLIQTKVNYVVQEAIVVIRDIFRKYPNKYESIIATLCENLDSLDEPDARAAMIWIVGEYAERIDNADELLESFLEGFHDESTQVQLTLLTAIVKLFLKKPSETQELVQQVLSLATQDSDNPDLRDRGYIYWRLLSTDPVTAKEVVLSEKPLISEETDLIEPTLLDELICHIGSLASVYHKPPNAFVEGSHGIHRKHLPIHHGSTDAGDSPVGTTTATNLEQPQVIPSQGDLLGDLLNLDLGPPVNVPQVSSMQMGAVDLLGGGLDSLLGSDLGGGIGGSPA

SEQ ID NO: 2469 - protein, 663 aa, Homo sapiens
  Payload ID: 595;
  Gene Symbol: AP2B1;
  Gene Name: adaptor-related prt complex 2, beta 1 subunit;
  ENSP ID: ENSP00000478471
MTDSKYFTTNKKGEIFELKAELNNEKKEKRKEAVKKVIAAMTVGKDVSSLFPDVVNCMQTDNLELKKLVYLYLMNYAKSQPDMAIMAVNSFVKDCEDPNPLIRALAVRTMGCIRVDKITEYLCEPLRKCLKDEDPYVRKTAAVCVAKLHDINAQMVEDQGFLDSLRDLIADSNPMVVANAVAALSEISESHPNSNLLDLNPQNINKLLTALNECTEWGQIFILDCLSNYNPKDDREAQSICERVTPRLSHANSAVVLSAVKVLMKFLELLPKDSDYYNMLLKKLAPPLVTLLSGEPEVQYVALRNINLIVQKRPEILKQEIKVFFVKYNDPIYVKLEKLDIMIRLASQANIAQVLAELKEYATEVDVDFVRKAVRAIGRCAIKVEQSAERCVSTLLDLIQTKVNYVVQEAIVVIRDIFRKYPNKYESIIATLCENLDSLDEPDARAAMIWIVGEYAERIDNADELLESFLEGFHDESTQVQLTLLTAIVKLFLKKPSETQELVQQVLSLATQDSDNPDLRDRGYIYWRLLSTDPVTAKEVVLSEKPLISEETDLIEPTLLDELICHIGSLASVYHKPPNAFVEGSHGIHRKHLPIHHGSTDAGDSPVGTTTATNLEQPQVIPSQGDLLGDLLNLDLGPPVNVPQVSSMQMGAVDLLGGGLDSL

SEQ ID NO: 2470 - protein, 677 aa, Homo sapiens; identical to SEQ ID NO: 2468
  Payload ID: 595;
  Gene Symbol: AP2B1;
  Gene Name: adaptor-related prt complex 2, beta 1 subunit;
  ENSP ID: ENSP00000479691

SEQ ID NO: 2471 - protein, 49 aa, Homo sapiens
  Payload ID: 595;
  Gene Symbol: AP2B1;
  Gene Name: adaptor-related prt complex 2, beta 1 subunit;
  ENSP ID: ENSP00000481246
MTDSKYFTTNKKGEIFELKAELNNEKKEKRKEAVKKVIAAMTVGKDVST

SEQ ID NO: 2472 - protein, 639 aa, Homo sapiens
  Payload ID: 595;
  Gene Symbol: AP2B1;
  Gene Name: adaptor-related prt complex 2, beta 1 subunit;
  ENSP ID: ENSP00000481704
MTDSKYFTTNKKGEIFELKAELNNEKKEKRKEAVKKVIAAMTVGKDVSSLFPDVVNCMQTDNLELKKLVYLYLMNYAKSQPDMAIMAVNSFVKDEDPYVRKTAAVCVAKLHDINAQMVEDQGFLDSLRDLIADSNPMVVANAVAALSEISESHPNSNLLDLNPQNINKLLTALNECTEWGQIFILDCLSNYNPKDDREAQSICERVTPRLSHANSAVVLSAVKVLMKFLELLPKDSDYYNMLLKKLAPPLVTLLSGEPEVQYVALRNINLIVQKRPEILKQEIKVFFVKYNDPIYVKLEKLDIMIRLASQANIAQVLAELKEYATEVDVDFVRKAVRAIGRCAIKVEQSAERCVSTLLDLIQTKVNYVVQEAIVVIRDIFRKYPNKYESIIATLCENLDSLDEPDARAAMIWIVGEYAERIDNADELLESFLEGFHDESTQVQLTLLTAIVKLFLKKPSETQELVQQVLSLATQDSDNPDLRDRGYIYWRLLSTDPVTAKEVVLSEKPLISEETDLIEPTLLDELICHIGSLASVYHKPPNAFVEGSHGIHRKHLPIHHGSTDAGDSPVGTTTATNLEQPQVIPSQGDLLGDLLNLDLGPPVNVPQVSSMQMGAVDLLGGGLDSLLGSDLGGGIGGSPA

SEQ ID NO: 2473 - protein, 937 aa, Homo sapiens
  Payload ID: 595;
  Gene Symbol: AP2B1;
  Gene Name: adaptor-related prt complex 2, beta 1 subunit;
  Uniprot ID:  P63010;
  ENSP ID: ENSP00000482315
MTDSKYFTTNKKGEIFELKAELNNEKKEKRKEAVKKVIAAMTVGKDVSSLFPDVVNCMQTDNLELKKLVYLYLMNYAKSQPDMAIMAVNSFVKDCEDPNPLIRALAVRTMGCIRVDKITEYLCEPLRKCLKDEDPYVRKTAAVCVAKLHDINAQMVEDQGFLDSLRDLIADSNPMVVANAVAALSEISESHPNSNLLDLNPQNINKLLTALNECTEWGQIFILDCLSNYNPKDDREAQSICERVTPRLSHANSAVVLSAVKVLMKFLELLPKDSDYYNMLLKKLAPPLVTLLSGEPEVQYVALRNINLIVQKRPEILKQEIKVFFVKYNDPIYVKLEKLDIMIRLASQANIAQVLAELKEYATEVDVDFVRKAVRAIGRCAIKVEQSAERCVSTLLDLIQTKVNYVVQEAIVVIRDIFRKYPNKYESIIATLCENLDSLDEPDARAAMIWIVGEYAERIDNADELLESFLEGFHDESTQVQLTLLTAIVKLFLKKPSETQELVQQVLSLATQDSDNPDLRDRGYIYWRLLSTDPVTAKEVVLSEKPLISEETDLIEPTLLDELICHIGSLASVYHKPPNAFVEGSHGIHRKHLPIHHGSTDAGDSPVGTTTATNLEQPQVIPSQGDLLGDLLNLDLGPPVNVPQVSSMQMGAVDLLGGGLDSLVGQSFIPSSVPATFAPSPTPAVVSSGLNDLFELSTGIGMAPGGYVAPKAVWLPAVKAKGLEISGTFTHRQGHIYMEMNFTNKALQHMTDFAIQFNKNSFGVIPSTPLAIHTPLMPNQSIDVSLPLNTLGPVMKMEPLNNLQVAVKNNIDVFYFSCLIPLNVLFVEDGKMERQVFLATWKDIPNENELQFQIKECHLNADTVSSKLQNNNVYTIAKRNVEGQDMLYQSLKLTNGIWILAELRIQPGNPNYTLSLKCRAPEVSQYIYQVYDSILKN

SEQ ID NO: 2474 - protein, 677 aa, Homo sapiens; identical to SEQ ID NO: 2468
  Payload ID: 595;
  Gene Symbol: AP2B1;
  Gene Name: adaptor-related prt complex 2, beta 1 subunit;
  ENSP ID: ENSP00000482825

SEQ ID NO: 2475 - protein, 951 aa, Homo sapiens
  Payload ID: 595;
  Gene Symbol: AP2B1;
  Gene Name: adaptor-related prt complex 2, beta 1 subunit;
  Uniprot ID:  P63010;
  ENSP ID: ENSP00000482835
MTDSKYFTTNKKGEIFELKAELNNEKKEKRKEAVKKVIAAMTVGKDVSSLFPDVVNCMQTDNLELKKLVYLYLMNYAKSQPDMAIMAVNSFVKDCEDPNPLIRALAVRTMGCIRVDKITEYLCEPLRKCLKDEDPYVRKTAAVCVAKLHDINAQMVEDQGFLDSLRDLIADSNPMVVANAVAALSEISESHPNSNLLDLNPQNINKLLTALNECTEWGQIFILDCLSNYNPKDDREAQSICERVTPRLSHANSAVVLSAVKVLMKFLELLPKDSDYYNMLLKKLAPPLVTLLSGEPEVQYVALRNINLIVQKRPEILKQEIKVFFVKYNDPIYVKLEKLDIMIRLASQANIAQVLAELKEYATEVDVDFVRKAVRAIGRCAIKVEQSAERCVSTLLDLIQTKVNYVVQEAIVVIRDIFRKYPNKYESIIATLCENLDSLDEPDARAAMIWIVGEYAERIDNADELLESFLEGFHDESTQVQLTLLTAIVKLFLKKPSETQELVQQVLSLATQDSDNPDLRDRGYIYWRLLSTDPVTAKEVVLSEKPLISEETDLIEPTLLDELICHIGSLASVYHKPPNAFVEGSHGIHRKHLPIHHGSTDAGDSPVGTTTATNLEQPQVIPSQGDLLGDLLNLDLGPPVNVPQVSSMQMGAVDLLGGGLDSLLGSDLGGGIGGSPAVGQSFIPSSVPATFAPSPTPAVVSSGLNDLFELSTGIGMAPGGYVAPKAVWLPAVKAKGLEISGTFTHRQGHIYMEMNFTNKALQHMTDFAIQFNKNSFGVIPSTPLAIHTPLMPNQSIDVSLPLNTLGPVMKMEPLNNLQVAVKNNIDVFYFSCLIPLNVLFVEDGKMERQVFLATWKDIPNENELQFQIKECHLNADTVSSKLQNNNVYTIAKRNVEGQDMLYQSLKLTNGIWILAELRIQPGNPNYTLSLKCRAPEVSQYIYQVYDSILKN

SEQ ID NO: 2476 - protein, 951 aa, Homo sapiens; identical to SEQ ID NO: 2475
  Payload ID: 595;
  Gene Symbol: AP2B1;
  Gene Name: adaptor-related prt complex 2, beta 1 subunit;
  Uniprot ID:  P63010;
  ENSP ID: ENSP00000483185

SEQ ID NO: 2477 - protein, 913 aa, Homo sapiens
  Payload ID: 595;
  Gene Symbol: AP2B1;
  Gene Name: adaptor-related prt complex 2, beta 1 subunit;
  ENSP ID: ENSP00000484708
MTDSKYFTTNKKGEIFELKAELNNEKKEKRKEAVKKVIAAMTVGKDVSSLFPDVVNCMQTDNLELKKLVYLYLMNYAKSQPDMAIMAVNSFVKDEDPYVRKTAAVCVAKLHDINAQMVEDQGFLDSLRDLIADSNPMVVANAVAALSEISESHPNSNLLDLNPQNINKLLTALNECTEWGQIFILDCLSNYNPKDDREAQSICERVTPRLSHANSAVVLSAVKVLMKFLELLPKDSDYYNMLLKKLAPPLVTLLSGEPEVQYVALRNINLIVQKRPEILKQEIKVFFVKYNDPIYVKLEKLDIMIRLASQANIAQVLAELKEYATEVDVDFVRKAVRAIGRCAIKVEQSAERCVSTLLDLIQTKVNYVVQEAIVVIRDIFRKYPNKYESIIATLCENLDSLDEPDARAAMIWIVGEYAERIDNADELLESFLEGFHDESTQVQLTLLTAIVKLFLKKPSETQELVQQVLSLATQDSDNPDLRDRGYIYWRLLSTDPVTAKEVVLSEKPLISEETDLIEPTLLDELICHIGSLASVYHKPPNAFVEGSHGIHRKHLPIHHGSTDAGDSPVGTTTATNLEQPQVIPSQGDLLGDLLNLDLGPPVNVPQVSSMQMGAVDLLGGGLDSLLGSDLGGGIGGSPAVGQSFIPSSVPATFAPSPTPAVVSSGLNDLFELSTGIGMAPGGYVAPKAVWLPAVKAKGLEISGTFTHRQGHIYMEMNFTNKALQHMTDFAIQFNKNSFGVIPSTPLAIHTPLMPNQSIDVSLPLNTLGPVMKMEPLNNLQVAVKNNIDVFYFSCLIPLNVLFVEDGKMERQVFLATWKDIPNENELQFQIKECHLNADTVSSKLQNNNVYTIAKRNVEGQDMLYQSLKLTNGIWILAELRIQPGNPNYTLSLKCRAPEVSQYIYQVYDSILKN

SEQ ID NO: 2478 - protein, 63 aa, Homo sapiens; identical to SEQ ID NO: 2462
  Payload ID: 595;
  Gene Symbol: AP2B1;
  Gene Name: adaptor-related prt complex 2, beta 1 subunit;
  ENSP ID: ENSP00000487324

SEQ ID NO: 2479 - protein, 435 aa, Homo sapiens
  Payload ID: 596;
  Gene Symbol: AP2M1;
  Gene Name: adaptor-related prt complex 2, mu 1 subunit;
  Uniprot ID:  Q96CW1;
  ENSP ID: ENSP00000292807
MIGGLFIYNHKGEVLISRVYRDDIGRNAVDAFRVNVIHARQQVRSPVTNIARTSFFHVKRSNIWLAAVTKQNVNAAMVFEFLYKMCDVMAAYFGKISEENIKNNFVLIYELLDEILDFGYPQNSETGALKTFITQQGIKSQHQTKEEQSQITSQVTGQIGWRREGIKYRRNELFLDVLESVNLLMSPQGQVLSAHVSGRVVMKSYLSGMPECKFGMNDKIVIEKQGKGTADETSKSGKQSIAIDDCTFHQCVRLSKFDSERSISFIPPDGEFELMRYRTTKDIILPFRVIPLVREVGRTKLEVKVVIKSNFKPSLLAQKIEVRIPTPLNTSGVQVICMKGKAKYKASENAIVWKIKRMAGMKESQISAEIELLPTNDKKKWARPPISMNFEVPFAPSGLKVRYLKVFEPKLNYSDHDVIKWVRYIGRSGIYETRC

SEQ ID NO: 2480 - protein, 433 aa, Homo sapiens
  Payload ID: 596;
  Gene Symbol: AP2M1;
  Gene Name: adaptor-related prt complex 2, mu 1 subunit;
  Uniprot ID:  Q96CW1;
  ENSP ID: ENSP00000371894
MIGGLFIYNHKGEVLISRVYRDDIGRNAVDAFRVNVIHARQQVRSPVTNIARTSFFHVKRSNIWLAAVTKQNVNAAMVFEFLYKMCDVMAAYFGKISEENIKNNFVLIYELLDEILDFGYPQNSETGALKTFITQQGIKSQTKEEQSQITSQVTGQIGWRREGIKYRRNELFLDVLESVNLLMSPQGQVLSAHVSGRVVMKSYLSGMPECKFGMNDKIVIEKQGKGTADETSKSGKQSIAIDDCTFHQCVRLSKFDSERSISFIPPDGEFELMRYRTTKDIILPFRVIPLVREVGRTKLEVKVVIKSNFKPSLLAQKIEVRIPTPLNTSGVQVICMKGKAKYKASENAIVWKIKRMAGMKESQISAEIELLPTNDKKKWARPPISMNFEVPFAPSGLKVRYLKVFEPKLNYSDHDVIKWVRYIGRSGIYETRC

SEQ ID NO: 2481 - protein, 252 aa, Homo sapiens
  Payload ID: 596;
  Gene Symbol: AP2M1;
  Gene Name: adaptor-related prt complex 2, mu 1 subunit;
  ENSP ID: ENSP00000395438
MIGGLFIYNHKGEVLISRVYRDDIGRNAVDAFRVNVIHARQQVRSPVTNIARTSFFHVKRSNIWLAAVTKQNVNAAMVFEFLYKMCDVMAAYFGKISEENIKNNFVLIYELLDEILDFGYPQNSETGALKTFITQQGIKSQHQTKEEQSQITSQGKGTADETSKSGKQSIAIDDCTFHQCVRLSKFDSERSISFIPPDGEFELMRYRTTKDIILPFRVIPLVREVGRTKLEVKVVIKSNFKPSLLAQKIEVR

SEQ ID NO: 2482 - protein, 136 aa, Homo sapiens
  Payload ID: 596;
  Gene Symbol: AP2M1;
  Gene Name: adaptor-related prt complex 2, mu 1 subunit;
  ENSP ID: ENSP00000402051
MIGGLFIYNHKGEVLISRVYRDDIGSRQAADSAVFSSSGPFPGEWLEARNAVDAFRVNVIHARQQVRSPVTNIARTSFFHVKRSNIWLAAVTKQNVNAAMVFEFLYKMCDVMAAYFGKISEENIKNNFVLIYELLD

SEQ ID NO: 2483 - protein, 160 aa, Homo sapiens
  Payload ID: 596;
  Gene Symbol: AP2M1;
  Gene Name: adaptor-related prt complex 2, mu 1 subunit;
  ENSP ID: ENSP00000402592
MIGGLFIYNHKGEVLISRVYRDDIGNRRNAVDAFRVNVIHARQQVRSPVTNIARTSFFHVKRSNIWLAAVTKQNVNAAMVFEFLYKMCDVMAAYFGKISEENIKNNFVLIYELLDEILDFGYPQNSETGALKTFITQQGIKSQHQTKEEQSQITSQVTGQ

SEQ ID NO: 2484 - protein, 460 aa, Homo sapiens
  Payload ID: 596;
  Gene Symbol: AP2M1;
  Gene Name: adaptor-related prt complex 2, mu 1 subunit;
  ENSP ID: ENSP00000403362
MIGGLFIYNHKGEVLISRVYRDDIGSRQAADSAVFSSSGPFPGEWLEANRRNAVDAFRVNVIHARQQVRSPVTNIARTSFFHVKRSNIWLAAVTKQNVNAAMVFEFLYKMCDVMAAYFGKISEENIKNNFVLIYELLDEILDFGYPQNSETGALKTFITQQGIKSQHQTKEEQSQITSQVTGQIGWRREGIKYRRNELFLDVLESVNLLMSPQGQVLSAHVSGRVVMKSYLSGMPECKFGMNDKIVIEKQGKGTADETSKSGKQSIAIDDCTFHQCVRLSKFDSERSISFIPPDGEFELMRYRTTKDIILPFRVIPLVREVGRTKLEVKVVIKSNFKPSLLAQKIEVRIPTPLNTSGVQVICMKGKAKYKASENAIVWKIKRMAGMKESQISAEIELLPTNDKKKWARPPISMNFEVPFAPSGLKVRYLKVFEPKLNYSDHDVIKWVRYIGRSGIYETRC

SEQ ID NO: 2485 - protein, 113 aa, Homo sapiens
  Payload ID: 596;
  Gene Symbol: AP2M1;
  Gene Name: adaptor-related prt complex 2, mu 1 subunit;
  ENSP ID: ENSP00000404031
MIGGLFIYNHKGEVLISRVYRDDIGRNAVDAFRVNVIHARQQVRSPVTNIARTSFFHVKRSNIWLAAVTKQNVNAAMVFEFLYKMCDVMAAYFGKISEENIKNNFVLIYELLD

SEQ ID NO: 2486 - protein, 195 aa, Homo sapiens
  Payload ID: 596;
  Gene Symbol: AP2M1;
  Gene Name: adaptor-related prt complex 2, mu 1 subunit;
  ENSP ID: ENSP00000404326
MIGGLFIYNHKGEVLISRVYRDDIGRNAVDAFRVNVIHARQQVRSPVTNIARTSFFHVKRSNIWLAAVTKQNVNAAMVFEFLYKMCDVMAAYFGKISEENIKNNFVLIYELLDEILDFGYPQNSETGALKTFITQQGIKSQHQVSSSLSFHPCSFALFLQALPFGAYRGKWITDKRRAVTDHQPGNWADWLAARG

SEQ ID NO: 2487 - protein, 433 aa, Homo sapiens; identical to SEQ ID NO: 2480
  Payload ID: 596;
  Gene Symbol: AP2M1;
  Gene Name: adaptor-related prt complex 2, mu 1 subunit;
  Uniprot ID:  Q96CW1;
  ENSP ID: ENSP00000409081

SEQ ID NO: 2488 - protein, 122 aa, Homo sapiens
  Payload ID: 596;
  Gene Symbol: AP2M1;
  Gene Name: adaptor-related prt complex 2, mu 1 subunit;
  ENSP ID: ENSP00000416688
FKPSLLAQKIEVRIPTPLNTSGVQVICMKGKAKYKASENAIVWKIKRMAGMKESQISAEIELLPTNDKKKWARPPISMNFEVWQRRGLESCQGMLEDLLEIIPINCCTLEVRKLRPRKKNWL

SEQ ID NO: 2489 - protein, 434 aa, Homo sapiens
  Payload ID: 596;
  Gene Symbol: AP2M1;
  Gene Name: adaptor-related prt complex 2, mu 1 subunit;
  ENSP ID: ENSP00000481563
MIGGLFIYNHKGEVLISRVYRDDIGRNAVDAFRVNVIHARQQVRSPVTNIARTSFFHVKRSNIWLAAVTKQNVNAAMVFEFLYKMCDVMAAYFGKISEENIKNNFVLIYELLDEILDFGYPQNSETGALKTFITQQGIKSQHTKEEQSQITSQVTGQIGWRREGIKYRRNELFLDVLESVNLLMSPQGQVLSAHVSGRVVMKSYLSGMPECKFGMNDKIVIEKQGKGTADETSKSGKQSIAIDDCTFHQCVRLSKFDSERSISFIPPDGEFELMRYRTTKDIILPFRVIPLVREVGRTKLEVKVVIKSNFKPSLLAQKIEVRIPTPLNTSGVQVICMKGKAKYKASENAIVWKIKRMAGMKESQISAEIELLPTNDKKKWARPPISMNFEVPFAPSGLKVRYLKVFEPKLNYSDHDVIKWVRYIGRSGIYETRC

SEQ ID NO: 2490 - protein, 142 aa, Homo sapiens
  Payload ID: 597;
  Gene Symbol: AP2S1;
  Gene Name: adaptor-related prt complex 2, sigma 1 subunit;
  Uniprot ID:  P53680;
  ENSP ID: ENSP00000263270
MIRFILIQNRAGKTRLAKWYMQFDDDEKQKLIEEVHAVVTVRDAKHTNFVEFRNFKIIYRRYAGLYFCICVDVNDNNLAYLEAIHNFVEVLNEYFHNVCELDLVFNFYKVYTVVDEMFLAGEIRETSQTKVLKQLLMLQSLE

SEQ ID NO: 2491 - protein, 156 aa, Homo sapiens
  Payload ID: 597;
  Gene Symbol: AP2S1;
  Gene Name: adaptor-related prt complex 2, sigma 1 subunit;
  ENSP ID: ENSP00000263271
MIRFILIQNRAGKTRLAKWYMQFDDDEKQKLIEEVHAVVTVRDAKHTNFVEVLAISVADSLSVLQFRNFKIIYRRYAGLYFCICVDVNDNNLAYLEAIHNFVEVLNEYFHNVCELDLVFNFYKVYTVVDEMFLAGEIRETSQTKVLKQLLMLQSLE

SEQ ID NO: 2492 - protein, 158 aa, Homo sapiens
  Payload ID: 597;
  Gene Symbol: AP2S1;
  Gene Name: adaptor-related prt complex 2, sigma 1 subunit;
  ENSP ID: ENSP00000470176
MKLKGLGKRCKRREDLEIRFILIQNRAGKTRLAKWYMQFDDDEKQKLIEEVHAVVTVRDAKHTNFVEFRNFKIIYRRYAGLYFCICVDVNDNNLAYLEAIHNFVEVLNEYFHNVCELDLVFNFYKVYTVVDEMFLAGEIRETSQTKVLKQLLMLQSLE

SEQ ID NO: 2493 - protein, 122 aa, Homo sapiens
  Payload ID: 597;
  Gene Symbol: AP2S1;
  Gene Name: adaptor-related prt complex 2, sigma 1 subunit;
  ENSP ID: ENSP00000470235
MQFDDDEKQKLIEEVHAVVTVRDAKHTNFVEFRNFKIIYRRYAGLYFCICVDVNDNNLAYLEAIHNFVEVLNEYFHNVCELDLVFNFYKVYTVVDEMFLAGEIRETSQTKVLKQLLMLQSLE

SEQ ID NO: 2494 - protein, 104 aa, Homo sapiens
  Payload ID: 597;
  Gene Symbol: AP2S1;
  Gene Name: adaptor-related prt complex 2, sigma 1 subunit;
  Uniprot ID:  P53680;
  ENSP ID: ENSP00000470898
MIRFILIQNRAGKTRLAKWYMQFDDDEKQKLIEEVHAVVTVRDAKHTNFVEVLNEYFHNVCELDLVFNFYKVYTVVDEMFLAGEIRETSQTKVLKQLLMLQSLE

SEQ ID NO: 2495 - protein, 144 aa, Homo sapiens
  Payload ID: 597;
  Gene Symbol: AP2S1;
  Gene Name: adaptor-related prt complex 2, sigma 1 subunit;
  ENSP ID: ENSP00000471340
MVWIRFILIQNRAGKTRLAKWYMQFDDDEKQKLIEEVHAVVTVRDAKHTNFVEFRNFKIIYRRYAGLYFCICVDVNDNNLAYLEAIHNFVEVLNEYFHNVCELDLVFNFYKVYTVVDEMFLAGEIRETSQTKVLKQLLMLQSLE

SEQ ID NO: 2496 - protein, 92 aa, Homo sapiens
  Payload ID: 597;
  Gene Symbol: AP2S1;
  Gene Name: adaptor-related prt complex 2, sigma 1 subunit;
  ENSP ID: ENSP00000472080
MFRNFKIIYRRYAGLYFCICVDVNDNNLAYLEAIHNFVEVLNEYFHNVCELDLVFNFYKVYTVVDEMFLAGEIRETSQTKVLKQLLMLQSLE

SEQ ID NO: 2497 - protein, 1094 aa, Homo sapiens
  Payload ID: 598;
  Gene Symbol: AP3B1;
  Gene Name: adaptor-related prt complex 3, beta 1 subunit;
  Uniprot ID:  O00203;
  ENSP ID: ENSP00000255194
MSSNSFPYNEQSGGGEATELGQEATSTISPSGAFGLFSSDLKKNEDLKQMLESNKDSAKLDAMKRIVGMIAKGKNASELFPAVVKNVASKNIEIKKLVYVYLVRYAEEQQDLALLSISTFQRALKDPNQLIRASALRVLSSIRVPIIVPIMMLAIKEASADLSPYVRKNAAHAIQKLYSLDPEQKEMLIEVIEKLLKDKSTLVAGSVVMAFEEVCPDRIDLIHKNYRKLCNLLVDVEEWGQVVIIHMLTRYARTQFVSPWKEGDELEDNGKNFYESDDDQKEKTDKKKKPYTMDPDHRLLIRNTKPLLQSRNAAVVMAVAQLYWHISPKSEAGIISKSLVRLLRSNREVQYIVLQNIATMSIQRKGMFEPYLKSFYVRSTDPTMIKTLKLEILTNLANEANISTLLREFQTYVKSQDKQFAAATIQTIGRCATNILEVTDTCLNGLVCLLSNRDEIVVAESVVVIKKLLQMQPAQHGEIIKHMAKLLDSITVPVARASILWLIGENCERVPKIAPDVLRKMAKSFTSEDDLVKLQILNLGAKLYLTNSKQTKLLTQYILNLGKYDQNYDIRDRTRFIRQLIVPNVKSGALSKYAKKIFLAQKPAPLLESPFKDRDHFQLGTLSHTLNIKATGYLELSNWPEVAPDPSVRNVEVIELAKEWTPAGKAKQENSAKKFYSESEEEEDSSDSSSDSESESGSESGEQGESGEEGDSNEDSSEDSSSEQDSESGRESGLENKRTAKRNSKAKGKSDSEDGEKENEKSKTSDSSNDESSSIEDSSSDSESESEPESESESRRVTKEKEKKTKQDRTPLTKDVSLLDLDDFNPVSTPVALPTPALSPSLMADLEGLHLSTSSSVISVSTPAFVPTKTHVLLHRMSGKGLAAHYFFPRQPCIFGDKMVSIQITLNNTTDRKIENIHIGEKKLPIGMKMHVFNPIDSLEPEGSITVSMGIDFCDSTQTASFQLCTKDDCFNVNIQPPVGELLLPVAMSEKDFKKEQGVLTGMNETSAVIIAAPQNFTPSVIFQKVVNVANVGAVPSGQDNIHRFAAKTVHSGSLMLVTVELKEGSTAQLIINTEKTVIGSVLLRELKPVLSQG

SEQ ID NO: 2498 - protein, 154 aa, Homo sapiens
  Payload ID: 598;
  Gene Symbol: AP3B1;
  Gene Name: adaptor-related prt complex 3, beta 1 subunit;
  ENSP ID: ENSP00000429228
  MOD_RES (1)..(1): Any amino acid
XIQITLNNTTDRKIENIHIGEKKLPIGMKMHVFNPIDSLEPEGSITVSMGIDFCDSTQTASFQLCTKDDCFNVNIQPPVGELLLPVAMSEKDFKKEQGVLTGMNETSAVIIAAPQNFTPSVIFQKVVNVANVGAVPSGQDNIHRSLFFLFQVCS

SEQ ID NO: 2499 - protein, 1045 aa, Homo sapiens
  Payload ID: 598;
  Gene Symbol: AP3B1;
  Gene Name: adaptor-related prt complex 3, beta 1 subunit;
  Uniprot ID:  O00203;
  ENSP ID: ENSP00000430597
MLESNKDSAKLDAMKRIVGMIAKGKNASELFPAVVKNVASKNIEIKKLVYVYLVRYAEEQQDLALLSISTFQRALKDPNQLIRASALRVLSSIRVPIIVPIMMLAIKEASADLSPYVRKNAAHAIQKLYSLDPEQKEMLIEVIEKLLKDKSTLVAGSVVMAFEEVCPDRIDLIHKNYRKLCNLLVDVEEWGQVVIIHMLTRYARTQFVSPWKEGDELEDNGKNFYESDDDQKEKTDKKKKPYTMDPDHRLLIRNTKPLLQSRNAAVVMAVAQLYWHISPKSEAGIISKSLVRLLRSNREVQYIVLQNIATMSIQRKGMFEPYLKSFYVRSTDPTMIKTLKLEILTNLANEANISTLLREFQTYVKSQDKQFAAATIQTIGRCATNILEVTDTCLNGLVCLLSNRDEIVVAESVVVIKKLLQMQPAQHGEIIKHMAKLLDSITVPVARASILWLIGENCERVPKIAPDVLRKMAKSFTSEDDLVKLQILNLGAKLYLTNSKQTKLLTQYILNLGKYDQNYDIRDRTRFIRQLIVPNVKSGALSKYAKKIFLAQKPAPLLESPFKDRDHFQLGTLSHTLNIKATGYLELSNWPEVAPDPSVRNVEVIELAKEWTPAGKAKQENSAKKFYSESEEEEDSSDSSSDSESESGSESGEQGESGEEGDSNEDSSEDSSSEQDSESGRESGLENKRTAKRNSKAKGKSDSEDGEKENEKSKTSDSSNDESSSIEDSSSDSESESEPESESESRRVTKEKEKKTKQDRTPLTKDVSLLDLDDFNPVSTPVALPTPALSPSLMADLEGLHLSTSSSVISVSTPAFVPTKTHVLLHRMSGKGLAAHYFFPRQPCIFGDKMVSIQITLNNTTDRKIENIHIGEKKLPIGMKMHVFNPIDSLEPEGSITVSMGIDFCDSTQTASFQLCTKDDCFNVNIQPPVGELLLPVAMSEKDFKKEQGVLTGMNETSAVIIAAPQNFTPSVIFQKVVNVANVGAVPSGQDNIHRFAAKTVHSGSLMLVTVELKEGSTAQLIINTEKTVIGSVLLRELKPVLSQG

SEQ ID NO: 2500 - protein, 1082 aa, Homo sapiens
  Payload ID: 599;
  Gene Symbol: AP3B2;
  Gene Name: adaptor-related prt complex 3, beta 2 subunit;
  Uniprot ID:  Q13367;
  ENSP ID: ENSP00000261722
MSAAPAYSEDKGGSAGPGEPEYGHDPASGGIFSSDYKRHDDLKEMLDTNKDSLKLEAMKRIVAMIARGKNASDLFPAVVKNVACKNIEVKKLVYVYLVRYAEEQQDLALLSISTFQRGLKDPNQLIRASALRVLSSIRVPIIVPIMMLAIKEAASDMSPYVRKTAAHAIPKLYSLDSDQKDQLIEVIEKLLADKTTLVAGSVVMAFEEVCPERIDLIHKNYRKLCNLLIDVEEWGQVVIISMLTRYARTQFLSPTQNESLLEENAEKAFYGSEEDEAKGAGSEETAAAAAPSRKPYVMDPDHRLLLRNTKPLLQSRSAAVVMAVAQLYFHLAPKAEVGVIAKALVRLLRSHSEVQYVVLQNVATMSIKRRGMFEPYLKSFYIRSTDPTQIKILKLEVLTNLANETNIPTVLREFQTYIRSMDKDFVAATIQAIGRCATNIGRVRDTCLNGLVQLLSNRDELVVAESVVVIKKLLQMQPAQHGEIIKHLAKLTDNIQVPMARASILWLIGEYCEHVPRIAPDVLRKMAKSFTAEEDIVKLQVINLAAKLYLTNSKQTKLLTQYVLSLAKYDQNYDIRDRARFTRQLIVPSEQGGALSRHAKKLFLAPKPAPVLESSFKDRDHFQLGSLSHLLNAKATGYQELPDWPEEAPDPSVRNVEVPEWTKCSNREKRKEKEKPFYSDSEGESGPTESADSDPESESESDSKSSSESGSGESSSESDNEDQDEDEEKGRGSESEQSEEDGKRKTKKKVPERKGEASSSDEGSDSSSSSSESEMTSESEEEQLEPASWSRKTPPSSKSAPATKEISLLDLEDFTPPSVQPVSPPAIVSTSLAADLEGLTLTDSTLVPSLLSPVSGVGRQELLHRVAGEGLAVDYTFSRQPFSGDPHMVSVHIHFSNSSDTPIKGLHVGTPKLPAGISIQEFPEIESLAPGESATAVMGINFCDSTQAANFQLCTQTRQFYVSIQPPVGELMAPVFMSENEFKKEQGKLMGMNEITEKLMLPDTCRSDHIVVQKVTATANLGRVPCGTSDEYRFAGRTLTGGSLVLLTLDARPAGAAQLTVNSEKMVIGTMLVKDVIQALTQ

SEQ ID NO: 2501 - protein, 1050 aa, Homo sapiens
  Payload ID: 599;
  Gene Symbol: AP3B2;
  Gene Name: adaptor-related prt complex 3, beta 2 subunit;
  Uniprot ID:  Q13367;
  ENSP ID: ENSP00000438721
MSAAPAYSEDKGGSAGPGEPEYGHDPASGGIFSSDYKRHDDLKEMLDTNKDSLKLEAMKRIVAMIARGKNASDLFPAVVKNVACKNIEDPNQLIRASALRVLSSIRVPIIVPIMMLAIKEAASDMSPYVRKTAAHAIPKLYSLDSDQKDQLIEVIEKLLADKTTLVAGSVVMAFEEVCPERIDLIHKNYRKLCNLLIDVEEWGQVVIISMLTRYARTQFLSPTQNESLLEENAEKAFYGSEEDEAKGAGSEETAAAAAPSRKPYVMDPDHRLLLRNTKPLLQSRSAAVVMAVAQLYFHLAPKAEVGVIAKALVRLLRSHSEVQYVVLQNVATMSIKRRGMFEPYLKSFYIRSTDPTQIKILKLEVLTNLANETNIPTVLREFQTYIRSMDKDFVAATIQAIGRCATNIGRVRDTCLNGLVQLLSNRDELVVAESVVVIKKLLQMQPAQHGEIIKHLAKLTDNIQVPMARASILWLIGEYCEHVPRIAPDVLRKMAKSFTAEEDIVKLQVINLAAKLYLTNSKQTKLLTQYVLSLAKYDQNYDIRDRARFTRQLIVPSEQGGALSRHAKKLFLAPKPAPVLESSFKDRDHFQLGSLSHLLNAKATGYQELPDWPEEAPDPSVRNVEVPEWTKCSNREKRKEKEKPFYSDSEGESGPTESADSDPESESESDSKSSSESGSGESSSESDNEDQDEDEEKGRGSESEQSEEDGKRKTKKKVPERKGEASSSDEGSDSSSSSSESEMTSESEEEQLEPASWSRKTPPSSKSAPATKEISLLDLEDFTPPSVQPVSPPAIVSTSLAADLEGLTLTDSTLVPSLLSPVSGVGRQELLHRVAGEGLAVDYTFSRQPFSGDPHMVSVHIHFSNSSDTPIKGLHVGTPKLPAGISIQEFPEIESLAPGESATAVMGINFCDSTQAANFQLCTQTRQFYVSIQPPVGELMAPVFMSENEFKKEQGKLMGMNEITEKLMLPDTCRSDHIVVQKVTATANLGRVPCGTSDEYRFAGRTLTGGSLVLLTLDARPAGAAQLTVNSEKMVIGTMLVKDVIQALTQ

SEQ ID NO: 2502 - protein, 141 aa, Homo sapiens
  Payload ID: 599;
  Gene Symbol: AP3B2;
  Gene Name: adaptor-related prt complex 3, beta 2 subunit;
  ENSP ID: ENSP00000440719
MSAAPAYSEDKGGSAGPGEPEYGHDPASGGIFSSDYKRHDDLKEMLDTNKDSLKLEAMKRIVAMIARGKNASDLFPAVVKNVACKNIEVKKLVYVYLVRYAEEQQDLALLSISTFQRGLKEPVVMAASSMNHLSPRRVESL

SEQ ID NO: 2503 - protein, 1101 aa, Homo sapiens
  Payload ID: 599;
  Gene Symbol: AP3B2;
  Gene Name: adaptor-related prt complex 3, beta 2 subunit;
  Uniprot ID:  Q13367;
  ENSP ID: ENSP00000440984
MSAAPAYSEDKGGSAGPGEPEYGHDPASGGIFSSDYKRHDDLKEMLDTNKDSLKLEAMKRIVAMIARGKNASDLFPAVVKNVACKNIEVKKLVYVYLVRYAEEQQDLALLSISTFQRGLKDPNQLIRASALRVLSSIRVPIIVPIMMLAIKEAASDMSPYVRKTAAHAIPKLYSLDSDQKDQLIEVIEKLLADKTTLVAGSVVMAFEEVCPERIDLIHKNYRKLCNLLIDVEEWGQVVIISMLTRYARTQFLSPTQNESLLEENAEKAFYGSEEDEAKGAGSEETAAAAAPSRKPYVMDPDHRLLLRNTKPLLQSRSAAVVMAVAQLYFHLAPKAEVGVIAKALVRLLRSHSEVQYVVLQNVATMSIKRRGMFEPYLKSFYIRSTDPTQIKILKLEVLTNLANETNIPTVLREFQTYIRSMDKDFVAATIQAIGRCATNIGRVRDTCLNGLVQLLSNRDELVVAESVVVIKKLLQMQPAQHGEIIKHLAKLTDNIQVPMARASILWLIGEYCEHVPRIAPDVLRKMAKSFTAEEDIVKLQVINLAAKLYLTNSKQTKLLTQYVLSLAKYDQNYDIRDRARFTRQLIVPSEQGGALSRHAKKLFLAPKPAPVLESSFKDRDHFQLGSLSHLLNAKATGYQELPDWPEEAPDPSVRNVEEEDLSLIETHVGLLGEYTEVPEWTKCSNREKRKEKEKPFYSDSEGESGPTESADSDPESESESDSKSSSESGSGESSSESDNEDQDEDEEKGRGSESEQSEEDGKRKTKKKVPERKGEASSSDEGSDSSSSSSESEMTSESEEEQLEPASWSRKTPPSSKSAPATKEISLLDLEDFTPPSVQPVSPPAIVSTSLAADLEGLTLTDSTLVPSLLSPVSGVGRQELLHRVAGEGLAVDYTFSRQPFSGDPHMVSVHIHFSNSSDTPIKGLHVGTPKLPAGISIQEFPEIESLAPGESATAVMGINFCDSTQAANFQLCTQTRQFYVSIQPPVGELMAPVFMSENEFKKEQGKLMGMNEITEKLMLPDTCRSDHIVVQKVTATANLGRVPCGTSDEYRFAGRTLTGGSLVLLTLDARPAGAAQLTVNSEKMVIGTMLVKDVIQALTQ

SEQ ID NO: 2504 - protein, 193 aa, Homo sapiens
  Payload ID: 599;
  Gene Symbol: AP3B2;
  Gene Name: adaptor-related prt complex 3, beta 2 subunit;
  ENSP ID: ENSP00000441961
MLDTNKDSLKLEAMKRIVAMIARGKNASDLFPAVVKNVACKNIEVKKLVYVYLVRYAEEQQDLALLSISTFQRGLKDPNQLIRASALRVLSSIRVPIIVPIMMLAIKEAASDMSPYVRKTAAHAIPKLYSLDSDQKDQLIEVIEKLLADKTTLVAGSVVMAFEEVCPERIDLIHKNYRKLCNLLIDVEEWGQV

SEQ ID NO: 2505 - protein, 22 aa, Homo sapiens
  Payload ID: 599;
  Gene Symbol: AP3B2;
  Gene Name: adaptor-related prt complex 3, beta 2 subunit;
  ENSP ID: ENSP00000445804
ISLLDLEDCSLLNPSHLHFASS

SEQ ID NO: 2506 - protein, 1082 aa, Homo sapiens; identical to SEQ ID NO: 2500
  Payload ID: 599;
  Gene Symbol: AP3B2;
  Gene Name: adaptor-related prt complex 3, beta 2 subunit;
  Uniprot ID:  Q13367;
  ENSP ID: ENSP00000479229

SEQ ID NO: 2507 - protein, 1153 aa, Homo sapiens
  Payload ID: 600;
  Gene Symbol: AP3D1;
  Gene Name: adaptor-related prt complex 3, delta 1 subunit;
  Uniprot ID:  O14617;
  ENSP ID: ENSP00000344055
MALKMVKGSIDRMFDKNLQDLVRGIRNHKEDEAKYISQCIDEIKQELKQDNIAVKANAVCKLTYLQMLGYDISWAAFNIIEVMSASKFTFKRIGYLAASQSFHEGTDVIMLTTNQIRKDLSSPSQYDTGVALTGLSCFVTPDLARDLANDIMTLMSHTKPYIRKKAVLIMYKVFLKYPESLRPAFPRLKEKLEDPDPGVQSAAVNVICELARRNPKNYLSLAPLFFKLMTSSTNNWVLIKIIKLFGALTPLEPRLGKKLIEPLTNLIHSTSAMSLLYECVNTVIAVLISLSSGMPNHSASIQLCVQKLRILIEDSDQNLKYLGLLAMSKILKTHPKSVQSHKDLILQCLDDKDESIRLRALDLLYGMVSKKNLMEIVKKLMTHVDKAEGTTYRDELLTKIIDICSQSNYQYITNFEWYISILVELTRLEGTRHGHLIAAQMLDVAIRVKAIRKFAVSQMSALLDSAHLLASSTQRNGICEVLYAAAWICGEFSEHLQEPHHTLEAMLRPRVTTLPGHIQAVYVQNVVKLYASILQQKEQAGEAEGAQAVTQLMVDRLPQFVQSADLEVQERASCILQLVKHIQKLQAKDVPVAEEVSALFAGELNPVAPKAQKKVPVPEGLDLDAWINEPLSDSESEDERPRAVFHEEEQRRPKHRPSEADEEELARRREARKQEQANNPFYIKSSPSPQKRYQDTPGVEHIPVVQIDLSVPLKVPGLPMSDQYVKLEEERRHRQKLEKDKRRKKRKEKEKKGKRRHSSLPTESDEDIAPAQQVDIVTEEMPENALPSDEDDKDPNDPYRALDIDLDKPLADSEKLPIQKHRNTETSKSPEKDVPMVEKKSKKPKKKEKKHKEKERDKEKKKEKEKKKSPKPKKKKHRKEKEERTKGKKKSKKQPPGSEEAAGEPVQNGAPEEEQLPPESSYSLLAENSYVKMTCDIRGSLQEDSQVTVAIVLENRSSSILKGMELSVLDSLNARMARPQGSSVHDGVPVPFQLPPGVSNEAQYVFTIQSIVMAQKLKGTLSFIAKNDEGATHEKLDFRLHFSCSSYLITTPCYSDAFAKLLESGDLSMSSIKVDGIRMSFQNLLAKICFHHHFSVVERVDSCASMYSRSIQGHHVCLLVKKGENSVSVDGKCSDSTLLSNLLEEMKATLAKC

SEQ ID NO: 2508 - protein, 1215 aa, Homo sapiens
  Payload ID: 600;
  Gene Symbol: AP3D1;
  Gene Name: adaptor-related prt complex 3, delta 1 subunit;
  Uniprot ID:  O14617;
  ENSP ID: ENSP00000347416
MALKMVKGSIDRMFDKNLQDLVRGIRNHKEDEAKYISQCIDEIKQELKQDNIAVKANAVCKLTYLQMLGYDISWAAFNIIEVMSASKFTFKRIGYLAASQSFHEGTDVIMLTTNQIRKDLSSPSQYDTGVALTGLSCFVTPDLARDLANDIMTLMSHTKPYIRKKAVLIMYKVFLKYPESLRPAFPRLKEKLEDPDPGVQSAAVNVICELARRNPKNYLSLAPLFFKLMTSSTNNWVLIKIIKLFGALTPLEPRLGKKLIEPLTNLIHSTSAMSLLYECVNTVIAVLISLSSGMPNHSASIQLCVQKLRILIEDSDQNLKYLGLLAMSKILKTHPKSVQSHKDLILQCLDDKDESIRLRALDLLYGMVSKKNLMEIVKKLMTHVDKAEGTTYRDELLTKIIDICSQSNYQYITNFEWYISILVELTRLEGTRHGHLIAAQMLDVAIRVKAIRKFAVSQMSALLDSAHLLASSTQRNGICEVLYAAAWICGEFSEHLQEPHHTLEAMLRPRVTTLPGHIQAVYVQNVVKLYASILQQKEQAGEAEGAQAVTQLMVDRLPQFVQSADLEVQERASCILQLVKHIQKLQAKDVPVAEEVSALFAGELNPVAPKAQKKVPVPEGLDLDAWINEPLSDSESEDERPRAVFHEEEQRRPKHRPSEADEEELARRREARKQEQANNPFYIKSSPSPQKRYQDTPGVEHIPVVQIDLSVPLKVPGLPMSDQYVKLEEERRHRQKLEKDKRRKKRKEKEKKGKRRHSSLPTESDEDIAPAQQVDIVTEEMPENALPSDEDDKDPNDPYRALDIDLDKPLADSEKLPIQKHRNTETSKSPEKDVPMVEKKSKKPKKKEKKHKEKERDKEKKKEKEKKAEDLDFWLSTTPPPAPAPAPAPVPSTGELSVNTVTTPKDECEDAKTEAQGEEDDAEGQDQDKKSPKPKKKKHRKEKEERTKGKKKSKKQPPGSEEAAGEPVQNGAPEEEQLPPESSYSLLAENSYVKMTCDIRGSLQEDSQVTVAIVLENRSSSILKGMELSVLDSLNARMARPQGSSVHDGVPVPFQLPPGVSNEAQYVFTIQSIVMAQKLKGTLSFIAKNDEGATHEKLDFRLHFSCSSYLITTPCYSDAFAKLLESGDLSMSSIKVDGIRMSFQNLLAKICFHHHFSVVERVDSCASMYSRSIQGHHVCLLVKKGENSVSVDGKCSDSTLLSNLLEEMKATLAKC

SEQ ID NO: 2509 - protein, 193 aa, Homo sapiens
  Payload ID: 600;
  Gene Symbol: AP3D1;
  Gene Name: adaptor-related prt complex 3, delta 1 subunit;
  ENSP ID: ENSP00000466267
  MOD_RES (1)..(1): Any amino acid
XELSVLDSLNARMARPQGSSVHDGVPVPFQLPPGVSNEAQYVFTIQSIVMAQKLKGTLSFIAKNDEGATHEKLDFRLHFSCSSYLITTPCYSDAFAKLLESGDLSMSSIKVDGIRMSFQNLLAKICFHHHFSGLLKLWPRAAQEGGPCSGGGAAAMQCPGSLTLPALLQLWSEWTPAPPCTAAPSRATMSASW

SEQ ID NO: 2510 - protein, 155 aa, Homo sapiens
  Payload ID: 600;
  Gene Symbol: AP3D1;
  Gene Name: adaptor-related prt complex 3, delta 1 subunit;
  ENSP ID: ENSP00000468449
  MOD_RES (1)..(1): Any amino acid
XGSLQEDSQVTVAIVLENRSSSILKGMELSVLDSLNARMARPQGSSVHDGVPVPFQLPPGVSNEAQYVFTIQSIVMAQKLKGTLSFIAKNDEGATHEKLDFRLHFSCSSYLITTPCYRIFWRRSVFTTIFPLWSEWTPAPPCTAAPSRATMSASW

SEQ ID NO: 2511 - protein, 203 aa, Homo sapiens
  Payload ID: 600;
  Gene Symbol: AP3D1;
  Gene Name: adaptor-related prt complex 3, delta 1 subunit;
  ENSP ID: ENSP00000481961
  MOD_RES (1)..(1): Any amino acid
XLKYPESLRPAFPRLKEKLEDPDPGVQSAAVNVICELARRNPKNYLSLAPLFFKLMTSSTNNWVLIKIIKLFGALTPLEPRLGKKLIEPLTNLIHSAHLAVLRHAQPQRQHPALCSEIKDIDRGLRSELEVPGAAGNVQDPEDPPQVRAVPQGPHPAVPGRQGRVHPAAGPGPALWDGVQEEPDGDREEADDPRRQGRGYHLP

SEQ ID NO: 2512 - protein, 418 aa, Homo sapiens
  Payload ID: 601;
  Gene Symbol: AP3M1;
  Gene Name: adaptor-related prt complex 3, mu 1 subunit;
  Uniprot ID:  Q9Y2T2;
  ENSP ID: ENSP00000347408
MIHSLFLINCSGDIFLEKHWKSVVSQSVCDYFFEAQEKAADVENVPPVISTPHHYLISIYRDKLFFVSVIQTEVPPLFVIEFLHRVADTFQDYFGECSEAAIKDNVVIVYELLEEMLDNGFPLATESNILKELIKPPTILRSVVNSITGSSNVGDTLPTGQLSNIPWRRAGVKYTNNEAYFDVVEEIDAIIDKSGSTVFAEIQGVIDACIKLSGMPDLSLSFMNPRLLDDVSFHPCIRFKRWESERVLSFIPPDGNFRLISYRVSSQNLVAIPVYVKHSISFKENSSCGRFDITIGPKQNMGKTIEGITVTVHMPKVVLNMNLTPTQGSYTFDPVTKVLTWDVGKITPQKLPSLKGLVNLQSGAPKPEENPSLNIQFKIQQLAISGLKVNRLDMYGEKYKPFKGVKYVTKAGKFQVRT

SEQ ID NO: 2513 - protein, 418 aa, Homo sapiens; identical to SEQ ID NO: 2512
  Payload ID: 601;
  Gene Symbol: AP3M1;
  Gene Name: adaptor-related prt complex 3, mu 1 subunit;
  Uniprot ID:  Q9Y2T2;
  ENSP ID: ENSP00000361831

SEQ ID NO: 2514 - protein, 418 aa, Homo sapiens
  Payload ID: 602;
  Gene Symbol: AP3M2;
  Gene Name: adaptor-related prt complex 3, mu 2 subunit;
  Uniprot ID:  P53677;
  ENSP ID: ENSP00000174653
MIHSLFLINSSGDIFLEKHWKSVVSRSVCDYFFEAQERATEAENVPPVIPTPHHYLLSVYRHKIFFVAVIQTEVPPLFVIEFLHRVVDTFQDYFGVCSEPVIKDNVVVVYEVLEEMLDNGFPLATESNILKELIKPPTILRTVVNTITGSTNVGDQLPTGQLSVVPWRRTGVKYTNNEAYFDVIEEIDAIIDKSGSTITAEIQGVIDACVKLTGMPDLTLSFMNPRLLDDVSFHPCVRFKRWESERILSFIPPDGNFRLLSYHVSAQNLVAIPVYVKHNISFRDSSSLGRFEITVGPKQTMGKTIEGVTVTSQMPKGVLNMSLTPSQGTHTFDPVTKMLSWDVGKINPQKLPSLKGTMSLQAGASKPDENPTINLQFKIQQLAISGLKVNRLDMYGEKYKPFKGIKYMTKAGKFQVRT

SEQ ID NO: 2515 - protein, 418 aa, Homo sapiens; identical to SEQ ID NO: 2514
  Payload ID: 602;
  Gene Symbol: AP3M2;
  Gene Name: adaptor-related prt complex 3, mu 2 subunit;
  Uniprot ID:  P53677;
  ENSP ID: ENSP00000380132

SEQ ID NO: 2516 - protein, 97 aa, Homo sapiens
  Payload ID: 602;
  Gene Symbol: AP3M2;
  Gene Name: adaptor-related prt complex 3, mu 2 subunit;
  ENSP ID: ENSP00000428279
  MOD_RES (1)..(1): Any amino acid
XTSQMPKGVLNMSLTPSQGTHTFDPVTKMLSWDVGKINPQKLPSLKGTMSLQAGASKPDENPTINLQFKIQQLAISEDFHVCSYFYFGTTGPFQDSR

SEQ ID NO: 2517 - protein, 418 aa, Homo sapiens; identical to SEQ ID NO: 2514
  Payload ID: 602;
  Gene Symbol: AP3M2;
  Gene Name: adaptor-related prt complex 3, mu 2 subunit;
  Uniprot ID:  P53677;
  ENSP ID: ENSP00000428787

SEQ ID NO: 2518 - protein, 131 aa, Homo sapiens
  Payload ID: 602;
  Gene Symbol: AP3M2;
  Gene Name: adaptor-related prt complex 3, mu 2 subunit;
  ENSP ID: ENSP00000429037
DYFGVCSEPVIKDNVVVVYEVLEEMLDNGFPLATESNILKELIKPPTILRTVVNTITGSTITAEIQGVIDACVKLTGMPDLTLSFMNPRLLDDVSFHPCVRFKRWESERILSFIPPDGNFRLLSYHVSAQK

SEQ ID NO: 2519 - protein, 268 aa, Homo sapiens
  Payload ID: 602;
  Gene Symbol: AP3M2;
  Gene Name: adaptor-related prt complex 3, mu 2 subunit;
  ENSP ID: ENSP00000429435
MIHSLFLINSSGDIFLEKHWKSVVSRSVCDYFFEAQERATEAENVPPVIPTPHHYLLSVYRHKIFFVAVIQTEVPPLFVIEFLHRVVDTFQDYFGVCSEPVIKDNVVVVYEVLEEMLDNGFPLATESNILKELIKPPTILRTVVNTITGSTNVGDQLPTGQLSVVPWRRTGVKYTNNEAYFDVIEEIDAIIDKSGSTITAEIQGVIDACVKLTGMPDLTLSFMNPRLLDDVSFHPCVRFKRWESERILSFIPPDGNFRLLSYHVSAQK

SEQ ID NO: 2520 - protein, 139 aa, Homo sapiens
  Payload ID: 602;
  Gene Symbol: AP3M2;
  Gene Name: adaptor-related prt complex 3, mu 2 subunit;
  ENSP ID: ENSP00000429515
MIHSLFLINSSGDIFLEKHWKSVVSRSVCDYFFEAQERATEAENVPPVIPTPHHYLLSVYRHKIFFVAVIQTEVPPLFVIEFLHRVVDTFQDYFGVCSEPVIKDNVVVVYEVLEEMLDNGFPLATESNILKELIKPPTI

SEQ ID NO: 2521 - protein, 48 aa, Homo sapiens
  Payload ID: 602;
  Gene Symbol: AP3M2;
  Gene Name: adaptor-related prt complex 3, mu 2 subunit;
  ENSP ID: ENSP00000429804
PTINLQFKIQQLAISGLKVNRLDMYGEKYKPFKGIKYMTKAGKFQVRT

SEQ ID NO: 2522 - protein, 109 aa, Homo sapiens
  Payload ID: 602;
  Gene Symbol: AP3M2;
  Gene Name: adaptor-related prt complex 3, mu 2 subunit;
  ENSP ID: ENSP00000430200
MIHSLFLINSSGDIFLEKHWKSVVSRSVCDYFFEAQERATEAENVPPVIPTPHHYLLSVYRHKIFFVAVIQTEVPPLFVIEFLHRVVDTFQYYCSGISVLMQHTGPFAQ

SEQ ID NO: 2523 - protein, 10 aa, Homo sapiens
  Payload ID: 602;
  Gene Symbol: AP3M2;
  Gene Name: adaptor-related prt complex 3, mu 2 subunit;
  ENSP ID: ENSP00000430538
MIHSLFLINS

SEQ ID NO: 2524 - protein, 287 aa, Homo sapiens
  Payload ID: 602;
  Gene Symbol: AP3M2;
  Gene Name: adaptor-related prt complex 3, mu 2 subunit;
  ENSP ID: ENSP00000430616
MLDNGFPLATESNILKELIKPPTILRTVVNTITGSTNVGDQLPTGQLSVVPWRRTGVKYTNNEAYFDVIEEIDAIIDKSGSTITAEIQGVIDACVKLTGMPDLTLSFMNPRLLDDVSFHPCVRFKRWESERILSFIPPDGNFRLLSYHVSAQNLVAIPVYVKHNISFRDSSSLGRFEITVGPKQTMGKTIEGVTVTSQMPKGVLNMSLTPSQGTHTFDPVTKMLSWDVGKINPQKLPSLKGTMSLQAGASKPDENPTINLQFKIQQLAISGLKVNRLDMYGEKYKPF

SEQ ID NO: 2525 - protein, 273 aa, Homo sapiens
  Payload ID: 602;
  Gene Symbol: AP3M2;
  Gene Name: adaptor-related prt complex 3, mu 2 subunit;
  Uniprot ID:  P53677;
  ENSP ID: ENSP00000431918
MIHSLFLINSSGDIFLEKHWKSVVSRSVCDYFFEAQERATEAENVPPVIPTPHHYLLSVYRHKIFFVAVIQTEVPPLFVIEFLHRVVDTFQDYFGVCSEPVIKDNVVVVYEVLEEMLDNGFPLATESNILKELIKPPTILRTVVNTITGSTNVGDQLPTGQLSVVPWRRTGVKYTNNEAYFDVIEEIDAIIDKSGSTITAEIQGVIDACVKLTGMPDLTLSFMNPRLLDDVSFHPCVRFKRWESERILSFIPPDGNFRLLSYHVSAQKCCLGM

SEQ ID NO: 2526 - protein, 193 aa, Homo sapiens
  Payload ID: 603;
  Gene Symbol: AP3S1;
  Gene Name: adaptor-related prt complex 3, sigma 1 subunit;
  Uniprot ID:  Q92572;
  ENSP ID: ENSP00000325369
MIKAILIFNNHGKPRLSKFYQPYSEDTQQQIIRETFHLVSKRDENVCNFLEGGLLIGGSDNKLIYRHYATLYFVFCVDSSESELGILDLIQVFVETLDKCFENVCELDLIFHVDKVHNILAEMVMGGMVLETNMNEIVTQIDAQNKLEKSEAGLAGAPARAVSAVKNMNLPEIPRNINIGDISIKVPNLPSFK

SEQ ID NO: 2527 - protein, 162 aa, Homo sapiens
  Payload ID: 603;
  Gene Symbol: AP3S1;
  Gene Name: adaptor-related prt complex 3, sigma 1 subunit;
  ENSP ID: ENSP00000446179
MIKAILIFNNHGKPRLSKFYQPYSEDTQQQIIRETFHLVSKRDENVCNFLEGGLLIGGSDNKLIYRHYATLYFVFCVDSSESELGILDLIQVFVETLDKCFENVCELDLIFHVDKVHNILAEMVMGGMVLETNMNEIVTQIDAQNKLEKSETFIFQSPRQDR

SEQ ID NO: 2528 - protein, 193 aa, Homo sapiens
  Payload ID: 604;
  Gene Symbol: AP3S2;
  Gene Name: adaptor-related prt complex 3, sigma 2 subunit;
  Uniprot ID:  P59780;
  ENSP ID: ENSP00000338777
MIQAILVFNNHGKPRLVRFYQRFPEEIQQQIVRETFHLVLKRDDNICNFLEGGSLIGGSDYKLIYRHYATLYFVFCVDSSESELGILDLIQVFVETLDKCFENVCELDLIFHMDKVHYILQEVVMGGMVLETNMNEIVAQIEAQNRLEKSEGGLSAAPARAVSAVKNINLPEIPRNINIGDLNIKVPNLSQFV

SEQ ID NO: 2529 - protein, 124 aa, Homo sapiens
  Payload ID: 604;
  Gene Symbol: AP3S2;
  Gene Name: adaptor-related prt complex 3, sigma 2 subunit;
  Uniprot ID:  P59780;
  ENSP ID: ENSP00000394170
MIQAILVFNNHGKPRLVRFYQRFPEEIQQQIVRETFHLVLKRDDNICNFLEGGSLIGGSDYKLIYRHYATLYFVFCVDSSESELGILDLIQLKKRERKKSQCNTLQTGTLALWEQGPDIRTRRL

SEQ ID NO: 2530 - protein, 44 aa, Homo sapiens
  Payload ID: 604;
  Gene Symbol: AP3S2;
  Gene Name: adaptor-related prt complex 3, sigma 2 subunit;
  ENSP ID: ENSP00000452862
MIQAILVFNNHGKPRLVRFYQRFVTRRNSTADCSRDFPSSPQAG

SEQ ID NO: 2531 - protein, 205 aa, Homo sapiens
  Payload ID: 604;
  Gene Symbol: AP3S2;
  Gene Name: adaptor-related prt complex 3, sigma 2 subunit;
  ENSP ID: ENSP00000453223
MIQAILVFNNHGKPRLVRFYQRFPEEIQQQIVRETFHLVLKRDDNICNFLEGGSLIGGSDYKLIYRHYATLYFVFCVDSSESELGILDLIQVHLEVVFFIAPKVFVETLDKCFENVCELDLIFHMDKVHYILQEVVMGGMVLETNMNEIVAQIEAQNRLEKSEGGLSAAPARAVSAVKNINLPEIPRNINIGDLNIKVPNLSQFV

SEQ ID NO: 2532 - protein, 124 aa, Homo sapiens; identical to SEQ ID NO: 2529
  Payload ID: 604;
  Gene Symbol: AP3S2;
  Gene Name: adaptor-related prt complex 3, sigma 2 subunit;
  Uniprot ID:  P59780;
  ENSP ID: ENSP00000453288

SEQ ID NO: 2533 - protein, 136 aa, Homo sapiens
  Payload ID: 604;
  Gene Symbol: AP3S2;
  Gene Name: adaptor-related prt complex 3, sigma 2 subunit;
  ENSP ID: ENSP00000453380
MIQAILVFNNHGKPRLVRFYQRFPEEIQQQIVRETFHLVLKRDDNICNFLEGGSLIGGSDYKLIYRHYATLYFVFCVDSSESELGILDLIQVHLEVVFFIAPKLKKRERKKSQCNTLQTGTLALWEQGPDIRTRRL

SEQ ID NO: 2534 - protein, 156 aa, Homo sapiens
  Payload ID: 604;
  Gene Symbol: AP3S2;
  Gene Name: adaptor-related prt complex 3, sigma 2 subunit;
  ENSP ID: ENSP00000453852
MIQAILVFNNHGKPRLVRFYQRFPEEIQQQIVRETFHLVLKRDDNICNFLEGGSLIGGSDYKLIYRHYATLYFVFCVDSSESELGILDLIQVFVETLDKCFENVCELDLIFHMDKVHYILQEVVMGGMVLETNMNEIVAQIEAQNRLEKSEDQVLA

SEQ ID NO: 2535 - protein, 36 aa, Homo sapiens
  Payload ID: 604;
  Gene Symbol: AP3S2;
  Gene Name: adaptor-related prt complex 3, sigma 2 subunit;
  ENSP ID: ENSP00000454027
MIQAILVFNNHGKPRLVRFYQRFKKFNSRLFERLSI

SEQ ID NO: 2536 - protein, 63 aa, Homo sapiens
  Payload ID: 604;
  Gene Symbol: AP3S2;
  Gene Name: adaptor-related prt complex 3, sigma 2 subunit;
  ENSP ID: ENSP00000481434
MIQAILVFNNHGKPRLVRFYQRFVSAARLHHAPSGRPLCLPSSLASRRPGAPLFGHLGLLHRA

SEQ ID NO: 2537 - protein, 739 aa, Homo sapiens
  Payload ID: 605;
  Gene Symbol: AP4B1;
  Gene Name: adaptor-related prt complex 4, beta 1 subunit;
  Uniprot ID:  Q9Y6B7;
  ENSP ID: ENSP00000256658
MPYLGSEDVVKELKKALCNPHIQADRLRYRNVIQRVIRYMTQGLDMSGVFMEMVKASATVDIVQKKLVYLYMCTYAPLKPDLALLAINTLCKDCSDPNPMVRGLALRSMCSLRMPGVQEYIQQPILNGLRDKASYVRRVAVLGCAKMHNLHGDSEVDGALVNELYSLLRDQDPIVVVNCLRSLEEILKQEGGVVINKPIAHHLLNRMSKLDQWGQAEVLNFLLRYQPRSEEELFDILNLLDSFLKSSSPGVVMGATKLFLILAKMFPHVQTDVLVRVKGPLLAACSSESRELCFVALCHVRQILHSLPGHFSSHYKKFFCSYSEPHYIKLQKVEVLCELVNDENVQQVLEELRGYCTDVSADFAQAAIFAIGGIARTYTDQCVQILTELLGLRQEHITTVVVQTFRDLVWLCPQCTEAVCQALPGCEENIQDSEGKQALIWLLGVHGERIPNAPYVLEDFVENVKSETFPAVKMELLTALLRLFLSRPAECQDMLGRLLYYCIEEEKDMAVRDRGLFYYRLLLVGIDEVKRILCSPKSDPTLGLLEDPAERPVNSWASDFNTLVPVYGKAHWATISKCQGAERCDPELPKTSSFAASGPLIPEENKERVQELPDSGALMLVPNRQLTADYFEKTWLSLKVAHQQVLPWRGEFHPDTLQMALQVVNIQTIAMSRAGSRPWKAYLSAQDDTGCLFLTELLLEPGNSEMQISVKQNEARTETLNSFISVLETVIGTIEEIKS

SEQ ID NO: 2538 - protein, 296 aa, Homo sapiens
  Payload ID: 605;
  Gene Symbol: AP4B1;
  Gene Name: adaptor-related prt complex 4, beta 1 subunit;
  ENSP ID: ENSP00000358577
MPYLGSEDVVKELKKALCNPHIQADRLRYRNVIQRVIRMPGVQEYIQQPILNGLRDKASYVRRVAVLGCAKMHNLHGDSEVDGALVNELYSLLRDQDPIVVVNCLRSLEEILKQEGGVVINKPIAHHLLNRMSKLDQWGQAEVLNFLLRYQPRSEEELFDILNLLDSFLKSSSPGVVMGATKLFLILAKMFPHVQTDVLVRVKGPLLAACSSESRELCFVALCHVRQILHSLPGHFSSHYKKFFCSYSEPHYIKLQKVEVLCELVNDENVQQVLEELRGYCTDVSADFAQAAIFAI

SEQ ID NO: 2539 - protein, 571 aa, Homo sapiens
  Payload ID: 605;
  Gene Symbol: AP4B1;
  Gene Name: adaptor-related prt complex 4, beta 1 subunit;
  ENSP ID: ENSP00000358580
MPYLGSEDVVKELKKALCNPHIQADRLRYRNVIQRVIRMSKLDQWGQAEVLNFLLRYQPRSEEELFDILNLLDSFLKSSSPGVVMGATKLFLILAKMFPHVQTDVLVRVKGPLLAACSSESRELCFVALCHVRQILHSLPGHFSSHYKKFFCSYSEPHYIKLQKVEVLCELVNDENVQQVLEELRGYCTDVSADFAQAAIFAIGGIARTYTDQCVQILTELLGLRQEHITTVVVQTFRDLVWLCPQCTEAVCQALPGCEENIQDSEGKQALIWLLGVHGERIPNAPYVLEDFVENVKSETFPAVKMELLTALLRLFLSRPAECQDMLGRLLYYCIEEEKDMAVRDRGLFYYRLLLVGIDEVKRILCSPKSDPTLGLLEDPAERPVNSWASDFNTLVPVYGKAHWATISKCQGAERCDPELPKTSSFAASGPLIPEENKERVQELPDSGALMLVPNRQLTADYFEKTWLSLKVAHQQVLPWRGEFHPDTLQMALQVVNIQTIAMSRAGSRPWKAYLSAQDDTGCLFLTELLLEPGNSEMQISVKQNEARTETLNSFISVLETVIGTIEEIKS

SEQ ID NO: 2540 - protein, 739 aa, Homo sapiens; identical to SEQ ID NO: 2537
  Payload ID: 605;
  Gene Symbol: AP4B1;
  Gene Name: adaptor-related prt complex 4, beta 1 subunit;
  Uniprot ID:  Q9Y6B7;
  ENSP ID: ENSP00000358582

SEQ ID NO: 2541 - protein, 262 aa, Homo sapiens
  Payload ID: 605;
  Gene Symbol: AP4B1;
  Gene Name: adaptor-related prt complex 4, beta 1 subunit;
  ENSP ID: ENSP00000358584
MPYLGSEDVVKELKKALCNPHIQADRLRYRNVIQRVIRYMTQGLDMSGVFMEMVKASATVDIVQKKLVYLYMCTYAPLKPDLALLAINTLCKDCSDPNPMVRGLALRSMCSLRMPGVQEYIQQPILNGLRDKASYVRRVAVLGCAKMHNLHGDSEVDGALVNELYSLLRDQDPIVVVNCLRSLEEILKQEGGVVINKPIAHHLLNRMSKLDQWGQAEVLNFLLRYQPRSEEELFDILNLLDSFLKSSSPGVVMGATKLFLIL

SEQ ID NO: 2542 - protein, 175 aa, Homo sapiens
  Payload ID: 605;
  Gene Symbol: AP4B1;
  Gene Name: adaptor-related prt complex 4, beta 1 subunit;
  ENSP ID: ENSP00000393622
MPYLGSEDVVKELKKALCNPHIQADRLRYRNVIQRVIRMSKLDQWGQAEVLNFLLRYQPRSEEELFDILNLLDSFLKSSSPGVVMGATKLFLILAKMFPHVQTDVLVRVKGPLLAACSSESRELCFVALCHVRQILHSLPGHFSSHYKKFFCSYSEPHYIKLQKVEVLCELVNDE

SEQ ID NO: 2543 - protein, 1137 aa, Homo sapiens
  Payload ID: 606;
  Gene Symbol: AP4E1;
  Gene Name: adaptor-related prt complex 4, epsilon 1 subunit;
  Uniprot ID:  Q9UPM8;
  ENSP ID: ENSP00000261842
MSDIVEKTLTALPGLFLQNQPGGGPAAAKASFSSRLGSLVRGITALTSKHEEEKLIQQELSSLKATVSAPTTTLKMMKECMVRLIYCEMLGYDASFGYIHAIKLAQQGNLLEKRVGYLAVSLFLHESHELLLLLVNTVVKDLQSTNLVEVCMALTVVSQIFPCEMIPAVLPLIEDKLQHSKEIVRRKAVLALYKFHLIAPNQVQHIHIKFRKALCDRDVGVMAASLHIYLRMIKENSSGYKDLTGSFVTILKQVVGGKLPVEFNYHSVPAPWLQIQLLRILGLLGKDDQRTSELMYDVLDESLRRAELNHNVTYAILFECVHTVYSIYPKSELLEKAAKCIGKFVLSPKINLKYLGLKALTYVIQQDPTLALQHQMTIIECLDHPDPIIKRETLELLYRITNAQNITVIVQKMLEYLHQSKEEYVIVNLVGKIAELAEKYAPDNAWFIQTMNAVFSVGGDVMHPDIPNNFLRLLAEGFDDETEDQQLRLYAVQSYLTLLDMENVFYPQRFLQVMSWVLGEYSYLLDKETPEEVIAKLYKLLMNDSVSSETKAWLIAAVTKLTSQAHSSNTVERLIHEFTISLDTCMRQHAFELKHLHENVELMKSLLPVDRSCEDLVVDASLSFLDGFVAEGLSQGAAPYKPPHQRQEEKLSQEKVLNFEPYGLSFSSSGFTGRQSPAGISLGSDVSGNSAETGLKETNSLKLEGIKKLWGKEGYLPKKESKTGDESGALPVPQESIMENVDQAITKKDQSQVLTQSKEEKEKQLLASSLFVGLGSESTINLLGKADTVSHKFRRKSKVKEAKSGETTSTHNMTCSSFSSLSNVAYEDDYYSNTLHDTGDKELKKFSLTSELLDSESLTELPLVEKFSYCSLSTPSLFANNNMEIFHPPQSTAASVAKESSLASSFLEETTEYIHSNAMEVCNNETISVSSYKIWKDDCLLMVWSVTNKSGLELKSADLEIFPAENFKVTEQPGCCLPVMEAESTKSFQYSVQIEKPFTEGNLTGFISYHMMDTHSAQLEFSVNLSLLDFIRPLKISSDDFGKLWLSFANDVKQNVKMSESQAALPSALKTLQQKLRLHIIEIIGNEGLLACQLLPSIPCLLHCRVHADVLALWFRSSCSTLPDYLLYQCQKVMEGS

SEQ ID NO: 2544 - protein, 218 aa, Homo sapiens
  Payload ID: 606;
  Gene Symbol: AP4E1;
  Gene Name: adaptor-related prt complex 4, epsilon 1 subunit;
  ENSP ID: ENSP00000452711
MMKECMVRLIYCEMLGYDASFGYIHAIKLAQQGNLLEKRVGYLAVSLFLHESHELLLLLVNTVVKDLQSTNLVEVCMALTVVSQIFPCEMIPAVLPLIEDKLQHSKEIVRRKAVLALYKFHLIAPNQVQHIHIKFRKALCDRDVGVMAASLHIYLRMIKENSSGYKDLTGSFVTILKQVVGGKLPVEFNYHSVPAPWLQIQLLRILGLLGKDDQSYFV

SEQ ID NO: 2545 - protein, 321 aa, Homo sapiens
  Payload ID: 606;
  Gene Symbol: AP4E1;
  Gene Name: adaptor-related prt complex 4, epsilon 1 subunit;
  ENSP ID: ENSP00000452712
MSDIVEKTLTALPGLFLQNQPGGGPAAAKASFSSRLGSLVRGITALTSKHEEEKLIQQELSSLKATVSAPTTTLKMMKECMVRLIYCEMLGYDASFGYIHAIKLAQQGNLLEKRVGYLAVSLFLHESHELLLLLVNTVVKDLQSTNLVEVCMALTVVSQIFPCEMIPAVLPLIEDKLQHSKEIVRRKAVLALYKFHLIAPNQVQHIHIKFRKALCDRDVGVMAASLHIYLRMIKENSSGYKDLTGSFVTILKQVVGGKLPVEFNYHSVPAPWLQIQLLRILGLLGKDDQRSSVLKRSLKNCFIGLEYYNSTANKISFKQDK

SEQ ID NO: 2546 - protein, 1062 aa, Homo sapiens
  Payload ID: 606;
  Gene Symbol: AP4E1;
  Gene Name: adaptor-related prt complex 4, epsilon 1 subunit;
  Uniprot ID:  Q9UPM8;
  ENSP ID: ENSP00000452976
MMKECMVRLIYCEMLGYDASFGYIHAIKLAQQGNLLEKRVGYLAVSLFLHESHELLLLLVNTVVKDLQSTNLVEVCMALTVVSQIFPCEMIPAVLPLIEDKLQHSKEIVRRKAVLALYKFHLIAPNQVQHIHIKFRKALCDRDVGVMAASLHIYLRMIKENSSGYKDLTGSFVTILKQVVGGKLPVEFNYHSVPAPWLQIQLLRILGLLGKDDQRTSELMYDVLDESLRRAELNHNVTYAILFECVHTVYSIYPKSELLEKAAKCIGKFVLSPKINLKYLGLKALTYVIQQDPTLALQHQMTIIECLDHPDPIIKRETLELLYRITNAQNITVIVQKMLEYLHQSKEEYVIVNLVGKIAELAEKYAPDNAWFIQTMNAVFSVGGDVMHPDIPNNFLRLLAEGFDDETEDQQLRLYAVQSYLTLLDMENVFYPQRFLQVMSWVLGEYSYLLDKETPEEVIAKLYKLLMNDSVSSETKAWLIAAVTKLTSQAHSSNTVERLIHEFTISLDTCMRQHAFELKHLHENVELMKSLLPVDRSCEDLVVDASLSFLDGFVAEGLSQGAAPYKPPHQRQEEKLSQEKVLNFEPYGLSFSSSGFTGRQSPAGISLGSDVSGNSAETGLKETNSLKLEGIKKLWGKEGYLPKKESKTGDESGALPVPQESIMENVDQAITKKDQSQVLTQSKEEKEKQLLASSLFVGLGSESTINLLGKADTVSHKFRRKSKVKEAKSGETTSTHNMTCSSFSSLSNVAYEDDYYSNTLHDTGDKELKKFSLTSELLDSESLTELPLVEKFSYCSLSTPSLFANNNMEIFHPPQSTAASVAKESSLASSFLEETTEYIHSNAMEVCNNETISVSSYKIWKDDCLLMVWSVTNKSGLELKSADLEIFPAENFKVTEQPGCCLPVMEAESTKSFQYSVQIEKPFTEGNLTGFISYHMMDTHSAQLEFSVNLSLLDFIRPLKISSDDFGKLWLSFANDVKQNVKMSESQAALPSALKTLQQKLRLHIIEIIGNEGLLACQLLPSIPCLLHCRVHADVLALWFRSSCSTLPDYLLYQCQKVMEGS

SEQ ID NO: 2547 - protein, 368 aa, Homo sapiens
  Payload ID: 606;
  Gene Symbol: AP4E1;
  Gene Name: adaptor-related prt complex 4, epsilon 1 subunit;
  ENSP ID: ENSP00000453112
MSDIVEKTLTALPGLFLQNQPGGGPAAAKASFSSRLGSLVRGITALTSKHEEEKLIQQELSSLKATVSAPTTTLKMMKECMVRLIYCEMLGYDASFGYIHAIKLAQQGNLLEKRVGYLAVSLFLHESHELLLLLVNTVVKDLQSTNLVEVCMALTVVSQIFPCEMIPAVLPLIEDKLQHSKEIVRRKAVLALYKFHLIAPNQVQHIHIKFRKALCDRDVGVMAASLHIYLRMIKENSSGYKDLTGSFVTILKQVVGGKLPVEFNYHSVPAPWLQIQLLRILGLLGKDDQRTSELMYDVLDESLRRAELNHNVTYAILFECVHTVYSIYPKSELLEKAAKCIGKFVLSPKINLKYLGSYSGSSTPDDNN

SEQ ID NO: 2548 - protein, 453 aa, Homo sapiens
  Payload ID: 607;
  Gene Symbol: AP4M1;
  Gene Name: adaptor-related prt complex 4, mu 1 subunit;
  Uniprot ID:  O00189;
  ENSP ID: ENSP00000352603
MISQFFILSSKGDPLIYKDFRGDSGGRDVAELFYRKLTGLPGDESPVVMHHHGRHFIHIRHSGLYLVVTTSENVSPFSLLELLSRLATLLGDYCGSLGEGTISRNVALVYELLDEVLDYGYVQTTSTEMLRNFIQTEAVVSKPFSLFDLSSVGLFGAETQQSKVAPSSAASRPVLSSRSDQSQKNEVFLDVVERLSVLIASNGSLLKVDVQGEIRLKSFLPSGSEMRIGLTEEFCVGKSELRGYGPGIRVDEVSFHSSVNLDEFESHRILRLQPPQGELTVMRYQLSDDLPSPLPFRLFPSVQWDRGSGRLQVYLKLRCDLLSKSQALNVRLHLPLPRGVVSLSQELSSPEQKAELAEGALRWDLPRVQGGSQLSGLFQMDVPGPPGPPSHGLSTSASPLGLGPASLSFELPRHTCSGLQVRFLRLAFRPCGNANPHKWVRHLSHSDAYVIRI

SEQ ID NO: 2549 - protein, 64 aa, Homo sapiens
  Payload ID: 607;
  Gene Symbol: AP4M1;
  Gene Name: adaptor-related prt complex 4, mu 1 subunit;
  ENSP ID: ENSP00000377625
MISQFFILSSKGDPLIYKDFRGDSGGRDVAELFYRKLTGLPGDESPVVMLGVVAGACNPIYSGS

SEQ ID NO: 2550 - protein, 160 aa, Homo sapiens
  Payload ID: 607;
  Gene Symbol: AP4M1;
  Gene Name: adaptor-related prt complex 4, mu 1 subunit;
  ENSP ID: ENSP00000391585
RVDEVSFHSSVNLDEFESHRILRLQPPQGELTVMRYQLSDDLPSPLPFRLFPSVQWDRGSGRLQVYLKLRCDLLSKSQALNVRLHLPLPRGVVSLSQELSSPEQKAELAEGALRWDLPRVQGGSQLSGLFQRPNIVSQLSQACDGAITSRPGRLLVHPAL

SEQ ID NO: 2551 - protein, 138 aa, Homo sapiens
  Payload ID: 607;
  Gene Symbol: AP4M1;
  Gene Name: adaptor-related prt complex 4, mu 1 subunit;
  ENSP ID: ENSP00000393723
  MOD_RES (1)..(1): Any amino acid
XQGELTVMRYQLSDDLPSPLPFRLFPSVQWDRGSGRLQVYLKLRCDLLSKSQALNVRLHLPLPRGVVSLSQELSSPEQKAELAEGALRWDLPRVQGGSQLSGLFQVRFLRLAFRPCGNANPHKWVRHLSHSDAYVIRI

SEQ ID NO: 2552 - protein, 218 aa, Homo sapiens
  Payload ID: 607;
  Gene Symbol: AP4M1;
  Gene Name: adaptor-related prt complex 4, mu 1 subunit;
  ENSP ID: ENSP00000396928
MISQFFILSSKGDPLIYKDFRGDSGGRDVAELFYRKLTGLPGDESPVVMHHHGRHFIHIRHSGLYLVVTTSENVSPFSLLELLSRLATLLGDYCGSLGEGTISRNVALVYELLDEVLDYGYVQTTSTEMLRNFIQTEAVVSKPFSLFDLSSVGLFGAETQQSKVAPSSAASRPVLSSRSDQSQKNEVFLDVVERLSVLIASNVMGQESGSMKSRFTAL

SEQ ID NO: 2553 - protein, 97 aa, Homo sapiens
  Payload ID: 607;
  Gene Symbol: AP4M1;
  Gene Name: adaptor-related prt complex 4, mu 1 subunit;
  ENSP ID: ENSP00000400598
MISQFFILSSKGDPLIYKDFRGDSGGRDVAELFYRKLTGLPGDESPVVMHHHGRHFIHIRHSGLYLVVTTSENVSPFSLLELLSRTMAMYRPHPRRC

SEQ ID NO: 2554 - protein, 311 aa, Homo sapiens
  Payload ID: 607;
  Gene Symbol: AP4M1;
  Gene Name: adaptor-related prt complex 4, mu 1 subunit;
  ENSP ID: ENSP00000401613
MISQFFILSSKGDPLIYKDFRGDSGGRDVAELFYRKLTGLPGDESPVVMDYGYVQTTSTEMLRNFIQTEAVVSKPFSLFDLSSVGLFGAETQQSKVAPSSAASRPVLSSRSDQSQKNEVFLDVVERLSVLIASNGSLLKVDVQGEIRLKSFLPSGSEMRIGLTEEFCVGKSELRGYGPGIRVDEVSFHSSVNLDEFESHRILRLQPPQGELTVMRYQLSDDLPSPLPFRLFPSVQWDRGSGRLQVYLKLRCDLLSKSQALNVRLHLPLPRGVVSLSQELSSPEQKAELAEGALRWDLPRVQGGSQLSGLFQ

SEQ ID NO: 2555 - protein, 460 aa, Homo sapiens
  Payload ID: 607;
  Gene Symbol: AP4M1;
  Gene Name: adaptor-related prt complex 4, mu 1 subunit;
  ENSP ID: ENSP00000403663
MISQFFILSSKGDPLIYKDFRGDSGGRDVAELFYRKLTGLPGDESPVVMVTSGGRRHHHGRHFIHIRHSGLYLVVTTSENVSPFSLLELLSRLATLLGDYCGSLGEGTISRNVALVYELLDEVLDYGYVQTTSTEMLRNFIQTEAVVSKPFSLFDLSSVGLFGAETQQSKVAPSSAASRPVLSSRSDQSQKNEVFLDVVERLSVLIASNGSLLKVDVQGEIRLKSFLPSGSEMRIGLTEEFCVGKSELRGYGPGIRVDEVSFHSSVNLDEFESHRILRLQPPQGELTVMRYQLSDDLPSPLPFRLFPSVQWDRGSGRLQVYLKLRCDLLSKSQALNVRLHLPLPRGVVSLSQELSSPEQKAELAEGALRWDLPRVQGGSQLSGLFQMDVPGPPGPPSHGLSTSASPLGLGPASLSFELPRHTCSGLQVRFLRLAFRPCGNANPHKWVRHLSHSDAYVIRI

SEQ ID NO: 2556 - protein, 193 aa, Homo sapiens
  Payload ID: 607;
  Gene Symbol: AP4M1;
  Gene Name: adaptor-related prt complex 4, mu 1 subunit;
  ENSP ID: ENSP00000406106
  MOD_RES (1)..(1): Any amino acid
XFHPPVRGDSGGRDVAELFYRKLTGLPGDESPVVMHHHGRHFIHIRHSGLYLVVTTSENVSPFSLLELLSRLATLLGDYCGSLGEGTISRNVALVYELLDEVLDYGYVQTTSTEMLRNFIQTEAVVSKPFSLFDLSSVGLFGAETQQSKVAPSSAASRPVLSSRSDQSQKNEVFLDVVERLSVLIASNRCALA

SEQ ID NO: 2557 - protein, 325 aa, Homo sapiens
  Payload ID: 607;
  Gene Symbol: AP4M1;
  Gene Name: adaptor-related prt complex 4, mu 1 subunit;
  ENSP ID: ENSP00000406676
MLRNFIQTEAVVSKPFSLFDLSSVGLFGAETQQSKVAPSSAASRPVLSSRSDQSQKNEVFLDVVERLSVLIASNGSLLKVDVQGEIRLKSFLPSGSEMRIGLTEEFCVGKSELRGYGPGIRVDEVSFHSSVNLDEFESHRILRLQPPQGELTVMRYQLSDDLPSPLPFRLFPSVQWDRGSGRLQVYLKLRCDLLSKSQALNVRLHLPLPRGVVSLSQELSSPEQKAELAEGALRWDLPRVQGGSQLSGLFQMDVPGPPGPPSHGLSTSASPLGLGPASLSFELPRHTCSGLQVRFLRLAFRPCGNANPHKWVRHLSHSDAYVIRI

SEQ ID NO: 2558 - protein, 453 aa, Homo sapiens; identical to SEQ ID NO: 2548
  Payload ID: 607;
  Gene Symbol: AP4M1;
  Gene Name: adaptor-related prt complex 4, mu 1 subunit;
  Uniprot ID:  O00189;
  ENSP ID: ENSP00000412185

SEQ ID NO: 2559 - protein, 265 aa, Homo sapiens
  Payload ID: 607;
  Gene Symbol: AP4M1;
  Gene Name: adaptor-related prt complex 4, mu 1 subunit;
  ENSP ID: ENSP00000414286
MISQFFILSSKGDPLIYKDFRGDSGGRDVAELFYRKLTGLPGDESPVVMHHHGRHFIHIRHSGLYLVVTTSENDYGYVQTTSTEMLRNFIQTEAVVSKPFSLFDLSSVGLFGAETQQSKVAPSSAASRPVLSSRSDQSQKNEVFLDVVERLSVLIASNGSLLKVDVQGEIRLKSFLPSGSEMRIGLTEEFCVGKSELRGYGPGIRVDEVSFHSSVNLDEFESHRILRLQPPQGELTVMRYQLSDDLPSPLPFRLFPSVQWDRGSG

SEQ ID NO: 2560 - protein, 159 aa, Homo sapiens
  Payload ID: 608;
  Gene Symbol: AP4S1;
  Gene Name: adaptor-related prt complex 4, sigma 1 subunit;
  Uniprot ID:  Q9Y587;
  ENSP ID: ENSP00000216366
MIKFFLMVNKQGQTRLSKYYEHVDINKRTLLETEVIKSCLSRSNEQCSFIEYKDFKLIYRQYAALFIVVGVNDTENEMAIYEFIHNFVEVLDEYFSRVSELDVSFFNTVFHSTWQMHSGPYQEPIDELPKICSALEPQQTCFSPDSSSFKGAASTTPIY

SEQ ID NO: 2561 - protein, 149 aa, Homo sapiens
  Payload ID: 608;
  Gene Symbol: AP4S1;
  Gene Name: adaptor-related prt complex 4, sigma 1 subunit;
  Uniprot ID:  Q9Y587;
  ENSP ID: ENSP00000322508
MIKFFLMVNKQGQTRLSKYYEHVDINKRTLLETEVIKSCLSRSNEQCSFIEYKDFKLIYRQYAALFIVVGVNDTENEMAIYEFIHNFVEVLDEYFSRVSELDVSFFNTVFHSTWQMHSGPYQTRSCSVTQAGVQRCDHGSLHPGSPGLK

SEQ ID NO: 2562 - protein, 149 aa, Homo sapiens; identical to SEQ ID NO: 2561
  Payload ID: 608;
  Gene Symbol: AP4S1;
  Gene Name: adaptor-related prt complex 4, sigma 1 subunit;
  Uniprot ID:  Q9Y587;
  ENSP ID: ENSP00000334484

SEQ ID NO: 2563 - protein, 144 aa, Homo sapiens
  Payload ID: 608;
  Gene Symbol: AP4S1;
  Gene Name: adaptor-related prt complex 4, sigma 1 subunit;
  Uniprot ID:  Q9Y587;
  ENSP ID: ENSP00000438170
MIKFFLMVNKQGQTRLSKYYEHVDINKRTLLETEVIKSCLSRSNEQCSFIEYKDFKLIYRQYAALFIVVGVNDTENEMAIYEFIHNFVEVLDEYFSRVSELDIMFNLDKVHIILDEMVLNGCIVETNRARILAPLLILDKMSES

SEQ ID NO: 2564 - protein, 135 aa, Homo sapiens
  Payload ID: 608;
  Gene Symbol: AP4S1;
  Gene Name: adaptor-related prt complex 4, sigma 1 subunit;
  Uniprot ID:  Q9Y587;
  ENSP ID: ENSP00000450768
MIKFFLMVNKQGQTRLSKYYEHVDINKRTLLETEVIKSCLSRSNEQCSFIEYKDFKLIYRQYAALFIVVGVNDTENEMAIYEFIHNFVEVLDEYFSRVEPIDELPKICSALEPQQTCFSPDSSSFKGAASTTPIY

SEQ ID NO: 2565 - protein, 133 aa, Homo sapiens
  Payload ID: 608;
  Gene Symbol: AP4S1;
  Gene Name: adaptor-related prt complex 4, sigma 1 subunit;
  ENSP ID: ENSP00000451479
MIKFFLMVNKQGQTRLSKYYEHVDINKRTLLETEVIKSCLSRSNEQCSFIEYKDFKLIYRQYAALFIVVGVNDTENEMAIYEFIHNFVEVLDEYFSRVSELDIMFNLDKVHIILDEMVLNGCIVETNRARILA

SEQ ID NO: 2566 - protein, 7 aa, Homo sapiens
  Payload ID: 608;
  Gene Symbol: AP4S1;
  Gene Name: adaptor-related prt complex 4, sigma 1 subunit;
  ENSP ID: ENSP00000451609
MIKFFLM

SEQ ID NO: 2567 - protein, 83 aa, Homo sapiens
  Payload ID: 608;
  Gene Symbol: AP4S1;
  Gene Name: adaptor-related prt complex 4, sigma 1 subunit;
  ENSP ID: ENSP00000451614
EVIKSCLSRSNEQCSFIEYKDFKLIYRQYAALFIVVGVNDTENEMAIYEFIHNFVEVLDEYFSRVVSLMAKKWFTSSTQFPRN

SEQ ID NO: 2568 - protein, 98 aa, Homo sapiens
  Payload ID: 608;
  Gene Symbol: AP4S1;
  Gene Name: adaptor-related prt complex 4, sigma 1 subunit;
  ENSP ID: ENSP00000451918
MIKFFLMVNKQGQTRLSKYYEHVDINKRTLLETEVIKSCLSRSNEQCSFIEYKDFKLIYRQYAALFIVVGVNDTENEMAIYEFIHNFVEVLDEYFSRV

SEQ ID NO: 2569 - protein, 102 aa, Homo sapiens
  Payload ID: 608;
  Gene Symbol: AP4S1;
  Gene Name: adaptor-related prt complex 4, sigma 1 subunit;
  ENSP ID: ENSP00000452383
MIKFFLMVNKQGQTRLSKYYEHVDINKRTLLETEVIKSCLSRSNEQCSFIEYKDFKLIYRQYAALFIVVGVNDTENEMAIYEFIHNFVEVLDEYFSRVVNNV

SEQ ID NO: 2570 - protein, 144 aa, Homo sapiens; identical to SEQ ID NO: 2563
  Payload ID: 608;
  Gene Symbol: AP4S1;
  Gene Name: adaptor-related prt complex 4, sigma 1 subunit;
  Uniprot ID:  Q9Y587;
  ENSP ID: ENSP00000477631

SEQ ID NO: 2571 - protein, 144 aa, Homo sapiens; identical to SEQ ID NO: 2563
  Payload ID: 608;
  Gene Symbol: AP4S1;
  Gene Name: adaptor-related prt complex 4, sigma 1 subunit;
  Uniprot ID:  Q9Y587;
  ENSP ID: ENSP00000482876

SEQ ID NO: 2572 - protein, 878 aa, Homo sapiens
  Payload ID: 609;
  Gene Symbol: AP5B1;
  Gene Name: adaptor-related prt complex 5, beta 1 subunit;
  Uniprot ID:  Q2VPB7;
  ENSP ID: ENSP00000454303
MGPLSRDAWAQRLGAFRASPSAFMAGPEGEDLGRDLLSDLRSEKLSEQTKVSLLALSMEYPAQLWPDASAAEVAATSLLDTLVLLPPRPSALRRPLLLAATTALAAGGALGPTSGASCRLLPLLLGLAAGSDLGRGFVPASEQRPLQATACECLRELESCKPGLLGGSLGLLRGLLGQEGPVQPLSLLLALALRNTLVLQSRVGAGLGGLLTDKVSPTGGGPWDWTLVEEGDGRLQPQAPSWPAAEEGEGERSLTAREHSPEEARELRAAVIQLLDTSYLLTPVAQAQLLWLLGWALRGLQGQPPALFKPQLVRLLGTAQLTLLHAMLALKAAFGEALFTAQDEALLLRRLTLAAQHPALPPPTHLFYLHCVLSFPENWPLGPEGEEAAPLLLGPQLCRGLLPSLLHDPMALLARLHLLCLLCAEEEEEEKGQLPSPRHYLEELLAGLRQRAALDGGPRALATLCFQASYLVACCLAGQPTVLTPLIHGLAQLYQARPMLAPHFVDLLDQVDSELREPLKVVLRQVVVSRPGRDEALCWHLQMLAKVADGDAQSATLNFLQAAAAHCTNWDLQQGLLRVCRALLRAGVRGGLVDLLQVLARQLEDPDGRDHARLYYILLAHLAAPKLGVALGPSLAAPALASSLVAENQGFVAALMVQEAPALVRLSLGSHRVKGPLPVLKLQPEALEPIYSLELRFRVEGQLYAPLEAVHVPCLCPGRPARPLLLPLQPRCPAPARLDVHALYTTSTGLTCHAHLPPLFVNFADLFLPFPQPPEGAGLGFFEELWDSCLPEGAESRVWCPLGPQGLEGLVSRHLEPFVVVAQPPTSYCVAIHLPPDSKLLLRLEAALADGVPVALRTDDWAVLPLAGDYLRGLAAAV

SEQ ID NO: 2573 - protein, 490 aa, Homo sapiens
  Payload ID: 610;
  Gene Symbol: AP5M1;
  Gene Name: adaptor-related prt complex 5, mu 1 subunit;
  Uniprot ID:  Q9H0R1;
  ENSP ID: ENSP00000261558
MAQRAVWLISHEPGTPLCGTVRFSRRYPTVEKRARVFNGASYVPVPEDGPFLKALLFELRLLDDDKDFVESRDSCSRINKTSIYGLLIGGEELWPVVAFLKNDMIYACVPLVEQTLSPRPPLISVSGVSQGFEFLFGIQDFLYSGQKNDSELNTKLSQLPDLLLQACPFGTLLDANLQNSLDNTNFASVTQPQKQPAWKTGTYKGKPQVSISITEKVKSMQYDKQGIADTWQVVGTVTCKCDLEGIMPNVTISLSLPTNGSPLQDILVHPCVTSLDSAILTSSSIDAMDDSAFSGPYKFPFTPPLESFNLCFYTSQVPVPPILGFYQMKEEEVQLRITINLKLHESVKNNFEFCEAHIPFYNRGPITHLEYKTSFGQLEVFREKSLLIWIIGQKFPKSMEISLSGTVTFGAKSHEKQPFDPICTGETAYLKLHFRILDYTLTGCYADQHSVQVFASGKPKISAHRKLISSDYYIWNSKAPAPVTYGSLLL

SEQ ID NO: 2574 - protein, 504 aa, Homo sapiens
  Payload ID: 610;
  Gene Symbol: AP5M1;
  Gene Name: adaptor-related prt complex 5, mu 1 subunit;
  ENSP ID: ENSP00000390531
MAQRAVWLISHEPGTPLCGTVRFSRDWQEDSGYLSFTIRRYPTVEKRARVFNGASYVPVPEDGPFLKALLFELRLLDDDKDFVESRDSCSRINKTSIYGLLIGGEELWPVVAFLKNDMIYACVPLVEQTLSPRPPLISVSGVSQGFEFLFGIQDFLYSGQKNDSELNTKLSQLPDLLLQACPFGTLLDANLQNSLDNTNFASVTQPQKQPAWKTGTYKGKPQVSISITEKVKSMQYDKQGIADTWQVVGTVTCKCDLEGIMPNVTISLSLPTNGSPLQDILVHPCVTSLDSAILTSSSIDAMDDSAFSGPYKFPFTPPLESFNLCFYTSQVPVPPILGFYQMKEEEVQLRITINLKLHESVKNNFEFCEAHIPFYNRGPITHLEYKTSFGQLEVFREKSLLIWIIGQKFPKSMEISLSGTVTFGAKSHEKQPFDPICTGETAYLKLHFRILDYTLTGCYADQHSVQVFASGKPKISAHRKLISSDYYIWNSKAPAPVTYGSLLL

SEQ ID NO: 2575 - protein, 59 aa, Homo sapiens
  Payload ID: 610;
  Gene Symbol: AP5M1;
  Gene Name: adaptor-related prt complex 5, mu 1 subunit;
  ENSP ID: ENSP00000450422
LHFRILDYTLTGCYADQHSVQVFASGKPKISAHRKLISSDYYIWNSKAPAPVTYGSLLL

SEQ ID NO: 2576 - protein, 38 aa, Homo sapiens
  Payload ID: 610;
  Gene Symbol: AP5M1;
  Gene Name: adaptor-related prt complex 5, mu 1 subunit;
  ENSP ID: ENSP00000451306
MAQRAVWLISHEPGTPLCGTVRFSSVIWKESCQMLPSA

SEQ ID NO: 2577 - protein, 81 aa, Homo sapiens
  Payload ID: 610;
  Gene Symbol: AP5M1;
  Gene Name: adaptor-related prt complex 5, mu 1 subunit;
  ENSP ID: ENSP00000452211
MIYACVPLVEQTLSPRPPLISVSGVSQGFEFLFGIQDFLYSGQKNDSELNTKLSQLPDLLLQACPFGTLLDANLQNSLDNT

SEQ ID NO: 2578 - protein, 93 aa, Homo sapiens
  Payload ID: 610;
  Gene Symbol: AP5M1;
  Gene Name: adaptor-related prt complex 5, mu 1 subunit;
  ENSP ID: ENSP00000473837
  MOD_RES (1)..(1): Any amino acid
XFREKSLLIWIIGQKFPKSMEISLSGTVTFGAKSHEKQPFDPICTGETAYLKLHFRILDYTLTGCYADQHSVQVFASGKPKISARKLHRFKLT

SEQ ID NO: 2579 - protein, 200 aa, Homo sapiens
  Payload ID: 611;
  Gene Symbol: AP5S1;
  Gene Name: adaptor-related prt complex 5, sigma 1 subunit;
  Uniprot ID:  Q9NUS5;
  ENSP ID: ENSP00000246041
MVHAFLIHTLRAPNTEDTGLCRVLYSCVFGAEKSPDDPRPHGAERDRLLRKEQILAVARQVESMCRLQQQASGRPPMDLQPQSSDEQVPLHEAPRGAFRLAAENPFQEPRTVVWLGVLSLGFALVLDAHENLLLAEGTLRLLTRLLLDHLRLLAPSTSLLLRADRIEGILTRFLPHGQLLFLNDQFVQGLEKEFSAAWPR

SEQ ID NO: 2580 - protein, 200 aa, Homo sapiens; identical to SEQ ID NO: 2579
  Payload ID: 611;
  Gene Symbol: AP5S1;
  Gene Name: adaptor-related prt complex 5, sigma 1 subunit;
  Uniprot ID:  Q9NUS5;
  ENSP ID: ENSP00000368886

SEQ ID NO: 2581 - protein, 59 aa, Homo sapiens
  Payload ID: 611;
  Gene Symbol: AP5S1;
  Gene Name: adaptor-related prt complex 5, sigma 1 subunit;
  ENSP ID: ENSP00000368892
MVHAFLIHTLRAPNTEDTGLCRVLYSCVFGAEKSPDDPRPHGAERDRLLRKEQILAVAR

SEQ ID NO: 2582 - protein, 86 aa, Homo sapiens
  Payload ID: 611;
  Gene Symbol: AP5S1;
  Gene Name: adaptor-related prt complex 5, sigma 1 subunit;
  ENSP ID: ENSP00000405487
MVHAFLIHTLRAPNTEDTGLCRVLYSCVFGAEKSPDDPRPHGAERDRLLRKEQILAVARQVESMCRLQQQASGRPPMDLQPQSSDE

SEQ ID NO: 2583 - protein, 200 aa, Homo sapiens; identical to SEQ ID NO: 2579
  Payload ID: 611;
  Gene Symbol: AP5S1;
  Gene Name: adaptor-related prt complex 5, sigma 1 subunit;
  Uniprot ID:  Q9NUS5;
  ENSP ID: ENSP00000481750

SEQ ID NO: 2584 - protein, 807 aa, Homo sapiens
  Payload ID: 612;
  Gene Symbol: AP5Z1;
  Gene Name: adaptor-related prt complex 5, zeta 1 subunit;
  Uniprot ID:  O43299;
  ENSP ID: ENSP00000297562
MFSAGAESLLHQAREIQDEELKKFCSRICKLLQAEDLGPDTLDSLQRLFLIISATKYSRRLEKTCVDLLQATLGLPACPEQLQVLCAAILREMSPSDSLSLAWDHTQNSRQLSLVASVLLAQGDRNEEVRAVGQGVLRALESRQPEGPSLRHLLPVMAKVVVLSPGTLQEDQATLLSKRLVDWLRYASLQQGLPHSGGFFSTPRARQPGPVTEVDGAVATDFFTVLSSGHRFTDDQWLNVQAFSMLRAWLLHSGPEGPGTLDTDDRSEQEGSTLSVISATSSAGRLLPPRERLREVAFEYCQRLIEQSNRRALRKGDSDLQKACLVEAVLVLDVLCRQDPSFLYRSLSCLKALHGRVRGDPASVRVLLPLAHFFLSHGEAAAVDSEAVYQHLFTRIPVEQFHSPMLAFEFIQFCRDNLHLFSGHLSTLRLSFPNLFKFLAWNSPPLTSEFVALLPALVDAGTALEMLHALLDLPCLTAVLDLQLRSAPAASERPLWDTSLRAPSCLEAFRDPQFQGLFQYLLRPKASGATERLAPLHQLLQPMAGCARVAQCAQAVPTLLQAFFSAVTQVADGSLINQLALLLLGRSDSLYPAPGYAAGVHSVLSSQFLALCTLKPSLVVELARDLLEFLGSVNGLCSRASLVTSVVWAIGEYLSVTYDRRCTVEQINKFFEALEALLFEVTQCRPSAALPRCPPQVVTVLMTTLTKLASRSQDLIPRASLLLSKMRTLAHSPATSSTHSEEGAEAIRTRATELLTLLKMPSVAQFVLTPSTEVCSPRYHRDANTALPLALRTVSRLVEREAGLMPG

SEQ ID NO: 2585 - protein, 1536 aa, Homo sapiens
  Payload ID: 613;
  Gene Symbol: ASXL1;
  Gene Name: additional sex combs like transcriptional regulator 1;
  ENSP ID: ENSP00000305119
MGVVNFVFRASEDLQVLENYSDAPMTPKQILQVIEAEGLKEMSGTSPLACLNAMLHSNSRGGEGLFYKLPGRISLFTLKKDALQWSRHPATVEGEEPEDTADVESCGSNEASTVSGENDVSLDETSSNASCSTESQSRPLSNPRDSYRASSQANKQKKKTGVMLPRVVLTPLKVNGAHVESASGFSGCHADGESGSPSSSSSGSLALGSAAIRGQAEVTQDPAPLLRGFRKPATGQMKRNRGEEIDFETPGSILVNTNLRALINSRTFHALPSHFQQQLLFLLPEVDRQVGTDGLLRLSSSALNNEFFTHAAQSWRERLADGEFTHEMQVRIRQEMEKEKKVEQWKEKFFEDYYGQKLGLTKEESLQQNVGQEEAEIKSGLCVPGESVRIQRGPATRQRDGHFKKRSRPDLRTRARRNLYKKQESEQAGVAKDAKSVASDVPLYKDGEAKTDPAGLSSPHLPGTSSAAPDLEGPEFPVESVASRIQAEPDNLARASASPDRIPSLPQETVDQEPKDQKRKSFEQAASASFPEKKPRLEDRQSFRNTIESVHTEKPQPTKEEPKVPPIRIQLSRIKPPWVVKGQPTYQICPRIIPTTESSCRGWTGARTLADIKARALQVRGARGHHCHREAATTAIGGGGGPGGGGGGATDEGGGRGSSSGDGGEACGHPEPRGGPSTPGKCTSDLQRTQLLPPYPLNGEHTQAGTAMSRARREDLPSLRKEESCLLQRATVGLTDGLGDASQLPVAPTGDQPCQALPLLSSQTSVAERLVEQPQLHPDVRTECESGTTSWESDDEEQGPTVPADNGPIPSLVGDDTLEKGTGQALDSHPTMKDPVNVTPSSTPESSPTDCLQNRAFDDELGLGGSCPPMRESDTRQENLKTKALVSNSSLHWIPIPSNDEVVKQPKPESREHIPSVEPQVGEEWEKAAPTPPALPGDLTAEEGLDPLDSLTSLWTVPSRGGSDSNGSYCQQVDIEKLKINGDSEALSPHGESTDTASDFEGHLTEDSSEADTREAAVTKGSSVDKDEKPNWNQSAPLSKVNGDMRLVTRTDGMVAPQSWVSRVCAVRQKIPDSLLLASTEYQPRAVCLSMPGSSVEATNPLVMQLLQGSLPLEKVLPPAHDDSMSESPQVPLTKDQSHGSLRMGSLHGLGKNSGMVDGSSPSSLRALKEPLLPDSCETGTGLARIEATQAPGAPQKNCKAVPSFDSLHPVTNPITSSRKLEEMDSKEQFSSFSCEDQKEVRAMSQDSNSNAAPGKSPGDLTTSRTPRFSSPNVISFGPEQTGRALGDQSNVTGQGKKLFGSGNVAATLQRPRPADPMPLPAEIPPVFPSGKLGPSTNSMSGGVQTPREDWAPKPHAFVGSVKNEKTFVGGPLKANAENRKATGHSPLELVGHLEGMPFVMDLPFWKLPREPGKGLSEPLEPSSLPSQLSIKQAFYGKLSKLQLSSTSFNYSSSSPTFPKGLAGSVVQLSHKANFGASHSASLSLQMFTDSSTVESISLQCACSLKAMIMCQGCGAFCHDDCIGPSKLCVLCLVVR

SEQ ID NO: 2586 - protein, 1541 aa, Homo sapiens
  Payload ID: 613;
  Gene Symbol: ASXL1;
  Gene Name: additional sex combs like transcriptional regulator 1;
  Uniprot ID:  Q8IXJ9;
  ENSP ID: ENSP00000364839
MKDKQKKKKERTWAEAARLVLENYSDAPMTPKQILQVIEAEGLKEMRSGTSPLACLNAMLHSNSRGGEGLFYKLPGRISLFTLKKDALQWSRHPATVEGEEPEDTADVESCGSNEASTVSGENDVSLDETSSNASCSTESQSRPLSNPRDSYRASSQANKQKKKTGVMLPRVVLTPLKVNGAHVESASGFSGCHADGESGSPSSSSSGSLALGSAAIRGQAEVTQDPAPLLRGFRKPATGQMKRNRGEEIDFETPGSILVNTNLRALINSRTFHALPSHFQQQLLFLLPEVDRQVGTDGLLRLSSSALNNEFFTHAAQSWRERLADGEFTHEMQVRIRQEMEKEKKVEQWKEKFFEDYYGQKLGLTKEESLQQNVGQEEAEIKSGLCVPGESVRIQRGPATRQRDGHFKKRSRPDLRTRARRNLYKKQESEQAGVAKDAKSVASDVPLYKDGEAKTDPAGLSSPHLPGTSSAAPDLEGPEFPVESVASRIQAEPDNLARASASPDRIPSLPQETVDQEPKDQKRKSFEQAASASFPEKKPRLEDRQSFRNTIESVHTEKPQPTKEEPKVPPIRIQLSRIKPPWVVKGQPTYQICPRIIPTTESSCRGWTGARTLADIKARALQVRGARGHHCHREAATTAIGGGGGPGGGGGGATDEGGGRGSSSGDGGEACGHPEPRGGPSTPGKCTSDLQRTQLLPPYPLNGEHTQAGTAMSRARREDLPSLRKEESCLLQRATVGLTDGLGDASQLPVAPTGDQPCQALPLLSSQTSVAERLVEQPQLHPDVRTECESGTTSWESDDEEQGPTVPADNGPIPSLVGDDTLEKGTGQALDSHPTMKDPVNVTPSSTPESSPTDCLQNRAFDDELGLGGSCPPMRESDTRQENLKTKALVSNSSLHWIPIPSNDEVVKQPKPESREHIPSVEPQVGEEWEKAAPTPPALPGDLTAEEGLDPLDSLTSLWTVPSRGGSDSNGSYCQQVDIEKLKINGDSEALSPHGESTDTASDFEGHLTEDSSEADTREAAVTKGSSVDKDEKPNWNQSAPLSKVNGDMRLVTRTDGMVAPQSWVSRVCAVRQKIPDSLLLASTEYQPRAVCLSMPGSSVEATNPLVMQLLQGSLPLEKVLPPAHDDSMSESPQVPLTKDQSHGSLRMGSLHGLGKNSGMVDGSSPSSLRALKEPLLPDSCETGTGLARIEATQAPGAPQKNCKAVPSFDSLHPVTNPITSSRKLEEMDSKEQFSSFSCEDQKEVRAMSQDSNSNAAPGKSPGDLTTSRTPRFSSPNVISFGPEQTGRALGDQSNVTGQGKKLFGSGNVAATLQRPRPADPMPLPAEIPPVFPSGKLGPSTNSMSGGVQTPREDWAPKPHAFVGSVKNEKTFVGGPLKANAENRKATGHSPLELVGHLEGMPFVMDLPFWKLPREPGKGLSEPLEPSSLPSQLSIKQAFYGKLSKLQLSSTSFNYSSSSPTFPKGLAGSVVQLSHKANFGASHSASLSLQMFTDSSTVESISLQCACSLKAMIMCQGCGAFCHDDCIGPSKLCVLCLVVR

SEQ ID NO: 2587 - protein, 81 aa, Homo sapiens
  Payload ID: 613;
  Gene Symbol: ASXL1;
  Gene Name: additional sex combs like transcriptional regulator 1;
  ENSP ID: ENSP00000364841
MGVVNFVFRASEDLQVLENYSDAPMTPKQILQVIEAEGLKEMRSGTSPLACLNAMLHSNSRGGEGLFYKLPGRISLFTLKV

SEQ ID NO: 2588 - protein, 85 aa, Homo sapiens
  Payload ID: 613;
  Gene Symbol: ASXL1;
  Gene Name: additional sex combs like transcriptional regulator 1;
  ENSP ID: ENSP00000438654
MKDKQKKKKERTWAEAARLVLENYSDAPMTPKQILQVIEAEGLKEMRSGTSPLACLNAMLHSNSRGGEGLFYKLPGRISLFTLKV

SEQ ID NO: 2589 - protein, 74 aa, Homo sapiens
  Payload ID: 613;
  Gene Symbol: ASXL1;
  Gene Name: additional sex combs like transcriptional regulator 1;
  ENSP ID: ENSP00000451216
  MOD_RES (1)..(1): Any amino acid
XWAEAARLVLENYSDAPMTPKQILQVIEAEGLKEMRSGTSPLACLNAMLHSNSRGGEGLFYKLPGRISLFTLKV

SEQ ID NO: 2590 - protein, 57 aa, Homo sapiens
  Payload ID: 613;
  Gene Symbol: ASXL1;
  Gene Name: additional sex combs like transcriptional regulator 1;
  ENSP ID: ENSP00000480361
MTPKQILQVIEAEGLKEMRSGTSPLACLNAMLHSNSRGGEGLFYKLPGRISLFTLKR

SEQ ID NO: 2591 - protein, 1541 aa, Homo sapiens; identical to SEQ ID NO: 2586
  Payload ID: 613;
  Gene Symbol: ASXL1;
  Gene Name: additional sex combs like transcriptional regulator 1;
  Uniprot ID:  Q8IXJ9;
  ENSP ID: ENSP00000480487

SEQ ID NO: 2592 - protein, 1541 aa, Homo sapiens; identical to SEQ ID NO: 2586
  Payload ID: 613;
  Gene Symbol: ASXL1;
  Gene Name: additional sex combs like transcriptional regulator 1;
  Uniprot ID:  Q8IXJ9;
  ENSP ID: ENSP00000481978

SEQ ID NO: 2593 - protein, 1407 aa, Homo sapiens [sequence omitted]

SEQ ID NO: 2594 - protein, 918 aa, Homo sapiens
  Payload ID: 614;
  Gene Symbol: ASXL2;
  Gene Name: additional sex combs like transcriptional regulator 2;
  Uniprot ID:  Q76L83;
  ENSP ID: ENSP00000383920
MKRTKCADIDVETPDSILVNTNLRALINKHTFSVLPGDCQQRLLLLLPEVDRQVGPDGLMKLNGSALNNEFFTSAAQGWKERLSEGEFTPEMQVRIRQEIEKEKKVEPWKEQFFESYYGQSSGLSLEDSKKLTASPSDPKVKKTPAEQPKSMPVSEASLIRIVPVVSQSECKEEALQMSSPGRKEECESQGEVQPNFSTSSEPLLSSALNTHELSSILPIKCPKDEDLLEQKPVTSAEQESEKNHLTTASNYNKSESQESLVTSPSKPKSPGVEKPIVKPTAGAGPQETNMKEPLATLVDQSPESLKRKSSLTQEEAPVSWEKRPRVTENRQHQQPFQVSPQPFLNRGDRIQVRKVPPLKIPVSRISPMPFHPSQVSPRARFPVSITSPNRTGARTLADIKAKAQLVKAQRAAAAAAAAAAAAASVGGTIPGPGPGGGQGPGEGGEGQTARGGSPGSDRVSETGKGPTLELAGTGSRGGTRELLPCGPETQPQSETKTTPSQAQPHSVSGAQLQQTPPVPPTPAVSGACTSVPSPAHIEKLDNEKLNPTRATATVASVSHPQGPSSCRQEKAPSPTGFQLEDISTSQRFMLGFAGRRTSKPAMAGHYLLNISTYGRGSESFRRTHSVNPEDRFCLSSPTEALKMGYTDCKNATGESSSSKEDDTDEESTGDEQESVTVKEEPQVSQSAGKGDTSSGPHSRETLSTSDCLASKNVKAEIPLNEQTTLSKENYLFTRGQTFDEKTLARDLIQAAQKQMAHAVRGKAIRSSPELFSSTVLPLPADSPTHQPLLLPPLQTPKLYGSPTQIGPSYRGMINVSTSSDMDHNSAVPGSQVSSNVGDVMSFSVTVTTIPASQAMNPSSHGQTIPVQAFSEENSIEGTPSKCYCRLKAMIMCKGCGAFCHDDCIGPSKLCVSCLVVR

SEQ ID NO: 2595 - protein, 1435 aa, Homo sapiens
  Payload ID: 614;
  Gene Symbol: ASXL2;
  Gene Name: additional sex combs like transcriptional regulator 2;
  Uniprot ID:  Q76L83;
  ENSP ID: ENSP00000391447
MREKGRRKKGRTWAEAAKTVLEKYPNTPMSHKEILQVIQREGLKEIRSGTSPLACLNAMLHTNSRGEEGIFYKVPGRMGVYTLKKDVPDGVKELSEGSEESSDGQSDSQSSENSSSSSDGGSNKEGKKSRWKRKVSSSSPQSGCPSPTIPAGKVISPSQKHSKKALKQALKQQQQKKQQQQCRPSISISSNQHLSLKTVKAASDSVPAKPATWEGKQSDGQTGSPQNSNSSFSSSVKVENTLLGLGKKSFQRSERLHTRQMKRTKCADIDVETPDSILVNTNLRALINKHTFSVLPGDCQQRLLLLLPEVDRQVGPDGLMKLNGSALNNEFFTSAAQGWKERLSEGEFTPEMQVRIRQEIEKEKKVEPWKEQFFESYYGQSSGLSLEDSKKLTASPSDPKVKKTPAEQPKSMPVSEASLIRIVPVVSQSECKEEALQMSSPGRKEECESQGEVQPNFSTSSEPLLSSALNTHELSSILPIKCPKDEDLLEQKPVTSAEQESEKNHLTTASNYNKSESQESLVTSPSKPKSPGVEKPIVKPTAGAGPQETNMKEPLATLVDQSPESLKRKSSLTQEEAPVSWEKRPRVTENRQHQQPFQVSPQPFLNRGDRIQVRKVPPLKIPVSRISPMPFHPSQVSPRARFPVSITSPNRTGARTLADIKAKAQLVKAQRAAAAAAAAAAAAASVGGTIPGPGPGGGQGPGEGGEGQTARGGSPGSDRVSETGKGPTLELAGTGSRGGTRELLPCGPETQPQSETKTTPSQAQPHSVSGAQLQQTPPVPPTPAVSGACTSVPSPAHIEKLDNEKLNPTRATATVASVSHPQGPSSCRQEKAPSPTGPALISGASPVHCAADGTVELKAGPSKNIPNPSASSKTDASVPVAVTPSPLTSLLTTATLEKLPVPQVSATTAPAGSAPPSSTLPAASSLKTPGTSLNMNGPTLRPTSSIPANNPLVTQLLQGKDVPMEQILPKPLTKVEMKTVPLTAKEERGMGALIATNTTENSTREEVNERQSHPATQQQLGKTLQSKQLPQVPRPLQLFSAKELRDSSIDTHQYHEGLSKATQDQILQTLIQRVRRQNLLSVVPPSQFNFAHSGFQLEDISTSQRFMLGFAGRRTSKPAMAGHYLLNISTYGRGSESFRRTHSVNPEDRFCLSSPTEALKMGYTDCKNATGESSSSKEDDTDEESTGDEQESVTVKEEPQVSQSAGKGDTSSGPHSRETLSTSDCLASKNVKAEIPLNEQTTLSKENYLFTRGQTFDEKTLARDLIQAAQKQMAHAVRGKAIRSSPELFSSTVLPLPADSPTHQPLLLPPLQTPKLYGSPTQIGPSYRGMINVSTSSDMDHNSAVPGSQVSSNVGDVMSFSVTVTTIPASQAMNPSSHGQTIPVQAFSEENSIEGTPSKCYCRLKAMIMCKGCGAFCHDDCIGPSKLCVSCLVVR

SEQ ID NO: 2596 - protein, 2248 aa, Homo sapiens
  Payload ID: 615;
  Gene Symbol: ASXL3;
  Gene Name: additional sex combs like transcriptional regulator 3;
  Uniprot ID:  Q9C0F0;
  ENSP ID: ENSP00000269197
MKDKRKKKDRTWAEAARLALEKHPNSPMTAKQILEVIQKEGLKETSGTSPLACLNAMLHTNTRIGDGTFFKIPGKSGLYALKKEESSCPADGTLDLVCESELDGTDMAEANAHGEENGVCSKQVTDEASSTRDSSLTNTAVQSKLVSSFQQHTKKALKQALRQQQKRRNGVSMMVNKTVPRVVLTPLKVSDEQSDSPSGSESKNGEADSSDKEMKHGQKSPTGKQTSQHLKRLKKSGLGHLKWTKAEDIDIETPGSILVNTNLRALINKHTFASLPQHFQQYLLLLLPEVDRQMGSDGILRLSTSALNNEFFAYAAQGWKQRLAEGEFTPEMQLRIRQEIEKEKKTEPWKEKFFERFYGEKLGMSREESVKLTTGPNNAGAQSSSSCGTSGLPVSAQTALAEQQPKSMKSPASPEPGFCATLCPMVEIPPKDIMAELESEDILIPEESVIQEEIAEEVETSICECQDENHKTIPEFSEEAESLTNSHEEPQIAPPEDNLESCVMMNDVLETLPHIEVKIEGKSESPQEEMTVVIDQLEVCDSLIPSTSSMTHVSDTEHKESETAVETSTPKIKTGSSSLEGQFPNEGIAIDMELQSDPEEQLSENACISETSFSSESPEGACTSLPSPGGETQSTSEESCTPASLETTFCSEVSSTENTDKYNQRNSTDENFHASLMSEISPISTSPEISEASLMSNLPLTSEASPVSNLPLTSETSPMSDLPLTSETSSVSSMLLTSETTFVSSLPLPSETSPISNSSINERMAHQQRKSPSVSEEPLSPQKDESSATAKPLGENLTSQQKNLSNTPEPIIMSSSSIAPEAFPSEDLHNKTLSQQTCKSHVDTEKPYPASIPELASTEMIKVKNHSVLQRTEKKVLPSPLELSVFSEGTDNKGNELPSAKLQDKQYISSVDKAPFSEGSRNKTHKQGSTQSRLETSHTSKSSEPSKSPDGIRNESRDSEISKRKTAEQHSFGICKEKRARIEDDQSTRNISSSSPPEKEQPPREEPRVPPLKIQLSKIGPPFIIKSQPVSKPESRASTSTSVSGGRNTGARTLADIKARAQQARAQREAAAAAAVAAAASIVSGAMGSPGEGGKTRTLAHIKEQTKAKLFAKHQARAHLFQTSKETRLPPPLSSKEGPPNLEVSSTPETKMEGSTGVIIVNPNCRSPSNKSAHLRETTTVLQQSLNPSKLPETATDLSVHSSDENIPVSHLSEKIVSSTSSENSSVPMLFNKNSVPVSVCSTAISGAIKEHPFVSSVDKSSVLMSVDSANTTISACNISMLKTIQGTDTPCIAIIPKCIESTPISATTEGSSISSSMDDKQLLISSSSASNLVSTQYTSVPTPSIGNNLPNLSTSSVLIPPMGINNRFPSEKIAIPGSEEQATVSMGTTVRAALSCSDSVAVTDSLVAHPTVAMFTGNMLTINSYDSPPKLSAESLDKNSGPRNRADNSGKPQQPPGGFAPAAINRSIPCKVIVDHSTTLTSSLSLTVSVESSEASLDLQGRPVRTEASVQPVACPQVSVISRPEPVANEGIDHSSTFIAASAAKQDSKTLPATCTSLRELPLVPDKLNEPTAPSHNFAEQARGPAPFKSEADTTCSNQYNPSNRICWNDDGMRSTGQPLVTHSGSSKQKEYLEQSCPKAIKTEHANYLNVSELHPRNLVTNVALPVKSELHEADKGFRMDTEDFPGPELPPPAAEGASSVQQTQNMKASTSSPMEEAISLATDALKRVPGAGSSGCRLSSVEANNPLVTQLLQGNLPLEKVLPQPRLGAKLEINRLPLPLQTTSVGKTAPERNVEIPPSSPNPDGKGYLAGTLAPLQMRKRENHPKKRVARTVGEHTQVKCEPGKLLVEPDVKGVPCVISSGISQLGHSQPFKQEWLNKHSMQNRIVHSPEVKQQKRLLPSCSFQQNLFHVDKNGGFHTDAGTSHRQQFYQMPVAARGPIPTAALLQASSKTPVGCNAFAFNRHLEQKGLGEVSLSSAPHQLRLANMLSPNMPMKEGDEVGGTAHTMPNKALVHPPPPPPPPPPPPLALPPPPPPPPPLPPPLPNAEVPSDQKQPPVTMETTKRLSWPQSTGICSNIKSEPLSFEEGLSSSCELGMKQVSYDQNEMKEQLKAFALKSADFSSYLLSEPQKPFTQLAAQKMQVQQQQQLCGNYPTIHFGSTSFKRAASAIEKSIGILGSGSNPATGLSGQNAQMPVQNFADSSNADELELKCSCRLKAMIVCKGCGAFCHDDCIGPSKLCVACLVVR

SEQ ID NO: 2597 - protein, 58 aa, Homo sapiens
  Payload ID: 615;
  Gene Symbol: ASXL3;
  Gene Name: additional sex combs like transcriptional regulator 3;
  ENSP ID: ENSP00000464931
MTAKQILEVIQKEGLKETRPRHGLETALVCMKDLPPMKDLGQLSMMIILEPQLLSCWS

SEQ ID NO: 2598 - protein, 318 aa, Homo sapiens
  Payload ID: 615;
  Gene Symbol: ASXL3;
  Gene Name: additional sex combs like transcriptional regulator 3;
  ENSP ID: ENSP00000465053
MKDKRKKKDRTWAEAARLALEKHPNSPMTAKQILEVIQKEGLKETRNGTSPLACLNAMLHTNTRIGDGTFFKIPGKSGLYALKKEESSCPADGTLDLVCESELDGTDMAEANAHGEENGVCSKQVTDEASSTRDSSLTNTAVQSKLVSSFQQHTKKALKQALRQQQKRRNGVSMMVNKTVPRVVLTPLKVSDEQSDSPSGSESKNGEADSSDKEMKHGQKSPTGKQTSQHLKRLKKSGLGHLKWTKAEDIDIETPGSILVNTNLRALINKHTFASLPQHFQQYLLLLLPEVDRQSRNEPFLQEAMVPISGGCHEIKMS

SEQ ID NO: 2599 - protein, 174 aa, Homo sapiens
  Payload ID: 615;
  Gene Symbol: ASXL3;
  Gene Name: additional sex combs like transcriptional regulator 3;
  ENSP ID: ENSP00000465634
  MOD_RES (1)..(1): Any amino acid
XAEAARLALEKHPNSPMTAKQILEVIQKEGLKETRNGTSPLACLNAMLHTNTRIGDGTFFKIPGKSGLYALKKEESSCPADGTLDLVCESELDGTDMAEANAHGEENGVCSKQVTDEASSTRDSSLTNTAVQSKLVSSFQQHTKKALKQALRQQQKRRNGVSMMVNKTVPRVVL

SEQ ID NO: 2600 - protein, 34 aa, Homo sapiens
  Payload ID: 615;
  Gene Symbol: ASXL3;
  Gene Name: additional sex combs like transcriptional regulator 3;
  ENSP ID: ENSP00000466030
MTAKQILEVIQKEGLKETSLVSDPGMAWRQRWCV

SEQ ID NO: 2601 - protein, 61 aa, Homo sapiens
  Payload ID: 615;
  Gene Symbol: ASXL3;
  Gene Name: additional sex combs like transcriptional regulator 3;
  ENSP ID: ENSP00000466073
MKDKRKKKDRTWAEAARLALEKHPNSPMTAKQILEVIQKEGLKETSLVSDPGMAWRQRWCV

SEQ ID NO: 2602 - protein, 148 aa, Homo sapiens
  Payload ID: 615;
  Gene Symbol: ASXL3;
  Gene Name: additional sex combs like transcriptional regulator 3;
  ENSP ID: ENSP00000466244
MTAKQILEVIQKEGLKETSSGRQKAQIKVGSVRFCGTSPLACLNAMLHTNTRIGDGTFFKIPGKSGLYALKKEESSCPADGTLDLVCESELDGTDMAEANAHGEENGVCSKQVTDEASSTRDSSLTNTAVQSKLVSSFQQHTKKALKQ

SEQ ID NO: 2603 - protein, 58 aa, Homo sapiens; identical to SEQ ID NO: 2597
  Payload ID: 615;
  Gene Symbol: ASXL3;
  Gene Name: additional sex combs like transcriptional regulator 3;
  ENSP ID: ENSP00000466655

SEQ ID NO: 2604 - protein, 34 aa, Homo sapiens
  Payload ID: 615;
  Gene Symbol: ASXL3;
  Gene Name: additional sex combs like transcriptional regulator 3;
  ENSP ID: ENSP00000467648
MTAKQILEVIQKEGLKETSSGRQKAQIKVGSVRF

SEQ ID NO: 2605 - protein, 34 aa, Homo sapiens; identical to SEQ ID NO: 2600
  Payload ID: 615;
  Gene Symbol: ASXL3;
  Gene Name: additional sex combs like transcriptional regulator 3;
  ENSP ID: ENSP00000467907

SEQ ID NO: 2606 - protein, 179 aa, Homo sapiens
  Payload ID: 615;
  Gene Symbol: ASXL3;
  Gene Name: additional sex combs like transcriptional regulator 3;
  ENSP ID: ENSP00000468024
KRKKKDRTWAEAARLALEKHPNSPMTAKQILEVIQKEGLKETSGTSPLACLNAMLHTNTRIGDGTFFKIPGKSGLYALKKEESSCPADGTLDLVCESELDGTDMAEANAHGEENGVCSKQVTDEASSTRDSSLTNTAVQSKLVSSFQQHTKKALKQALRQQQKRRNGVSMMVNKTVPRV

SEQ ID NO: 2607 - protein, 19 aa, Homo sapiens
  Payload ID: 615;
  Gene Symbol: ASXL3;
  Gene Name: additional sex combs like transcriptional regulator 3;
  ENSP ID: ENSP00000468264
MTAKQILEVIQKEGLKETR

SEQ ID NO: 2608 - protein, 58 aa, Homo sapiens; identical to SEQ ID NO: 2597
  Payload ID: 615;
  Gene Symbol: ASXL3;
  Gene Name: additional sex combs like transcriptional regulator 3;
  ENSP ID: ENSP00000468533

SEQ ID NO: 2609 - protein, 768 aa, Homo sapiens
  Payload ID: 616;
  Gene Symbol: ADD1;
  Gene Name: adducin 1 (alpha);
  Uniprot ID:  P35611;
  ENSP ID: ENSP00000264758
MNGDSRAAVVTSPPPTTAPHKERYFDRVDENNPEYLRERNMAPDLRQDFNMMEQKKRVSMILQSPAFCEELESMIQEQFKKGKNPTGLLALQQIADFMTTNVPNVYPAAPQGGMAALNMSLGMVTPVNDLRGSDSIAYDKGEKLLRCKLAAFYRLADLFGWSQLIYNHITTRVNSEQEHFLIVPFGLLYSEVTASSLVKINLQGDIVDRGSTNLGVNQAGFTLHSAIYAARPDVKCVVHIHTPAGAAVSAMKCGLLPISPEALSLGEVAYHDYHGILVDEEEKVLIQKNLGPKSKVLILRNHGLVSVGESVEEAFYYIHNLVVACEIQVRTLASAGGPDNLVLLNPEKYKAKSRSPGSPVGEGTGSPPKWQIGEQEFEALMRMLDNLGYRTGYPYRYPALREKSKKYSDVEVPASVTGYSFASDGDSGTCSPLRHSFQKQQREKTRWLNSGRGDEASEEGQNGSSPKSKTKVWTNITHDHVKPLLQSLSSGVCVPSCITNCLWTKEDGHRTSTSAVPNLFVPLNTNPKEVQEMRNKIREQNLQDIKTAGPQSQVLCGVVMDRSLVQGELVTASKAIIEKEYQPHVIVSTTGPNPFTTLTDRELEEYRREVERKQKGSEENLDEAREQKEKSPPDQPAVPHPPPSTPIKLEEDLVPEPTTGDDSDAATFKPTLPDLSPDEPSEALGFPMLEKEEEAHRPPSPTEAPTEASPEPAPDPAPVAEEAAPSAVEEGAAADPGSDGSPGKSPSKKKKKFRTPSFLKKSKKKSDS

SEQ ID NO: 2610 - protein, 662 aa, Homo sapiens
  Payload ID: 616;
  Gene Symbol: ADD1;
  Gene Name: adducin 1 (alpha);
  Uniprot ID:  P35611;
  ENSP ID: ENSP00000348100
MNGDSRAAVVTSPPPTTAPHKERYFDRVDENNPEYLRERNMAPDLRQDFNMMEQKKRVSMILQSPAFCEELESMIQEQFKKGKNPTGLLALQQIADFMTTNVPNVYPAAPQGGMAALNMSLGMVTPVNDLRGSDSIAYDKGEKLLRCKLAAFYRLADLFGWSQLIYNHITTRVNSEQEHFLIVPFGLLYSEVTASSLVKINLQGDIVDRGSTNLGVNQAGFTLHSAIYAARPDVKCVVHIHTPAGAAVSAMKCGLLPISPEALSLGEVAYHDYHGILVDEEEKVLIQKNLGPKSKVLILRNHGLVSVGESVEEAFYYIHNLVVACEIQVRTLASAGGPDNLVLLNPEKYKAKSRSPGSPVGEGTGSPPKWQIGEQEFEALMRMLDNLGYRTGYPYRYPALREKSKKYSDVEVPASVTGYSFASDGDSGTCSPLRHSFQKQQREKTRWLNSGRGDEASEEGQNGSSPKSKTKWTKEDGHRTSTSAVPNLFVPLNTNPKEVQEMRNKIREQNLQDIKTAGPQSQVLCGVVMDRSLVQDAPLSDCTETIEGLELTEQTFSPAKSLSFRKGELVTASKAIIEKEYQPHVIVSTTGPNPFTTLTDRELEEYRREVERKQKGSEENLDEAREQKEKSPPDQPAVPHPPPSTPIKLEEGDGCAREYLLP

SEQ ID NO: 2611 - protein, 662 aa, Homo sapiens
  Payload ID: 616;
  Gene Symbol: ADD1;
  Gene Name: adducin 1 (alpha);
  Uniprot ID:  P35611;
  ENSP ID: ENSP00000381191
MNGDSRAAVVTSPPPTTAPHKERYFDRVDENNPEYLRERNMAPDLRQDFNMMEQKKRVSMILQSPAFCEELESMIQEQFKKGKNPTGLLALQQIADFMTTNVPNVYPAAPQGGMAALNMSLGMVTPVNDLRGSDSIAYDKGEKLLRCKLAAFYRLADLFGWSQLIYNHITTRVNSEQEHFLIVPFGLLYSEVTASSLVKINLQGDIVDRGSTNLGVNQAGFTLHSAIYAARPDVKCVVHIHTPAGAAVSAMKCGLLPISPEALSLGEVAYHDYHGILVDEEEKVLIQKNLGPKSKVLILRNHGLVSVGESVEEAFYYIHNLVVACEIQVRTLASAGGPDNLVLLNPEKYKAKSRSPGSPVGEGTGSPPKWQIGEQEFEALMRMLDNLGYRTGYPYRYPALREKSKKYSDVEVPASVTGYSFASDGDSGTCSPLRHSFQKQQREKTRWLNSGRGDEASEEGQNGSSPKSKTKVWTNITHDHVKPLLQSLSSGVCVPSCITNCLWTKEDGHRTSTSAVPNLFVPLNTNPKEVQEMRNKIREQNLQDIKTAGPQSQVLCGVVMDRSLVQGELVTASKAIIEKEYQPHVIVSTTGPNPFTTLTDRELEEYRREVERKQKGSEENLDEAREQKEKSPPDQPAVPHPPPSTPIKLEEGDGCAREYLLP

SEQ ID NO: 2612 - protein, 662 aa, Homo sapiens; identical to SEQ ID NO: 2611
  Payload ID: 616;
  Gene Symbol: ADD1;
  Gene Name: adducin 1 (alpha);
  Uniprot ID:  P35611;
  ENSP ID: ENSP00000381193

SEQ ID NO: 2613 - protein, 737 aa, Homo sapiens
  Payload ID: 616;
  Gene Symbol: ADD1;
  Gene Name: adducin 1 (alpha);
  Uniprot ID:  P35611;
  ENSP ID: ENSP00000381197
MNGDSRAAVVTSPPPTTAPHKERYFDRVDENNPEYLRERNMAPDLRQDFNMMEQKKRVSMILQSPAFCEELESMIQEQFKKGKNPTGLLALQQIADFMTTNVPNVYPAAPQGGMAALNMSLGMVTPVNDLRGSDSIAYDKGEKLLRCKLAAFYRLADLFGWSQLIYNHITTRVNSEQEHFLIVPFGLLYSEVTASSLVKINLQGDIVDRGSTNLGVNQAGFTLHSAIYAARPDVKCVVHIHTPAGAAVSAMKCGLLPISPEALSLGEVAYHDYHGILVDEEEKVLIQKNLGPKSKVLILRNHGLVSVGESVEEAFYYIHNLVVACEIQVRTLASAGGPDNLVLLNPEKYKAKSRSPGSPVGEGTGSPPKWQIGEQEFEALMRMLDNLGYRTGYPYRYPALREKSKKYSDVEVPASVTGYSFASDGDSGTCSPLRHSFQKQQREKTRWLNSGRGDEASEEGQNGSSPKSKTKWTKEDGHRTSTSAVPNLFVPLNTNPKEVQEMRNKIREQNLQDIKTAGPQSQVLCGVVMDRSLVQGELVTASKAIIEKEYQPHVIVSTTGPNPFTTLTDRELEEYRREVERKQKGSEENLDEAREQKEKSPPDQPAVPHPPPSTPIKLEEDLVPEPTTGDDSDAATFKPTLPDLSPDEPSEALGFPMLEKEEEAHRPPSPTEAPTEASPEPAPDPAPVAEEAAPSAVEEGAAADPGSDGSPGKSPSKKKKKFRTPSFLKKSKKKSDS

SEQ ID NO: 2614 - protein, 400 aa, Homo sapiens [sequence omitted]

SEQ ID NO: 2615 - protein, 632 aa, Homo sapiens
  Payload ID: 616;
  Gene Symbol: ADD1;
  Gene Name: adducin 1 (alpha);
  ENSP ID: ENSP00000421907
MNGDSRAAVVTSPPPTTAPHKERYFDRVDENNPEYLRERNMAPDLRQDFNMMEQKKRVSMILQSPAFCEELESMIQEQFKKGKNPTGLLALQQIADFMTTNVPNVYPAAPQGGMAALNMSLGMVTPVNDLRGSDSIAYDKGEKLLRCKLAAFYRLADLFGWSQLIYNHITTRVNSEQEHFLIVPFGLLYSEVTASSLVKINLQGDIVDRGSTNLGVNQAGFTLHSAIYAARPDVKCVVHIHTPAGAAVSAMKCGLLPISPEALSLGEVAYHDYHGILVDEEEKVLIQKNLGPKSKVLILRNHGLVSVGESVEEAFYYIHNLVVACEIQVRTLASAGGPDNLVLLNPEKYKAKSRSPGSPVGEGTGSPPKWQIGEQEFEALMRMLDNLGYRTGYPYRYPALREKSKKYSDVEVPASVTGYSFASDGDSGTCSPLRHSFQKQQREKTRWLNSGRGDEASEEGQNGSSPKSKTKWTKEDGHRTSTSAVPNLFVPLNTNPKEVQEMRNKIREQNLQDIKTAGPQSQVLCGVVMDRSLVQGELVTASKAIIEKEYQPHVIVSTTGPNPFTTLTDRELEEYRREVERKQKGSEENLDEAREQKEKSPPDQPAVPHPPPSTPIKLEEAGDGCAREYLLP

SEQ ID NO: 2616 - protein, 137 aa, Homo sapiens
  Payload ID: 616;
  Gene Symbol: ADD1;
  Gene Name: adducin 1 (alpha);
  ENSP ID: ENSP00000421918
MNGDSRAAVVTSPPPTTAPHKERYFDRVDENNPEYLRERNMAPDLRQDFNMMEQKKRVSMILQSPAFCEELESMIQEQFKKGKNPTGLLALQQIADFMTTNVPNVYPAAPQGGMAALNMSLGMVTPVNDLRGSDSIA

SEQ ID NO: 2617 - protein, 663 aa, Homo sapiens
  Payload ID: 616;
  Gene Symbol: ADD1;
  Gene Name: adducin 1 (alpha);
  ENSP ID: ENSP00000423024
MNGDSRAAVVTSPPPTTAPHKERYFDRVDENNPEYLRERNMAPDLRQDFNMMEQKKRVSMILQSPAFCEELESMIQEQFKKGKNPTGLLALQQIADFMTTNVPNVYPAAPQGGMAALNMSLGMVTPVNDLRGSDSIAYDKGEKLLRCKLAAFYRLADLFGWSQLIYNHITTRVNSEQEHFLIVPFGLLYSEVTASSLVKINLQGDIVDRGSTNLGVNQAGFTLHSAIYAARPDVKCVVHIHTPAGAAVSAMKCGLLPISPEALSLGEVAYHDYHGILVDEEEKVLIQKNLGPKSKVLILRNHGLVSVGESVEEAFYYIHNLVVACEIQVRTLASAGGPDNLVLLNPEKYKAKSRSPGSPVGEGTGSPPKWQIGEQEFEALMRMLDNLGYRTGYPYRYPALREKSKKYSDVEVPASVTGYSFASDGDSGTCSPLRHSFQKQQREKTRWLNSGRGDEASEEGQNGSSPKSKTKVWTNITHDHVKPLLQSLSSGVCVPSCITNCLWTKEDGHRTSTSAVPNLFVPLNTNPKEVQEMRNKIREQNLQDIKTAGPQSQVLCGVVMDRSLVQGELVTASKAIIEKEYQPHVIVSTTGPNPFTTLTDRELEEYRREVERKQKGSEENLDEAREQKEKSPPDQPAVPHPPPSTPIKLEEAGDGCAREYLLP

SEQ ID NO: 2618 - protein, 444 aa, Homo sapiens
  Payload ID: 616;
  Gene Symbol: ADD1;
  Gene Name: adducin 1 (alpha);
  ENSP ID: ENSP00000424143
  MOD_RES (1)..(1): Any amino acid
XVLILRNHGLVSVGESVEEAFYYIHNLVVACEIQVRTLASAGGPDNLVLLNPEKYKAKSRSPGSPVGEGTGSPPKWQIGEQEFEALMRMLDNLGYRTGYPYRYPALREKSKKYSDVEVPASVTGYSFASDGDSGTCSPLRHSFQKQQREKTRWLNSGRGDEASEEGQNGSSPKSKTKVWTNITHDHVKPLLQSLSSGVCVPSCITNCLWTKEDGHRTSTSAVPNLFVPLNTNPKEVQEMRNKIREQNLQDIKTAGPQSQVLCGVVMDRSLVQGELVTASKAIIEKEYQPHVIVSTTGPNPFTTLTDRELEEYRREVERKQKGSEENLDEAREQKEKSPPDQPAVPHPPPSTPIKLEEDLVPEPTTGDDSDAATFKPTLPDLSPDEPSEALGFPMLEKEEEAHRPPSPTEAPTEASPEPAPDPAPVAEEAAPSAVEEGAAADPGS

SEQ ID NO: 2619 - protein, 69 aa, Homo sapiens
  Payload ID: 616;
  Gene Symbol: ADD1;
  Gene Name: adducin 1 (alpha);
  ENSP ID: ENSP00000425703
MNGDSRAAVVTSPPPTTAPHKERYFDRVDENNPEYLRERNMAPDLRQDFNMMEQKKRVSMILQSPVLVW

SEQ ID NO: 2620 - protein, 142 aa, Homo sapiens
  Payload ID: 616;
  Gene Symbol: ADD1;
  Gene Name: adducin 1 (alpha);
  ENSP ID: ENSP00000426700
MNGDSRAAVVTSPPPTTAPHKERYFDRVDENNPEYLRERNMAPDLRQDFNMMEQKKRVSMILQSPTRVNSEQEHFLIVPFGLLYSEVTASSLVKINLQGDIVDRGSTNLGVNQAGFTLHSAIYAARPDVKCVVHIHTPAGAA

SEQ ID NO: 2621 - protein, 105 aa, Homo sapiens
  Payload ID: 616;
  Gene Symbol: ADD1;
  Gene Name: adducin 1 (alpha);
  ENSP ID: ENSP00000438069
EMRNKIREQNLQDIKTAGPQSQVLCGVVMDRSLVQRIWTRLENRKKRVLQTSLRSPTRLPALPSSWRKTLCRSRLLEMTVMLPPLSQLSPICPLMNLQKHSASQC

SEQ ID NO: 2622 - protein, 114 aa, Homo sapiens
  Payload ID: 616;
  Gene Symbol: ADD1;
  Gene Name: adducin 1 (alpha);
  ENSP ID: ENSP00000441388
  MOD_RES (1)..(1): Any amino acid
XVSTTGPNPFTTLTDRELEEYRREVERKQKGSEENLDEAREQKEKSPPDQPAVPHPPPSTPIKLEEGKTDLYVSCDQTLCRSRLLEMTVMLPPLSQLSPICPLMNLQKHSASQC

SEQ ID NO: 2623 - protein, 726 aa, Homo sapiens
  Payload ID: 617;
  Gene Symbol: ADD2;
  Gene Name: adducin 2 (beta);
  Uniprot ID:  P35612;
  ENSP ID: ENSP00000264436
MSEETVPEAASPPPPQGQPYFDRFSEDDPEYMRLRNRAADLRQDFNLMEQKKRVTMILQSPSFREELEGLIQEQMKKGNNSSNIWALRQIADFMASTSHAVFPTSSMNVSMMTPINDLHTADSLNLAKGERLMRCKISSVYRLLDLYGWAQLSDTYVTLRVSKEQDHFLISPKGVSCSEVTASSLIKVNILGEVVEKGSSCFPVDTTGFCLHSAIYAARPDVRCIIHLHTPATAAVSAMKWGLLPVSHNALLVGDMAYYDFNGEMEQEADRINLQKCLGPTCKILVLRNHGVVALGDTVEEAFYKIFHLQAACEIQVSALSSAGGVENLILLEQEKHRPHEVGSVQWAGSTFGPMQKSRLGEHEFEALMRMLDNLGYRTGYTYRHPFVQEKTKHKSEVEIPATVTAFVFEEDGAPVPALRQHAQKQQKEKTRWLNTPNTYLRVNVADEVQRSMGSPRPKTTWMKADEVEKSSSGMPIRIENPNQFVPLYTDPQEVLEMRNKIREQNRQDVKSAGPQSQLLASVIAEKSRSPSTESQLMSKGDEDTKDDSEETVPNPFSQLTDQELEEYKKEVERKKLELDGEKETAPEEPGSPAKSAPASPVQSPAKEAETKSPLVSPSKSLEEGTKKTETSKAATTEPETTQPEGVVVNGREEEQTAEEILSKGLSQMTTSADTDVDTSKDKTESVTSGPMSPEGSPSKSPSKKKKKFRTPSFLKKSKKKEKVES

SEQ ID NO: 2624 - protein, 643 aa, Homo sapiens
  Payload ID: 617;
  Gene Symbol: ADD2;
  Gene Name: adducin 2 (beta);
  Uniprot ID:  P35612;
  ENSP ID: ENSP00000347972
MSEETVPEAASPPPPQGQPYFDRFSEDDPEYMRLRNRAADLRQDFNLMEQKKRVTMILQSPSFREELEGLIQEQMKKGNNSSNIWALRQIADFMASTSHAVFPTSSMNVSMMTPINDLHTADSLNLAKGERLMRCKISSVYRLLDLYGWAQLSDTYVTLRVSKEQDHFLISPKGVSCSEVTASSLIKVNILGEVVEKGSSCFPVDTTGFCLHSAIYAARPDVRCIIHLHTPATAAVSAMKWGLLPVSHNALLVGDMAYYDFNGEMEQEADRINLQKCLGPTCKILVLRNHGVVALGDTVEEAFYKIFHLQAACEIQVSALSSAGGVENLILLEQEKHRPHEVGSVQWAGSTFGPMQKSRLGEHEFEALMRMLDNLGYRTGYTYRHPFVQEKTKHKSEVEIPATVTAFVFEEDGAPVPALRQHAQKQQKEKTRWLNTPNTYLRVNVADEVQRSMGSPRPKTTWMKADEVEKSSSGMPIRIENPNQFVPLYTDPQEVLEMRNKIREQNRQDVKSAGPQSQLLASVIAEKSRSPSTESQLMSKGDEDTKDDSEETVPNPFSQLTDQELEEYKKEVERKKLELDETGQEREPGSGPAVCEFFSVALHIWSNILERKKLPQKSLAHLQSLHLLLQCRAQRRRQRQRAL

SEQ ID NO: 2625 - protein, 726 aa, Homo sapiens; identical to SEQ ID NO: 2623
  Payload ID: 617;
  Gene Symbol: ADD2;
  Gene Name: adducin 2 (beta);
  Uniprot ID:  P35612;
  ENSP ID: ENSP00000384303

SEQ ID NO: 2626 - protein, 726 aa, Homo sapiens; identical to SEQ ID NO: 2623
  Payload ID: 617;
  Gene Symbol: ADD2;
  Gene Name: adducin 2 (beta);
  Uniprot ID:  P35612;
  ENSP ID: ENSP00000384677

SEQ ID NO: 2627 - protein, 559 aa, Homo sapiens
  Payload ID: 617;
  Gene Symbol: ADD2;
  Gene Name: adducin 2 (beta);
  Uniprot ID:  P35612;
  ENSP ID: ENSP00000388072
MSEETVPEAASPPPPQGQPYFDRFSEDDPEYMRLRNRAADLRQDFNLMEQKKRVTMILQSPSFREELEGLIQEQMKKGNNSSNIWALRQIADFMASTSHAVFPTSSMNVSMMTPINDLHTADSLNLAKGERLMRCKISSVYRLLDLYGWAQLSDTYVTLRVSKEQDHFLISPKGVSCSEVTASSLIKVNILGEVVEKGSSCFPVDTTGFCLHSAIYAARPDVRCIIHLHTPATAAVSAMKWGLLPVSHNALLVGDMAYYDFNGEMEQEADRINLQKCLGPTCKILVLRNHGVVALGDTVEEAFYKIFHLQAACEIQVSALSSAGGVENLILLEQEKHRPHEVGSVQWAGSTFGPMQKSRLGEHEFEALMRMLDNLGYRTGYTYRHPFVQEKTKHKSEVEIPATVTAFVFEEDGAPVPALRQHAQKQQKEKTRWLNTPNTYLRVNVADEVQRSMGSPRPKTTWMKADEVEKSSSGMPIRIENPNQFVPLYTDPQEVLEMRNKIREQNRQDVKSAGPQSQLLASVIAEKSRSPVEQRLPLTGGETCLPSGSSVPGAGLQDP

SEQ ID NO: 2628 - protein, 575 aa, Homo sapiens
  Payload ID: 617;
  Gene Symbol: ADD2;
  Gene Name: adducin 2 (beta);
  Uniprot ID:  P35612;
  ENSP ID: ENSP00000398112
MPRRRVPGANCKPTGKMSEETVPEAASPPPPQGQPYFDRFSEDDPEYMRLRNRAADLRQDFNLMEQKKRVTMILQSPSFREELEGLIQEQMKKGNNSSNIWALRQIADFMASTSHAVFPTSSMNVSMMTPINDLHTADSLNLAKGERLMRCKISSVYRLLDLYGWAQLSDTYVTLRVSKEQDHFLISPKGVSCSEVTASSLIKVNILGEVVEKGSSCFPVDTTGFCLHSAIYAARPDVRCIIHLHTPATAAVSAMKWGLLPVSHNALLVGDMAYYDFNGEMEQEADRINLQKCLGPTCKILVLRNHGVVALGDTVEEAFYKIFHLQAACEIQVSALSSAGGVENLILLEQEKHRPHEVGSVQWAGSTFGPMQKSRLGEHEFEALMRMLDNLGYRTGYTYRHPFVQEKTKHKSEVEIPATVTAFVFEEDGAPVPALRQHAQKQQKEKTRWLNTPNTYLRVNVADEVQRSMGSPRPKTTWMKADEVEKSSSGMPIRIENPNQFVPLYTDPQEVLEMRNKIREQNRQDVKSAGPQSQLLASVIAEKSRSPVEQRLPLTGGETCLPSGSSVPGAGLQDP

SEQ ID NO: 2629 - protein, 17 aa, Homo sapiens
  Payload ID: 617;
  Gene Symbol: ADD2;
  Gene Name: adducin 2 (beta);
  ENSP ID: ENSP00000403722
MSEETVPEAASPPPPQG

SEQ ID NO: 2630 - protein, 226 aa, Homo sapiens
  Payload ID: 617;
  Gene Symbol: ADD2;
  Gene Name: adducin 2 (beta);
  ENSP ID: ENSP00000412357
MSEETVPEAASPPPPQGQPYFDRFSEDDPEYMRLRNRAADLRQDFNLMEQKKRVTMILQSPSFREELEGLIQEQMKKGNNSSNIWALRQIADFMASTSHAVFPTSSMNVSMMTPINDLHTADSLNLAKGERLMRCKISSVYRLLDLYGWAQLSDTYVTLRVSKEQDHFLISPKGVSCSEVTASSLIKVNILGEVVEKGSSCFPVDTTGFCLHSAIYAARPDVRCII

SEQ ID NO: 2631 - protein, 142 aa, Homo sapiens
  Payload ID: 617;
  Gene Symbol: ADD2;
  Gene Name: adducin 2 (beta);
  ENSP ID: ENSP00000412681
MSEETVPEAASPPPPQGQPYFDRFSEDDPEYMRLRNRAADLRQDFNLMEQKKRVTMILQSPSFREELEGLIQEQMKKGNNSSNIWALRQIADFMASTSHAVFPTSSMNVSMMTPINDLHTADSLNLAKGERLMRCKISSVYR

SEQ ID NO: 2632 - protein, 332 aa, Homo sapiens
  Payload ID: 617;
  Gene Symbol: ADD2;
  Gene Name: adducin 2 (beta);
  ENSP ID: ENSP00000414546
MSEETVPEAASPPPPQGQPYFDRFSEDDPEYMRLRNRAADLRQDFNLMEQKKRVTMILQSPSFREELEGLIQEQMKKGNNSSNIWALRQIADFMASTSHAVFPTSSMNVSMMTPINDLHTADSLNLAKGERLMRCKISSVYRLLDLYGWAQLSDTYVTLRVSKEQDHFLISPKGVSCSEVTASSLIKVNILGEVVEKGSSCFPVDTTGFCLHSAIYAARPDVRCIIHLHTPATAAVSAMKWGLLPVSHNALLVGDMAYYDFNGEMEQEADRINLQKCLGPTCKSTESQLMSKGDEDTKDDSEETVPNPFSQLTDQELEEYKKEVERKKLELD

SEQ ID NO: 2633 - protein, 279 aa, Homo sapiens
  Payload ID: 617;
  Gene Symbol: ADD2;
  Gene Name: adducin 2 (beta);
  ENSP ID: ENSP00000430243
MSEETVPEAASPPPPQGQPYFDRFSEDDPEYMRLRNRAADLRQDFNLMEQKKRVTMILQSPSFREELEGLIQEQMKKGNNSSNIWALRQIADFMASTSHAVFPTSSMNVSMMTPINDLHTADSLNLAKGERLMRCKISSVYRLLDLYGWAQLSDTYVTLRVSKEQDHFLISPKGVSCSEVTASSLIKEVLEMRNKIREQNRQDVKSAGPQSQLLASVIAEKSRSPSTESQLMSKGDEDTKDDSEETVPNPFSQLTDQELEEYKKEVERKKLELDETGQE

SEQ ID NO: 2634 - protein, 674 aa, Homo sapiens
  Payload ID: 618;
  Gene Symbol: ADD3;
  Gene Name: adducin 3 (gamma);
  Uniprot ID:  Q9UEY8;
  ENSP ID: ENSP00000277900
MSSDASQGVITTPPPPSMPHKERYFDRINENDPEYIRERNMSPDLRQDFNMMEQRKRVTQILQSPAFREDLECLIQEQMKKGHNPTGLLALQQIADYIMANSFSGFSSPPLSLGMVTPINDLPGADTSSYVKGEKLTRCKLASLYRLVDLFGWAHLANTYISVRISKEQDHIIIIPRGLSFSEATASNLVKVNIIGEVVDQGSTNLKIDHTGFSPHAAIYSTRPDVKCVIHIHTLATAAVSSMKCGILPISQESLLLGDVAYYDYQGSLEEQEERIQLQKVLGPSCKVLVLRNHGVVALGETLEEAFHYIFNVQLACEIQVQALAGAGGVDNLHVLDFQKYKAFTYTVAASGGGGVNMGSHQKWKVGEIEFEGLMRTLDNLGYRTGYAYRHPLIREKPRHKSDVEIPATVTAFSFEDDTVPLSPLKYMAQRQQREKTRWLNSPNTYMKVNVPEESRNGETSPRTKITWMKAEDSSKVSGGTPIKIEDPNQFVPLNTNPNEVLEKRNKIREQNRYDLKTAGPQSQLLAGIVVDKPPSTMQFEDDDHGPPAPPNPFSHLTEGELEEYKRTIERKQQGLEENHELFSKSFISMEVPVMVVNGKDDMHDVEDELAKRVSRLSTSTTIENIEITIKSPEKIEEVLSPEGSPSKSPSKKKKKFRTPSFLKKNKKKEKVEA

SEQ ID NO: 2635 - protein, 706 aa, Homo sapiens
  Payload ID: 618;
  Gene Symbol: ADD3;
  Gene Name: adducin 3 (gamma);
  Uniprot ID:  Q9UEY8;
  ENSP ID: ENSP00000348381
MSSDASQGVITTPPPPSMPHKERYFDRINENDPEYIRERNMSPDLRQDFNMMEQRKRVTQILQSPAFREDLECLIQEQMKKGHNPTGLLALQQIADYIMANSFSGFSSPPLSLGMVTPINDLPGADTSSYVKGEKLTRCKLASLYRLVDLFGWAHLANTYISVRISKEQDHIIIIPRGLSFSEATASNLVKVNIIGEVVDQGSTNLKIDHTGFSPHAAIYSTRPDVKCVIHIHTLATAAVSSMKCGILPISQESLLLGDVAYYDYQGSLEEQEERIQLQKVLGPSCKVLVLRNHGVVALGETLEEAFHYIFNVQLACEIQVQALAGAGGVDNLHVLDFQKYKAFTYTVAASGGGGVNMGSHQKWKVGEIEFEGLMRTLDNLGYRTGYAYRHPLIREKPRHKSDVEIPATVTAFSFEDDTVPLSPLKYMAQRQQREKTRWLNSPNTYMKVNVPEESRNGETSPRTKITWMKAEDSSKVSGGTPIKIEDPNQFVPLNTNPNEVLEKRNKIREQNRYDLKTAGPQSQLLAGIVVDKPPSTMQFEDDDHGPPAPPNPFSHLTEGELEEYKRTIERKQQGLEDAEQELLSDDASSVSQIQSQTQSPQNVPEKLEENHELFSKSFISMEVPVMVVNGKDDMHDVEDELAKRVSRLSTSTTIENIEITIKSPEKIEEVLSPEGSPSKSPSKKKKKFRTPSFLKKNKKKEKVEA

SEQ ID NO: 2636 - protein, 674 aa, Homo sapiens; identical to SEQ ID NO: 2634
  Payload ID: 618;
  Gene Symbol: ADD3;
  Gene Name: adducin 3 (gamma);
  Uniprot ID:  Q9UEY8;
  ENSP ID: ENSP00000353286

SEQ ID NO: 2637 - protein, 672 aa, Homo sapiens
  Payload ID: 618;
  Gene Symbol: ADD3;
  Gene Name: adducin 3 (gamma);
  ENSP ID: ENSP00000480646
MSSDASQGVITTPPPPSMPHKERYFDRINENDPEYIRERNMSPDLRQDFNMMEQRKRVTQILQSPAFREDLECLIQEQMKKGHNPTGLLALQQIADYIMANSFSGFSSPPLSLGMVTPINDLPGADTSSYVKGEKLTRCKLASLYRLVDLFGWAHLANTYISVRISKEQDHIIIIPRGLSFSEATASNLVKVNIIGEVVDQGSTNLKIDHTGFSPHAAIYSTRPDVKCVIHIHTLATAAVSSMKCGILPISQESLLLGDVAYYDYQGSLEEQEERIQLQKVLGPSCKVLVLRNHGVVALGETLEEAFHYIFNVQLACEIQVQALAGAGGVDNLHVLDFQKYKAFTYTVAASGGGGVNMGSHQKWKVGEIEFEGLMRTLDNLGYRTGYAYRHPLIREKPRHKSDVEIPATVTAFSFEDDTVPLSQIHGTRQQREKTRWLNSPNTYMKVNVPEESRNGETSPRTKITWMKAEDSSKVSGGTPIKIEDPNQFVPLNTNPNEVLEKRNKIREQNRYDLKTAGPQSQLLAGIVVDKPPSTMQFEDDDHGPPAPPNPFSHLTEGELEEYKRTIERKQQGLEENHELFSKSFISMEVPVMVVNGKDDMHDVEDELAKRVSRLSTSTTIENIEITIKSPEKIEEVLSPEGSPSKSPSKKKKKFRTPSFLKKNKKKEKVEA

SEQ ID NO: 2638 - protein, 180 aa, Homo sapiens
  Payload ID: 619;
  Gene Symbol: APRT;
  Gene Name: adenine phosphoribosyltransferase;
  Uniprot ID:  P07741;
  ENSP ID: ENSP00000367615
MADSELQLVEQRIRSFPDFPTPGVVFRDISPVLKDPASFRAAIGLLARHLKATHGGRIDYIAGLDSRGFLFGPSLAQELGLGCVLIRKRGKLPGPTLWASYSLEYGKAELEIQKDALEPGQRVVVVDDLLATGGTMNAACELLGRLQAEVLECVSLVELTSLKGREKLAPVPFFSLLQYE

SEQ ID NO: 2639 - protein, 134 aa, Homo sapiens
  Payload ID: 619;
  Gene Symbol: APRT;
  Gene Name: adenine phosphoribosyltransferase;
  Uniprot ID:  P07741;
  ENSP ID: ENSP00000397007
MADSELQLVEQRIRSFPDFPTPGVVFRDISPVLKDPASFRAAIGLLARHLKATHGGRIDYIAGLDSRGFLFGPSLAQELGLGCVLIRKRGKLPGPTLWASYSLEYGKAELEIQKDALEPGQRVVVVDDLLATGV

SEQ ID NO: 2640 - protein, 162 aa, Homo sapiens
  Payload ID: 619;
  Gene Symbol: APRT;
  Gene Name: adenine phosphoribosyltransferase;
  ENSP ID: ENSP00000455692
  MOD_RES (1)..(1): Any amino acid
XADSELQLVEQRIRSFPDFPTPGVVFRDISPVLKDPASFRAAIGLLARHLKATHGGRIDYIAGLDSRGFLFGPSLAQELGLGCVLIRKRGKLPGPTLWASYSLEYGKAELEIQKDALEPGQRVVVVDDLLATGGAGLEHLLSAAQANWGPHPPIPRNHERCL

SEQ ID NO: 2641 - protein, 148 aa, Homo sapiens
  Payload ID: 619;
  Gene Symbol: APRT;
  Gene Name: adenine phosphoribosyltransferase;
  ENSP ID: ENSP00000455749
MADSELQLVEQRIRSFPDFPTPGVVFRDISPVLKDPASFRAAIGLLARHLKATHGGRIDYIAGLDSRGFLFGPSLAQELGLGCVLIRKRGKLPGPTLWASYSLEYGKLCFSHTEPNYTQRENAVNSFPTRAVSCPPVPQGREPQDNTR

SEQ ID NO: 2642 - protein, 153 aa, Homo sapiens
  Payload ID: 619;
  Gene Symbol: APRT;
  Gene Name: adenine phosphoribosyltransferase;
  ENSP ID: ENSP00000456012
MADSELQLVEQRIRSFPDFPTPGVVFRDISPVLKDPASFRAAIGLLARHLKATHGGRIDYIAGECPVAASRALPPLRAPRAELEIQKDALEPGQRVVVVDDLLATGGTMNAACELLGRLQAEVLECVSLVELTSLKGREKLAPVPFFSLLQYE

SEQ ID NO: 2643 - protein, 63 aa, Homo sapiens
  Payload ID: 619;
  Gene Symbol: APRT;
  Gene Name: adenine phosphoribosyltransferase;
  ENSP ID: ENSP00000456905
MADSELQLVEQRIRSFPDFPTPGVVFRDISPVLKDPASFRAAIGLLARHLKATHGGRIDYIAG

SEQ ID NO: 2644 - protein, 63 aa, Homo sapiens; identical to SEQ ID NO: 2643
  Payload ID: 619;
  Gene Symbol: APRT;
  Gene Name: adenine phosphoribosyltransferase;
  ENSP ID: ENSP00000457964

SEQ ID NO: 2645 - protein, 2303 aa, Homo sapiens
  Payload ID: 620;
  Gene Symbol: APC2;
  Gene Name: adenomatosis polyposis coli 2;
  Uniprot ID:  O95996;
  ENSP ID: ENSP00000233607
MASSVAPYEQLVRQVEALKAENSHLRQELRDNSSHLSKLETETSGMKEVLKHLQGKLEQEARVLVSSGQTEVLEQLKALQMDITSLYNLKFQPPTLGPEPAARTPEGSPVHGSGPSKDSFGELSRATIRLLEELDRERCFLLNEIEKEEKEKLWYYSQLQGLSKRLDELPHVETQFSMQMDLIRQQLEFEAQHIRSLMEERFGTSDEMVQRAQIRASRLEQIDKELLEAQDRVQQTEPQALLAVKSVPVDEDPETEVPTHPEDGTPQPGNSKVEVVFWLLSMLATRDQEDTARTLLAMSSSPESCVAMRRSGCLPLLLQILHGTEAAAGGRAGAPGAPGAKDARMRANAALHNIVFSQPDQGLARKEMRVLHVLEQIRAYCETCWDWLQARDGGPEGGGAGSAPIPIEPQICQATCAVMKLSFDEEYRRAMNELGGLQAVAELLQVDYEMHKMTRDPLNLALRRYAGMTLTNLTFGDVANKATLCARRGCMEAIVAQLASDSEELHQVVSSILRNLSWRADINSKKVLREAGSVTALVQCVLRATKESTLKSVLSALWNLSAHSTENKAAICQVDGALGFLVSTLTYKCQSNSLAIIESGGGILRNVSSLVATREDYRQVLRDHNCLQTLLQHLTSHSLTIVSNACGTLWNLSARSARDQELLWDLGAVGMLRNLVHSKHKMIAMGSAAALRNLLAHRPAKHQAAATAVSPGSCVPSLYVRKQRALEAELDARHLAQALEHLEKQGPPAAEAATKKPLPPLRHLDGLAQDYASDSGCFDDDDAPSSLAAAAATGEPASPAALSLFLGSPFLQGQALARTPPTRRGGKEAEKDTSGEAAVAAKAKAKLALAVARIDQLVEDISALHTSSDDSFSLSSGDPGQEAPREGRAQSCSPCRGPEGGRREAGSRAHPLLRLKAAHASLSNDSLNSGSASDGYCPREHMLPCPLAALASRREDPRCGQPRPSRLDLDLPGCQAEPPAREATSADARVRTIKLSPTYQHVPLLEGASRAGAEPLAGPGISPGARKQAWLPADHLSKVPEKLAAAPLSVASKALQKLAAQEGPLSLSRCSSLSSLSSAGRPGPSEGGDLDDSDSSLEGLEEAGPSEAELDSTWRAPGATSLPVAIPAPRRNRGRGLGVEDATPSSSSENYVQETPLVLSRCSSVSSLGSFESPSIASSIPSEPCSGQGSGTISPSELPDSPGQTMPPSRSKTPPLAPAPQGPPEATQFSLQWESYVKRFLDIADCRERCRLPSELDAGSVRFTVEKPDENFSCASSLSALALHEHYVQQDVELRLLPSACPERGGGAGGAGLHFAGHRRREEGPAPTGSRPRGAADQELELLRECLGAAVPARLRKVASALVPGRRALPVPVYMLVPAPAPAQEDDSCTDSAEGTPVNFSSAASLSDETLQGPPRDQPGGPAGRQRPTGRPTSARQAMGHRHKAGGAGRSAEQSRGAGKNRAGLELPLGRPPSAPADKDGSKPGRTRGDGALQSLCLTTPTEEAVYCFYGNDSDEEPPAAAPTPTHRRTSAIPRAFTRERPQGRKEAPAPSKAAPAAPPPARTQPSLIADETPPCYSLSSSASSLSEPEPSEPPAVHPRGREPAVTKDPGPGGGRDSSPSPRAAEELLQRCISSALPRRRPPVSGLRRRKPRATRLDERPAEGSRERGEEAAGSDRASDLDSVEWRAIQEGANSIVTWLHQAAAATREASSESDSILSFVSGLSVGSTLQPPKHRKGRQAEGEMGSARRPEKRGAASVKTSGSPRSPAGPEKPRGTQKTTPGVPAVLRGRTVIYVPSPAPRAQPKGTPGPRATPRKVAPPCLAQPAAPAKVPSPGQQRSRSLHRPAKTSELATLSQPPRSATPPARLAKTPSSSSSQTSPASQPLPRKRPPVTQAAGALPGPGASPVPKTPARTLLAKQHKTQRSPVRIPFMQRPARRGPPPLARAVPEPGPRGRAGTEAGPGARGGRLGLVRVASALSSGSESSDRSGFRRQLTFIKESPGLRRRRSELSSAESAASAPQGASPRRGRPALPAVFLCSSRCEELRAAPRQGPAPARQRPPAARPSPGERPARRTTSESPSRLPVRAPAARPETVKRYASLPHISVARRPDGAVPAAPASADAARRSSDGEPRPLPRVAAPGTTWRRIRDEDVPHILRSTLPATALPLRGSTPEDAPAGPPPRKTSDAVVQTEEVAAPKTNSSTSPSLETREPPGAPAGGQLSLLGSDVDGPSLAKAPISAPFVHEGLGVAVGGFPASRHGSPSRSARVPPFNYVPSPMVVAATTDSAAEKAPATASATLLE

SEQ ID NO: 2646 - protein, 730 aa, Homo sapiens
  Payload ID: 620;
  Gene Symbol: APC2;
  Gene Name: adenomatosis polyposis coli 2;
  ENSP ID: ENSP00000238483
MASSVAPYEQLVRQVEALKAENSHLRQELRDNSSHLSKLETETSGMKEVLKHLQGKLEQEARVLVSSGQTEVLEQLKALQMDITSLYNLKFQPPTLGPEPAARTPEGSPVHGSGPSKDSFGELSRATIRLLEELDRERCFLLNEIEKEEKEKLWYYSQLQGLSKRLDELPHVETFSMQMDLIRQQLEFEAQHIRSLMEERFGTSDEMVQRAQIRASRLEQIDKELLEAQDRVQQTEPQALLAVKSVPVDEDPETEVPTHPEDGTPQPGNSKVEVVFWLLSMLATRDQEDTARTLLAMSSSPESCVAMRRSGCLPLLLQILHGTEAAAGGRAGAPGAPGAKDARMRANAALHNIVFSQPDQGLARKEMRVLHVLEQIRAYCETCWDWLQARDGGPEGGGAGSAPIPIEPQICQATCAVMKLSFDEEYRRAMNELGGLQAVAELLQVDYEMHKMTRDPLNLALRRYAGMTLTNLTFGDVANKATLCARRGCMEAIVAQLASDSEELHQVVSSILRNLSWRADINSKKVLREAGSVTALVQCVLRATKESTLKSVLSALWNLSAHSTENKAAICQVDGALGFLVSTLTYKCQSNSLAIIESGGGILRNVSSLVATREDYRQVLRDHNCLQTLLQHLTSHSLTIVSNACGTLWNLSARSARDQELLWDLGAVGMLRNLVHSKHKMIAMGSAAALRNLLAHRPAKHQAAATAVSPGSCVPSLYVRKQRALEAELD

SEQ ID NO: 2647 - protein, 2303 aa, Homo sapiens; identical to SEQ ID NO: 2645
  Payload ID: 620;
  Gene Symbol: APC2;
  Gene Name: adenomatosis polyposis coli 2;
  Uniprot ID:  O95996;
  ENSP ID: ENSP00000442954

SEQ ID NO: 2648 - protein, 193 aa, Homo sapiens
  Payload ID: 620;
  Gene Symbol: APC2;
  Gene Name: adenomatosis polyposis coli 2;
  ENSP ID: ENSP00000466173
MASSVAPYEQLVRQVEALKAENSHLRQELRDNSSHLSKLETETSGMKEVLKHLQGKLEQEARVLVSSGQTEVLEQLKALQMDITSLYNLKFQPPTLGPEPAARTPEGSPVHGSGPSKDSFGELSRATIRLLEELDRERCFLLNEIEKEEKEKLWYYSQLQGLSKRLDELPHVETFSMQMDLIRQQLEFEAQHI

SEQ ID NO: 2649 - protein, 170 aa, Homo sapiens
  Payload ID: 620;
  Gene Symbol: APC2;
  Gene Name: adenomatosis polyposis coli 2;
  ENSP ID: ENSP00000466803
MASSVAPYEQLVRQVEALKAENSHLRQELRDNSSHLSKLETETSGMKEVLKHLQGKLEQEARVLVSSGQTEVLEQLKALQMDITSLYNLKFQPPTLGPEPAARTPEGSPVHGSGPSKDSFGELSRATIRLLEELDRERCFLLNEIEKEEKEKLWYYSQLQGLSKRLDELP

SEQ ID NO: 2650 - protein, 702 aa, Homo sapiens
  Payload ID: 620;
  Gene Symbol: APC2;
  Gene Name: adenomatosis polyposis coli 2;
  ENSP ID: ENSP00000467073
MASSVAPYEQLVRQVEALKAENSHLRQELRDNSSHLSKLETETSGMKEVLKHLQGKLEQEARVLVSSGQTEVLEQLKALQMDITSLYNLKFQPPTLGPEPAARTPEGSPVHGSGPSKDSFGELSRATIRLLEELDRERCFLLNEIEKEEKEKLWYYSQLQGLSKRLDELPHVETQFSMQMDLIRQQLEFEAQHIRSLMEERFGTSDEMVQRAQIRASRLEQIDKELLEAQDRVQQTEPQALLAVKSVPVDEDPETEVPTHPEDGTPQPGNSKVEVVFWLLSMLATRDQEDTARTLLAMSSSPESCVAMRRSGCLPLLLQILHGTEAAAGGRAGAPGAPGAKDARMRANAALHNIVFSQPDQGLARKEMRVLHVLEQIRAYCETCWDWLQARDGGPEGGGAGSAPIPIEPQICQATCAVMKLSFDEEYRRAMNELGGLQAVAELLQVDYEMHKMTRDPLNLALRRYAGMTLTNLTFGDVANKATLCARRGCMEAIVAQLASDSEELHQVVSSILRNLSWRADINSKKVLREAGSVTALVQCVLRATKESTLKSVLSALWNLSAHSTENKAAICQVDGALGFLVSTLTYKCQSNSLAIIESGGGILRNVSSLVATREDYRQVLRDHNCLQTLLQHLTSHSLTIVSNACGTLWNLSARSARDQELLWDLGAVGMLRNLVHSKHKMIAMGSAAALRNLLAHRPAKH

SEQ ID NO: 2651 - protein, 138 aa, Homo sapiens
  Payload ID: 620;
  Gene Symbol: APC2;
  Gene Name: adenomatosis polyposis coli 2;
  ENSP ID: ENSP00000468199
MASSVAPYEQLVRQVEALKAENSHLRQELRDNSSHLSKLETETSGMKEVLKHLQGKLEQEARVLVSSGQTEVLEQLKALQMDITSLYNLKFQPPTLGPEPAARTPEGSPVHGSGPSKDSFGELSRATIRLLEELDRER

SEQ ID NO: 2652 - protein, 514 aa, Homo sapiens
  Payload ID: 621;
  Gene Symbol: APCDD1;
  Gene Name: adenomatosis polyposis coli down-regulated 1;
  Uniprot ID:  Q8J025;
  ENSP ID: ENSP00000347433
MSWPRRLLLRYLFPALLLHGLGEGSALLHPDSRSHPRSLEKSAWRAFKESQCHHMLKHLHNGARITVQMPPTIEGHWVSTGCEVRSGPEFITRSYRFYHNNTFKAYQFYYGSNRCTNPTYTLIIRGKIRLRQASWIIRGGTEADYQLHNVQVICHTEAVAEKLGQQVNRTCPGFLADGGPWVQDVAYDLWREENGCECTKAVNFAMHELQLIRVEKQYLHHNLDHLVEELFLGDIHTDATQRMFYRPSSYQPPLQNAKNHDHACIACRIIYRSDEHHPPILPPKADLTIGLHGEWVSQRCEVRPEVLFLTRHFIFHDNNNTWEGHYYHYSDPVCKHPTFSIYARGRYSRGVLSSRVMGGTEFVFKVNHMKVTPMDAATASLLNVFNGNECGAEGSWQVGIQQDVTHTNGCVALGIKLPHTEYEIFKMEQDARGRYLLFNGQRPSDGSSPDRPEKRATSYQMPLVQCASSSPRAEDLAEDSGSSLYGRAPGRHTWSLLLAALACLVPLLHWNIRR

SEQ ID NO: 2653 - protein, 61 aa, Homo sapiens
  Payload ID: 621;
  Gene Symbol: APCDD1;
  Gene Name: adenomatosis polyposis coli down-regulated 1;
  ENSP ID: ENSP00000404930
MSWPRRLLLRYLFPALLLHEPRPCLHRLSDHLSVRRAPPSHPAPKGRPDHRPARGVGEPAL

SEQ ID NO: 2654 - protein, 184 aa, Homo sapiens
  Payload ID: 621;
  Gene Symbol: APCDD1;
  Gene Name: adenomatosis polyposis coli down-regulated 1;
  ENSP ID: ENSP00000463104
MSWPRRLLLRYLFPALLLHGLGEGSALLHPDSRSHPRSLEKSAWRAFKESQCHHMLKHLHNGARITVQMPPTIEGHWVSTGCEVRSGPEFITRSYRFYHNNTFKAYQFYYGSNRCTNPTYTLIIRGKIRLRQASWIIRGGTEADYQLHNVQGHGRHRVRVQSESHEGHPHGCGHSLTAQRLQRE

SEQ ID NO: 2655 - protein, 22 aa, Homo sapiens
  Payload ID: 621;
  Gene Symbol: APCDD1;
  Gene Name: adenomatosis polyposis coli down-regulated 1;
  ENSP ID: ENSP00000463110
MSWPRRLLLRYLFPALLLHAVK

SEQ ID NO: 2656 - protein, 94 aa, Homo sapiens
  Payload ID: 621;
  Gene Symbol: APCDD1;
  Gene Name: adenomatosis polyposis coli down-regulated 1;
  ENSP ID: ENSP00000464649
PEDVLPALQLPAPSAECQVEMGFHHVGQDGLQLPTSSDPPALASQSAGITGVSHRPPGRHLSNDLRTTTMPASPVGSSIGQTSTTLPSCPQRQT

SEQ ID NO: 2657 - protein, 227 aa, Homo sapiens
  Payload ID: 621;
  Gene Symbol: APCDD1;
  Gene Name: adenomatosis polyposis coli down-regulated 1;
  ENSP ID: ENSP00000476491
  MOD_RES (1)..(1): Any amino acid
XDVAYDLWREENGCECTKAVNFAMHELQLIRVEKQYLHHNLDHLVEELFLGDIHTDATQRMFYRPSSYQPPLQNAKCAAESSGSFQILPQDSSEKEQNGLSHWCLSRPGHQKDWALCAHAGPATAGCPSCLWPPAETGRKAGRTSSKTVHACPGEAGTSSFELFYFPNCWSIETKLKISLNAKLSFKPRASAPLETGHRVKIETLSQLVFLSFIQLCCEVQSPLANK

SEQ ID NO: 2658 - protein, 501 aa, Homo sapiens
  Payload ID: 622;
  Gene Symbol: APCDD1L;
  Gene Name: adenomatosis polyposis coli down-regulated 1-like;
  Uniprot ID:  Q8NCL9;
  ENSP ID: ENSP00000360191
MPAAMLPYACVLVLLGAHTAPAAGEAGGSCLRWEPHCQQPLPDRVPSTAILPPRLNGPWISTGCEVRPGPEFLTRAYTFYPSRLFRAHQFYYEDPFCGEPAHSLLVKGKVRLRRASWVTRGATEADYHLHKVGIVFHSRRALVDVTGRLNQTRAGRDCARRLPPARAWLPGALYELRSARAQGDCLEALGLTMHELSLVRVQRRLQPQPRASPRLVEELYLGDIHTDPAERRHYRPTGYQRPLQSALHHVQPCPACGLIARSDVHHPPVLPPPLALPLHLGGWWVSSGCEVRPAVLFLTRLFTFHGHSRSWEGYYHHFSDPACRQPTFTVYAAGRYTRGTPSTRVRGGTELVFEVTRAHVTPMDQVTTAMLNFSEPSSCGGAGAWSMGTERDVTATNGCLPLGIRLPHVEYELFKMEQDPLGQSLLFIGQRPTDGSSPDTPEKRPTSYQAPLVLCHGEAPDFSRPPQHRPSLQKHPSTGGLHIAPFPLLPLVLGLAFLHWL

SEQ ID NO: 2659 - protein, 80 aa, Homo sapiens
  Payload ID: 622;
  Gene Symbol: APCDD1L;
  Gene Name: adenomatosis polyposis coli down-regulated 1-like;
  ENSP ID: ENSP00000396856
MAENSGPGVRPPGWEAQINIISTRLALAHTAPAAGEAGGSCLRWEPHCQQPLPDRVPSTAILPPRLNGPWISTGCEVRPG

SEQ ID NO: 2660 - protein, 2843 aa, Homo sapiens
  Payload ID: 623;
  Gene Symbol: APC;
  Gene Name: adenomatous polyposis coli;
  Uniprot ID:  P25054;
  ENSP ID: ENSP00000257430
MAAASYDQLLKQVEALKMENSNLRQELEDNSNHLTKLETEASNMKEVLKQLQGSIEDEAMASSGQIDLLERLKELNLDSSNFPGVKLRSKMSLRSYGSREGSVSSRSGECSPVPMGSFPRRGFVNGSRESTGYLEELEKERSLLLADLDKEEKEKDWYYAQLQNLTKRIDSLPLTENFSLQTDMTRRQLEYEARQIRVAMEEQLGTCQDMEKRAQRRIARIQQIEKDILRIRQLLQSQATEAERSSQNKHETGSHDAERQNEGQGVGEINMATSGNGQGSTTRMDHETASVLSSSSTHSAPRRLTSHLGTKVEMVYSLLSMLGTHDKDDMSRTLLAMSSSQDSCISMRQSGCLPLLIQLLHGNDKDSVLLGNSRGSKEARARASAALHNIIHSQPDDKRGRREIRVLHLLEQIRAYCETCWEWQEAHEPGMDQDKNPMPAPVEHQICPAVCVLMKLSFDEEHRHAMNELGGLQAIAELLQVDCEMYGLTNDHYSITLRRYAGMALTNLTFGDVANKATLCSMKGCMRALVAQLKSESEDLQQVIASVLRNLSWRADVNSKKTLREVGSVKALMECALEVKKESTLKSVLSALWNLSAHCTENKADICAVDGALAFLVGTLTYRSQTNTLAIIESGGGILRNVSSLIATNEDHRQILRENNCLQTLLQHLKSHSLTIVSNACGTLWNLSARNPKDQEALWDMGAVSMLKNLIHSKHKMIAMGSAAALRNLMANRPAKYKDANIMSPGSSLPSLHVRKQKALEAELDAQHLSETFDNIDNLSPKASHRSKQRHKQSLYGDYVFDTNRHDDNRSDNFNTGNMTVLSPYLNTTVLPSSSSSRGSLDSSRSEKDRSLERERGIGLGNYHPATENPGTSSKRGLQISTTAAQIAKVMEEVSAIHTSQEDRSSGSTTELHCVTDERNALRRSSAAHTHSNTYNFTKSENSNRTCSMPYAKLEYKRSSNDSLNSVSSSDGYGKRGQMKPSIESYSEDDESKFCSYGQYPADLAHKIHSANHMDDNDGELDTPINYSLKYSDEQLNSGRQSPSQNERWARPKHIIEDEIKQSEQRQSRNQSTTYPVYTESTDDKHLKFQPHFGQQECVSPYRSRGANGSETNRVGSNHGINQNVSQSLCQEDDYEDDKPTNYSERYSEEEQHEEEERPTNYSIKYNEEKRHVDQPIDYSLKYATDIPSSQKQSFSFSKSSSGQSSKTEHMSSSSENTSTPSSNAKRQNQLHPSSAQSRSGQPQKAATCKVSSINQETIQTYCVEDTPICFSRCSSLSSLSSAEDEIGCNQTTQEADSANTLQIAEIKEKIGTRSAEDPVSEVPAVSQHPRTKSSRLQGSSLSSESARHKAVEFSSGAKSPSKSGAQTPKSPPEHYVQETPLMFSRCTSVSSLDSFESRSIASSVQSEPCSGMVSGIISPSDLPDSPGQTMPPSRSKTPPPPPQTAQTKREVPKNKAPTAEKRESGPKQAAVNAAVQRVQVLPDADTLLHFATESTPDGFSCSSSLSALSLDEPFIQKDVELRIMPPVQENDNGNETESEQPKESNENQEKEAEKTIDSEKDLLDDSDDDDIEILEECIISAMPTKSSRKAKKPAQTASKLPPPVARKPSQLPVYKLLPSQNRLQPQKHVSFTPGDDMPRVYCVEGTPINFSTATSLSDLTIESPPNELAAGEGVRGGAQSGEFEKRDTIPTEGRSTDEAQGGKTSSVTIPELDDNKAEEGDILAECINSAMPKGKSHKPFRVKKIMDQVQQASASSSAPNKNQLDGKKKKPTSPVKPIPQNTEYRTRVRKNADSKNNLNAERVFSDNKDSKKQNLKNNSKVFNDKLPNNEDRVRGSFAFDSPHHYTPIEGTPYCFSRNDSLSSLDFDDDDVDLSREKAELRKAKENKESEAKVTSHTELTSNQQSANKTQAIAKQPINRGQPKPILQKQSTFPQSSKDIPDRGAATDEKLQNFAIENTPVCFSHNSSLSSLSDIDQENNNKENEPIKETEPPDSQGEPSKPQASGYAPKSFHVEDTPVCFSRNSSLSSLSIDSEDDLLQECISSAMPKKKKPSRLKGDNEKHSPRNMGGILGEDLTLDLKDIQRPDSEHGLSPDSENFDWKAIQEGANSIVSSLHQAAAAACLSRQASSDSDSILSLKSGISLGSPFHLTPDQEEKPFTSNKGPRILKPGEKSTLETKKIESESKGIKGGKKVYKSLITGKVRSNSEISGQMKQPLQANMPSISRGRTMIHIPGVRNSSSSTSPVSKKGPPLKTPASKSPSEGQTATTSPRGAKPSVKSELSPVARQTSQIGGSSKAPSRSGSRDSTPSRPAQQPLSRPIQSPGRNSISPGRNGISPPNKLSQLPRTSSPSTASTKSSGSGKMSYTSPGRQMSQQNLTKQTGLSKNASSIPRSESASKGLNQMNNGNGANKKVELSRMSSTKSSGSESDRSERPVLVRQSTFIKEAPSPTLRRKLEESASFESLSPSSRPASPTRSQAQTPVLSPSLPDMSLSTHSSVQAGGWRKLPPNLSPTIEYNDGRPAKRHDIARSHSESPSRLPINRSGTWKREHSKHSSSLPRVSTWRRTGSSSSILSASSESSEKAKSEDEKHVNSISGTKQSKENQVSAKGTWRKIKENEFSPTNSTSQTVSSGATNGAESKTLIYQMAPAVSKTEDVWVRIEDCPINNPRSGRSPTGNTPPVIDSVSEKANPNIKDSKDNQAKQNVGNGSVPMRTVGLENRLNSFIQVDAPDQKGTEIKPGQNNPVPVSETNESSIVERTPFSSSSSSKHSSPSGTVAARVTPFNYNPSPRKSSADSTSARPSQIPTPVNNNTKKRDSKTDSTESSGTQSPKRHSGSYLVTSV

SEQ ID NO: 2661 - protein, 1135 aa, Homo sapiens
  Payload ID: 623;
  Gene Symbol: APC;
  Gene Name: adenomatous polyposis coli;
  ENSP ID: ENSP00000423224
MYASLGSGPVAPLPASVPPSVLGSWSTGGSRSCVRQETKSPGGARTSGHWASVWQEVLKQLQGSIEDEAMASSGQIDLLERLKELNLDSSNFPGVKLRSKMSLRSYGSREGSVSSRSGECSPVPMGSFPRRGFVNGSRESTGYLEELEKERSLLLADLDKEEKEKDWYYAQLQNLTKRIDSLPLTENFSLQTDMTRRQLEYEARQIRVAMEEQLGTCQDMEKRAQRSSQNKHETGSHDAERQNEGQGVGEINMATSGNGQGSTTRMDHETASVLSSSSTHSAPRRLTSHLGTKVEMVYSLLSMLGTHDKDDMSRTLLAMSSSQDSCISMRQSGCLPLLIQLLHGNDKDSVLLGNSRGSKEARARASAALHNIIHSQPDDKRGRREIRVLHLLEQIRAYCETCWEWQEAHEPGMDQDKNPMPAPVEHQICPAVCVLMKLSFDEEHRHAMNELGGLQAIAELLQVDCEMYGLTNDHYSITLRRYAGMALTNLTFGDVANKATLCSMKGCMRALVAQLKSESEDLQQVIASVLRNLSWRADVNSKKTLREVGSVKALMECALEVKKESTLKSVLSALWNLSAHCTENKADICAVDGALAFLVGTLTYRSQTNTLAIIESGGGILRNVSSLIATNEDHRQILRENNCLQTLLQHLKSHSLTIVSNACGTLWNLSARNPKDQEALWDMGAVSMLKNLIHSKHKMIAMGSAAALRNLMANRPAKYKDANIMSPGSSLPSLHVRKQKALEAELDAQHLSETFDNIDNLSPKASHRSKQRHKQSLYGDYVFDTNRHDDNRSDNFNTGNMTVLSPYLNTTVLPSSSSSRGSLDSSRSEKDRSLERERGIGLGNYHPATENPGTSSKRGLQISTTAAQIAKVMEEVSAIHTSQEDRSSGSTTELHCVTDERNALRRSSAAHTHSNTYNFTKSENSNRTCSMPYAKLEYKRSSNDSLNSVSSSDGYGKRGQMKPSIESYSEDDESKFCSYGQYPADLAHKIHSANHMDDNDGELDTPINYSLKYSDEQLNSGRQSPSQNERWARPKHIIEDEIKQSEQRQSRNQSTTYPVYTESTDDKHLKFQPHFGQQECVSPYRSRGANGSETNRVGSNHGINQNVSQSLCQEDDYEDDKPTNYSERYSEEEQH

SEQ ID NO: 2662 - protein, 1304 aa, Homo sapiens
  Payload ID: 623;
  Gene Symbol: APC;
  Gene Name: adenomatous polyposis coli;
  ENSP ID: ENSP00000423828
MAAASYDQLLKQVEALKMENSNLRQELEDNSNHLTKLETEASNMKEVLKQLQGSIEDEAMASSGQIDLLERLKELNLDSSNFPGVKLRSKMSLRSYGSREGSVSSRSGECSPVPMGSFPRRGFVNGSRESTGYLEELEKERSLLLADLDKEEKEKDWYYAQLQNLTKRIDSLPLTENFSLQTDMTRRQLEYEARQIRVAMEEQLGTCQDMEKRAQRRIARIQQIEKDILRIRQLLQSQATEAERSSQNKHETGSHDAERQNEGQGVGEINMATSGNGQGSTTRMDHETASVLSSSSTHSAPRRLTSHLGTKVEMVYSLLSMLGTHDKDDMSRTLLAMSSSQDSCISMRQSGCLPLLIQLLHGNDKDSVLLGNSRGSKEARARASAALHNIIHSQPDDKRGRREIRVLHLLEQIRAYCETCWEWQEAHEPGMDQDKNPMPAPVEHQICPAVCVLMKLSFDEEHRHAMNELGGLQAIAELLQVDCEMYGLTNDHYSITLRRYAGMALTNLTFGDVANKATLCSMKGCMRALVAQLKSESEDLQQVIASVLRNLSWRADVNSKKTLREVGSVKALMECALEVKKESTLKSVLSALWNLSAHCTENKADICAVDGALAFLVGTLTYRSQTNTLAIIESGGGILRNVSSLIATNEDHRQILRENNCLQTLLQHLKSHSLTIVSNACGTLWNLSARNPKDQEALWDMGAVSMLKNLIHSKHKMIAMGSAAALRNLMANRPAKYKDANIMSPGSSLPSLHVRKQKALEAELDAQHLSETFDNIDNLSPKASHRSKQRHKQSLYGDYVFDTNRHDDNRSDNFNTGNMTVLSPYLNTTVLPSSSSSRGSLDSSRSEKDRSLERERGIGLGNYHPATENPGTSSKRGLQISTTAAQIAKVMEEVSAIHTSQEDRSSGSTTELHCVTDERNALRRSSAAHTHSNTYNFTKSENSNRTCSMPYAKLEYKRSSNDSLNSVSSSDGYGKRGQMKPSIESYSEDDESKFCSYGQYPADLAHKIHSANHMDDNDGELDTPINYSLKYSDEQLNSGRQSPSQNERWARPKHIIEDEIKQSEQRQSRNQSTTYPVYTESTDDKHLKFQPHFGQQECVSPYRSRGANGSETNRVGSNHGINQNVSQSLCQEDDYEDDKPTNYSERYSEEEQHEEEERPTNYSIKYNEEKRHVDQPIDYSLKYATDIPSSQKQSFSFSKSSSGQSSKTEHMSSSSENTSTPSSNAKRQNQLHPSSAQSRSGQPQKAATCKVSSINQETIQTYCVEDTPICFSRCSSLSSLSSAEDEIGCNQTTQEADSANTLQI

SEQ ID NO: 2663 - protein, 287 aa, Homo sapiens
  Payload ID: 623;
  Gene Symbol: APC;
  Gene Name: adenomatous polyposis coli;
  ENSP ID: ENSP00000424265
MAAASYDQLLKQVEALKMENSNLRQELEDNSNHLTKLETEASNMKEVLKQLQGSIEDEAMASSGQIDLLERLKELNLDSSNFPGVKLRSKMSLRSYGSREGSVSSRSGECSPVPMGSFPRRGFVNGSRESTGYLEELEKERSLLLADLDKEEKEKDWYYAQLQNLTKRIDSLPLTENFSLQTDMTRRQLEYEARQIRVAMEEQLGTCQDMEKRAQRRIARIQQIEKDILRIRQLLQSQATEAERSSQNKHETGSHDAERQNEGQGVGEINMATSGNGQIEKMRMFEC

SEQ ID NO: 2664 - protein, 118 aa, Homo sapiens
  Payload ID: 623;
  Gene Symbol: APC;
  Gene Name: adenomatous polyposis coli;
  ENSP ID: ENSP00000426541
MAAASYDQLLKQVEALKMENSNLRQELEDNSNHLTKLETEASNMKEVLKQLQGSIEDEAMASSGQIDLLERLKELNLDSSNFPGVKLRSKMSLRSYGSREGSVSSRSGECSPVPMGSF

SEQ ID NO: 2665 - protein, 2843 aa, Homo sapiens; identical to SEQ ID NO: 2660
  Payload ID: 623;
  Gene Symbol: APC;
  Gene Name: adenomatous polyposis coli;
  Uniprot ID:  P25054;
  ENSP ID: ENSP00000427089

SEQ ID NO: 2666 - protein, 272 aa, Homo sapiens
  Payload ID: 623;
  Gene Symbol: APC;
  Gene Name: adenomatous polyposis coli;
  ENSP ID: ENSP00000473355
LSFDEEHRHAMNELGRKATRGISSQELGQGLSGGLQAIAELLQVDCEMYGLTNDHYSITLRRYAGMALTNLTFGDVANKATLCSMKGCMRALVAQLKSESEDLQQVIASVLRNLSWRADVNSKKTLREVGSVKALMECALEVKKESTLKSVLSALWNLSAHCTENKADICAVDGALAFLVGTLTYRSQTNTLAIIESGGGILRNVSSLIATNEDHRQILRENNCLQTLLQHLKSHSLTIVSNACGTLWNLSARNPKDQEALWDMGAVSMLKN

SEQ ID NO: 2667 - protein, 58 aa, Homo sapiens
  Payload ID: 623;
  Gene Symbol: APC;
  Gene Name: adenomatous polyposis coli;
  ENSP ID: ENSP00000481752
MYASLGSGPVAPLPASVPPSVLGSWSTGGSRSCVRQETKSPGGARTSGHWASVWQVQG

SEQ ID NO: 2668 - protein, 51 aa, Homo sapiens
  Payload ID: 623;
  Gene Symbol: APC;
  Gene Name: adenomatous polyposis coli;
  ENSP ID: ENSP00000484935
  MOD_RES (1)..(1): Any amino acid
XPAPVEHQICPAVCVLMKLSFDEEHRHAMNELGINPQKRIECLMEFVSTLH

SEQ ID NO: 2669 - protein, 326 aa, Homo sapiens
  Payload ID: 624;
  Gene Symbol: ADORA1;
  Gene Name: adenosine A1 receptor;
  Uniprot ID:  P30542;
  ENSP ID: ENSP00000308549
MPPSISAFQAAYIGIEVLIALVSVPGNVLVIWAVKVNQALRDATFCFIVSLAVADVAVGALVIPLAILINIGPQTYFHTCLMVACPVLILTQSSILALLAIAVDRYLRVKIPLRYKMVVTPRRAAVAIAGCWILSFVVGLTPMFGWNNLSAVERAWAANGSMGEPVIKCEFEKVISMEYMVYFNFFVWVLPPLLLMVLIYLEVFYLIRKQLNKKVSASSGDPQKYYGKELKIAKSLALILFLFALSWLPLHILNCITLFCPSCHKPSILTYIAIFLTHGNSAMNPIVYAFRIQKFRVTFLKIWNDHFRCQPAPPIDEDLPEERPDD

SEQ ID NO: 2670 - protein, 326 aa, Homo sapiens; identical to SEQ ID NO: 2669
  Payload ID: 624;
  Gene Symbol: ADORA1;
  Gene Name: adenosine A1 receptor;
  Uniprot ID:  P30542;
  ENSP ID: ENSP00000338435

SEQ ID NO: 2671 - protein, 125 aa, Homo sapiens
  Payload ID: 624;
  Gene Symbol: ADORA1;
  Gene Name: adenosine A1 receptor;
  Uniprot ID:  P30542;
  ENSP ID: ENSP00000356204
MPPSISAFQAAYIGIEVLIALVSVPGNVLVIWAVKVNQALRDATFCFIVSLAVADVAVGALVIPLAILINIGPQTYFHTCLMVACPVLILTQSSILALLAIAVDRYLRVKIPLRRISQCMASTKS

SEQ ID NO: 2672 - protein, 326 aa, Homo sapiens; identical to SEQ ID NO: 2669
  Payload ID: 624;
  Gene Symbol: ADORA1;
  Gene Name: adenosine A1 receptor;
  Uniprot ID:  P30542;
  ENSP ID: ENSP00000356205

SEQ ID NO: 2673 - protein, 210 aa, Homo sapiens
  Payload ID: 624;
  Gene Symbol: ADORA1;
  Gene Name: adenosine A1 receptor;
  ENSP ID: ENSP00000483953
MVVTPRRAAVAIAGCWILSFVVGLTPMFGWNNLSAVERAWAANGSMGEPVIKCEFEKVISMEYMVYFNFFVWVLPPLLLMVLIYLEVFYLIRKQLNKKVSASSGDPQKYYGKELKIAKSLALILFLFALSWLPLHILNCITLFCPSCHKPSILTYIAIFLTHGNSAMNPIVYAFRIQKFRVTFLKIWNDHFRCQPAPPIDEDLPEERPDD

SEQ ID NO: 2674 - protein, 412 aa, Homo sapiens
  Payload ID: 625;
  Gene Symbol: ADORA2A;
  Gene Name: adenosine A2a receptor;
  Uniprot ID:  P29274;
  ENSP ID: ENSP00000336630
MPIMGSSVYITVELAIAVLAILGNVLVCWAVWLNSNLQNVTNYFVVSLAAADIAVGVLAIPFAITISTGFCAACHGCLFIACFVLVLTQSSIFSLLAIAIDRYIAIRIPLRYNGLVTGTRAKGIIAICWVLSFAIGLTPMLGWNNCGQPKEGKNHSQGCGEGQVACLFEDVVPMNYMVYFNFFACVLVPLLLMLGVYLRIFLAARRQLKQMESQPLPGERARSTLQKEVHAAKSLAIIVGLFALCWLPLHIINCFTFFCPDCSHAPLWLMYLAIVLSHTNSVVNPFIYAYRIREFRQTFRKIIRSHVLRQQEPFKAAGTSARVLAAHGSDGEQVSLRLNGHPPGVWANGSAPHPERRPNGYALGLVSGGSAQESQGNTGLPDVELLSHELKGVCPEPPGLDDPLAQDGAGVS

SEQ ID NO: 2675 - protein, 64 aa, Homo sapiens
  Payload ID: 625;
  Gene Symbol: ADORA2A;
  Gene Name: adenosine A2a receptor;
  ENSP ID: ENSP00000397071
MPIMGSSVYITVELAIAVLAILGNVLVCWAVWLNSNLQNVTNYFVVSLAAADIAVGVLAIPFAI

SEQ ID NO: 2676 - protein, 76 aa, Homo sapiens
  Payload ID: 625;
  Gene Symbol: ADORA2A;
  Gene Name: adenosine A2a receptor;
  ENSP ID: ENSP00000400190
MPIMGSSVYITVELAIAVLAILGNVLVCWAVWLNSNLQNVTNYFVVSLAAADIAVGVLAIPFAITISTGFCAACHG

SEQ ID NO: 2677 - protein, 87 aa, Homo sapiens
  Payload ID: 625;
  Gene Symbol: ADORA2A;
  Gene Name: adenosine A2a receptor;
  ENSP ID: ENSP00000404497
MPIMGSSVYITVELAIAVLAILGNVLVCWAVWLNSNLQNVTNYFVVSLAAADIAVGVLAIPFAITISTGFCAACHGCLFIACFVLVL

SEQ ID NO: 2678 - protein, 365 aa, Homo sapiens
  Payload ID: 625;
  Gene Symbol: ADORA2A;
  Gene Name: adenosine A2a receptor;
  ENSP ID: ENSP00000414802
MPIMGSSVYITVELAIAVLAILGNVLVCWAVWLNSNLQNVTNYFVVSLAAADIAVGVLAIPFAITISTGFCAACHGCLFIACFVLVLTQSSIFSLLAIAIDRYIAIRIPLRYNGLVTGTRAKGIIAICWVLSFAIGLTPMLGWNNCGQPKEGKNHSQGCGEGQVACLFEDVVPMNYMVYFNFFACVLVPLLLMLGVYLRIFLAARRQLKQMESQPLPGERARSTLQKEVHAAKSLAIIVGLFALCWLPLHIINCFTFFCPDCSHAPLWLMYLAIVLSHTNSVVNPFIYAYRIREFRQTFRKIIRSHVLRQQEPFKAAGTSARVLAAHGSDGEQVSLRLNGHPPGVWANGSAPHPERRPNGYALGL

SEQ ID NO: 2679 - protein, 108 aa, Homo sapiens
  Payload ID: 625;
  Gene Symbol: ADORA2A;
  Gene Name: adenosine A2a receptor;
  ENSP ID: ENSP00000473799
MPIMGSSVYITVELAIAVLAILGNVLVCWAVWLNSNLQNVTNYFVVSLAAADIAVGVLAIPFAITISTGFCAACHGCLFIACFVLVLTQSSIFSLLAIAIDRYIAIRI

SEQ ID NO: 2680 - protein, 83 aa, Homo sapiens
  Payload ID: 625;
  Gene Symbol: ADORA2A;
  Gene Name: adenosine A2a receptor;
  ENSP ID: ENSP00000474097
MPIMGSSVYITVELAIAVLAILGNVLVCWAVWLNSNLQNVTNYFVVSLAAADIAVGVLAIPFAITISTGFCAACHGCLFIACF

SEQ ID NO: 2681 - protein, 6 aa, Homo sapiens
  Payload ID: 625;
  Gene Symbol: ADORA2A;
  Gene Name: adenosine A2a receptor;
  ENSP ID: ENSP00000474895
MPIMGS

SEQ ID NO: 2682 - protein, 29 aa, Homo sapiens
  Payload ID: 625;
  Gene Symbol: ADORA2A;
  Gene Name: adenosine A2a receptor;
  ENSP ID: ENSP00000475000
MPIMGSSVYITVELAIAVLAILGNVLVCW

SEQ ID NO: 2683 - protein, 332 aa, Homo sapiens
  Payload ID: 626;
  Gene Symbol: ADORA2B;
  Gene Name: adenosine A2b receptor;
  Uniprot ID:  P29275;
  ENSP ID: ENSP00000304501
MLLETQDALYVALELVIAALSVAGNVLVCAAVGTANTLQTPTNYFLVSLAAADVAVGLFAIPFAITISLGFCTDFYGCLFLACFVLVLTQSSIFSLLAVAVDRYLAICVPLRYKSLVTGTRARGVIAVLWVLAFGIGLTPFLGWNSKDSATNNCTEPWDGTTNESCCLVKCLFENVVPMSYMVYFNFFGCVLPPLLIMLVIYIKIFLVACRQLQRTELMDHSRTTLQREIHAAKSLAMIVGIFALCWLPVHAVNCVTLFQPAQGKNKPKWAMNMAILLSHANSVVNPIVYAYRNRDFRYTFHKIISRYLLCQADVKSGNGQAGVQPALGVGL

SEQ ID NO: 2684 - protein, 318 aa, Homo sapiens
  Payload ID: 627;
  Gene Symbol: ADORA3;
  Gene Name: adenosine A3 receptor;
  Uniprot ID:  P0DMS8;
  ENSP ID: ENSP00000241356
MPNNSTALSLANVTYITMEIFIGLCAIVGNVLVICVVKLNPSLQTTTFYFIVSLALADIAVGVLVMPLAIVVSLGITIHFYSCLFMTCLLLIFTHASIMSLLAIAVDRYLRVKLTVRYKRVTTHRRIWLALGLCWLVSFLVGLTPMFGWNMKLTSEYHRNVTFLSCQFVSVMRMDYMVYFSFLTWIFIPLVVMCAIYLDIFYIIRNKLSLNLSNSKETGAFYGREFKTAKSLFLVLFLFALSWLPLSIINCIIYFNGEVPQLVLYMGILLSHANSMMNPIVYAYKIKKFKETYLLILKACVVCHPSDSLDTSIEKNSE

SEQ ID NO: 2685 - protein, 123 aa, Homo sapiens
  Payload ID: 627;
  Gene Symbol: ADORA3;
  Gene Name: adenosine A3 receptor;
  ENSP ID: ENSP00000488073
MPNNSTALSLANVTYITMEIFIGLCAIVGNVLVICVVKLNPSLQTTTFYFIVSLALADIAVGVLVMPLAIVVSLGITIHFYSCLFMTCLLLIFTHASIMSLLAIAVDRYLRVKLTVSSISPTL

SEQ ID NO: 2686 - protein, 363 aa, Homo sapiens
  Payload ID: 628;
  Gene Symbol: ADA;
  Gene Name: adenosine deaminase;
  Uniprot ID:  P00813;
  ENSP ID: ENSP00000361965
MAQTPAFDKPKVELHVHLDGSIKPETILYYGRRRGIALPANTAEGLLNVIGMDKPLTLPDFLAKFDYYMPAIAGCREAIKRIAYEFVEMKAKEGVVYVEVRYSPHLLANSKVEPIPWNQAEGDLTPDEVVALVGQGLQEGERDFGVKARSILCCMRHQPNWSPKVVELCKKYQQQTVVAIDLAGDETIPGSSLLPGHVQAYQEAVKSGIHRTVHAGEVGSAEVVKEAVDILKTERLGHGYHTLEDQALYNRLRQENMHFEICPWSSYLTGAWKPDTEHAVIRLKNDQANYSLNTDDPLIFKSTLDTDYQMTKRDMGFTEEEFKRLNINAAKSSFLPEDEKRELLDLLYKAYGMPPSASAGQNL

SEQ ID NO: 2687 - protein, 263 aa, Homo sapiens
  Payload ID: 628;
  Gene Symbol: ADA;
  Gene Name: adenosine deaminase;
  ENSP ID: ENSP00000440946
MAQTPAFDKPKVELHVHLDGSIKPETILYYGRRRGIALPANTAEGLLNVIGMDKPLTLPDFLAKFDYYMPAIAGCREAIKRIAYEFVEMKAKEGVVYVEVRYSPHLLANSKVEPIPWNQAEGDLTPDEVVALVGQGLQEGERDFGVKARSILCCMRHQPNWSPKVVELCKKYQQQTVVAIDLAGDETIPGSSLLPGHVQAYQEAVKSGIHRTVHAGEVGSAEVVKEAVDILKTERLGHGYHTLEDQALYNRLRQENMHFEAQK

SEQ ID NO: 2688 - protein, 339 aa, Homo sapiens
  Payload ID: 628;
  Gene Symbol: ADA;
  Gene Name: adenosine deaminase;
  ENSP ID: ENSP00000441818
MAQTPAFDKPKVELHVHLDGSIKPETILYYGRRRGIALPANTAEGLLNVIGMDKPLTLPDFLAKFDYYMPAIAGCREAIKRIAYEFVEMKAKEGVVYVEVRYSPHLLANSKVEPIPWNQAEGDLTPDEVVALVGQGLQEGERDFGVKARSILCCMRHQPNWSPKVVELCKKYQQQTVVAIDLAGDETIPGSSLLPGHVQAYQAVDILKTERLGHGYHTLEDQALYNRLRQENMHFEICPWSSYLTGAWKPDTEHAVIRLKNDQANYSLNTDDPLIFKSTLDTDYQMTKRDMGFTEEEFKRLNINAAKSSFLPEDEKRELLDLLYKAYGMPPSASAGQNL

SEQ ID NO: 2689 - protein, 75 aa, Homo sapiens
  Payload ID: 628;
  Gene Symbol: ADA;
  Gene Name: adenosine deaminase;
  ENSP ID: ENSP00000446464
MAQTPAFDKPKVELHVHLDGSIKPETILYYGRRRGIALPANTAEGLLNVIGMDKPLTLPDFLAKFDYYMPAIARL

SEQ ID NO: 2690 - protein, 576 aa, Homo sapiens
  Payload ID: 629;
  Gene Symbol: ADAD1;
  Gene Name: adenosine deaminase domain containing 1 (testis-specific);
  Uniprot ID:  Q96M93;
  ENSP ID: ENSP00000296513
MASNNHWFQSSQVPSFAQMLKKNLPVQPATKTITTPTGWSSESYGLSKMASKVTQVTGNFPEPLLSKNLSSISNPVLPPKKIPKEFIMKYKRGEINPVSALHQFAQMQRVQLDLKETVTTGNVMGPYFAFCAVVDGIQYKTGLGQNKKESRSNAAKLALDELLQLDEPEPRILETSGPPPFPAEPVVLSELAYVSKVHYEGRHIQYAKISQIVKERFNQLISNRSEYLKYSSSLAAFIIERAGQHEVVAIGTGEYNYSQDIKPDGRVLHDTHAVVTARRSLLRYFYRQLLLFYSKNPAMMEKSIFCTEPTSNLLTLKQNINICLYMNQLPKGSAQIKSQLRLNPHSISAFEANEELCLHVAVEGKIYLTVYCPKDGVNRISSMSSSDKLTRWEVLGVQGALLSHFIQPVYISSILIGDGNCSDTRGLEIAIKQRVDDALTSKLPMFYLVNRPHISLVPSAYPLQMNLEYKFLSLNWAQGDVSLEIVDGLSGKITESSPFKSGMSMASRLCKAAMLSRFNLLAKEAKKELLEAGTYHAAKCMSASYQEAKCKLKSYLQQHGYGSWIVKSPCIEQFNM

SEQ ID NO: 2691 - protein, 565 aa, Homo sapiens
  Payload ID: 629;
  Gene Symbol: ADAD1;
  Gene Name: adenosine deaminase domain containing 1 (testis-specific);
  Uniprot ID:  Q96M93;
  ENSP ID: ENSP00000373376
MASNNHWFQSSQVPSFAQMLKKNLPVQPATKTITTPTGWSSESYGLSKMASKVTQVTGNFPEPLLSKNLSSISNPVLPPKKIPKEFIMKYKRGEINPVSALHQFAQMQRVQLDLKETVTTGNVMGPYFAFCAVVDGIQYKTGLGQNKKESRSNAAKLALDELLQLDEPEPRILETSGPPPFPAEPVVLSELAYVSKVHYEGRHIQYAKISQIVKERFNQLISNRSEYLKYSSSLAAFIIERAGQHEVVAIGTGEYNYSQDIKPDGRVLHDTHAVVTARRSLLSKNPAMMEKSIFCTEPTSNLLTLKQNINICLYMNQLPKGSAQIKSQLRLNPHSISAFEANEELCLHVAVEGKIYLTVYCPKDGVNRISSMSSSDKLTRWEVLGVQGALLSHFIQPVYISSILIGDGNCSDTRGLEIAIKQRVDDALTSKLPMFYLVNRPHISLVPSAYPLQMNLEYKFLSLNWAQGDVSLEIVDGLSGKITESSPFKSGMSMASRLCKAAMLSRFNLLAKEAKKELLEAGTYHAAKCMSASYQEAKCKLKSYLQQHGYGSWIVKSPCIEQFNM

SEQ ID NO: 2692 - protein, 558 aa, Homo sapiens
  Payload ID: 629;
  Gene Symbol: ADAD1;
  Gene Name: adenosine deaminase domain containing 1 (testis-specific);
  Uniprot ID:  Q96M93;
  ENSP ID: ENSP00000373377
MLKKNLPVQPATKTITTPTGWSSESYGLSKMASKVTQVTGNFPEPLLSKNLSSISNPVLPPKKIPKEFIMKYKRGEINPVSALHQFAQMQRVQLDLKETVTTGNVMGPYFAFCAVVDGIQYKTGLGQNKKESRSNAAKLALDELLQLDEPEPRILETSGPPPFPAEPVVLSELAYVSKVHYEGRHIQYAKISQIVKERFNQLISNRSEYLKYSSSLAAFIIERAGQHEVVAIGTGEYNYSQDIKPDGRVLHDTHAVVTARRSLLRYFYRQLLLFYSKNPAMMEKSIFCTEPTSNLLTLKQNINICLYMNQLPKGSAQIKSQLRLNPHSISAFEANEELCLHVAVEGKIYLTVYCPKDGVNRISSMSSSDKLTRWEVLGVQGALLSHFIQPVYISSILIGDGNCSDTRGLEIAIKQRVDDALTSKLPMFYLVNRPHISLVPSAYPLQMNLEYKFLSLNWAQGDVSLEIVDGLSGKITESSPFKSGMSMASRLCKAAMLSRFNLLAKEAKKELLEAGTYHAAKCMSASYQEAKCKLKSYLQQHGYGSWIVKSPCIEQFNM

SEQ ID NO: 2693 - protein, 156 aa, Homo sapiens
  Payload ID: 629;
  Gene Symbol: ADAD1;
  Gene Name: adenosine deaminase domain containing 1 (testis-specific);
  ENSP ID: ENSP00000390510
MASNNHWFQSSQVPSFAQMLKKNLPVQPATKTITTPTGWSSESYGLSKMASKVTQVTGNFPEPLLSKNLSSISNPVLPPKKIPKEFIMKYKRGEINPVSALHQFAQMQRVQLDLKETVTTGNVMGPYFAFCAVVDGIQYKTGLGQNKKESRSNAAK

SEQ ID NO: 2694 - protein, 241 aa, Homo sapiens
  Payload ID: 629;
  Gene Symbol: ADAD1;
  Gene Name: adenosine deaminase domain containing 1 (testis-specific);
  ENSP ID: ENSP00000397254
MASNNHWFQSSQVPSFAQMLKKNLPVQPATKTITTPTGWSSESYGLSKMASKVTQVTGNFPEPLLSKNLSSISNPVLPPKKIPKEFIMKYKRGEINPVSALHQFAQMQRVQLDLKETVTTGNVMGPYFAFCAVVDGIQYKTGLGQNKKESRSNAAKLALDELLQLDEPEPRILETSGPPPFPAEPVVLSELAYVSKVHYEGRHIQYAKISQIVKERFNQLISNRSEYLKYSSSLAAFIIER

SEQ ID NO: 2695 - protein, 665 aa, Homo sapiens
  Payload ID: 630;
  Gene Symbol: ADAD2;
  Gene Name: adenosine deaminase domain containing 2;
  Uniprot ID:  Q8NCV1;
  ENSP ID: ENSP00000268624
MASASQGADDDGSRRKPRLAASLQISPQPRPWRPLPAQAQSAWGPAPAPATYRAEGGWPQVSVLRDSGPGAGAGVGELGAARAWENLGEQMGKAPRVPVPPAGLSLPLKDPPASQAVSLLTEYAASLGIFLLFREDQPPGKVFKYRAPGGEELKAMCLWQVEVLRAFLLRTGWRGLWRGDLDLGPDSSWANRLPFLLICEMESRIPAVEELGPCFPFSVSAELDGVVCPAGTANSKTEAKQQAALSALCYIRSQLENPESPQTSSRPPLAPLSVENILTHEQRCAALVSAGFDLLLDERSPYWACKGTVAGVILERGWAVSAPSCTEIPRARGHVKEIYKLVALGTGSSCCAGWLEFSGQQLHDCHGLVIARRALLRFLFRQLLLATQGGPKGKEQSVLAPQPGPGPPFTLKPRVFLHLYISNTPKGAARDIYLPPTSEGGLPHSPPMRLQAHVLGQLKPVCYVAPSLCDTHVGCLSASDKLARWAVLGLGGALLAHLVSPLYSTSLILADSCHDPPTLSRAIHTRPCLDSVLGPCLPPPYVRTALHLFAGPPVAPSEPTPDTCRGLSLNWSLGDPGIEVVDVATGRVKANAALGPPSRLCKASFLRAFHQAARAVGKPYLLALKTYEAAKAGPYQEARRQLSLLLDQQGLGAWPSKPLVGKFRN

SEQ ID NO: 2696 - protein, 583 aa, Homo sapiens
  Payload ID: 630;
  Gene Symbol: ADAD2;
  Gene Name: adenosine deaminase domain containing 2;
  Uniprot ID:  Q8NCV1;
  ENSP ID: ENSP00000325153
MASASQGADDDGSRRKPRLAASLQISPQPRPWRPLPAQAQSAWGPAPAPATYRAEGGWPQVSVLRDSGPGAGAGVGELGAARAWENLGEQMGKAPRVPVPPAGLSLPLKDPPASQAVSLLTEYAASLGIFLLFREDQPPGPCFPFSVSAELDGVVCPAGTANSKTEAKQQAALSALCYIRSQLENPESPQTSSRPPLAPLSVENILTHEQRCAALVSAGFDLLLDERSPYWACKGTVAGVILEREIPRARGHVKEIYKLVALGTGSSCCAGWLEFSGQQLHDCHGLVIARRALLRFLFRQLLLATQGGPKGKEQSVLAPQPGPGPPFTLKPRVFLHLYISNTPKGAARDIYLPPTSEGGLPHSPPMRLQAHVLGQLKPVCYVAPSLCDTHVGCLSASDKLARWAVLGLGGALLAHLVSPLYSTSLILADSCHDPPTLSRAIHTRPCLDSVLGPCLPPPYVRTALHLFAGPPVAPSEPTPDTCRGLSLNWSLGDPGIEVVDVATGRVKANAALGPPSRLCKASFLRAFHQAARAVGKPYLLALKTYEAAKAGPYQEARRQLSLLLDQQGLGAWPSKPLVGKFRN

SEQ ID NO: 2697 - protein, 267 aa, Homo sapiens
  Payload ID: 630;
  Gene Symbol: ADAD2;
  Gene Name: adenosine deaminase domain containing 2;
  ENSP ID: ENSP00000454950
  MOD_RES (1)..(1): Any amino acid
XELGAARAWENLGEQMGKAPRVPVPPAGLSLPLKDPPASQAVSLLTEYAASLGIFLLFREDQPPGPCFPFSVSAELDGVVCPAGTANSKTEAKQQAALSALCYIRSQLENPENILTHEQRCAALVSAGFDLLLDERSPYWACKGTVAGVILEREIPRARGHVKEIYKLVALGTGSSCCAGWLEFSGQQLHDCHGLVIARRALLRFLFRQLLLATQGGPKGKEQSVLAPQPGPGPPFTLKPRVFLHLYISNTPKGAARDIYLPPTSEG

SEQ ID NO: 2698 - protein, 931 aa, Homo sapiens
  Payload ID: 631;
  Gene Symbol: ADAR;
  Gene Name: adenosine deaminase, RNA-specific;
  Uniprot ID:  P55265;
  ENSP ID: ENSP00000357456
MAEIKEKICDYLFNVSDSSALNLAKNIGLTKARDINAVLIDMERQGDVYRQGTTPPIWHLTDKKRERMQIKRNTNSVPETAPAAIPETKRNAEFLTCNIPTSNASNNMVTTEKVENGQEPVIKLENRQEARPEPARLKPPVHYNGPSKAGYVDFENGQWATDDIPDDLNSIRAAPGEFRAIMEMPSFYSHGLPRCSPYKKLTECQLKNPISGLLEYAQFASQTCEFNMIEQSGPPHEPRFKFQVVINGREFPPAEAGSKKVAKQDAAMKAMTILLEEAKAKDSGKSEESSHYSTEKESEKTAESQTPTPSATSFFSGKSPVTTLLECMHKLGNSCEFRLLSKEGPAHEPKFQYCVAVGAQTFPSVSAPSKKVAKQMAAEEAMKALHGEATNSMASDNQPEGMISESLDNLESMMPNKVRKIGELVRYLNTNPVGGLLEYARSHGFAAEFKLVDQSGPPHEPKFVYQAKVGGRWFPAVCAHSKKQGKQEAADAALRVLIGENEKAERMGFTEVTPVTGASLRRTMLLLSRSPEAQPKTLPLTGSTFHDQIAMLSHRCFNTLTNSFQPSLLGRKILAAIIMKKDSEDMGVVVSLGTGNRCVKGDSLSLKGETVNDCHAEIISRRGFIRFLYSELMKYNSQTAKDSIFEPAKGGEKLQIKKTVSFHLYISTAPCGDGALFDKSCSDRAMESTESRHYPVFENPKQGKLRTKVENGEGTIPVESSDIVPTWDGIRLGERLRTMSCSDKILRWNVLGLQGALLTHFLQPIYLKSVTLGYLFSQGHLTRAICCRVTRDGSAFEDGLRHPFIVNHPKVGRVSIYDSKRQSGKTKETSVNWCLADGYDLEILDGTRGTVDGPRNELSRVSKKNIFLLFKKLCSFRYRRDLLRLSYGEAKKAARDYETAKNYFKKGLKDMGYGNWISKPQEEKNFYLCPV

SEQ ID NO: 2699 - protein, 1226 aa, Homo sapiens
  Payload ID: 631;
  Gene Symbol: ADAR;
  Gene Name: adenosine deaminase, RNA-specific;
  Uniprot ID:  P55265;
  ENSP ID: ENSP00000357459
MNPRQGYSLSGYYTHPFQGYEHRQLRYQQPGPGSSPSSFLLKQIEFLKGQLPEAPVIGKQTPSLPPSLPGLRPRFPVLLASSTRGRQVDIRGVPRGVHLRSQGLQRGFQHPSPRGRSLPQRGVDCLSSHFQELSIYQDQEQRILKFLEELGEGKATTAHDLSGKLGTPKKEINRVLYSLAKKGKLQKEAGTPPLWKIAVSTQAWNQHSGVVRPDGHSQGAPNSDPSLEPEDRNSTSVSEDLLEPFIAVSAQAWNQHSGVVRPDSHSQGSPNSDPGLEPEDSNSTSALEDPLEFLDMAEIKEKICDYLFNVSDSSALNLAKNIGLTKARDINAVLIDMERQGDVYRQGTTPPIWHLTDKKRERMQIKRNTNSVPETAPAAIPETKRNAEFLTCNIPTSNASNNMVTTEKVENGQEPVIKLENRQEARPEPARLKPPVHYNGPSKAGYVDFENGQWATDDIPDDLNSIRAAPGEFRAIMEMPSFYSHGLPRCSPYKKLTECQLKNPISGLLEYAQFASQTCEFNMIEQSGPPHEPRFKFQVVINGREFPPAEAGSKKVAKQDAAMKAMTILLEEAKAKDSGKSEESSHYSTEKESEKTAESQTPTPSATSFFSGKSPVTTLLECMHKLGNSCEFRLLSKEGPAHEPKFQYCVAVGAQTFPSVSAPSKKVAKQMAAEEAMKALHGEATNSMASDNQPEGMISESLDNLESMMPNKVRKIGELVRYLNTNPVGGLLEYARSHGFAAEFKLVDQSGPPHEPKFVYQAKVGGRWFPAVCAHSKKQGKQEAADAALRVLIGENEKAERMGFTEVTPVTGASLRRTMLLLSRSPEAQPKTLPLTGSTFHDQIAMLSHRCFNTLTNSFQPSLLGRKILAAIIMKKDSEDMGVVVSLGTGNRCVKGDSLSLKGETVNDCHAEIISRRGFIRFLYSELMKYNSQTAKDSIFEPAKGGEKLQIKKTVSFHLYISTAPCGDGALFDKSCSDRAMESTESRHYPVFENPKQGKLRTKVENGEGTIPVESSDIVPTWDGIRLGERLRTMSCSDKILRWNVLGLQGALLTHFLQPIYLKSVTLGYLFSQGHLTRAICCRVTRDGSAFEDGLRHPFIVNHPKVGRVSIYDSKRQSGKTKETSVNWCLADGYDLEILDGTRGTVDGPRNELSRVSKKNIFLLFKKLCSFRYRRDLLRLSYGEAKKAARDYETAKNYFKKGLKDMGYGNWISKPQEEKNFYLCPV

SEQ ID NO: 2700 - protein, 1195 aa, Homo sapiens
  Payload ID: 631;
  Gene Symbol: ADAR;
  Gene Name: adenosine deaminase, RNA-specific;
  ENSP ID: ENSP00000431794
GYSLSGYYTHPFQGYEHRQLRYQQPGPGSSPSSFLLKQIEFLKGQLPEAPVIGKQTPSLPPSLPGLRPRFPVLLASSTRGRQVDIRGVPRGVHLRSQGLQRGFQHPSPRGRSLPQRGVDCLSSHFQELSIYQDQEQRILKFLEELGEGKATTAHDLSGKLGTPKKEINRVLYSLAKKGKLQKEAGTPPLWKIAVSTQAWNQHSGVVRPDGHSQGAPNSDPSLEPEDRNSTSVSEDLLEPFIAVSAQAWNQHSGVVRPDSHSQGSPNSDPGLEPEDSNSTSALEDPLEFLDMAEIKEKICDYLFNVSDSSALNLAKNIGLTKARDINAVLIDMERQGDVYRQGTTPPIWHLTDKKRERMQIKRNTNSVPETAPAAIPETKRNAEFLTCNIPTSNASNNMVTTEKVENGQEPVIKLENRQEARPEPARLKPPVHYNGPSKAGYVDFENGQWATDDIPDDLNSIRAAPGEFRAIMEMPSFYSHGLPRCSPYKKLTECQLKNPISGLLEYAQFASQTCEFNMIEQSGPPHEPRFKFQVVINGREFPPAEAGSKKVAKQDAAMKAMTILLEEAKAKDSGKSEESSHYSTEKESEKTAESQTPTPSATSFFSGKSPVTTLLECMHKLGNSCEFRLLSKEGPAHEPKFQYCVAVGAQTFPSVSAPSKKVAKQMAAEEAMKALHGEATNSMASDNQPEGMISESLDNLESMMPNKVRKIGELVRYLNTNPVGGLLEYARSHGFAAEFKLVDQSGPPHEPKFVYQAKVGGRWFPAVCAHSKKQGKQEAADAALRVLIGENEKAERMGFTELPLTGSTFHDQIAMLSHRCFNTLTNSFQPSLLGRKILAAIIMKKDSEDMGVVVSLGTGNRCVKGDSLSLKGETVNDCHAEIISRRGFIRFLYSELMKYNSQTAKDSIFEPAKGGEKLQIKKTVSFHLYISTAPCGDGALFDKSCSDRAMESTESRHYPVFENPKQGKLRTKVENGEGTIPVESSDIVPTWDGIRLGERLRTMSCSDKILRWNVLGLQGALLTHFLQPIYLKSVTLGYLFSQGHLTRAICCRVTRDGSAFEDGLRHPFIVNHPKVGRVSIYDSKRQSGKTKETSVNWCLADGYDLEILDGTRGTVDGPRNELSRVSKKNIFLLFKKLCSFRYRRDLLRLSYGEAKKAARDYETAKNYFKKGLKDMGYGNWISKPQEEKNFYLCPV

SEQ ID NO: 2701 - protein, 701 aa, Homo sapiens
  Payload ID: 632;
  Gene Symbol: ADARB1;
  Gene Name: adenosine deaminase, RNA-specific, B1;
  Uniprot ID:  P78563;
  ENSP ID: ENSP00000015877
MDIEDEENMSSSSTDVKENRNLDNVSPKDGSTPGPGEGSQLSNGGGGGPGRKRPLEEGSNGHSKYRLKKRRKTPGPVLPKNALMQLNEIKPGLQYTLLSQTGPVHAPLFVMSVEVNGQVFEGSGPTKKKAKLHAAEKALRSFVQFPNASEAHLAMGRTLSVNTDFTSDQADFPDTLFNGFETPDKAEPPFYVGSNGDDSFSSSGDLSLSASPVPASLAQPPLPVLPPFPPPSGKNPVMILNELRPGLKYDFLSESGESHAKSFVMSVVVDGQFFEGSGRNKKLAKARAAQSALAAIFNLHLDQTPSRQPIPSEGLQLHLPQVLADAVSRLVLGKFGDLTDNFSSPHARRKVLAGVVMTTGTDVKDAKVISVSTGTKCINGEYMSDRGLALNDCHAEIISRRSLLRFLYTQLELYLNNKDDQKRSIFQKSERGGFRLKENVQFHLYISTSPCGDARIFSPHEPILEEPADRHPNRKARGQLRTKIESGEGTIPVRSNASIQTWDGVLQGERLLTMSCSDKIARWNVVGIQGSLLSIFVEPIYFSSIILGSLYHGDHLSRAMYQRISNIEDLPPLYTLNKPLLSGISNAEARQPGKAPNFSVNWTVGDSAIEVINATTGKDELGRASRLCKHALYCRWMRVHGKVPSHLLRSKITKPNVYHESKLAAKEYQAAKARLFTAFIKAGLGAWVEKPTEQDQFSLTP

SEQ ID NO: 2702 - protein, 741 aa, Homo sapiens
  Payload ID: 632;
  Gene Symbol: ADARB1;
  Gene Name: adenosine deaminase, RNA-specific, B1;
  Uniprot ID:  P78563;
  ENSP ID: ENSP00000353920
MDIEDEENMSSSSTDVKENRNLDNVSPKDGSTPGPGEGSQLSNGGGGGPGRKRPLEEGSNGHSKYRLKKRRKTPGPVLPKNALMQLNEIKPGLQYTLLSQTGPVHAPLFVMSVEVNGQVFEGSGPTKKKAKLHAAEKALRSFVQFPNASEAHLAMGRTLSVNTDFTSDQADFPDTLFNGFETPDKAEPPFYVGSNGDDSFSSSGDLSLSASPVPASLAQPPLPVLPPFPPPSGKNPVMILNELRPGLKYDFLSESGESHAKSFVMSVVVDGQFFEGSGRNKKLAKARAAQSALAAIFNLHLDQTPSRQPIPSEGLQLHLPQVLADAVSRLVLGKFGDLTDNFSSPHARRKVLAGVVMTTGTDVKDAKVISVSTGTKCINGEYMSDRGLALNDCHAEIISRRSLLRFLYTQLELYLNNKDDQKRSIFQKSERGGFRLKENVQFHLYISTSPCGDARIFSPHEPILEGSRSYTQAGVQWCNHGSLQPRPPGLLSDPSTSTFQGAGTTEPADRHPNRKARGQLRTKIESGEGTIPVRSNASIQTWDGVLQGERLLTMSCSDKIARWNVVGIQGSLLSIFVEPIYFSSIILGSLYHGDHLSRAMYQRISNIEDLPPLYTLNKPLLSGISNAEARQPGKAPNFSVNWTVGDSAIEVINATTGKDELGRASRLCKHALYCRWMRVHGKVPSHLLRSKITKPNVYHESKLAAKEYQAAKARLFTAFIKAGLGAWVEKPTEQDQFSLTP

SEQ ID NO: 2703 - protein, 714 aa, Homo sapiens
  Payload ID: 632;
  Gene Symbol: ADARB1;
  Gene Name: adenosine deaminase, RNA-specific, B1;
  Uniprot ID:  P78563;
  ENSP ID: ENSP00000374513
MDIEDEENMSSSSTDVKENRNLDNVSPKDGSTPGPGEGSQLSNGGGGGPGRKRPLEEGSNGHSKYRLKKRRKTPGPVLPKNALMQLNEIKPGLQYTLLSQTGPVHAPLFVMSVEVNGQVFEGSGPTKKKAKLHAAEKALRSFVQFPNASEAHLAMGRTLSVNTDFTSDQADFPDTLFNGFETPDKAEPPFYVGSNGDDSFSSSGDLSLSASPVPASLAQPPLPVLPPFPPPSGKNPVMILNELRPGLKYDFLSESGESHAKSFVMSVVVDGQFFEGSGRNKKLAKARAAQSALAAIFNLHLDQTPSRQPIPSEGLQLHLPQVLADAVSRLVLGKFGDLTDNFSSPHARRKVLAGVVMTTGTDVKDAKVISVSTGTKCINGEYMSDRGLALNDCHAEIISRRSLLRFLYTQLELYLNNKDDQKRSIFQKSERGGFRLKENVQFHLYISTSPCGDARIFSPHEPILEGSRSYTQAGVQWCNHGSLQPRPPGLLSDPSTSTFQGAGTTEPADRHPNRKARGQLRTKIESGEGTIPVRSNASIQTWDGVLQGERLLTMSCSDKIARWNVVGIQGSLLSIFVEPIYFSSIILGSLYHGDHLSRAMYQRISNIEDLPPLYTLNKPLLSGISNAEARQPGKAPNFSVNWTVGDSAIEVINATTGKDELGRASRLCKHALYCRWMRVHGKVPSHLLRSKITKPNVYHESKLAAKEYQAAKVH

SEQ ID NO: 2704 - protein, 141 aa, Homo sapiens
  Payload ID: 632;
  Gene Symbol: ADARB1;
  Gene Name: adenosine deaminase, RNA-specific, B1;
  ENSP ID: ENSP00000387480
MDIEDEENMSSSSTDVKENRNLDNVSPKDGSTPGPGEGSQLSNGGGGGPGRKRPLEEGSNGHSKYRLKKRRKTPGPVLPKNALMQLNEIKPGLQYTLLSQTGPVHAPLFVMSVEVNGQVFEGSGPTKKKAKLHAAEKALRS

SEQ ID NO: 2705 - protein, 741 aa, Homo sapiens; identical to SEQ ID NO: 2702
  Payload ID: 632;
  Gene Symbol: ADARB1;
  Gene Name: adenosine deaminase, RNA-specific, B1;
  Uniprot ID:  P78563;
  ENSP ID: ENSP00000414600

SEQ ID NO: 2706 - protein, 741 aa, Homo sapiens; identical to SEQ ID NO: 2702
  Payload ID: 632;
  Gene Symbol: ADARB1;
  Gene Name: adenosine deaminase, RNA-specific, B1;
  Uniprot ID:  P78563;
  ENSP ID: ENSP00000435381

SEQ ID NO: 2707 - protein, 701 aa, Homo sapiens; identical to SEQ ID NO: 2701
  Payload ID: 632;
  Gene Symbol: ADARB1;
  Gene Name: adenosine deaminase, RNA-specific, B1;
  Uniprot ID:  P78563;
  ENSP ID: ENSP00000436367

SEQ ID NO: 2708 - protein, 52 aa, Homo sapiens
  Payload ID: 632;
  Gene Symbol: ADARB1;
  Gene Name: adenosine deaminase, RNA-specific, B1;
  ENSP ID: ENSP00000478160
MANEHTLIHPASIEDPLEARPMSDEDPEDEDALPARWKKEMGRKRKRTIATL

SEQ ID NO: 2709 - protein, 729 aa, Homo sapiens
  Payload ID: 632;
  Gene Symbol: ADARB1;
  Gene Name: adenosine deaminase, RNA-specific, B1;
  Uniprot ID:  P78563;
  ENSP ID: ENSP00000486475
MKIPRMKTPCQPDRNSLRQSRNPQKYFAMDIEDEENMSSSSTDVKENRNLDNVSPKDGSTPGPGEGSQLSNGGGGGPGRKRPLEEGSNGHSKYRLKKRRKTPGPVLPKNALMQLNEIKPGLQYTLLSQTGPVHAPLFVMSVEVNGQVFEGSGPTKKKAKLHAAEKALRSFVQFPNASEAHLAMGRTLSVNTDFTSDQADFPDTLFNGFETPDKAEPPFYVGSNGDDSFSSSGDLSLSASPVPASLAQPPLPVLPPFPPPSGKNPVMILNELRPGLKYDFLSESGESHAKSFVMSVVVDGQFFEGSGRNKKLAKARAAQSALAAIFNLHLDQTPSRQPIPSEGLQLHLPQVLADAVSRLVLGKFGDLTDNFSSPHARRKVLAGVVMTTGTDVKDAKVISVSTGTKCINGEYMSDRGLALNDCHAEIISRRSLLRFLYTQLELYLNNKDDQKRSIFQKSERGGFRLKENVQFHLYISTSPCGDARIFSPHEPILEEPADRHPNRKARGQLRTKIESGEGTIPVRSNASIQTWDGVLQGERLLTMSCSDKIARWNVVGIQGSLLSIFVEPIYFSSIILGSLYHGDHLSRAMYQRISNIEDLPPLYTLNKPLLSGISNAEARQPGKAPNFSVNWTVGDSAIEVINATTGKDELGRASRLCKHALYCRWMRVHGKVPSHLLRSKITKPNVYHESKLAAKEYQAAKARLFTAFIKAGLGAWVEKPTEQDQFSLTP

SEQ ID NO: 2710 - protein, 141 aa, Homo sapiens
  Payload ID: 633;
  Gene Symbol: ADARB2;
  Gene Name: adenosine deaminase, RNA-specific, B2 (non-functional);
  ENSP ID: ENSP00000370706
MSHRMEGVGQLPASYRHNRPLLSGVSDAEARQPGKSPPFSMNWVVGSADLEIINATTGRRSCGGPSRLCKHVLSARWARLYGRLSTRTPSPGDTPSMYCEAKLGAHTYQSVKQQLFKAFQKAGLGTWVRKPPEQQQFLLTL

SEQ ID NO: 2711 - protein, 248 aa, Homo sapiens
  Payload ID: 633;
  Gene Symbol: ADARB2;
  Gene Name: adenosine deaminase, RNA-specific, B2 (non-functional);
  Uniprot ID:  Q9NS39;
  ENSP ID: ENSP00000370711
MGLWSPVPGNSVPRAPVMAGLGLGHSQGAPQGPHDGKTDRSSGPGRRRTERTRLPGLLGGAPLTAGSPHRWNVLGLQGALLSHFVEPVYLQSIVVGSLHHTGHLARVMSHRMEGVGQLPASYRHNRPLLSGVSDAEARQPGKSPPFSMNWVVGSADLEIINATTGRRSCGGPSRLCKHVLSARWARLYGRLSTRTPSPGDTPSMYCEAKLGAHTYQSVKQQLFKAFQKAGLGTWVRKPPEQQQFLLTL

SEQ ID NO: 2712 - protein, 739 aa, Homo sapiens
  Payload ID: 633;
  Gene Symbol: ADARB2;
  Gene Name: adenosine deaminase, RNA-specific, B2 (non-functional);
  Uniprot ID:  Q9NS39;
  ENSP ID: ENSP00000370713
MASVLGSGRGSGGLSSQLKCKSKRRRRRRSKRKDKVSILSTFLAPFKHLSPGITNTEDDDTLSTSSAEVKENRNVGNLAARPPPSGDRARGGAPGAKRKRPLEEGNGGHLCKLQLVWKKLSWSVAPKNALVQLHELRPGLQYRTVSQTGPVHAPVFAVAVEVNGLTFEGTGPTKKKAKMRAAELALRSFVQFPNACQAHLAMGGGPGPGTDFTSDQADFPDTLFQEFEPPAPRPGLAGGRPGDAALLSAAYGRRRLLCRALDLVGPTPATPAAPGERNPVVLLNRLRAGLRYVCLAEPAERRARSFVMAVSVDGRTFEGSGRSKKLARGQAAQAALQELFDIQMPGHAPGRARRTPMPQEFADSISQLVTQKFREVTTDLTPMHARHKALAGIVMTKGLDARQAQVVALSSGTKCISGEHLSDQGLVVNDCHAEVVARRAFLHFLYTQLELHLSKRREDSERSIFVRLKEGGYRLRENILFHLYVSTSPCGDARLHSPYEITTDLHSSKHLVRKFRGHLRTKIESGEGTVPVRGPSAVQTWDGVLLGEQLITMSCTDKIARWNVLGLQGALLSHFVEPVYLQSIVVGSLHHTGHLARVMSHRMEGVGQLPASYRHNRPLLSGVSDAEARQPGKSPPFSMNWVVGSADLEIINATTGRRSCGGPSRLCKHVLSARWARLYGRLSTRTPSPGDTPSMYCEAKLGAHTYQSVKQQLFKAFQKAGLGTWVRKPPEQQQFLLTL

SEQ ID NO: 2713 - protein, 502 aa, Homo sapiens
  Payload ID: 634;
  Gene Symbol: ADAT1;
  Gene Name: adenosine deaminase, tRNA-specific 1;
  Uniprot ID:  Q9BUB4;
  ENSP ID: ENSP00000310015
MWTADEIAQLCYEHYGIRLPKKGKPEPNHEWTLLAAVVKIQSPADKACDTPDKPVQVTKEVVSMGTGTKCIGQSKMRKNGDILNDSHAEVIARRSFQRYLLHQLQLAATLKEDSIFVPGTQKGVWKLRRDLIFVFFSSHTPCGDASIIPMLEFEDQPCCPVFRNWAHNSSVEASSNLEAPGNERKCEDPDSPVTKKMRLEPGTAAREVTNGAAHHQSFGKQKSGPISPGIHSCDLTVEGLATVTRIAPGSAKVIDVYRTGAKCVPGEAGDSGKPGAAFHQVGLLRVKPGRGDRTRSMSCSDKMARWNVLGCQGALLMHLLEEPIYLSAVVIGKCPYSQEAMQRALIGRCQNVSALPKGFGVQELKILQSDLLFEQSRSAVQAKRADSPGRLVPCGAAISWSAVPEQPLDVTANGFPQGTTKKTIGSLQARSQISKVELFRSFQKLLSRIARDKWPHSLRVQKLDTYQEYKEAASSYQEAWSTLRKQVFGSWIRNPPDYHQFK

SEQ ID NO: 2714 - protein, 18 aa, Homo sapiens
  Payload ID: 634;
  Gene Symbol: ADAT1;
  Gene Name: adenosine deaminase, tRNA-specific 1;
  ENSP ID: ENSP00000455000
QKLLSRIARDKWPHSLSF

SEQ ID NO: 2715 - protein, 160 aa, Homo sapiens
  Payload ID: 634;
  Gene Symbol: ADAT1;
  Gene Name: adenosine deaminase, tRNA-specific 1;
  ENSP ID: ENSP00000455108
MWTADEIAQLCYEHYGIRLPKKGKPEPNHEWTLLAAVVKIQSPADKACDTPDKPVQVTKEVVSMGTGTKCIGQSKMRKNGDILNDSHAEVIARRSFQRYLLHQLQLAATLKEDSIFVPGTQKGVWKLRRDLIFVFFSSHTPCGDASIIPMLEFEDQPCCP

SEQ ID NO: 2716 - protein, 120 aa, Homo sapiens
  Payload ID: 634;
  Gene Symbol: ADAT1;
  Gene Name: adenosine deaminase, tRNA-specific 1;
  ENSP ID: ENSP00000455121
FGVQELKILQSDLLFEQSRSAVQAKRADSPGRLVPCGAAISWSAVPEQPLDVTANGFPQGTTKKTIGSLQARSQISKVELFRSFQKLLSRIARDKWPHSLRRPRWADHDVRRSRPSWPTW

SEQ ID NO: 2717 - protein, 10 aa, Homo sapiens
  Payload ID: 634;
  Gene Symbol: ADAT1;
  Gene Name: adenosine deaminase, tRNA-specific 1;
  ENSP ID: ENSP00000456751
MWTADEIAQL

SEQ ID NO: 2718 - protein, 103 aa, Homo sapiens
  Payload ID: 634;
  Gene Symbol: ADAT1;
  Gene Name: adenosine deaminase, tRNA-specific 1;
  ENSP ID: ENSP00000456768
MWTADEIAQLCYEHYGIRLPKKGKPEPNHEWTLLAAVVKIQSPADKACDTPDKPVQVTKEVVSMGTGTKCIGQSKMRKNGTRPSPASICLHLVSYLCRRRHPQ

SEQ ID NO: 2719 - protein, 109 aa, Homo sapiens
  Payload ID: 634;
  Gene Symbol: ADAT1;
  Gene Name: adenosine deaminase, tRNA-specific 1;
  ENSP ID: ENSP00000457501
MWTADEIAQLCYEHYGIRLPKKGKPEPNHEWTLLAAVVKIQSPADKACDTPDKPVQVTKEVVSMGTGTKCIGQSKMRKNGDILNDSHAEVIARRSFQRYLLHQLQLAAT

SEQ ID NO: 2720 - protein, 91 aa, Homo sapiens
  Payload ID: 634;
  Gene Symbol: ADAT1;
  Gene Name: adenosine deaminase, tRNA-specific 1;
  ENSP ID: ENSP00000457999
MWTADEIAQLCYEHYGIRLPKKGKPEPNHEWTLLAAVVKIQSPADKACDTPDKPVQVTKEVVSMGTGTKCIGQSKMRKNGTFSTNSSWQPP

SEQ ID NO: 2721 - protein, 191 aa, Homo sapiens
  Payload ID: 635;
  Gene Symbol: ADAT2;
  Gene Name: adenosine deaminase, tRNA-specific 2;
  Uniprot ID:  Q7Z6V5;
  ENSP ID: ENSP00000237283
MEAKAAPKPAASGACSVSAEETEKWMEEAMHMAKEALENTEVPVGCLMVYNNEVVGKGRNEVNQTKNATRHAEMVAIDQVLDWCRQSGKSPSEVFEHTVLYVTVEPCIMCAAALRLMKIPLVVYGCQNERFGGCGSVLNIASADLPNTGRPFQCIPGYRAEEAVEMLKTFYKQENPNAPKSKVRKKECQKS

SEQ ID NO: 2722 - protein, 144 aa, Homo sapiens
  Payload ID: 635;
  Gene Symbol: ADAT2;
  Gene Name: adenosine deaminase, tRNA-specific 2;
  Uniprot ID:  Q7Z6V5;
  ENSP ID: ENSP00000475651
MVYNNEVVGKGRNEVNQTKNATRHAEMVAIDQVLDWCRQSGKSPSEVFEHTVLYVTVEPCIMCAAALRLMKIPLVVYGCQNERFGGCGSVLNIASADLPNTGRPFQCIPGYRAEEAVEMLKTFYKQENPNAPKSKVRKKECQKS

SEQ ID NO: 2723 - protein, 367 aa, Homo sapiens
  Payload ID: 636;
  Gene Symbol: ADAT3;
  Gene Name: adenosine deaminase, tRNA-specific 3;
  ENSP ID: ENSP00000332448
MILCSRLCLPQSASLRMEPAPGLVEQPKCLEAGSPEPEPAPWQALPVLSEKQSGDVELVLAYAAPVLDKRQTSRLLKEVSALHPLPAQPHLKRVRPSRDAGSPHALEMLLCLAGPASGPRSLAELLPRPAVDPRGLGQPFLVPVPARPPLTRGQFEEARAHWPTSFHEDKQVTSALAGRLFSTQERAAMQSHMERAVWAARRAAARGLRAVGAVVVDPASDRVLATGHDCSCADNPLLHAVMVCVDLVARGQGRGTYDFRPFPACSFAPAAAPQAVRAGAVRKLDADEDGLPYLCTGYDLYVTREPCAMCAMALVHARILRVFYGAPSPDGALGTRFRIHARPDLNHRFQVFRGVLEEQCRWLDPDT

SEQ ID NO: 2724 - protein, 69 aa, Homo sapiens
  Payload ID: 636;
  Gene Symbol: ADAT3;
  Gene Name: adenosine deaminase, tRNA-specific 3;
  ENSP ID: ENSP00000404502
MILCSRLCLPQSASLRMEPAPGLVEQPKCLEAGSPEPEPAPWQALPVLSEKQSGDVELVLAYAAPVLDK

SEQ ID NO: 2725 - protein, 267 aa, Homo sapiens
  Payload ID: 637;
  Gene Symbol: ADAL;
  Gene Name: adenosine deaminase-like;
  Uniprot ID:  Q6DHV7;
  ENSP ID: ENSP00000374302
MIEAEEQQPCKTDFYSELPKVELHAHLNGSISSHTMKKLIAQKPDLKIHDQMTVIDKGKKRTLEECFQMFQTIHQLTSSPEDILMVTKDVIKEFADDGVKYLELRSTPRRENATGMTKKTYVESILEGIKQSKQENLDIDVRYLIAVDRRGGPLVAKETVKLAEEFFLSTEGTVLGLDLSGDPTVGQAKDFLEPLLEAKKAGLKLALHLSEIPNQKKETQILLDLLPDRIGHGTFLNSGEGGSLDLVDFVRQHRIPLGKAWSFRSSR

SEQ ID NO: 2726 - protein, 328 aa, Homo sapiens
  Payload ID: 637;
  Gene Symbol: ADAL;
  Gene Name: adenosine deaminase-like;
  Uniprot ID:  Q6DHV7;
  ENSP ID: ENSP00000398744
MIEAEEQQPCKTDFYSELPKVELHAHLNGSISSHTMKKLIAQKPDLKIHDQMTVIDKGKKRTLEECFQMFQTIHQLTSSPEDILMVTKDVIKEFADDGVKYLELRSTPRRENATGMTKKTYVESILEGIKQSKQENLDIDVRYLIAVDRRGGPLVAKETVKLAEEFFLSTEGTVLGLDLSGDPTIPNQKKETQILLDLLPDRIGHGTFLNSGEGGSLDLVDFVRQHRIPLELCLTSNVKSQTVPSYDQHHFGFWYSIAHPSVICTDDKGVFATHLSQEYQLAAETFNLTQSQVWDLSYESINYIFASDSTRSELRKKWNHLKPRVLHI

SEQ ID NO: 2727 - protein, 328 aa, Homo sapiens; identical to SEQ ID NO: 2726
  Payload ID: 637;
  Gene Symbol: ADAL;
  Gene Name: adenosine deaminase-like;
  Uniprot ID:  Q6DHV7;
  ENSP ID: ENSP00000413074

SEQ ID NO: 2728 - protein, 35 aa, Homo sapiens
  Payload ID: 637;
  Gene Symbol: ADAL;
  Gene Name: adenosine deaminase-like;
  ENSP ID: ENSP00000455907
MKKLIAQKPDLKIHDQMTVIDKGKKRTLEESQKMS

SEQ ID NO: 2729 - protein, 355 aa, Homo sapiens
  Payload ID: 637;
  Gene Symbol: ADAL;
  Gene Name: adenosine deaminase-like;
  Uniprot ID:  Q6DHV7;
  ENSP ID: ENSP00000456242
MIEAEEQQPCKTDFYSELPKVELHAHLNGSISSHTMKKLIAQKPDLKIHDQMTVIDKGKKRTLEECFQMFQTIHQLTSSPEDILMVTKDVIKEFADDGVKYLELRSTPRRENATGMTKKTYVESILEGIKQSKQENLDIDVRYLIAVDRRGGPLVAKETVKLAEEFFLSTEGTVLGLDLSGDPTVGQAKDFLEPLLEAKKAGLKLALHLSEIPNQKKETQILLDLLPDRIGHGTFLNSGEGGSLDLVDFVRQHRIPLELCLTSNVKSQTVPSYDQHHFGFWYSIAHPSVICTDDKGVFATHLSQEYQLAAETFNLTQSQVWDLSYESINYIFASDSTRSELRKKWNHLKPRVLHI

SEQ ID NO: 2730 - protein, 110 aa, Homo sapiens
  Payload ID: 637;
  Gene Symbol: ADAL;
  Gene Name: adenosine deaminase-like;
  ENSP ID: ENSP00000457591
  MOD_RES (1)..(1): Any amino acid
XKLAEEFFLSTEGTVLGLDLSGDPTIPNQKKETQILLDLLPDRIGHGTFLNSGEGGSLDLVDFVRQHRIPLELCLTSNVKSQTVPSYDQHHFGFWYSIAHPSVICVRCSV

SEQ ID NO: 2731 - protein, 267 aa, Homo sapiens; identical to SEQ ID NO: 2725
  Payload ID: 637;
  Gene Symbol: ADAL;
  Gene Name: adenosine deaminase-like;
  Uniprot ID:  Q6DHV7;
  ENSP ID: ENSP00000478575

SEQ ID NO: 2732 - protein, 362 aa, Homo sapiens
  Payload ID: 638;
  Gene Symbol: ADK;
  Gene Name: adenosine kinase;
  Uniprot ID:  P55263;
  ENSP ID: ENSP00000286621
MAAAEEEPKPKKLKVEAPQALRENILFGMGNPLLDISAVVDKDFLDKYSLKPNDQILAEDKHKELFDELVKKFKVEYHAGGSTQNSIKVAQWMIQQPHKAATFFGCIGIDKFGEILKRKAAEAHVDAHYYEQNEQPTGTCAACITGDNRSLIANLAAANCYKKEKHLDLEKNWMLVEKARVCYIAGFFLTVSPESVLKVAHHASENNRIFTLNLSAPFISQFYKESLMKVMPYVDILFGNETEAATFAREQGFETKDIKEIAKKTQALPKMNSKRQRIVIFTQGRDDTIMATESEVTAFAVLDQDQKEIIDTNGAGDAFVGGFLSQLVSDKPLTECIRAGHYAASIIIRRTGCTFPEKPDFH

SEQ ID NO: 2733 - protein, 345 aa, Homo sapiens
  Payload ID: 638;
  Gene Symbol: ADK;
  Gene Name: adenosine kinase;
  Uniprot ID:  P55263;
  ENSP ID: ENSP00000361819
MTSVRENILFGMGNPLLDISAVVDKDFLDKYSLKPNDQILAEDKHKELFDELVKKFKVEYHAGGSTQNSIKVAQWMIQQPHKAATFFGCIGIDKFGEILKRKAAEAHVDAHYYEQNEQPTGTCAACITGDNRSLIANLAAANCYKKEKHLDLEKNWMLVEKARVCYIAGFFLTVSPESVLKVAHHASENNRIFTLNLSAPFISQFYKESLMKVMPYVDILFGNETEAATFAREQGFETKDIKEIAKKTQALPKMNSKRQRIVIFTQGRDDTIMATESEVTAFAVLDQDQKEIIDTNGAGDAFVGGFLSQLVSDKPLTECIRAGHYAASIIIRRTGCTFPEKPDFH

SEQ ID NO: 2734 - protein, 327 aa, Homo sapiens
  Payload ID: 638;
  Gene Symbol: ADK;
  Gene Name: adenosine kinase;
  Uniprot ID:  P55263;
  ENSP ID: ENSP00000438321
MTSVRENILFGMGNPLLDISAVVDKDFLDKFDELVKKFKVEYHAGGSTQNSIKVAQWMIQQPHKAATFFGCIGIDKFGEILKRKAAEAHVDAHYYEQNEQPTGTCAACITGDNRSLIANLAAANCYKKEKHLDLEKNWMLVEKARVCYIAGFFLTVSPESVLKVAHHASENNRIFTLNLSAPFISQFYKESLMKVMPYVDILFGNETEAATFAREQGFETKDIKEIAKKTQALPKMNSKRQRIVIFTQGRDDTIMATESEVTAFAVLDQDQKEIIDTNGAGDAFVGGFLSQLVSDKPLTECIRAGHYAASIIIRRTGCTFPEKPDFH

SEQ ID NO: 2735 - protein, 305 aa, Homo sapiens
  Payload ID: 638;
  Gene Symbol: ADK;
  Gene Name: adenosine kinase;
  Uniprot ID:  P55263;
  ENSP ID: ENSP00000443965
MAAAEEEPKPKKLKVEAPQALRENILFGMGNPLLDISAVVDKDFLDKYSLKPNDQILAEDKHKELFDELVKKFKVEYHAGGSTQNSIKVAQWMIQQPHKAATFFGCIGIDKFGEILKRKAAEAHVDAHYYEQNEQPTGTCAACITGDNRSLIANLAAANCYKKEKHLDLEKNWMLVEKARVCYIAEAATFAREQGFETKDIKEIAKKTQALPKMNSKRQRIVIFTQGRDDTIMATESEVTAFAVLDQDQKEIIDTNGAGDAFVGGFLSQLVSDKPLTECIRAGHYAASIIIRRTGCTFPEKPDFH

SEQ ID NO: 2736 - protein, 776 aa, Homo sapiens
  Payload ID: 639;
  Gene Symbol: AMPD1;
  Gene Name: adenosine monophosphate deaminase 1;
  Uniprot ID:  P23109;
  ENSP ID: ENSP00000358551
MNVRIFYSVSQSPHSLLSLLFYCAILESRISATMPLFKLPEIDDAMRNFAEKVFASEVKDEGGRQEISPFDVDEICPISHHEMQAHIFHLETLSTSTEARRKKRFQGRKTVNLSIPLSETSSTKLSHIDEYISSSPTYQTVPDFQRVQITGDYASGVTVEDFEIVCKGLYRALCIREKYMQKSFQRFPKTPSKYLRNIDGEAWVANESFYPVFTPPVKKGEDPFRTDNLPENLGYHLKMKDGVVYVYPNEAAVSKDEPKPLPYPNLDTFLDDMNFLLALIAQGPVKTYTHRRLKFLSSKFQVHQMLNEMDELKELKNNPHRDFYNCRKVDTHIHAAACMNQKHLLRFIKKSYQIDADRVVYSTKEKNLTLKELFAKLKMHPYDLTVDSLDVHAGRQTFQRFDKFNDKYNPVGASELRDLYLKTDNYINGEYFATIIKEVGADLVEAKYQHAEPRLSIYGRSPDEWSKLSSWFVCNRIHCPNMTWMIQVPRIYDVFRSKNFLPHFGKMLENIFMPVFEATINPQADPELSVFLKHITGFDSVDDESKHSGHMFSSKSPKPQEWTLEKNPSYTYYAYYMYANIMVLNSLRKERGMNTFLFRPHCGEAGALTHLMTAFMIADDISHGLNLKKSPVLQYLFFLAQIPIAMSPLSNNSLFLEYAKNPFLDFLQKGLMISLSTDDPMQFHFTKEPLMEEYAIAAQVFKLSTCDMCEVARNSVLQCGISHEEKVKFLGDNYLEEGPAGNDIRRTNVAQIRMAYRYETWCYELNLIAEGLKSTE

SEQ ID NO: 2737 - protein, 780 aa, Homo sapiens
  Payload ID: 639;
  Gene Symbol: AMPD1;
  Gene Name: adenosine monophosphate deaminase 1;
  Uniprot ID:  P23109;
  ENSP ID: ENSP00000430075
MNVRIFYSVSQSPHSLLSLLFYCAILESRISATMPLFKLPAEEKQIDDAMRNFAEKVFASEVKDEGGRQEISPFDVDEICPISHHEMQAHIFHLETLSTSTEARRKKRFQGRKTVNLSIPLSETSSTKLSHIDEYISSSPTYQTVPDFQRVQITGDYASGVTVEDFEIVCKGLYRALCIREKYMQKSFQRFPKTPSKYLRNIDGEAWVANESFYPVFTPPVKKGEDPFRTDNLPENLGYHLKMKDGVVYVYPNEAAVSKDEPKPLPYPNLDTFLDDMNFLLALIAQGPVKTYTHRRLKFLSSKFQVHQMLNEMDELKELKNNPHRDFYNCRKVDTHIHAAACMNQKHLLRFIKKSYQIDADRVVYSTKEKNLTLKELFAKLKMHPYDLTVDSLDVHAGRQTFQRFDKFNDKYNPVGASELRDLYLKTDNYINGEYFATIIKEVGADLVEAKYQHAEPRLSIYGRSPDEWSKLSSWFVCNRIHCPNMTWMIQVPRIYDVFRSKNFLPHFGKMLENIFMPVFEATINPQADPELSVFLKHITGFDSVDDESKHSGHMFSSKSPKPQEWTLEKNPSYTYYAYYMYANIMVLNSLRKERGMNTFLFRPHCGEAGALTHLMTAFMIADDISHGLNLKKSPVLQYLFFLAQIPIAMSPLSNNSLFLEYAKNPFLDFLQKGLMISLSTDDPMQFHFTKEPLMEEYAIAAQVFKLSTCDMCEVARNSVLQCGISHEEKVKFLGDNYLEEGPAGNDIRRTNVAQIRMAYRYETWCYELNLIAEGLKSTE

SEQ ID NO: 2738 - protein, 879 aa, Homo sapiens
  Payload ID: 640;
  Gene Symbol: AMPD2;
  Gene Name: adenosine monophosphate deaminase 2;
  Uniprot ID:  Q01433;
  ENSP ID: ENSP00000256578
MRNRGQGLFRLRSRCFLHQSLPLGAGRRKGLDVAEPGPSRCRSDSPAVAAVVPAMASYPSGSGKPKAKYPFKKRASLQASTAAPEARGGLGAPPLQSARSLPGPAPCLKHFPLDLRTSMDGKCKEIAEELFTRSLAESELRSAPYEFPEESPIEQLEERRQRLERQISQDVKLEPDILLRAKQDFLKTDSDSDLQLYKEQGEGQGDRSLRERDVLEREFQRVTISGEEKCGVPFTDLLDAAKSVVRALFIREKYMALSLQSFCPTTRRYLQQLAEKPLETRTYEQGPDTPVSADAPVHPPALEQHPYEHCEPSTMPGDLGLGLRMVRGVVHVYTRREPDEHCSEVELPYPDLQEFVADVNVLMALIINGPIKSFCYRRLQYLSSKFQMHVLLNEMKELAAQKKVPHRDFYNIRKVDTHIHASSCMNQKHLLRFIKRAMKRHLEEIVHVEQGREQTLREVFESMNLTAYDLSVDTLDVHADRNTFHRFDKFNAKYNPIGESVLREIFIKTDNRVSGKYFAHIIKEVMSDLEESKYQNAELRLSIYGRSRDEWDKLARWAVMHRVHSPNVRWLVQVPRLFDVYRTKGQLANFQEMLENIFLPLFEATVHPASHPELHLFLEHVDGFDSVDDESKPENHVFNLESPLPEAWVEEDNPPYAYYLYYTFANMAMLNHLRRQRGFHTFVLRPHCGEAGPIHHLVSAFMLAENISHGLLLRKAPVLQYLYYLAQIGIAMSPLSNNSLFLSYHRNPLPEYLSRGLMVSLSTDDPLQFHFTKEPLMEEYSIATQVWKLSSCDMCELARNSVLMSGFSHKVKSHWLGPNYTKEGPEGNDIRRTNVPDIRVGYRYETLCQELALITQAVQSEMLETIPEEAGITMSPGPQ

SEQ ID NO: 2739 - protein, 798 aa, Homo sapiens
  Payload ID: 640;
  Gene Symbol: AMPD2;
  Gene Name: adenosine monophosphate deaminase 2;
  Uniprot ID:  Q01433;
  ENSP ID: ENSP00000345498
MASEARGGLGAPPLQSARSLPGPAPCLKHFPLDLRTSMDGKCKEIAEELFTRSLAESELRSAPYEFPEESPIEQLEERRQRLERQISQDVKLEPDILLRAKQDFLKTDSDSDLQLYKEQGEGQGDRSLRERDVLEREFQRVTISGEEKCGVPFTDLLDAAKSVVRALFIREKYMALSLQSFCPTTRRYLQQLAEKPLETRTYEQGPDTPVSADAPVHPPALEQHPYEHCEPSTMPGDLGLGLRMVRGVVHVYTRREPDEHCSEVELPYPDLQEFVADVNVLMALIINGPIKSFCYRRLQYLSSKFQMHVLLNEMKELAAQKKVPHRDFYNIRKVDTHIHASSCMNQKHLLRFIKRAMKRHLEEIVHVEQGREQTLREVFESMNLTAYDLSVDTLDVHADRNTFHRFDKFNAKYNPIGESVLREIFIKTDNRVSGKYFAHIIKEVMSDLEESKYQNAELRLSIYGRSRDEWDKLARWAVMHRVHSPNVRWLVQVPRLFDVYRTKGQLANFQEMLENIFLPLFEATVHPASHPELHLFLEHVDGFDSVDDESKPENHVFNLESPLPEAWVEEDNPPYAYYLYYTFANMAMLNHLRRQRGFHTFVLRPHCGEAGPIHHLVSAFMLAENISHGLLLRKAPVLQYLYYLAQIGIAMSPLSNNSLFLSYHRNPLPEYLSRGLMVSLSTDDPLQFHFTKEPLMEEYSIATQVWKLSSCDMCELARNSVLMSGFSHKVKSHWLGPNYTKEGPEGNDIRRTNVPDIRVGYRYETLCQELALITQAVQSEMLETIPEEAGITMSPGPQ

SEQ ID NO: 2740 - protein, 804 aa, Homo sapiens
  Payload ID: 640;
  Gene Symbol: AMPD2;
  Gene Name: adenosine monophosphate deaminase 2;
  Uniprot ID:  Q01433;
  ENSP ID: ENSP00000351573
MWQSQAPAGAAQTPPLSPPWSQPWHPIHLALASPRPNIPLRSGPACRPPLQLQELFTRSLAESELRSAPYEFPEESPIEQLEERRQRLERQISQDVKLEPDILLRAKQDFLKTDSDSDLQLYKEQGEGQGDRSLRERDVLEREFQRVTISGEEKCGVPFTDLLDAAKSVVRALFIREKYMALSLQSFCPTTRRYLQQLAEKPLETRTYEQGPDTPVSADAPVHPPALEQHPYEHCEPSTMPGDLGLGLRMVRGVVHVYTRREPDEHCSEVELPYPDLQEFVADVNVLMALIINGPIKSFCYRRLQYLSSKFQMHVLLNEMKELAAQKKVPHRDFYNIRKVDTHIHASSCMNQKHLLRFIKRAMKRHLEEIVHVEQGREQTLREVFESMNLTAYDLSVDTLDVHADRNTFHRFDKFNAKYNPIGESVLREIFIKTDNRVSGKYFAHIIKEVMSDLEESKYQNAELRLSIYGRSRDEWDKLARWAVMHRVHSPNVRWLVQVPRLFDVYRTKGQLANFQEMLENIFLPLFEATVHPASHPELHLFLEHVDGFDSVDDESKPENHVFNLESPLPEAWVEEDNPPYAYYLYYTFANMAMLNHLRRQRGFHTFVLRPHCGEAGPIHHLVSAFMLAENISHGLLLRKAPVLQYLYYLAQIGIAMSPLSNNSLFLSYHRNPLPEYLSRGLMVSLSTDDPLQFHFTKEPLMEEYSIATQVWKLSSCDMCELARNSVLMSGFSHKVKSHWLGPNYTKEGPEGNDIRRTNVPDIRVGYRYETLCQELALITQAVQSEMLETIPEEAGITMSPGPQ

SEQ ID NO: 2741 - protein, 861 aa, Homo sapiens
  Payload ID: 640;
  Gene Symbol: AMPD2;
  Gene Name: adenosine monophosphate deaminase 2;
  ENSP ID: ENSP00000358855
  MOD_RES (1)..(1): Any amino acid
XLDVAEPGPSRCRSDSPAVAAVVPAMASYPSGSGKPKAKYPFKKRASLQASTAAPEARGGLGAPPLQSARSLPGPAPCLKHFPLDLRTSMDGKCKEIAEELFTRSLAESELRSAPYEFPEESPIEQLEERRQRLERQISQDVKLEPDILLRAKQDFLKTDSDSDLQLYKEQGEGQGDRSLRERDVLEREFQRVTISGEEKCGVPFTDLLDAAKSVVRALFIREKYMALSLQSFCPTTRRYLQQLAEKPLETRTYEQGPDTPVSADAPVHPPALEQHPYEHCEPSTMPGDLGLGLRMVRGVVHVYTRREPDEHCSEVELPYPDLQEFVADVNVLMALIINGPIKSFCYRRLQYLSSKFQMHVLLNEMKELAAQKKVPHRDFYNIRKVDTHIHASSCMNQKHLLRFIKRAMKRHLEEIVHVEQGREQTLREVFESMNLTAYDLSVDTLDVHADRNTFHRFDKFNAKYNPIGESVLREIFIKTDNRVSGKYFAHIIKEVMSDLEESKYQNAELRLSIYGRSRDEWDKLARWAVMHRVHSPNVRWLVQVPRLFDVYRTKGQLANFQEMLENIFLPLFEATVHPASHPELHLFLEHVDGFDSVDDESKPENHVFNLESPLPEAWVEEDNPPYAYYLYYTFANMAMLNHLRRQRGFHTFVLRPHCGEAGPIHHLVSAFMLAENISHGLLLRKAPVLQYLYYLAQIGIAMSPLSNNSLFLSYHRNPLPEYLSRGLMVSLSTDDPLQFHFTKVRAQQAARRAGEPLMEEYSIATQVWKLSSCDMCELARNSVLMSGFSHKVKSHWLGPNYTKEGPEGNDIRRTNVPDIRVGYRYETLCQELALITQAVQSEMLETIPEEAGITMSPGPQ

SEQ ID NO: 2742 - protein, 760 aa, Homo sapiens
  Payload ID: 640;
  Gene Symbol: AMPD2;
  Gene Name: adenosine monophosphate deaminase 2;
  Uniprot ID:  Q01433;
  ENSP ID: ENSP00000377292
MLTFLPSPQELFTRSLAESELRSAPYEFPEESPIEQLEERRQRLERQISQDVKLEPDILLRAKQDFLKTDSDSDLQLYKEQGEGQGDRSLRERDVLEREFQRVTISGEEKCGVPFTDLLDAAKSVVRALFIREKYMALSLQSFCPTTRRYLQQLAEKPLETRTYEQGPDTPVSADAPVHPPALEQHPYEHCEPSTMPGDLGLGLRMVRGVVHVYTRREPDEHCSEVELPYPDLQEFVADVNVLMALIINGPIKSFCYRRLQYLSSKFQMHVLLNEMKELAAQKKVPHRDFYNIRKVDTHIHASSCMNQKHLLRFIKRAMKRHLEEIVHVEQGREQTLREVFESMNLTAYDLSVDTLDVHADRNTFHRFDKFNAKYNPIGESVLREIFIKTDNRVSGKYFAHIIKEVMSDLEESKYQNAELRLSIYGRSRDEWDKLARWAVMHRVHSPNVRWLVQVPRLFDVYRTKGQLANFQEMLENIFLPLFEATVHPASHPELHLFLEHVDGFDSVDDESKPENHVFNLESPLPEAWVEEDNPPYAYYLYYTFANMAMLNHLRRQRGFHTFVLRPHCGEAGPIHHLVSAFMLAENISHGLLLRKAPVLQYLYYLAQIGIAMSPLSNNSLFLSYHRNPLPEYLSRGLMVSLSTDDPLQFHFTKEPLMEEYSIATQVWKLSSCDMCELARNSVLMSGFSHKVKSHWLGPNYTKEGPEGNDIRRTNVPDIRVGYRYETLCQELALITQAVQSEMLETIPEEAGITMSPGPQ

SEQ ID NO: 2743 - protein, 195 aa, Homo sapiens
  Payload ID: 640;
  Gene Symbol: AMPD2;
  Gene Name: adenosine monophosphate deaminase 2;
  ENSP ID: ENSP00000431904
ECVLPGLRIDAGLCLATSRPRCWSPQRGPPPPASSLWWCPSTSVPGTAGLEEARGGLGAPPLQSARSLPGPAPCLKHFPLDLRTSMDGKCKEIAEELFTRSLAESELRSAPYEFPEESPIEQLEERRQRLERQISQDVKLEPDILLRAKQDFLKTDSDSDLQLYKEQGEGQGDRSLRERDVLEREFQRVTISGEE

SEQ ID NO: 2744 - protein, 87 aa, Homo sapiens
  Payload ID: 640;
  Gene Symbol: AMPD2;
  Gene Name: adenosine monophosphate deaminase 2;
  ENSP ID: ENSP00000431975
MDGKCKEIAEELFTRSLAESELRSAPYEFPEESPIEQLEERRQRLERQISQDVKLEPDILLRAKQDFLKTDSDSDLQLYKEQGEGQG

SEQ ID NO: 2745 - protein, 1 aa, Homo sapiens
  Payload ID: 640;
  Gene Symbol: AMPD2;
  Gene Name: adenosine monophosphate deaminase 2;
  ENSP ID: ENSP00000432344
M

SEQ ID NO: 2746 - protein, 103 aa, Homo sapiens
  Payload ID: 640;
  Gene Symbol: AMPD2;
  Gene Name: adenosine monophosphate deaminase 2;
  ENSP ID: ENSP00000433739
MASEARGGLGAPPLQSARSLPGPAPCLKHFPLDLRTSMDGKCKEIAEELFTRSLAESELRSAPYEFPEESPIEQLEERRQRLERQISQDVKLEPDILLRAKQD

SEQ ID NO: 2747 - protein, 83 aa, Homo sapiens
  Payload ID: 640;
  Gene Symbol: AMPD2;
  Gene Name: adenosine monophosphate deaminase 2;
  ENSP ID: ENSP00000434891
AVAAVVPAMASYPSGSGKPKAKYPFKKRASLQASTAAPDDWCKVSTVLRVFSVPRSVPSRKGVPWVGPFLALFGSAIGQLIRI

SEQ ID NO: 2748 - protein, 1 aa, Homo sapiens
  Payload ID: 640;
  Gene Symbol: AMPD2;
  Gene Name: adenosine monophosphate deaminase 2;
  ENSP ID: ENSP00000436303
M

SEQ ID NO: 2749 - protein, 879 aa, Homo sapiens; identical to SEQ ID NO: 2738
  Payload ID: 640;
  Gene Symbol: AMPD2;
  Gene Name: adenosine monophosphate deaminase 2;
  Uniprot ID:  Q01433;
  ENSP ID: ENSP00000436541

SEQ ID NO: 2750 - protein, 231 aa, Homo sapiens
  Payload ID: 640;
  Gene Symbol: AMPD2;
  Gene Name: adenosine monophosphate deaminase 2;
  ENSP ID: ENSP00000437025
  MOD_RES (1)..(1): Any amino acid
XELHLFLEHVDGFDSVDDESKPENHVFNLESPLPEAWVEEDNPPYAYYLYYTFANMAMLNHLRRQRGFHTFVLRPHCGEAGPIHHLVSAFMLAENISHGLLLRKAPVLQYLYYLAQIGIAMSPLSNNSLFLSYHRNPLPEYLSRGLMVSLSTDDPLQFHFTKVKSHWLGPNYTKEGPEGNDIRRTNVPDIRVGYRYETLCQELALITQAVQSEMLETIPEEAGITMSPGPQ

SEQ ID NO: 2751 - protein, 761 aa, Homo sapiens
  Payload ID: 640;
  Gene Symbol: AMPD2;
  Gene Name: adenosine monophosphate deaminase 2;
  Uniprot ID:  Q01433;
  ENSP ID: ENSP00000437164
MDGKCKEIAEELFTRSLAESELRSAPYEFPEESPIEQLEERRQRLERQISQDVKLEPDILLRAKQDFLKTDSDSDLQLYKEQGEGQGDRSLRERDVLEREFQRVTISGEEKCGVPFTDLLDAAKSVVRALFIREKYMALSLQSFCPTTRRYLQQLAEKPLETRTYEQGPDTPVSADAPVHPPALEQHPYEHCEPSTMPGDLGLGLRMVRGVVHVYTRREPDEHCSEVELPYPDLQEFVADVNVLMALIINGPIKSFCYRRLQYLSSKFQMHVLLNEMKELAAQKKVPHRDFYNIRKVDTHIHASSCMNQKHLLRFIKRAMKRHLEEIVHVEQGREQTLREVFESMNLTAYDLSVDTLDVHADRNTFHRFDKFNAKYNPIGESVLREIFIKTDNRVSGKYFAHIIKEVMSDLEESKYQNAELRLSIYGRSRDEWDKLARWAVMHRVHSPNVRWLVQVPRLFDVYRTKGQLANFQEMLENIFLPLFEATVHPASHPELHLFLEHVDGFDSVDDESKPENHVFNLESPLPEAWVEEDNPPYAYYLYYTFANMAMLNHLRRQRGFHTFVLRPHCGEAGPIHHLVSAFMLAENISHGLLLRKAPVLQYLYYLAQIGIAMSPLSNNSLFLSYHRNPLPEYLSRGLMVSLSTDDPLQFHFTKEPLMEEYSIATQVWKLSSCDMCELARNSVLMSGFSHKVKSHWLGPNYTKEGPEGNDIRRTNVPDIRVGYRYETLCQELALITQAVQSEMLETIPEEAGITMSPGPQ

SEQ ID NO: 2752 - protein, 767 aa, Homo sapiens
  Payload ID: 641;
  Gene Symbol: AMPD3;
  Gene Name: adenosine monophosphate deaminase 3;
  Uniprot ID:  Q01432;
  ENSP ID: ENSP00000379801
MPRQFPKLNISEVDEQVRLLAEKVFAKVLREEDSKDALSLFTVPEDCPIGQKEAKERELQKELAEQKSVETAKRKKSFKMIRSQSLSLQMPPQQDWKGPPAASPAMSPTTPVVTGATSLPTPAPYAMPEFQRVTISGDYCAGITLEDYEQAAKSLAKALMIREKYARLAYHRFPRITSQYLGHPRADTAPPEEGLPDFHPPPLPQEDPYCLDDAPPNLDYLVHMQGGILFVYDNKKMLEHQEPHSLPYPDLETYTVDMSHILALITDGPTKTYCHRRLNFLESKFSLHEMLNEMSEFKELKSNPHRDFYNVRKVDTHIHAAACMNQKHLLRFIKHTYQTEPDRTVAEKRGRKITLRQVFDGLHMDPYDLTVDSLDVHAGRQTFHRFDKFNSKYNPVGASELRDLYLKTENYLGGEYFARMVKEVARELEESKYQYSEPRLSIYGRSPEEWPNLAYWFIQHKVYSPNMRWIIQVPRIYDIFRSKKLLPNFGKMLENIFLPLFKATINPQDHRELHLFLKYVTGFDSVDDESKHSDHMFSDKSPNPDVWTSEQNPPYSYYLYYMYANIMVLNNLRRERGLSTFLFRPHCGEAGSITHLVSAFLTADNISHGLLLKKSPVLQYLYYLAQIPIAMSPLSNNSLFLEYSKNPLREFLHKGLHVSLSTDDPMQFHYTKEALMEEYAIAAQVWKLSTCDLCEIARNSVLQSGLSHQEKQKFLGQNYYKEGPEGNDIRKTNVAQIRMAFRYETLCNELSFLSDAMKSEEITALTN

SEQ ID NO: 2753 - protein, 776 aa, Homo sapiens
  Payload ID: 641;
  Gene Symbol: AMPD3;
  Gene Name: adenosine monophosphate deaminase 3;
  Uniprot ID:  Q01432;
  ENSP ID: ENSP00000379802
MALSSEPAEMPRQFPKLNISEVDEQVRLLAEKVFAKVLREEDSKDALSLFTVPEDCPIGQKEAKERELQKELAEQKSVETAKRKKSFKMIRSQSLSLQMPPQQDWKGPPAASPAMSPTTPVVTGATSLPTPAPYAMPEFQRVTISGDYCAGITLEDYEQAAKSLAKALMIREKYARLAYHRFPRITSQYLGHPRADTAPPEEGLPDFHPPPLPQEDPYCLDDAPPNLDYLVHMQGGILFVYDNKKMLEHQEPHSLPYPDLETYTVDMSHILALITDGPTKTYCHRRLNFLESKFSLHEMLNEMSEFKELKSNPHRDFYNVRKVDTHIHAAACMNQKHLLRFIKHTYQTEPDRTVAEKRGRKITLRQVFDGLHMDPYDLTVDSLDVHAGRQTFHRFDKFNSKYNPVGASELRDLYLKTENYLGGEYFARMVKEVARELEESKYQYSEPRLSIYGRSPEEWPNLAYWFIQHKVYSPNMRWIIQVPRIYDIFRSKKLLPNFGKMLENIFLPLFKATINPQDHRELHLFLKYVTGFDSVDDESKHSDHMFSDKSPNPDVWTSEQNPPYSYYLYYMYANIMVLNNLRRERGLSTFLFRPHCGEAGSITHLVSAFLTADNISHGLLLKKSPVLQYLYYLAQIPIAMSPLSNNSLFLEYSKNPLREFLHKGLHVSLSTDDPMQFHYTKEALMEEYAIAAQVWKLSTCDLCEIARNSVLQSGLSHQEKQKFLGQNYYKEGPEGNDIRKTNVAQIRMAFRYETLCNELSFLSDAMKSEEITALTN

SEQ ID NO: 2754 - protein, 608 aa, Homo sapiens
  Payload ID: 641;
  Gene Symbol: AMPD3;
  Gene Name: adenosine monophosphate deaminase 3;
  Uniprot ID:  Q01432;
  ENSP ID: ENSP00000396000
MIREKYARLAYHRFPRITSQYLGHPRADTAPPEEGLPDFHPPPLPQEDPYCLDDAPPNLDYLVHMQGGILFVYDNKKMLEHQEPHSLPYPDLETYTVDMSHILALITDGPTKTYCHRRLNFLESKFSLHEMLNEMSEFKELKSNPHRDFYNVRKVDTHIHAAACMNQKHLLRFIKHTYQTEPDRTVAEKRGRKITLRQVFDGLHMDPYDLTVDSLDVHAGRQTFHRFDKFNSKYNPVGASELRDLYLKTENYLGGEYFARMVKEVARELEESKYQYSEPRLSIYGRSPEEWPNLAYWFIQHKVYSPNMRWIIQVPRIYDIFRSKKLLPNFGKMLENIFLPLFKATINPQDHRELHLFLKYVTGFDSVDDESKHSDHMFSDKSPNPDVWTSEQNPPYSYYLYYMYANIMVLNNLRRERGLSTFLFRPHCGEAGSITHLVSAFLTADNISHGLLLKKSPVLQYLYYLAQIPIAMSPLSNNSLFLEYSKNPLREFLHKGLHVSLSTDDPMQFHYTKEALMEEYAIAAQVWKLSTCDLCEIARNSVLQSGLSHQEKQKFLGQNYYKEGPEGNDIRKTNVAQIRMAFRYETLCNELSFLSDAMKSEEITALTN

SEQ ID NO: 2755 - protein, 767 aa, Homo sapiens; identical to SEQ ID NO: 2752
  Payload ID: 641;
  Gene Symbol: AMPD3;
  Gene Name: adenosine monophosphate deaminase 3;
  Uniprot ID:  Q01432;
  ENSP ID: ENSP00000431648

SEQ ID NO: 2756 - protein, 111 aa, Homo sapiens
  Payload ID: 641;
  Gene Symbol: AMPD3;
  Gene Name: adenosine monophosphate deaminase 3;
  ENSP ID: ENSP00000432707
MPRQFPKLNISEVDEQVRLLAEKVFAKVLREEDSKDALSLFTVPEDCPIGQKEAKERELQKELAEQKSVETAKRKKSFKMIRSQSLSLQMPPQQDWKGPPAASPAMSPTTP

SEQ ID NO: 2757 - protein, 267 aa, Homo sapiens
  Payload ID: 641;
  Gene Symbol: AMPD3;
  Gene Name: adenosine monophosphate deaminase 3;
  ENSP ID: ENSP00000433284
MPRQFPKLNISEVDEQVRLLAEKVFAKVLREEDSKDALSLFTVPEDCPIGQKEAKERELQKELAEQKSVETAKRKKSFKMIRSQSLSLQMPPQQDWKGPPAASPAMSPTTPVVTGATSLPTPAPYAMPEFQRVTISGDYCAGITLEDYEQAAKSLAKALMIREKYARLAYHRFPRITSQYLGHPRADTAPPEEGLPDFHPPPLPQEDPYCLDDAPPNLDYLVHMQGGILFVYDNKKMLEHQEPHSLPYPDLETYTVDMSHILALITD

SEQ ID NO: 2758 - protein, 110 aa, Homo sapiens
  Payload ID: 641;
  Gene Symbol: AMPD3;
  Gene Name: adenosine monophosphate deaminase 3;
  ENSP ID: ENSP00000433351
AAACMNQKHLLRFIKHTYQTEPDRTVAEKRGRKITLRQVFDGLHMDPYDLTVDSLDVHAVSELLLQCRQQTAALAGDSAPWKATMIVLAGRCYGSSFLFYLTERSCGLRE

SEQ ID NO: 2759 - protein, 212 aa, Homo sapiens
  Payload ID: 641;
  Gene Symbol: AMPD3;
  Gene Name: adenosine monophosphate deaminase 3;
  ENSP ID: ENSP00000433937
MALSSEPAEMPRQFPKLNISEVDEQVRLLAEKVFAKVLREEDSKDALSLFTVPEDCPIGQKEAKERELQKELAEQKSVETAKRKKSFKMIRSQSLSLQMPPQQDWKGPPAASPAMSPTTPVVTGATSLPTPAPYAMPEFQRVTISGDYCAGITLEDYEQAAKSLAKALMIREKYARLAYHRFPRITSQYLGHPRADTAPPEEGLPGGHPLCV

SEQ ID NO: 2760 - protein, 90 aa, Homo sapiens
  Payload ID: 641;
  Gene Symbol: AMPD3;
  Gene Name: adenosine monophosphate deaminase 3;
  ENSP ID: ENSP00000434608
PPYSYYLYYMYANIMVLNNLRRERGLSTFLFRPHCGEAGSITHLVSAFLTADNISHGLLLKKQQQFVPRIFQEPSEGIPTQGTACFSFHR

SEQ ID NO: 2761 - protein, 677 aa, Homo sapiens
  Payload ID: 641;
  Gene Symbol: AMPD3;
  Gene Name: adenosine monophosphate deaminase 3;
  ENSP ID: ENSP00000435382
MPRQFPKLNISEVDEQVRLLAEKVFAKVLREEDSKDALSLFTVPEDCPIGQKEAKERELQKELAEQKSVETAKRKKSFKMIRSQSLSLQMPPQQDWKGPPAASPAMSPTTPVVTGATSLPTPAPYAMPEFQRVTISGDYCAGITLEDYEQAAKSLAKALMIREKYARLAYHRFPRITSQYLGHPRADTAPPEEGLPDFHPPPLPQEDPYCLDDAPPNLDYLVHMQGGILFVYDNKKMLEHQEPHSLPYPDLETYTVDMSHILALITDGPTKTYCHRRLNFLESKFSLHEMLNEMSEFKELKSNPHRDFYNVRKVDTHIHAAACMNQKHLLRFIKHTYQTEPDRTVAEKRGRKITLRQVFDGLHMDPYDLTVDSLDVHAGRQTFHRFDKFNSKYNPVGASELRDLYLKTENYLGGEYFARMVKEVARELEESKYQYSEPRLSIYGRSPEEWPNLAYWFIQHKVYSPNMRWIIQVPRIYDIFRSKKLLPNFGKMLENIFLPLFKATINPQDHRELHLFLKYVTGFDSVDDESKHSDHMFSDKSPNPDVWTSEQNPPYSYYLYYMYANIMVLNNLRRERGLSTFLFRPHCGEAGSITHLVSAFLTADNISHGLLLKKSPVLQYLYYLAQIPIAMSPLSNNSLFLEYSKNPLREFLHKGLHVSLSTDDPMQFHYTKLKCGS

SEQ ID NO: 2762 - protein, 774 aa, Homo sapiens
  Payload ID: 641;
  Gene Symbol: AMPD3;
  Gene Name: adenosine monophosphate deaminase 3;
  Uniprot ID:  Q01432;
  ENSP ID: ENSP00000436987
MEPGSAEMPRQFPKLNISEVDEQVRLLAEKVFAKVLREEDSKDALSLFTVPEDCPIGQKEAKERELQKELAEQKSVETAKRKKSFKMIRSQSLSLQMPPQQDWKGPPAASPAMSPTTPVVTGATSLPTPAPYAMPEFQRVTISGDYCAGITLEDYEQAAKSLAKALMIREKYARLAYHRFPRITSQYLGHPRADTAPPEEGLPDFHPPPLPQEDPYCLDDAPPNLDYLVHMQGGILFVYDNKKMLEHQEPHSLPYPDLETYTVDMSHILALITDGPTKTYCHRRLNFLESKFSLHEMLNEMSEFKELKSNPHRDFYNVRKVDTHIHAAACMNQKHLLRFIKHTYQTEPDRTVAEKRGRKITLRQVFDGLHMDPYDLTVDSLDVHAGRQTFHRFDKFNSKYNPVGASELRDLYLKTENYLGGEYFARMVKEVARELEESKYQYSEPRLSIYGRSPEEWPNLAYWFIQHKVYSPNMRWIIQVPRIYDIFRSKKLLPNFGKMLENIFLPLFKATINPQDHRELHLFLKYVTGFDSVDDESKHSDHMFSDKSPNPDVWTSEQNPPYSYYLYYMYANIMVLNNLRRERGLSTFLFRPHCGEAGSITHLVSAFLTADNISHGLLLKKSPVLQYLYYLAQIPIAMSPLSNNSLFLEYSKNPLREFLHKGLHVSLSTDDPMQFHYTKEALMEEYAIAAQVWKLSTCDLCEIARNSVLQSGLSHQEKQKFLGQNYYKEGPEGNDIRKTNVAQIRMAFRYETLCNELSFLSDAMKSEEITALTN

SEQ ID NO: 2763 - protein, 432 aa, Homo sapiens
  Payload ID: 642;
  Gene Symbol: AHCY;
  Gene Name: adenosylhomocysteinase;
  Uniprot ID:  P23526;
  ENSP ID: ENSP00000217426
MSDKLPYKVADIGLAAWGRKALDIAENEMPGLMRMRERYSASKPLKGARIAGCLHMTVETAVLIETLVTLGAEVQWSSCNIFSTQDHAAAAIAKAGIPVYAWKGETDEEYLWCIEQTLYFKDGPLNMILDDGGDLTNLIHTKYPQLLPGIRGISEETTTGVHNLYKMMANGILKVPAINVNDSVTKSKFDNLYGCRESLIDGIKRATDVMIAGKVAVVAGYGDVGKGCAQALRGFGARVIITEIDPINALQAAMEGYEVTTMDEACQEGNIFVTTTGCIDIILGRHFEQMKDDAIVCNIGHFDVEIDVKWLNENAVEKVNIKPQVDRYRLKNGRRIILLAEGRLVNLGCAMGHPSFVMSNSFTNQVMAQIELWTHPDKYPVGVHFLPKKLDEAVAEAHLGKLNVKLTKLTEKQAQYLGMSCDGPFKPDHYRY

SEQ ID NO: 2764 - protein, 404 aa, Homo sapiens
  Payload ID: 642;
  Gene Symbol: AHCY;
  Gene Name: adenosylhomocysteinase;
  Uniprot ID:  P23526;
  ENSP ID: ENSP00000442820
MPGLMRMRERYSASKPLKGARIAGCLHMTVETAVLIETLVTLGAEVQWSSCNIFSTQDHAAAAIAKAGIPVYAWKGETDEEYLWCIEQTLYFKDGPLNMILDDGGDLTNLIHTKYPQLLPGIRGISEETTTGVHNLYKMMANGILKVPAINVNDSVTKSKFDNLYGCRESLIDGIKRATDVMIAGKVAVVAGYGDVGKGCAQALRGFGARVIITEIDPINALQAAMEGYEVTTMDEACQEGNIFVTTTGCIDIILGRHFEQMKDDAIVCNIGHFDVEIDVKWLNENAVEKVNIKPQVDRYRLKNGRRIILLAEGRLVNLGCAMGHPSFVMSNSFTNQVMAQIELWTHPDKYPVGVHFLPKKLDEAVAEAHLGKLNVKLTKLTEKQAQYLGMSCDGPFKPDHYRY

SEQ ID NO: 2765 - protein, 483 aa, Homo sapiens
  Payload ID: 643;
  Gene Symbol: AHCYL1;
  Gene Name: adenosylhomocysteinase-like 1;
  Uniprot ID:  O43865;
  ENSP ID: ENSP00000352092
MQEFTKFPTKTGRRSLSRSISQSSTDSYSSAASYTDSSDDEVSPREKQQTNSKGSSNFCVKNIKQAEFGRREIEIAEQDMSALISLRKRAQGEKPLAGAKIVGCTHITAQTAVLIETLCALGAQCRWSACNIYSTQNEVAAALAEAGVAVFAWKGESEDDFWWCIDRCVNMDGWQANMILDDGGDLTHWVYKKYPNVFKKIRGIVEESVTGVHRLYQLSKAGKLCVPAMNVNDSVTKQKFDNLYCCRESILDGLKRTTDVMFGGKQVVVCGYGEVGKGCCAALKALGAIVYITEIDPICALQACMDGFRVVKLNEVIRQVDVVITCTGNKNVVTREHLDRMKNSCIVCNMGHSNTEIDVTSLRTPELTWERVRSQVDHVIWPDGKRVVLLAEGRLLNLSCSTVPTFVLSITATTQALALIELYNAPEGRYKQDVYLLPKKMDEYVASLHLPSFDAHLTELTDDQAKYLGLNKNGPFKPNYYRY

SEQ ID NO: 2766 - protein, 530 aa, Homo sapiens
  Payload ID: 643;
  Gene Symbol: AHCYL1;
  Gene Name: adenosylhomocysteinase-like 1;
  Uniprot ID:  O43865;
  ENSP ID: ENSP00000358814
MSMPDAMPLPGVGEELKQAKEIEDAEKYSFMATVTKAPKKQIQFADDMQEFTKFPTKTGRRSLSRSISQSSTDSYSSAASYTDSSDDEVSPREKQQTNSKGSSNFCVKNIKQAEFGRREIEIAEQDMSALISLRKRAQGEKPLAGAKIVGCTHITAQTAVLIETLCALGAQCRWSACNIYSTQNEVAAALAEAGVAVFAWKGESEDDFWWCIDRCVNMDGWQANMILDDGGDLTHWVYKKYPNVFKKIRGIVEESVTGVHRLYQLSKAGKLCVPAMNVNDSVTKQKFDNLYCCRESILDGLKRTTDVMFGGKQVVVCGYGEVGKGCCAALKALGAIVYITEIDPICALQACMDGFRVVKLNEVIRQVDVVITCTGNKNVVTREHLDRMKNSCIVCNMGHSNTEIDVTSLRTPELTWERVRSQVDHVIWPDGKRVVLLAEGRLLNLSCSTVPTFVLSITATTQALALIELYNAPEGRYKQDVYLLPKKMDEYVASLHLPSFDAHLTELTDDQAKYLGLNKNGPFKPNYYRY

SEQ ID NO: 2767 - protein, 483 aa, Homo sapiens; identical to SEQ ID NO: 2765
  Payload ID: 643;
  Gene Symbol: AHCYL1;
  Gene Name: adenosylhomocysteinase-like 1;
  Uniprot ID:  O43865;
  ENSP ID: ENSP00000377238

SEQ ID NO: 2768 - protein, 611 aa, Homo sapiens
  Payload ID: 644;
  Gene Symbol: AHCYL2;
  Gene Name: adenosylhomocysteinase-like 2;
  Uniprot ID:  Q96HN2;
  ENSP ID: ENSP00000315931
MSVQVVSAAAAAKVPEVELKDLSPSEAESQLGLSTAAVGAMAPPAGGGDPEAPAPAAERPPVPGPGSGPAAALSPAAGKVPQASAMKRSDPHHQHQRHRDGGEALVSPDGTVTEAPRTVKKQIQFADQKQEFNKRPTKIGRRSLSRSISQSSTDSYSSAASYTDSSDDETSPRDKQQKNSKGSSDFCVKNIKQAEFGRREIEIAEQEMPALMALRKRAQGEKPLAGAKIVGCTHITAQTAVLMETLGALGAQCRWAACNIYSTLNEVAAALAESGFPVFAWKGESEDDFWWCIDRCVNVEGWQPNMILDDGGDLTHWIYKKYPNMFKKIKGIVEESVTGVHRLYQLSKAGKLCVPAMNVNDSVTKQKFDNLYCCRESILDGLKRTTDMMFGGKQVVVCGYGEVGKGCCAALKAMGSIVYVTEIDPICALQACMDGFRLVKLNEVIRQVDIVITCTGNKNVVTREHLDRMKNSCIVCNMGHSNTEIDVASLRTPELTWERVRSQVDHVIWPDGKRIVLLAEGRLLNLSCSTVPTFVLSITATTQALALIELYNAPEGRYKQDVYLLPKKMDEYVASLHLPTFDAHLTELTDEQAKYLGLNKNGPFKPNYYRY

SEQ ID NO: 2769 - protein, 610 aa, Homo sapiens
  Payload ID: 644;
  Gene Symbol: AHCYL2;
  Gene Name: adenosylhomocysteinase-like 2;
  Uniprot ID:  Q96HN2;
  ENSP ID: ENSP00000413639
MSVQVVSAAAAAKVPEVELKDLSPSEAESQLGLSTAAVGAMAPPAGGGDPEAPAPAAERPPVPGPGSGPAAALSPAAGKVPQASAMKRSDPHHQHQRHRDGGEALVSPDGTVTEAPRTVKKIQFADQKQEFNKRPTKIGRRSLSRSISQSSTDSYSSAASYTDSSDDETSPRDKQQKNSKGSSDFCVKNIKQAEFGRREIEIAEQEMPALMALRKRAQGEKPLAGAKIVGCTHITAQTAVLMETLGALGAQCRWAACNIYSTLNEVAAALAESGFPVFAWKGESEDDFWWCIDRCVNVEGWQPNMILDDGGDLTHWIYKKYPNMFKKIKGIVEESVTGVHRLYQLSKAGKLCVPAMNVNDSVTKQKFDNLYCCRESILDGLKRTTDMMFGGKQVVVCGYGEVGKGCCAALKAMGSIVYVTEIDPICALQACMDGFRLVKLNEVIRQVDIVITCTGNKNVVTREHLDRMKNSCIVCNMGHSNTEIDVASLRTPELTWERVRSQVDHVIWPDGKRIVLLAEGRLLNLSCSTVPTFVLSITATTQALALIELYNAPEGRYKQDVYLLPKKMDEYVASLHLPTFDAHLTELTDEQAKYLGLNKNGPFKPNYYRY

SEQ ID NO: 2770 - protein, 518 aa, Homo sapiens
  Payload ID: 644;
  Gene Symbol: AHCYL2;
  Gene Name: adenosylhomocysteinase-like 2;
  ENSP ID: ENSP00000419346
  MOD_RES (1)..(1): Any amino acid
XRKWSRQFLLSFWCTVCSAHQGTIFLSLKIQFADQKQEFNKRPTKIGRRSLSRSISQSSTDSYSSAASYTDSSDDETSPRDKQQKNSKGSSDFCVKNIKQAEFGRREIEIAEQEMPALMALRKRAQGEKPLAGAKIVGCTHITAQTAVLMETLGALGAQCRWAACNIYSTLNEVAAALAESGFPVFAWKGESEDDFWWCIDRCVNVEGWQPNMILDDGGDLTHWIYKKYPNMFKKIKGIVEESVTGVHRLYQLSKAGKLCVPAMNVNDSVTKQKFDNLYCCRESILDGLKRTTDMMFGGKQVVVCGYGEVGKGCCAALKAMGSIVYVTEIDPICALQACMDGFRLVKLNEVIRQVDIVITCTGNKNVVTREHLDRMKNSCIVCNMGHSNTEIDVASLRTPELTWERVRSQVDHVIWPDGKRIVLLAEGRLLNLSCSTVPTFVLSITATTQALALIELYNAPEGRYKQDVYLLPKKMDEYVASLHLPTFDAHLTELTDEQAKYLGLNKNGPFKPNYYRY

SEQ ID NO: 2771 - protein, 182 aa, Homo sapiens
  Payload ID: 644;
  Gene Symbol: AHCYL2;
  Gene Name: adenosylhomocysteinase-like 2;
  ENSP ID: ENSP00000419608
MLGSKKKYIVNGNSGIKAQQIQFADQKQEFNKRPTKIGRRSLSRSISQSSTDSYSSAASYTDSSDDETSPRDKQQKNSKGSSDFCVKNIKQAEFGRREIEIAEQEMPALMALRKRAQGEKPLAGAKIVGCTHITAQTAVLMETLGALGAQCRWAACNIYSTLNEVAAALAESGFPVFAWKGE

SEQ ID NO: 2772 - protein, 75 aa, Homo sapiens
  Payload ID: 644;
  Gene Symbol: AHCYL2;
  Gene Name: adenosylhomocysteinase-like 2;
  ENSP ID: ENSP00000419717
MEKWDGNEGTSAFHMPEWMQIQFADQKQEFNKRPTKIGRRSLSRSISQSSTDSYSSAASYTDSSDDETSPRDKQQ

SEQ ID NO: 2773 - protein, 508 aa, Homo sapiens
  Payload ID: 644;
  Gene Symbol: AHCYL2;
  Gene Name: adenosylhomocysteinase-like 2;
  Uniprot ID:  Q96HN2;
  ENSP ID: ENSP00000420459
MEKWDGNEGTSAFHMPEWMIQFADQKQEFNKRPTKIGRRSLSRSISQSSTDSYSSAASYTDSSDDETSPRDKQQKNSKGSSDFCVKNIKQAEFGRREIEIAEQEMPALMALRKRAQGEKPLAGAKIVGCTHITAQTAVLMETLGALGAQCRWAACNIYSTLNEVAAALAESGFPVFAWKGESEDDFWWCIDRCVNVEGWQPNMILDDGGDLTHWIYKKYPNMFKKIKGIVEESVTGVHRLYQLSKAGKLCVPAMNVNDSVTKQKFDNLYCCRESILDGLKRTTDMMFGGKQVVVCGYGEVGKGCCAALKAMGSIVYVTEIDPICALQACMDGFRLVKLNEVIRQVDIVITCTGNKNVVTREHLDRMKNSCIVCNMGHSNTEIDVASLRTPELTWERVRSQVDHVIWPDGKRIVLLAEGRLLNLSCSTVPTFVLSITATTQALALIELYNAPEGRYKQDVYLLPKKMDEYVASLHLPTFDAHLTELTDEQAKYLGLNKNGPFKPNYYRY

SEQ ID NO: 2774 - protein, 508 aa, Homo sapiens
  Payload ID: 644;
  Gene Symbol: AHCYL2;
  Gene Name: adenosylhomocysteinase-like 2;
  Uniprot ID:  Q96HN2;
  ENSP ID: ENSP00000420801
MLGSKKKYIVNGNSGIKAQIQFADQKQEFNKRPTKIGRRSLSRSISQSSTDSYSSAASYTDSSDDETSPRDKQQKNSKGSSDFCVKNIKQAEFGRREIEIAEQEMPALMALRKRAQGEKPLAGAKIVGCTHITAQTAVLMETLGALGAQCRWAACNIYSTLNEVAAALAESGFPVFAWKGESEDDFWWCIDRCVNVEGWQPNMILDDGGDLTHWIYKKYPNMFKKIKGIVEESVTGVHRLYQLSKAGKLCVPAMNVNDSVTKQKFDNLYCCRESILDGLKRTTDMMFGGKQVVVCGYGEVGKGCCAALKAMGSIVYVTEIDPICALQACMDGFRLVKLNEVIRQVDIVITCTGNKNVVTREHLDRMKNSCIVCNMGHSNTEIDVASLRTPELTWERVRSQVDHVIWPDGKRIVLLAEGRLLNLSCSTVPTFVLSITATTQALALIELYNAPEGRYKQDVYLLPKKMDEYVASLHLPTFDAHLTELTDEQAKYLGLNKNGPFKPNYYRY

SEQ ID NO: 2775 - protein, 265 aa, Homo sapiens
  Payload ID: 645;
  Gene Symbol: AMD1;
  Gene Name: adenosylmethionine decarboxylase 1;
  ENSP ID: ENSP00000357870
MFVSKRRFILKTCGTTLLLKALVPLLKLARDYSGFDSIQSFFYSRKNFMKPSHQGYPHRNFQEEIEFLNAIFPNGAAYCMGRMNSDCWYLYTLDFPESRVISQPDQTLEILMSELDPAVMDQFYMKDGVTAKDVTRESGIRDLIPGSVIDATMFNPCGYSMNGMKSDGTYWTIHITPEPEFSYVSFETNLSQTSYDDLIRKVVEVFKPGKFVTTLFVNQSSKCRTVLASPQKIEGFKRLDCQSAMFNDYNFVFTSFAKKQQQQQS

SEQ ID NO: 2776 - protein, 265 aa, Homo sapiens; identical to SEQ ID NO: 2775
  Payload ID: 645;
  Gene Symbol: AMD1;
  Gene Name: adenosylmethionine decarboxylase 1;
  ENSP ID: ENSP00000357871

SEQ ID NO: 2777 - protein, 214 aa, Homo sapiens
  Payload ID: 645;
  Gene Symbol: AMD1;
  Gene Name: adenosylmethionine decarboxylase 1;
  ENSP ID: ENSP00000357877
MEAAHFFEGTEKLLEVWFSRQQPDANQGSGDLRTIPRYLYTLDFPESRVISQPDQTLEILMSELDPAVMDQFYMKDGVTAKDVTRESGIRDLIPGSVIDATMFNPCGYSMNGMKSDGTYWTIHITPEPEFSYVSFETNLSQTSYDDLIRKVVEVFKPGKFVTTLFVNQSSKCRTVLASPQKIEGFKRLDCQSAMFNDYNFVFTSFAKKQQQQQS

SEQ ID NO: 2778 - protein, 334 aa, Homo sapiens
  Payload ID: 645;
  Gene Symbol: AMD1;
  Gene Name: adenosylmethionine decarboxylase 1;
  Uniprot ID:  P17707;
  ENSP ID: ENSP00000357880
MEAAHFFEGTEKLLEVWFSRQQPDANQGSGDLRTIPRSEWDILLKDVQCSIISVTKTDKQEAYVLSESSMFVSKRRFILKTCGTTLLLKALVPLLKLARDYSGFDSIQSFFYSRKNFMKPSHQGYPHRNFQEEIEFLNAIFPNGAAYCMGRMNSDCWYLYTLDFPESRVISQPDQTLEILMSELDPAVMDQFYMKDGVTAKDVTRESGIRDLIPGSVIDATMFNPCGYSMNGMKSDGTYWTIHITPEPEFSYVSFETNLSQTSYDDLIRKVVEVFKPGKFVTTLFVNQSSKCRTVLASPQKIEGFKRLDCQSAMFNDYNFVFTSFAKKQQQQQS

SEQ ID NO: 2779 - protein, 48 aa, Homo sapiens
  Payload ID: 645;
  Gene Symbol: AMD1;
  Gene Name: adenosylmethionine decarboxylase 1;
  ENSP ID: ENSP00000389988
MEAAHFFEGTEKLLEVWFSRQQPDANQGSGDLRTIPRWSSILYGTYEF

SEQ ID NO: 2780 - protein, 5 aa, Homo sapiens
  Payload ID: 645;
  Gene Symbol: AMD1;
  Gene Name: adenosylmethionine decarboxylase 1;
  ENSP ID: ENSP00000433396
DSFHS

SEQ ID NO: 2781 - protein, 265 aa, Homo sapiens; identical to SEQ ID NO: 2775
  Payload ID: 645;
  Gene Symbol: AMD1;
  Gene Name: adenosylmethionine decarboxylase 1;
  ENSP ID: ENSP00000483984

SEQ ID NO: 2782 - protein, 1119 aa, Homo sapiens
  Payload ID: 646;
  Gene Symbol: ADCY1;
  Gene Name: adenylate cyclase 1 (brain);
  Uniprot ID:  Q08828;
  ENSP ID: ENSP00000297323
MAGAPRGGGGGGGGAGEPGGAERAAGTSRRRGLRACDEEFACPELEALFRGYTLRLEQAATLKALAVLSLLAGALALAELLGAPGPAPGLAKGSHPVHCVLFLALLVVTNVRSLQVPQLQQVGQLALLFSLTFALLCCPFALGGPARGSAGAAGGPATAEQGVWQLLLVTFVSYALLPVRSLLAIGFGLVVAASHLLVTATLVPAKRPRLWRTLGANALLFVGVNMYGVFVRILTERSQRKAFLQARSCIEDRLRLEDENEKQERLLMSLLPRNVAMEMKEDFLKPPERIFHKIYIQRHDNVSILFADIVGFTGLASQCTAQELVKLLNELFGKFDELATENHCRRIKILGDCYYCVSGLTQPKTDHAHCCVEMGLDMIDTITSVAEATEVDLNMRVGLHTGRVLCGVLGLRKWQYDVWSNDVTLANVMEAAGLPGKVHITKTTLACLNGDYEVEPGYGHERNSFLKTHNIETFFIVPSHRRKIFPGLILSDIKPAKRMKFKTVCYLLVQLMHCRKMFKAEIPFSNVMTCEDDDKRRALRTASEKLRNRSSFSTNVVYTTPGTRVNRYISRLLEARQTELEMADLNFFTLKYKHVEREQKYHQLQDEYFTSAVVLTLILAALFGLVYLLIFPQSVVVLLLLVFCICFLVACVLYLHITRVQCFPGCLTIQIRTVLCIFIVVLIYSVAQGCVVGCLPWAWSSKPNSSLVVLSSGGQRTALPTLPCESTHHALLCCLVGTLPLAIFFRVSSLPKMILLSGLTTSYILVLELSGYTRTGGGAVSGRSYEPIVAILLFSCALALHARQVDIRLRLDYLWAAQAEEEREDMEKVKLDNRRILFNLLPAHVAQHFLMSNPRNMDLYYQSYSQVGVMFASIPNFNDFYIELDGNNMGVECLRLLNEIIADFDELMEKDFYKDIEKIKTIGSTYMAAVGLAPTSGTKAKKSISSHLSTLADFAIEMFDVLDEINYQSYNDFVLRVGINVGPVVAGVIGARRPQYDIWGNTVNVASRMDSTGVQGRIQVTEEVHRLLRRCPYHFVCRGKVSVKGKGEMLTYFLEGRTDGNGSQIRSLGLDRKMCPFGRAGLQGRRPPVCPMPGVSVRAGLPPHSPGQYLPSAAAGKEA

SEQ ID NO: 2783 - protein, 338 aa, Homo sapiens
  Payload ID: 646;
  Gene Symbol: ADCY1;
  Gene Name: adenylate cyclase 1 (brain);
  ENSP ID: ENSP00000392721
MYGVFVRILTERSQRKAFLQARSCIEDRLRLEDENEKQERLLMSLLPRNVAMEMKEDFLKPPERIFHKIYIQRHDNVSILFADIVGFTGLASQCTAQELVKLLNELFGKFDELATENHCRRIKILGDCYYCVSGLTQPKTDHAHCCVEMGLDMIDTITSVAEATEVDLNMRVGLHTGRVLCGVLGLRKWQYDVWSNDVTLANVMEAAGLPGKVHITKTTLACLNGDYEVEPGYGHERNSFLKTHNIETFFIVPSHRRKIFPGLILSDIKPAKRMKFKTVCYLLVQLMHCRKMFKAEIPFSNVMTCEDDDKVQIHPSLSGLDVLLGFWSPTLQRGRLCT

SEQ ID NO: 2784 - protein, 338 aa, Homo sapiens; identical to SEQ ID NO: 2783
  Payload ID: 646;
  Gene Symbol: ADCY1;
  Gene Name: adenylate cyclase 1 (brain);
  ENSP ID: ENSP00000479770

SEQ ID NO: 2785 - protein, 1518 aa, Homo sapiens
  Payload ID: 647;
  Gene Symbol: ADCY10;
  Gene Name: adenylate cyclase 10 (soluble);
  Uniprot ID:  Q96PN6;
  ENSP ID: ENSP00000356822
MSLSEGDALLALWRVERKQLKNIITVVIKCSLEIHGLFETQEWEEGLDIRVKIGLAAGHISMLVFGDETHSHFLVIGQAVDDVRLAQNMAQMNDVILSPNCWQLCDRSMIEIESVPDQRAVKVNFLKPPPNFNFDEFFTKCTTFMHYYPSGEHKNLLRLACTLKPDPELEMSLQKYVMESILKQIDNKQLQGYLSELRPVTIVFVNLMFEDQDKAEEIGPAIQDAYMHITSVLKIFQGQINKVFMFDKGCSFLCVFGFPGEKVPDELTHALECAMDIFDFCSQVHKIQTVSIGVASGIVFCGIVGHTVRHEYTVIGQKVNLAARMMMYYPGIVTCDSVTYNGSNLPAYFFKELPKKVMKGVADSGPLYQYWGRTEKVMFGMACLICNRKEDYPLLGRNKEINYFMYTMKKFLISNSSQVLMYEGLPGYGKSQILMKIEYLAQGKNHRIIAISLNKISFHQTFYTIQMFMANVLGLDTCKHYKERQTNLRNKVMTLLDEKFYCLLNDIFHVQFPISREISRMSTLKKQKQLEILFMKILKLIVKEERIIFIIDEAQFVDSTSWRFMEKLIRTLPIFIIMSLCPFVNIPCAAARAVIKNRNTTYIVIGAVQPNDISNKICLDLNVSCISKELDSYLGEGSCGIPFYCEELLKNLEHHEVLVFQQTESEEKTNRTWNNLFKYSIKLTEKLNMVTLHSDKESEEVCHLTSGVRLKNLSPPTSLKEISLIQLDSMRLSHQMLVRCAAIIGLTFTTELLFEILPCWNMKMMIKTLATLVESNIFYCFRNGKELQKALKQNDPSFEVHYRSLSLKPSEGMDHGEEEQLRELENEVIECHRIRFCNPMMQKTAYELWLKDQRKAMHLKCARFLEEDAHRCDHCRGRDFIPYHHFTVNIRLNALDMDAIKKMAMSHGFKTEEKLILSNSEIPETSAFFPENRSPEEIREKILNFFDHVLTKMKTSDEDIIPLESCQCEEILEIVILPLAHHFLALGENDKALYYFLEIASAYLIFCDNYMAYMYLNEGQKLLKTLKKDKSWSQTFESATFYSLKGEVCFNMGQIVLAKKMLRKALKLLNRIFPYNLISLFLHIHVEKNRHFHYVNRQAQESPPPGKKRLAQLYRQTVCLSLLWRIYSYSYLFHCKYYAHLAVMMQMNTALETQNCFQIIKAYLDYSLYHHLAGYKGVWFKYEVMAMEHIFNLPLKGEGIEIVAYVAETLVFNKLIMGHLDLAIELGSRALQMWALLQNPNRHYQSLCRLSRCLLLNSRYPQLIQVLGRLWELSVTQEHIFSKAFFYFVCLDILLYSGFVYRTFEECLEFIHQYENNRILKFHSGLLLGLYSSVAIWYARLQEWDNFYKFSNRAKNLLPRRTMTLTYYDGISRYMEGQVLHLQKQIKEQSENAQASGEELLKNLENLVAQNTTGPVFCPRLYHLMAYVCILMGDGQKCGLFLNTALRLSETQGNILEKCWLNMNKESWYSTSELKEDQWLQTILSLPSWEKIVAGRVNIQDLQKNKFLMRANTVDNHF

SEQ ID NO: 2786 - protein, 1610 aa, Homo sapiens
  Payload ID: 647;
  Gene Symbol: ADCY10;
  Gene Name: adenylate cyclase 10 (soluble);
  Uniprot ID:  Q96PN6;
  ENSP ID: ENSP00000356825
MNTPKEEFQDWPIVRIAAHLPDLIVYGHFSPERPFMDYFDGVLMFVDISGFTAMTEKFSSAMYMDRGAEQLVEILNYHISAIVEKVLIFGGDILKFAGDALLALWRVERKQLKNIITVVIKCSLEIHGLFETQEWEEGLDIRVKIGLAAGHISMLVFGDETHSHFLVIGQAVDDVRLAQNMAQMNDVILSPNCWQLCDRSMIEIESVPDQRAVKVNFLKPPPNFNFDEFFTKCTTFMHYYPSGEHKNLLRLACTLKPDPELEMSLQKYVMESILKQIDNKQLQGYLSELRPVTIVFVNLMFEDQDKAEEIGPAIQDAYMHITSVLKIFQGQINKVFMFDKGCSFLCVFGFPGEKVPDELTHALECAMDIFDFCSQVHKIQTVSIGVASGIVFCGIVGHTVRHEYTVIGQKVNLAARMMMYYPGIVTCDSVTYNGSNLPAYFFKELPKKVMKGVADSGPLYQYWGRTEKVMFGMACLICNRKEDYPLLGRNKEINYFMYTMKKFLISNSSQVLMYEGLPGYGKSQILMKIEYLAQGKNHRIIAISLNKISFHQTFYTIQMFMANVLGLDTCKHYKERQTNLRNKVMTLLDEKFYCLLNDIFHVQFPISREISRMSTLKKQKQLEILFMKILKLIVKEERIIFIIDEAQFVDSTSWRFMEKLIRTLPIFIIMSLCPFVNIPCAAARAVIKNRNTTYIVIGAVQPNDISNKICLDLNVSCISKELDSYLGEGSCGIPFYCEELLKNLEHHEVLVFQQTESEEKTNRTWNNLFKYSIKLTEKLNMVTLHSDKESEEVCHLTSGVRLKNLSPPTSLKEISLIQLDSMRLSHQMLVRCAAIIGLTFTTELLFEILPCWNMKMMIKTLATLVESNIFYCFRNGKELQKALKQNDPSFEVHYRSLSLKPSEGMDHGEEEQLRELENEVIECHRIRFCNPMMQKTAYELWLKDQRKAMHLKCARFLEEDAHRCDHCRGRDFIPYHHFTVNIRLNALDMDAIKKMAMSHGFKTEEKLILSNSEIPETSAFFPENRSPEEIREKILNFFDHVLTKMKTSDEDIIPLESCQCEEILEIVILPLAHHFLALGENDKALYYFLEIASAYLIFCDNYMAYMYLNEGQKLLKTLKKDKSWSQTFESATFYSLKGEVCFNMGQIVLAKKMLRKALKLLNRIFPYNLISLFLHIHVEKNRHFHYVNRQAQESPPPGKKRLAQLYRQTVCLSLLWRIYSYSYLFHCKYYAHLAVMMQMNTALETQNCFQIIKAYLDYSLYHHLAGYKGVWFKYEVMAMEHIFNLPLKGEGIEIVAYVAETLVFNKLIMGHLDLAIELGSRALQMWALLQNPNRHYQSLCRLSRCLLLNSRYPQLIQVLGRLWELSVTQEHIFSKAFFYFVCLDILLYSGFVYRTFEECLEFIHQYENNRILKFHSGLLLGLYSSVAIWYARLQEWDNFYKFSNRAKNLLPRRTMTLTYYDGISRYMEGQVLHLQKQIKEQSENAQASGEELLKNLENLVAQNTTGPVFCPRLYHLMAYVCILMGDGQKCGLFLNTALRLSETQGNILEKCWLNMNKESWYSTSELKEDQWLQTILSLPSWEKIVAGRVNIQDLQKNKFLMRANTVDNHF

SEQ ID NO: 2787 - protein, 1457 aa, Homo sapiens
  Payload ID: 647;
  Gene Symbol: ADCY10;
  Gene Name: adenylate cyclase 10 (soluble);
  Uniprot ID:  Q96PN6;
  ENSP ID: ENSP00000441992
MLVFGDETHSHFLVIGQAVDDVRLAQNMAQMNDVILSPNCWQLCDRSMIEIESVPDQRAVKVNFLKPPPNFNFDEFFTKCTTFMHYYPSGEHKNLLRLACTLKPDPELEMSLQKYVMESILKQIDNKQLQGYLSELRPVTIVFVNLMFEDQDKAEEIGPAIQDAYMHITSVLKIFQGQINKVFMFDKGCSFLCVFGFPGEKVPDELTHALECAMDIFDFCSQVHKIQTVSIGVASGIVFCGIVGHTVRHEYTVIGQKVNLAARMMMYYPGIVTCDSVTYNGSNLPAYFFKELPKKVMKGVADSGPLYQYWGRTEKVMFGMACLICNRKEDYPLLGRNKEINYFMYTMKKFLISNSSQVLMYEGLPGYGKSQILMKIEYLAQGKNHRIIAISLNKISFHQTFYTIQMFMANVLGLDTCKHYKERQTNLRNKVMTLLDEKFYCLLNDIFHVQFPISREISRMSTLKKQKQLEILFMKILKLIVKEERIIFIIDEAQFVDSTSWRFMEKLIRTLPIFIIMSLCPFVNIPCAAARAVIKNRNTTYIVIGAVQPNDISNKICLDLNVSCISKELDSYLGEGSCGIPFYCEELLKNLEHHEVLVFQQTESEEKTNRTWNNLFKYSIKLTEKLNMVTLHSDKESEEVCHLTSGVRLKNLSPPTSLKEISLIQLDSMRLSHQMLVRCAAIIGLTFTTELLFEILPCWNMKMMIKTLATLVESNIFYCFRNGKELQKALKQNDPSFEVHYRSLSLKPSEGMDHGEEEQLRELENEVIECHRIRFCNPMMQKTAYELWLKDQRKAMHLKCARFLEEDAHRCDHCRGRDFIPYHHFTVNIRLNALDMDAIKKMAMSHGFKTEEKLILSNSEIPETSAFFPENRSPEEIREKILNFFDHVLTKMKTSDEDIIPLESCQCEEILEIVILPLAHHFLALGENDKALYYFLEIASAYLIFCDNYMAYMYLNEGQKLLKTLKKDKSWSQTFESATFYSLKGEVCFNMGQIVLAKKMLRKALKLLNRIFPYNLISLFLHIHVEKNRHFHYVNRQAQESPPPGKKRLAQLYRQTVCLSLLWRIYSYSYLFHCKYYAHLAVMMQMNTALETQNCFQIIKAYLDYSLYHHLAGYKGVWFKYEVMAMEHIFNLPLKGEGIEIVAYVAETLVFNKLIMGHLDLAIELGSRALQMWALLQNPNRHYQSLCRLSRCLLLNSRYPQLIQVLGRLWELSVTQEHIFSKAFFYFVCLDILLYSGFVYRTFEECLEFIHQYENNRILKFHSGLLLGLYSSVAIWYARLQEWDNFYKFSNRAKNLLPRRTMTLTYYDGISRYMEGQVLHLQKQIKEQSENAQASGEELLKNLENLVAQNTTGPVFCPRLYHLMAYVCILMGDGQKCGLFLNTALRLSETQGNILEKCWLNMNKESWYSTSELKEDQWLQTILSLPSWEKIVAGRVNIQDLQKNKFLMRANTVDNHF

SEQ ID NO: 2788 - protein, 73 aa, Homo sapiens
  Payload ID: 647;
  Gene Symbol: ADCY10;
  Gene Name: adenylate cyclase 10 (soluble);
  ENSP ID: ENSP00000475192
MNTPKEEFQDWPIVRIAAHLPDLIVYGHFSPERPFMDYFDGVLMFVDISGKCKRDVCLMWMSNRLAWEFTCRA

SEQ ID NO: 2789 - protein, 250 aa, Homo sapiens
  Payload ID: 647;
  Gene Symbol: ADCY10;
  Gene Name: adenylate cyclase 10 (soluble);
  ENSP ID: ENSP00000476402
  MOD_RES (1)..(1): Any amino acid
XYSIKLTEKLNMVTLHSDKESEEVCHLTSGVRLKNLSPPTSLKEISLIQLDSMRLSHQMLVRCAAIIGLTFTTELLFEILPCWNMKMMIKTLATLVESNIFYCFRNGKELQKALKQNDPSFEVHYRSLSLKPSEGMDHGEEEQLRELENEVIECHRIRFCNPMMQKTAYELWLKDQRKAMHLKCARFLEEDAHRCDHCRGRDFIPYHHFTVNIRLNALDMDAIKKMAMSHGFKRCMRLGDTASPYYILQV

SEQ ID NO: 2790 - protein, 1091 aa, Homo sapiens
  Payload ID: 648;
  Gene Symbol: ADCY2;
  Gene Name: adenylate cyclase 2 (brain);
  Uniprot ID:  Q08462;
  ENSP ID: ENSP00000342952
MWQEAMRRRRYLRDRSEEAAGGGDGLPRSRDWLYESYYCMSQQHPLIVFLLLIVMGSCLALLAVFFALGLEVEDHVAFLITVPTALAIFFAIFILVCIESVFKKLLRLFSLVIWICLVAMGYLFMCFGGTVSPWDQVSFFLFIIFVVYTMLPFNMRDAIIASVLTSSSHTIVLSVCLSATPGGKEHLVWQILANVIIFICGNLAGAYHKHLMELALQQTYQDTCNCIKSRIKLEFEKRQQERLLLSLLPAHIAMEMKAEIIQRLQGPKAGQMENTNNFHNLYVKRHTNVSILYADIVGFTRLASDCSPGELVHMLNELFGKFDQIAKENECMRIKILGDCYYCVSGLPISLPNHAKNCVKMGLDMCEAIKKVRDATGVDINMRVGVHSGNVLCGVIGLQKWQYDVWSHDVTLANHMEAGGVPGRVHISSVTLEHLNGAYKVEEGDGDIRDPYLKQHLVKTYFVINPKGERRSPQHLFRPRHTLDGAKMRASVRMTRYLESWGAAKPFAHLHHRDSMTTENGKISTTDVPMGQHNFQNRTLRTKSQKKRFEEELNERMIQAIDGINAQKQWLKSEDIQRISLLFYNKVLEKEYRATALPAFKYYVTCACLIFFCIFIVQILVLPKTSVLGISFGAAFLLLAFILFVCFAGQLLQCSKKASPLLMWLLKSSGIIANRPWPRISLTIITTAIILMMAVFNMFFLSDSEETIPPTANTTNTSFSASNNQVAILRAQNLFFLPYFIYSCILGLISCSVFLRVNYELKMLIMMVALVGYNTILLHTHAHVLGDYSQVLFERPGIWKDLKTMGSVSLSIFFITLLVLGRQNEYYCRLDFLWKNKFKKEREEIETMENLNRVLLENVLPAHVAEHFLARSLKNEELYHQSYDCVCVMFASIPDFKEFYTESDVNKEGLECLRLLNEIIADFDDLLSKPKFSGVEKIKTIGSTYMAATGLSAVPSQEHSQEPERQYMHIGTMVEFAFALVGKLDAINKHSFNDFKLRVGINHGPVIAGVIGAQKPQYDIWGNTVNVASRMDSTGVLDKIQVTEETSLVLQTLGYTCTCRGIINVKGKGDLKTYFVNTEMSRSLSQSNVAS

SEQ ID NO: 2791 - protein, 100 aa, Homo sapiens
  Payload ID: 648;
  Gene Symbol: ADCY2;
  Gene Name: adenylate cyclase 2 (brain);
  ENSP ID: ENSP00000425069
MELALQQTYQDTCNCIKSRIKLEFEKRQQERLLLSLLPAHIAMEMKAEIIQRLQGPKAGQMENTNNFHNLYVKRHTNVSILYADIVGFTRLASDCSPGEL

SEQ ID NO: 2792 - protein, 76 aa, Homo sapiens
  Payload ID: 648;
  Gene Symbol: ADCY2;
  Gene Name: adenylate cyclase 2 (brain);
  ENSP ID: ENSP00000426196
  MOD_RES (1)..(1): Any amino acid
XLGDYSQVLFERPGIWKDLKTMGSVSLSIFFITLLVLGRQVRLLMEEQIQKRAGGDRDHGEPEPRAAGERASRARG

SEQ ID NO: 2793 - protein, 1089 aa, Homo sapiens
  Payload ID: 648;
  Gene Symbol: ADCY2;
  Gene Name: adenylate cyclase 2 (brain);
  ENSP ID: ENSP00000444803
MWQEAMRRRRYLRDRSEEAAGGGDGLPRSRDWLYESYYCMSQQHPLIVFLLLIVMGSCLALLAVFFALGLEVEDHVAFLITVPTALAIFFAIFILVCIESVFKKLLRLFSLVIWICLVAMGYLFMCFGGTVSPWDQVSFFLFIIFVVYTMLPFNMRDAIIASVLTSSSHTIVLSVCLSATPGGKEHLADPGQCDHFHLWEPGGAYHKHLMELALQQTYQDTCNCIKSRIKLEFEKRQQERLLLSLLPAHIAMEMKAEIIQRLQGPKAGQMENTNNFHNLYVKRHTNVSILYADIVGFTRLASDCSPGELVHMLNELFGKFDQIAKENECMRIKILGDCYYCVSGLPISLPNHAKNCVKMGLDMCEAIKKVRDATGVDINMRVGVHSGNVLCGVIGLQKWQYDVWSHDVTLANHMEAGGVPGRVHISSVTLEHLNGAYKVEEGDGDIRDPYLKQHLVKTYFVINPKGERRSPQHLFRPRHTLDGAKMRASVRMTRYLESWGAAKPFAHLHHRDSMTTENGKISTTDVPMGQHNFQNRTLRTKSQKKRFEEELNERMIQAIDGINAQKQWLKSEDIQRISLLFYNKVLEKEYRATALPAFKYYVTCACLIFFCIFIVQILVLPKTSVLGISFGAAFLLLAFILFVCFAGQLLQCSKKASPLLMWLLKSSGIIANRPWPRISLTIITTAIILMMAVFNMFFLSDSEETIPPTANTTNTSFSASNNQVAILRAQNLFFLPYFIYSCILGLISCSVFLRVNYELKMLIMMVALVGYNTILLHTHAHVLGDYSQVLFERPGIWKDLKTMGSVSLSIFFITLLVLGRQNEYYCRLDFLWKNKFKKEREEIETMENLNRVLLENVLPAHVAEHFLARSLKNEELYHQSYDCVCVMFASIPDFKEFYTESDVNKEGLECLRLLNEIIADFDDLLSKPKFSGVEKIKTIGSTYMAATGLSAVPSQEHSQEPERQYMHIGTMVEFAFALVGKLDAINKHSFNDFKLRVGINHGPVIAGVIGAQKPQYDIWGNTVNVASRMDSTGVLDKIQVTEETSLVLQTLGYTCTCRGIINVKGKGDLKTYFVNTEMSRSLSQSNVAS

SEQ ID NO: 2794 - protein, 1144 aa, Homo sapiens
  Payload ID: 649;
  Gene Symbol: ADCY3;
  Gene Name: adenylate cyclase 3;
  Uniprot ID:  O60266;
  ENSP ID: ENSP00000260600
MPRNQGFSEPEYSAEYSAEYSVSLPSDPDRGVGRTHEISVRNSGSCLCLPRFMRLTFVPESLENLYQTYFKRQRHETLLVLVVFAALFDCYVVVMCAVVFSSDKLASLAVAGIGLVLDIILFVLCKKGLLPDRVTRRVLPYVLWLLITAQIFSYLGLNFARAHAASDTVGWQVFFVFSFFITLPLSLSPIVIISVVSCVVHTLVLGVTVAQQQQEELKGMQLLREILANVFLYLCAIAVGIMSYYMADRKHRKAFLEARQSLEVKMNLEEQSQQQENLMLSILPKHVADEMLKDMKKDESQKDQQQFNTMYMYRHENVSILFADIVGFTQLSSACSAQELVKLLNELFARFDKLAAKYHQLRIKILGDCYYCICGLPDYREDHAVCSILMGLAMVEAISYVREKTKTGVDMRVGVHTGTVLGGVLGQKRWQYDVWSTDVTVANKMEAGGIPGRVHISQSTMDCLKGEFDVEPGDGGSRCDYLEEKGIETYLIIASKPEVKKTATQNGLNGSALPNGAPASSKSSSPALIETKEPNGSAHSSGSTSEKPEEQDAQADNPSFPNPRRRLRLQDLADRVVDASEDEHELNQLLNEALLERESAQVVKKRNTFLLSMRFMDPEMETRYSVEKEKQSGAAFSCSCVVLLCTALVEILIDPWLMTNYVTFMVGEILLLILTICSLAAIFPRAFPKKLVAFSTWIDRTRWARNTWAMLAIFILVMANVVDMLSCLQYYTGPSNATAGMETEGSCLENPKYYNYVAVLSLIATIMLVQVSHMVKLTLMLLVAGAVATINLYAWRPVFDEYDHKRFREHDLPMVALEQMQGFNPGLNGTDRLPLVPSKYSMTVMVFLMMLSFYYFSRHVEKLARTLFLWKIEVHDQKERVYEMRRWNEALVTNMLPEHVARHFLGSKKRDEELYSQTYDEIGVMFASLPNFADFYTEESINNGGIECLRFLNEIISDFDSLLDNPKFRVITKIKTIGSTYMAASGVTPDVNTNGFASSNKEDKSERERWQHLADLADFALAMKDTLTNINNQSFNNFMLRIGMNKGGVLAGVIGARKPHYDIWGNTVNVASRMESTGVMGNIQVVEETQVILREYGFRFVRRGPIFVKGKGELLTFFLKGRDKLATFPNGPSVTLPHQVVDNS

SEQ ID NO: 2795 - protein, 1145 aa, Homo sapiens
  Payload ID: 649;
  Gene Symbol: ADCY3;
  Gene Name: adenylate cyclase 3;
  ENSP ID: ENSP00000384484
MPRNQGFSEPEYSAEYSAEYSVSLPSDPDRGVGRTHEISVRNSGSCLCLPRFMRLTFVPESLENLYQTYFKRQRHETLLVLVVFAALFDCYVVVMCAVVFSSDKLASLAVAGIGLVLDIILFVLCKKGLLPDRVTRRVLPYVLWLLITAQIFSYLGLNFARAHAASDTVGWQVFFVFSFFITLPLSLSPIVIISVVSCVVHTLVLGVTVAQQQQEELKGMQLLREILANVFLYLCAIAVGIMSYYMADRKHRKAFLEARQSLEVKMNLEEQSQQQENLMLSILPKHVADEMLKDMKKDESQKDQQQFNTMYMYRHENVSILFADIVGFTQLSSACSAQELVKLLNELFARFDKLAAKYHQLRIKILGDCYYCICGLPDYREDHAVCSILMGLAMVEAISYVREKTKTGVDMRVGVHTGTVLGGVLGQKRWQYDVWSTDVTVANKMEAGGIPGRVHISQSTMDCLKGEFDVEPGDGGSRCDYLEEKGIETYLIIASKPEVKKTATQNGLNGSALPNGAPASSKSSSPALIETKEPNGSAHSSGSTSEKPEEQDAQADNPSFPNPRRRLRLQDLADRVVDASEDEHELNQLLNEALLERESAQVVKKRNTFLLSMRFMDPEMETRYSVEKEKQSGAAFSCSCVVLLCTALVEILIDPWLMTNYVTFMVGEILLLILTICSLAAIFPRAFPKKLVAFSTWIDRTRWARNTWAMLAIFILVMANVVDMLSCLQYYTGPSNATAGMETEGSCLENPKYYNYVAVLSLIATIMLVQVSHMVKLTLMLLVAGAVATINLYAWRPVFDEYDHKRFREHDLPMVALEQMQGFNPGLNGTDSRLPLVPSKYSMTVMVFLMMLSFYYFSRHVEKLARTLFLWKIEVHDQKERVYEMRRWNEALVTNMLPEHVARHFLGSKKRDEELYSQTYDEIGVMFASLPNFADFYTEESINNGGIECLRFLNEIISDFDSLLDNPKFRVITKIKTIGSTYMAASGVTPDVNTNGFASSNKEDKSERERWQHLADLADFALAMKDTLTNINNQSFNNFMLRIGMNKGGVLAGVIGARKPHYDIWGNTVNVASRMESTGVMGNIQVVEETQVILREYGFRFVRRGPIFVKGKGELLTFFLKGRDKLATFPNGPSVTLPHQVVDNS

SEQ ID NO: 2796 - protein, 482 aa, Homo sapiens
  Payload ID: 649;
  Gene Symbol: ADCY3;
  Gene Name: adenylate cyclase 3;
  ENSP ID: ENSP00000389799
MPRNQGFSEPEYSAEYSAEYSVSLPSDPDRGVGRTHEISVRNSGSCLCLPRFMRLTFVPESLENLYQTYFKRQRHETLLVLVVFAALFDCYVVVMCAVVFSSDKLASLAVAGIGLVLDIILFVLCKKGLLPDRVTRRVLPYVLWLLITAQIFSYLGLNFARAHAASDTVGWQVFFVFSFFITLPLSLSPIVIISVVSCVVHTLVLGVTVAQQQQEELKGMQLLREENLMLSILPKHVADEMLKDMKKDESQKDQQQFNTMYMYRHENVSILFADIVGFTQLSSACSAQELVKLLNELFARFDKLAAKYHQLRIKILGDCYYCICGLPDYREDHAVCSILMGLAMVEAISYVREKTKTGVDMRVGVHTGTVLGGVLGQKRWQYDVWSTDVTVANKMEAGGIPGRVHISQSTMDCLKGEFDVEPGDGGSRCDYLEEKGIETYLIIASKPEVKKTATQNGLNGSALPNGAPASSKSSSPALIETK

SEQ ID NO: 2797 - protein, 298 aa, Homo sapiens
  Payload ID: 649;
  Gene Symbol: ADCY3;
  Gene Name: adenylate cyclase 3;
  ENSP ID: ENSP00000399275
CAIAVGIMSYYMADRKHRKAFLEARQSLEVKMNLEEQSQQQHVADEMLKDMKKDESQKDQQQFNTMYMYRHENVSILFADIVGFTQLSSACSAQELVKLLNELFARFDKLAAKYHQLRIKILGDCYYCICGLPDYREDHAVCSILMGLAMVEAISYVREKTKTGVDMRVGVHTGTVLGGVLGQKRWQYDVWSTDVTVANKMEAGGIPGRVHISQSTMDCLKGEFDVEPGDGGSRCDYLEEKGIETYLIIASKPEVKKTATQNGLNGSALPNGAPASSKSSSPALIETKEPNGSAHSSG

SEQ ID NO: 2798 - protein, 154 aa, Homo sapiens
  Payload ID: 649;
  Gene Symbol: ADCY3;
  Gene Name: adenylate cyclase 3;
  ENSP ID: ENSP00000401455
MGLILANVFLYLCAIAVGIMSYYMADRKHRKAFLEARQSLEVKMNLEEQSQQQENLMLSILPKHVADEMLKDMKKDESQKDQQQFNTMYMYRHENVSILFADIVGFTQLSSACSAQELVKLLNELFARFDKLAAKYHQLRIKILGDCYYCICGL

SEQ ID NO: 2799 - protein, 198 aa, Homo sapiens
  Payload ID: 649;
  Gene Symbol: ADCY3;
  Gene Name: adenylate cyclase 3;
  ENSP ID: ENSP00000402008
VTFMVGEILLLILTICSLAAIFPRAFPKKLVAFSTWIDRTRWARNTWAMLAIFILVMANVVDMLSCLQYYTGPSNATAGMETEGSCLENPKYYNYVAVLSLIATIMLVQVSHMVKLTLMLLVAGAVATINLYAWRPVFDEYDHKRFREHDLPMVALEQMQGFNPGLNGTDSRLPLVPSKYSMTVMVFLMMLSFYYFSR

SEQ ID NO: 2800 - protein, 112 aa, Homo sapiens
  Payload ID: 649;
  Gene Symbol: ADCY3;
  Gene Name: adenylate cyclase 3;
  ENSP ID: ENSP00000406153
MPRNQGFSEPEYSAEYSAEYSVSLPSDPDRGVGRTHEISVRNSGSCLCLPRFMRLTFVPESLENLYQTYFKRQRHETLLVLVVFAALFDCYVVVMCAVVFSSDKLASLAVAG

SEQ ID NO: 2801 - protein, 791 aa, Homo sapiens
  Payload ID: 649;
  Gene Symbol: ADCY3;
  Gene Name: adenylate cyclase 3;
  ENSP ID: ENSP00000475652
QLSSACSAQELVKLLNELFARFDKLAAKYHQLRIKILGDCYYCICGLPDYREDHAVCSILMGLAMVEAISYVREKTKTGVDMRVGVHTGTVLGGVLGQKRWQYDVWSTDVTVANKMEAGGIPGGSKIEERLYSCVVAPTLRLRWERVHISQSTMDCLKGEFDVEPGDGGSRCDYLEEKGIETYLIIASKPEVKKTATQNGLNGSALPNGAPASSKSSSPALIETKEPNGSAHSSGSTSEKPEEQDAQADNPSFPNPRRRLRLQDLADRVVDASEDEHELNQLLNEALLERESAQVVKKRNTFLLSMRFMDPEMETRYSVEKEKQSGAAFSCSCVVLLCTALVEILIDPWLMTNYVTFMVGEILLLILTICSLAAIFPRAFPKKLVAFSTWIDRTRWARNTWAMLAIFILVMANVVDMVSHMVKLTLMLLVAGAVATINLYAWRPVFDEYDHKRFREHDLPMVALEQMQGFNPGLNGTDRLPLVPSKYSMTVMVFLMMLSFYYFSRHVEKLARTLFLWKIEVHDQKERVYEMRRWNEALVTNMLPEHVARHFLGSKKRDEELYSQTYDEIGVMFASLPNFADFYTEESINNGGIECLRFLNEIISDFDSLLDNPKFRVITKIKTIGSTYMAASGVTPDVNTNGFASSNKEDKSERERWQHLADLADFALAMKDTLTNINNQSFNNFMLRIGMNKGGVLAGVIGARKPHYDIWGNTVNVASRMESTGVMGNIQVVEETQVILREYGFRFVRRGPIFVKGKGELLTFFLKGRDKLATFPNGPSVTLPHQVVDNS

SEQ ID NO: 2802 - protein, 49 aa, Homo sapiens
  Payload ID: 649;
  Gene Symbol: ADCY3;
  Gene Name: adenylate cyclase 3;
  ENSP ID: ENSP00000476143
  MOD_RES (1)..(1): Any amino acid
XYDIWGNTVNVASRMESTGVMGNIQWRLAEKLHERGKGTEEQAVAVSRW

SEQ ID NO: 2803 - protein, 1077 aa, Homo sapiens
  Payload ID: 650;
  Gene Symbol: ADCY4;
  Gene Name: adenylate cyclase 4;
  Uniprot ID:  Q8NFM4;
  ENSP ID: ENSP00000312126
MARLFSPRPPPSEDLFYETYYSLSQQYPLLLLLLGIVLCALAALLAVAWASGRELTSDPSFLTTVLCALGGFSLLLGLASREQRLQRWTRPLSGLVWVALLALGHAFLFTGGVVSAWDQVSYFLFVIFTAYAMLPLGMRDAAVAGLASSLSHLLVLGLYLGPQPDSRPALLPQLAANAVLFLCGNVAGVYHKALMERALRATFREALSSLHSRRRLDTEKKHQEHLLLSILPAYLAREMKAEIMARLQAGQGSRPESTNNFHSLYVKRHQGVSVLYADIVGFTRLASECSPKELVLMLNELFGKFDQIAKEHECMRIKILGDCYYCVSGLPLSLPDHAINCVRMGLDMCRAIRKLRAATGVDINMRVGVHSGSVLCGVIGLQKWQYDVWSHDVTLANHMEAGGVPGRVHITGATLALLAGAYAVEDAGMEHRDPYLRELGEPTYLVIDPRAEEEDEKGTAGGLLSSLEGLKMRPSLLMTRYLESWGAAKPFAHLSHGDSPVSTSTPLPEKTLASFSTQWSLDRSRTPRGLDDELDTGDAKFFQVIEQLNSQKQWKQSKDFNPLTLYFREKEMEKEYRLSAIPAFKYYEACTFLVFLSNFIIQMLVTNRPPALAITYSITFLLFLLILFVCFSEDLMRCVLKGPKMLHWLPALSGLVATRPGLRIALGTATILLVFAMAITSLFFFPTSSDCPFQAPNVSSMISNLSWELPGSLPLISVPYSMHCCTLGFLSCSLFLHMSFELKLLLLLLWLAASCSLFLHSHAWLSECLIVRLYLGPLDSRPGVLKEPKLMGAISFFIFFFTLLVLARQNEYYCRLDFLWKKKLRQEREETETMENLTRLLLENVLPAHVAPQFIGQNRRNEDLYHQSYECVCVLFASVPDFKEFYSESNINHEGLECLRLLNEIIADFDELLSKPKFSGVEKIKTIGSTYMAATGLNATSGQDAQQDAERSCSHLGTMVEFAVALGSKLDVINKHSFNNFRLRVGLNHGPVVAGVIGAQKPQYDIWGNTVNVASRMESTGVLGKIQVTEETAWALQSLGYTCYSRGVIKVKGKGQLCTYFLNTDLTRTGPPSATLG

SEQ ID NO: 2804 - protein, 1077 aa, Homo sapiens; identical to SEQ ID NO: 2803
  Payload ID: 650;
  Gene Symbol: ADCY4;
  Gene Name: adenylate cyclase 4;
  Uniprot ID:  Q8NFM4;
  ENSP ID: ENSP00000393177

SEQ ID NO: 2805 - protein, 449 aa, Homo sapiens
  Payload ID: 650;
  Gene Symbol: ADCY4;
  Gene Name: adenylate cyclase 4;
  ENSP ID: ENSP00000450477
MARLFSPRPPPSEDLFYETYYSLSQQYPLLLLLLGIVLCALAALLAVAWASGRELTSDPSFLTTVLCALGGFSLLLGLASREQRLQRWTRPLSGLVWVALLALGHAFLFTGGVVSAWDQVSYFLFVIFTAYAMLPLGMRDAAVAGLASSLSHLLVLGLYLGPQPDSRPALLPQLAANAVLFLCGNVAGVYHKALMERALRATFREALSSLHSRRRLDTEKKHQEHLLLSILPAYLAREMKAEIMARLQAGQGSRPESTNNFHSLYVKRHQGVSVLYADIVGFTRLASECSPKELVLMLNELFGKFDQIAKVPLHTHIHTPRSMNACGSRSWGTVTTVSLGCHSHCQTMPSTACAWAWTCAGPSGNCGQPLAWTSTCVWACTQAAYCVESSGCRSGSTTFGHMMSHWLTTWRQAVYQGECTSQGLPWPCWQGLMLWRTQAWSIGTPTFGS

SEQ ID NO: 2806 - protein, 216 aa, Homo sapiens
  Payload ID: 650;
  Gene Symbol: ADCY4;
  Gene Name: adenylate cyclase 4;
  ENSP ID: ENSP00000450481
MLPLGMRDAAVAGLASSLSHLLVLGLYLGPQPDSRPALLPQLAANAVLFLCGNVAGVYHKALMERALRATFREALSSLHSRRRLDTEKKHQEHLLLSILPAYLAREMKAEIMARLQAGQGSRPESTNNFHSLYVKRHQGVSVLYADIVGFTRLASECSPKELVLMLNELFGKFDQIAKETAGSHWRGHQHACGRALRQRTVWSHRAAEVAVRRLVT

SEQ ID NO: 2807 - protein, 137 aa, Homo sapiens
  Payload ID: 650;
  Gene Symbol: ADCY4;
  Gene Name: adenylate cyclase 4;
  ENSP ID: ENSP00000450843
  MOD_RES (1)..(1): Any amino acid
XMEHRDPYLRELGEPTYLVIDPRAEEEDEKGTAGGLLSSLEGLKMRPSLLMTRYLESWGAAKPFAHLSHGDSPVSTSTPLPEKTLASFSTQWSLDRSRTPRGLDDELDTGDAKFFQTVEAVEGLQPTDTVLQREGDG

SEQ ID NO: 2808 - protein, 1077 aa, Homo sapiens; identical to SEQ ID NO: 2803
  Payload ID: 650;
  Gene Symbol: ADCY4;
  Gene Name: adenylate cyclase 4;
  Uniprot ID:  Q8NFM4;
  ENSP ID: ENSP00000452250

SEQ ID NO: 2809 - protein, 36 aa, Homo sapiens
  Payload ID: 650;
  Gene Symbol: ADCY4;
  Gene Name: adenylate cyclase 4;
  ENSP ID: ENSP00000453259
MLPLGMRDAAVAGLASSLSHLLVLGLYLGPQPDSRP

SEQ ID NO: 2810 - protein, 115 aa, Homo sapiens
  Payload ID: 650;
  Gene Symbol: ADCY4;
  Gene Name: adenylate cyclase 4;
  ENSP ID: ENSP00000453893
MARLFSPRPPPSEDLFYETYYSLSQQYPLLLLLLGIVLCALAALLAVAWASGRELTSDPSFLTTVLCALGGFSLLLGLASREQRLQRWTRPLSGLVWVALLALGHAFLFTGGVVS

SEQ ID NO: 2811 - protein, 911 aa, Homo sapiens
  Payload ID: 651;
  Gene Symbol: ADCY5;
  Gene Name: adenylate cyclase 5;
  Uniprot ID:  O95622;
  ENSP ID: ENSP00000308685
MKSQKEGCCSRGDLSIQTGPGGEWAPRRLVSNVLIFSCTNIVGVCTHYPAEVSQRQAFQETRECIQARLHSQRENQQQERLLLSVLPRHVAMEMKADINAKQEDMMFHKIYIQKHDNVSILFADIEGFTSLASQCTAQELVMTLNELFARFDKLAAENHCLRIKILGDCYYCVSGLPEARADHAHCCVEMGMDMIEAISLVREVTGVNVNMRVGIHSGRVHCGVLGLRKWQFDVWSNDVTLANHMEAGGKAGRIHITKATLNYLNGDYEVEPGCGGERNAYLKEHSIETFLILRCTQKRKEEKAMIAKMNRQRTNSIGHNPPHWGAERPFYNHLGGNQVSKEMKRMGFEDPKDKNAQESANPEDEVDEFLGRAIDARSIDRLRSEHVRKFLLTFREPDLEKKYSKQVDDRFGAYVACASLVFLFICFVQITIVPHSIFMLSFYLTCSLLLTLVVFVSVIYSCVKLFPSPLQTLSRKIVRSKMNSTLVGVFTITLVFLAAFVNMFTCNSRDLLGCLAQEHNISASQVNACHVAESAVNYSLGDEQGFCGSPWPNCNFPEYFTYSVLLSLLACSVFLQISCIGKLVLMLAIELIYVLIVEVPGVTLFDNADLLVTANAIDFFNNGTSQCPEHATKVALKVVTPIIISVFVLALYLHAQQVESTARLDFLWKLQATEEKEEMEELQAYNRRLLHNILPKDVAAHFLARERRNDELYYQSCECVAVMFASIANFSEFYVELEANNEGVECLRLLNEIIADFDEIISEDRFRQLEKIKTIGSTYMAASGLNDSTYDKVGKTHIKALADFAMKLMDQMKYINEHSFNNFQMKIGLNIGPVVAGVIGARKPQYDIWGNTVNVASRMDSTGVPDRIQVTTDMYQVLAANTYQLECRGVVKVKGKGEMMTYFLNGGPPLS

SEQ ID NO: 2812 - protein, 78 aa, Homo sapiens
  Payload ID: 651;
  Gene Symbol: ADCY5;
  Gene Name: adenylate cyclase 5;
  ENSP ID: ENSP00000417789
MAPSRFRTQLEVSLSPMFSFSPAPTSWVSAPTIRLRSPRDRLSRRPESASRRGSTRSGRTSSRNGSCCLSFPVMLPWR

SEQ ID NO: 2813 - protein, 919 aa, Homo sapiens
  Payload ID: 651;
  Gene Symbol: ADCY5;
  Gene Name: adenylate cyclase 5;
  ENSP ID: ENSP00000418537
MAPSRFRTQLELVSNVLIFSCTNIVGVCTHYPAEVSQRQAFQETRECIQARLHSQRENQQQERLLLSVLPRHVAMEMKADINAKQEDMMFHKIYIQKHDNVSILFADIEGFTSLASQCTAQELVMTLNELFARFDKLAAENHCLRIKILGDCYYCVSGLPEARADHAHCCVEMGMDMIEAISLVREVTGVNVNMRVGIHSGRVHCGVLGLRKWQFDVWSNDVTLANHMEAGGKAGRIHITKATLNYLNGDYEVEPGCGGERNAYLKEHSIETFLILRCTQKRKEEKAMIAKMNRQRTNSIGHNPPHWGAERPFYNHLGGNQVSKEMKRMGFEDPKDKNAQESANPEDEVDEFLGRAIDARSIDRLRSEHVRKFLLTFREPDLEKKYSKQVDDRFGAYVACASLVFLFICFVQITIVPHSIFMLSFYLTCSLLLTLVVFVSVIYSCVKLFPSPLQTLSRKIVRSKMNSTLVGVFTITLVFLAAFVNMFTCNSRDLLGCLAQEHNISASQVNACHVAESAVNYSLGDEQGFCGSPWPNCNFPEYFTYSVLLSLLACSVFLQISCIGKLVLMLAIELIYVLIVEVPGVTLFDNADLLVTANAIDFFNNGTSQWSLCENLRHRRMEAGTYFPSGVKEQSPEHATKVALKVVTPIIISVFVLALYLHAQQVESTARLDFLWKLQATEEKEEMEELQAYNRRLLHNILPKDVAAHFLARERRNDELYYQSCECVAVMFASIANFSEFYVELEANNEGVECLRLLNEIIADFDEIISEDRFRQLEKIKTIGSTYMAASGLNDSTYDKVGKTHIKALADFAMKLMDQMKYINEHSFNNFQMKIGLNIGPVVAGVIGARKPQYDIWGNTVNVASRMDSTGVPDRIQVTTDMYQVLAANTYQLECRGVVKVKGKGEMMTYFLNGGPPLS

SEQ ID NO: 2814 - protein, 1261 aa, Homo sapiens
  Payload ID: 651;
  Gene Symbol: ADCY5;
  Gene Name: adenylate cyclase 5;
  Uniprot ID:  O95622;
  ENSP ID: ENSP00000419361
MSGSKSVSPPGYAAQKTAAPAPRGGPEHRSAWGEADSRANGYPHAPGGSARGSTKKPGGAVTPQQQQRLASRWRSDDDDDPPLSGDDPLAGGFGFSFRSKSAWQERGGDDCGRGSRRQRRGAASGGSTRAPPAGGGGGSAAAAASAGGTEVRPRSVEVGLEERRGKGRAADELEAGAVEGGEGSGDGGSSADSGSGAGPGAVLSLGACCLALLQIFRSKKFPSDKLERLYQRYFFRLNQSSLTMLMAVLVLVCLVMLAFHAARPPLQLPYLAVLAAAVGVILIMAVLCNRAAFHQDHMGLACYALIAVVLAVQVVGLLLPQPRSASEGIWWTVFFIYTIYTLLPVRMRAAVLSGVLLSALHLAIALRTNAQDQFLLKQLVSNVLIFSCTNIVGVCTHYPAEVSQRQAFQETRECIQARLHSQRENQQQERLLLSVLPRHVAMEMKADINAKQEDMMFHKIYIQKHDNVSILFADIEGFTSLASQCTAQELVMTLNELFARFDKLAAENHCLRIKILGDCYYCVSGLPEARADHAHCCVEMGMDMIEAISLVREVTGVNVNMRVGIHSGRVHCGVLGLRKWQFDVWSNDVTLANHMEAGGKAGRIHITKATLNYLNGDYEVEPGCGGERNAYLKEHSIETFLILRCTQKRKEEKAMIAKMNRQRTNSIGHNPPHWGAERPFYNHLGGNQVSKEMKRMGFEDPKDKNAQESANPEDEVDEFLGRAIDARSIDRLRSEHVRKFLLTFREPDLEKKYSKQVDDRFGAYVACASLVFLFICFVQITIVPHSIFMLSFYLTCSLLLTLVVFVSVIYSCVKLFPSPLQTLSRKIVRSKMNSTLVGVFTITLVFLAAFVNMFTCNSRDLLGCLAQEHNISASQVNACHVAESAVNYSLGDEQGFCGSPWPNCNFPEYFTYSVLLSLLACSVFLQISCIGKLVLMLAIELIYVLIVEVPGVTLFDNADLLVTANAIDFFNNGTSQCPEHATKVALKVVTPIIISVFVLALYLHAQQVESTARLDFLWKLQATEEKEEMEELQAYNRRLLHNILPKDVAAHFLARERRNDELYYQSCECVAVMFASIANFSEFYVELEANNEGVECLRLLNEIIADFDEIISEDRFRQLEKIKTIGSTYMAASGLNDSTYDKVGKTHIKALADFAMKLMDQMKYINEHSFNNFQMKIGLNIGPVVAGVIGARKPQYDIWGNTVNVASRMDSTGVPDRIQVTTDMYQVLAANTYQLECRGVVKVKGKGEMMTYFLNGGPPLS

SEQ ID NO: 2815 - protein, 492 aa, Homo sapiens
  Payload ID: 651;
  Gene Symbol: ADCY5;
  Gene Name: adenylate cyclase 5;
  ENSP ID: ENSP00000420082
MEMKADINAKQEDMMFHKIYIQKHDNVSILFADIEGFTSLASQCTAQELVMTLNELFARFDKLAAENHCLRIKILGDCYYCVSGLPEARADHAHCCVEMGMDMIEAISLVREVTGVNVNMRVGIHSGRVHCGVLGLRKWQFDVWSNDVTLANHMEAGGKAGRIHITKATLNYLNGDYEVEPGCGGERNAYLKEHSIETFLILRCTQKRKEEKAMIAKMNRQRTNSIGHNPPHWGAERPFYNHLGGNQVSKEMKRMGFEDPKDKNAQESANPEDEVDEFLGRAIDARSIDRLRSEHVRKFLLTFREPDLEKKYSKQVDDRFGAYVACASLVFLFICFVQITIVPHSIFMLSFYLTCSLLLTLVVFVSVIYSCVKLFPSPLQTLSRKIVRSKMNSTLVGVFTITLVFLAAFVNMFTCNSRDLLGCLAQEHNISASQVNACHVAESAVNYSLGDEQGFCGSPWPNCNFPEYFTYSVLLSLLACSVFLQISCIGKL

SEQ ID NO: 2816 - protein, 90 aa, Homo sapiens
  Payload ID: 651;
  Gene Symbol: ADCY5;
  Gene Name: adenylate cyclase 5;
  ENSP ID: ENSP00000420252
MEMKADINAKQEDMMFHKIYIQKHDNVSILFADIEGFTSLASQCTAQELVMTLNELFARFDKLAAENHCLRIKILGDCYYCVSGLPEARA

SEQ ID NO: 2817 - protein, 1168 aa, Homo sapiens
  Payload ID: 652;
  Gene Symbol: ADCY6;
  Gene Name: adenylate cyclase 6;
  Uniprot ID:  O43306;
  ENSP ID: ENSP00000311405
MSWFSGLLVPKVDERKTAWGERNGQKRSRRRGTRAGGFCTPRYMSCLRDAEPPSPTPAGPPRCPWQDDAFIRRGGPGKGKELGLRAVALGFEDTEVTTTAGGTAEVAPDAVPRSGRSCWRRLVQVFQSKQFRSAKLERLYQRYFFQMNQSSLTLLMAVLVLLTAVLLAFHAAPARPQPAYVALLACAAALFVGLMVVCNRHSFRQDSMWVVSYVVLGILAAVQVGGALAADPRSPSAGLWCPVFFVYIAYTLLPIRMRAAVLSGLGLSTLHLILAWQLNRGDAFLWKQLGANVLLFLCTNVIGICTHYPAEVSQRQAFQETRGYIQARLHLQHENRQQERLLLSVLPQHVAMEMKEDINTKKEDMMFHKIYIQKHDNVSILFADIEGFTSLASQCTAQELVMTLNELFARFDKLAAENHCLRIKILGDCYYCVSGLPEARADHAHCCVEMGVDMIEAISLVREVTGVNVNMRVGIHSGRVHCGVLGLRKWQFDVWSNDVTLANHMEAGGRAGRIHITRATLQYLNGDYEVEPGRGGERNAYLKEQHIETFLILGASQKRKEEKAMLAKLQRTRANSMEGLMPRWVPDRAFSRTKDSKAFRQMGIDDSSKDNRGTQDALNPEDEVDEFLSRAIDARSIDQLRKDHVRRFLLTFQREDLEKKYSRKVDPRFGAYVACALLVFCFICFIQLLIFPHSTLMLGIYASIFLLLLITVLICAVYSCGSLFPKALQRLSRSIVRSRAHSTAVGIFSVLLVFTSAIANMFTCNHTPIRSCAARMLNLTPADITACHLQQLNYSLGLDAPLCEGTMPTCSFPEYFIGNMLLSLLASSVFLHISSIGKLAMIFVLGLIYLVLLLLGPPATIFDNYDLLLGVHGLASSNETFDGLDCPAAGRVALKYMTPVILLVFALALYLHAQQVESTARLDFLWKLQATGEKEEMEELQAYNRRLLHNILPKDVAAHFLARERRNDELYYQSCECVAVMFASIANFSEFYVELEANNEGVECLRLLNEIIADFDEIISEERFRQLEKIKTIGSTYMAASGLNASTYDQVGRSHITALADYAMRLMEQMKHINEHSFNNFQMKIGLNMGPVVAGVIGARKPQYDIWGNTVNVSSRMDSTGVPDRIQVTTDLYQVLAAKGYQLECRGVVKVKGKGEMTTYFLNGGPSS

SEQ ID NO: 2818 - protein, 1115 aa, Homo sapiens
  Payload ID: 652;
  Gene Symbol: ADCY6;
  Gene Name: adenylate cyclase 6;
  Uniprot ID:  O43306;
  ENSP ID: ENSP00000350536
MSWFSGLLVPKVDERKTAWGERNGQKRSRRRGTRAGGFCTPRYMSCLRDAEPPSPTPAGPPRCPWQDDAFIRRGGPGKGKELGLRAVALGFEDTEVTTTAGGTAEVAPDAVPRSGRSCWRRLVQVFQSKQFRSAKLERLYQRYFFQMNQSSLTLLMAVLVLLTAVLLAFHAAPARPQPAYVALLACAAALFVGLMVVCNRHSFRQDSMWVVSYVVLGILAAVQVGGALAADPRSPSAGLWCPVFFVYIAYTLLPIRMRAAVLSGLGLSTLHLILAWQLNRGDAFLWKQLGANVLLFLCTNVIGICTHYPAEVSQRQAFQETRGYIQARLHLQHENRQQERLLLSVLPQHVAMEMKEDINTKKEDMMFHKIYIQKHDNVSILFADIEGFTSLASQCTAQELVMTLNELFARFDKLAAENHCLRIKILGDCYYCVSGLPEARADHAHCCVEMGVDMIEAISLVREVTGVNVNMRVGIHSGRVHCGVLGLRKWQFDVWSNDVTLANHMEAGGRAGRIHITRATLQYLNGDYEVEPGRGGERNAYLKEQHIETFLILGASQKRKEEKAMLAKLQRTRANSMEGLMPRWVPDRAFSRTKDSKAFRQMGIDDSSKDNRGTQDALNPEDEVDEFLSRAIDARSIDQLRKDHVRRFLLTFQREDLEKKYSRKVDPRFGAYVACALLVFCFICFIQLLIFPHSTLMLGIYASIFLLLLITVLICAVYSCGSLFPKALQRLSRSIVRSRAHSTAVGIFSVLLVFTSAIANMYFIGNMLLSLLASSVFLHISSIGKLAMIFVLGLIYLVLLLLGPPATIFDNYDLLLGVHGLASSNETFDGLDCPAAGRVALKYMTPVILLVFALALYLHAQQVESTARLDFLWKLQATGEKEEMEELQAYNRRLLHNILPKDVAAHFLARERRNDELYYQSCECVAVMFASIANFSEFYVELEANNEGVECLRLLNEIIADFDEIISEERFRQLEKIKTIGSTYMAASGLNASTYDQVGRSHITALADYAMRLMEQMKHINEHSFNNFQMKIGLNMGPVVAGVIGARKPQYDIWGNTVNVSSRMDSTGVPDRIQVTTDLYQVLAAKGYQLECRGVVKVKGKGEMTTYFLNGGPSS

SEQ ID NO: 2819 - protein, 1115 aa, Homo sapiens; identical to SEQ ID NO: 2818
  Payload ID: 652;
  Gene Symbol: ADCY6;
  Gene Name: adenylate cyclase 6;
  Uniprot ID:  O43306;
  ENSP ID: ENSP00000446730

SEQ ID NO: 2820 - protein, 82 aa, Homo sapiens
  Payload ID: 652;
  Gene Symbol: ADCY6;
  Gene Name: adenylate cyclase 6;
  ENSP ID: ENSP00000447702
MVTVCLCHLLQLGANVLLFLCTNVIGICTHYPAEVSQRQAFQETRGYIQARLHLQHENRQQERLLLSVLPQHVAMEMKEDIN

SEQ ID NO: 2821 - protein, 1080 aa, Homo sapiens
  Payload ID: 653;
  Gene Symbol: ADCY7;
  Gene Name: adenylate cyclase 7;
  Uniprot ID:  P51828;
  ENSP ID: ENSP00000254235
MPAKGRYFLNEGEEGPDQDALYEKYQLTSQHGPLLLTLLLVAATACVALIIIAFSQGDPSRHQAILGMAFLVLAVFAALSVLMYVECLLRRWLRALALLTWACLVALGYVLVFDAWTKAACAWEQVPFFLFIVFVVYTLLPFSMRGAVAVGAVSTASHLLVLGSLMGGFTTPSVRVGLQLLANAVIFLCGNLTGAFHKHQMQDASRDLFTYTVKCIQIRRKLRIEKRQQENLLLSVLPAHISMGMKLAIIERLKEHGDRRCMPDNNFHSLYVKRHQNVSILYADIVGFTQLASDCSPKELVVVLNELFGKFDQIAKANECMRIKILGDCYYCVSGLPVSLPTHARNCVKMGLDMCQAIKQVREATGVDINMRVGIHSGNVLCGVIGLRKWQYDVWSHDVSLANRMEAAGVPGRVHITEATLKHLDKAYEVEDGHGQQRDPYLKEMNIRTYLVIDPRSQQPPPPSQHLPRPKGDAALKMRASVRMTRYLESWGAARPFAHLNHRESVSSGETHVPNGRRPKSVPQRHRRTPDRSMSPKGRSEDDSYDDEMLSAIEGLSSTRPCCSKSDDFYTFGSIFLEKGFEREYRLAPIPRARHDFACASLIFVCILLVHVLLMPRTAALGVSFGLVACVLGLVLGLCFATKFSRCCPARGTLCTISERVETQPLLRLTLAVLTIGSLLTVAIINLPLMPFQVPELPVGNETGLLAASSKTRALCEPLPYYTCSCVLGFIACSVFLRMSLEPKVVLLTVALVAYLVLFNLSPCWQWDCCGQGLGNLTKPNGTTSGTPSCSWKDLKTMTNFYLVLFYITLLTLSRQIDYYCRLDCLWKKKFKKEHEEFETMENVNRLLLENVLPAHVAAHFIGDKLNEDWYHQSYDCVCVMFASVPDFKVFYTECDVNKEGLECLRLLNEIIADFDELLLKPKFSGVEKIKTIGSTYMAAAGLSVASGHENQELERQHAHIGVMVEFSIALMSKLDGINRHSFNSFRLRVGINHGPVIAGVIGARKPQYDIWGNTVNVASRMESTGELGKIQVTEETCTILQGLGYSCECRGLINVKGKGELRTYFVCTDTAKFQGLGLN

SEQ ID NO: 2822 - protein, 1080 aa, Homo sapiens; identical to SEQ ID NO: 2821
  Payload ID: 653;
  Gene Symbol: ADCY7;
  Gene Name: adenylate cyclase 7;
  Uniprot ID:  P51828;
  ENSP ID: ENSP00000378187

SEQ ID NO: 2823 - protein, 433 aa, Homo sapiens
  Payload ID: 653;
  Gene Symbol: ADCY7;
  Gene Name: adenylate cyclase 7;
  ENSP ID: ENSP00000437788
MPAKGRYFLNEGEEGPDQDALYEKYQLTSQHGPLLLTLLLVAATACVALIIIAFSQGDPSRHQAILGMAFLVLAVFAALSVLMYVECLLRRWLRALALLTWACLVALGYVLVFDAWTKAACAWEQVPFFLFIVFVVYTLLPFSMRGAVAVGAVSTASHLLVLGSLMGGFTTPSVRVGLQLLANAVIFLCGNLTGAFHKHQMQDASRDLFTYTVKCIQIRRKLRIEKRQQENLLLSVLPAHISMGMKLAIIERLKEHGDRRCMPDNNFHSLYVKRHQNVSILYADIVGFTQLASDCSPKELVVVLNELFGKFDQIAKANECMRIKILGDCYYCVSGLPVSLPTHARNCVKMGLDMCQAIKQVREATGVDINMRVGIHSGNVLCGVIGLRKWQYDVWSHDVSLANRMEAAGVPGRVHITEATLKHLDKALLLQVR

SEQ ID NO: 2824 - protein, 108 aa, Homo sapiens
  Payload ID: 653;
  Gene Symbol: ADCY7;
  Gene Name: adenylate cyclase 7;
  ENSP ID: ENSP00000454301
MPAKGRYFLNEGEEGPDQDALYEKYQLTSQHGPLLLTLLLVAATACVALIIIAFSQGRHGLAMLPRLVLNSWPQVILLPWPPKVLGLQDPSRHQAILGMAFLVLAVFA

SEQ ID NO: 2825 - protein, 530 aa, Homo sapiens
  Payload ID: 653;
  Gene Symbol: ADCY7;
  Gene Name: adenylate cyclase 7;
  ENSP ID: ENSP00000455670
MPAKGRYFLNEGEEGPDQDALYEKYQLTSQHGPLLLTLLLVAATACVALIIIAFSQGDPSRHQAILGMAFLVLAVFAALSVLMYVECLLRRWLRALALLTWACLVALGYVLVFDAWTKAACAWEQVPFFLFIVFVVYTLLPFSMRGAVAVGAVSTASHLLVLGSLMGGFTTPSVRVGLQLLANAVIFLCGNLTGAFHKHQMQDASRDLFTYTVKCIQIRRKLRIEKRQQENLLLSVLPAHISMGMKLAIIERLKEHGDRRCMPDNNFHSLYVKRHQNVSILYADIVGFTQLASDCSPKELVVVLNELFGKFDQIAKANECMRIKILGDCYYCVSGLPVSLPTHARNCVKMGLDMCQAIKQVREATGVDINMRVGIHSGNVLCGVIGLRKWQYDVWSHDVSLANRMEAAGVPGRVHITEATLKHLDKAYEVEDGHGQQRDPYLKEMNIRTYLVIDPRSQQPPPPSQHLPRPKGDAALKMRASVRMTRYLESWGAARPFAHLNHRESVSSERSPAPPPDPRQKHVPQGAVGG

SEQ ID NO: 2826 - protein, 734 aa, Homo sapiens
  Payload ID: 653;
  Gene Symbol: ADCY7;
  Gene Name: adenylate cyclase 7;
  ENSP ID: ENSP00000457409
MPAKGRYFLNEGEEGPDQDALYEKYQLTSQHGPLLLTLLLVAATACVALIIIAFSQGDPSRHQAILGMAFLVLAVFAALSVLMYVECLLRRWLRALALLTWACLVALGYVLVFDAWTKAACAWEQVPFFLFIVFVVYTLLPFSMRGAVAVGAVSTASHLLVLGSLMGGFTTPSVRVGLQLLANAVIFLCGNLTGAFHKHQMQDASRDLFTYTVKCIQIRRKLRIEKRQQENLLLSVLPAHISMGMKLAIIERLKEHGDRRCMPDNNFHSLYVKRHQNVSILYADIVGFTQLASDCSPKELVVVLNELFGKFDQIAKANECMRIKILGDCYYCVSGLPVSLPTHARNCVKMGLDMCQAIKQVREATGVDINMRVGIHSGNVLCGVIGLRKWQYDVWSHDVSLANRMEAAGVPGRVHITEATLKHLDKAYEVEDGHGQQRDPYLKEMNIRTYLVIDPRSQQPPPPSQHLPRPKGDAALKMRASVRMTRYLESWGAARPFAHLNHRESVSSGETHVPNGRRPKSVPQRHRRTPDRSMSPKGRSEDDSYDDEMLSAIEGLSSTRPCCSKSDDFYTFGSIFLEKGFEREYRLAPIPRARHDFACASLIFVCILLVHVLLMPRTAALGVSFGLVACVLGLVLGLCFATKFSRCCPARGTLCTISERVETQPLLRLTLAVLTIGSLLTVAIINLPLMPFQVPELPVGNETGLLAASSKTRALCEPLPHLHTVFSRLNELTS

SEQ ID NO: 2827 - protein, 17 aa, Homo sapiens
  Payload ID: 653;
  Gene Symbol: ADCY7;
  Gene Name: adenylate cyclase 7;
  ENSP ID: ENSP00000460018
MPAKGRYFLNEGEEGPD

SEQ ID NO: 2828 - protein, 81 aa, Homo sapiens
  Payload ID: 653;
  Gene Symbol: ADCY7;
  Gene Name: adenylate cyclase 7;
  ENSP ID: ENSP00000460636
MPAKGRYFLNEGEEGPDQDALYEKYQLTSQHGPLLLTLLLVAATACVALIIIAFSQGDPSRHQAILGMAFLVLAVFAALSV

SEQ ID NO: 2829 - protein, 1251 aa, Homo sapiens
  Payload ID: 654;
  Gene Symbol: ADCY8;
  Gene Name: adenylate cyclase 8 (brain);
  Uniprot ID:  P40145;
  ENSP ID: ENSP00000286355
MELSDVRCLTGSEELYTIHPTPPAGDGRSASRPQRLLWQTAVRHITEQRFIHGHRGGSGSGSGGSGKASDPAGGGPNHHAPQLSGDSALPLYSLGPGERAHSTCGTKVFPERSGSGSASGSGGGGDLGFLHLDCAPSNSDFFLNGGYSYRGVIFPTLRNSFKSRDLERLYQRYFLGQRRKSEVVMNVLDVLTKLTLLVLHLSLASAPMDPLKGILLGFFTGIEVVICALVVVRKDTTSHTYLQYSGVVTWVAMTTQILAAGLGYGLLGDGIGYVLFTLFATYSMLPLPLTWAILAGLGTSLLQVILQVVIPRLAVISINQVVAQAVLFMCMNTAGIFISYLSDRAQRQAFLETRRCVEARLRLETENQRQERLVLSVLPRFVVLEMINDMTNVEDEHLQHQFHRIYIHRYENVSILFADVKGFTNLSTTLSAQELVRMLNELFARFDRLAHEHHCLRIKILGDCYYCVSGLPEPRQDHAHCCVEMGLSMIKTIRYVRSRTKHDVDMRIGIHSGSVLCGVLGLRKWQFDVWSWDVDIANKLESGGIPGRIHISKATLDCLNGDYNVEEGHGKERNEFLRKHNIETYLIKQPEDSLLSLPEDIVKESVSSSDRRNSGATFTEGSWSPELPFDNIVGKQNTLAALTRNSINLLPNHLAQALHVQSGPEEINKRIEHTIDLRSGDKLRREHIKPFSLMFKDSSLEHKYSQMRDEVFKSNLVCAFIVLLFITAIQSLLPSSRVMPMTIQFSILIMLHSALVLITTAEDYKCLPLILRKTCCWINETYLARNVIIFASILINFLGAILNILWCDFDKSIPLKNLTFNSSAVFTDICSYPEYFVFTGVLAMVTCAVFLRLNSVLKLAVLLIMIAIYALLTETVYAGLFLRYDNLNHSGEDFLGTKEVSLLLMAMFLLAVFYHGQQLEYTARLDFLWRVQAKEEINEMKELREHNENMLRNILPSHVARHFLEKDRDNEELYSQSYDAVGVMFASIPGFADFYSQTEMNNQGVECLRLLNEIIADFDELLGEDRFQDIEKIKTIGSTYMAVSGLSPEKQQCEDKWGHLCALADFSLALTESIQEINKHSFNNFELRIGISHGSVVAGVIGAKKPQYDIWGKTVNLASRMDSTGVSGRIQVPEETYLILKDQGFAFDYRGEIYVKGISEQEGKIKTYFLLGRVQPNPFILPPRRLPGQYSLAAVVLGLVQSLNRQRQKQLLNENNNTGIIKGHYNRRTLLSPSGTEPGAQAEGTDKSDLP

SEQ ID NO: 2830 - protein, 1120 aa, Homo sapiens
  Payload ID: 654;
  Gene Symbol: ADCY8;
  Gene Name: adenylate cyclase 8 (brain);
  ENSP ID: ENSP00000367161
MELSDVRCLTGSEELYTIHPTPPAGDGRSASRPQRLLWQTAVRHITEQRFIHGHRGGSGSGSGGSGKASDPAGGGPNHHAPQLSGDSALPLYSLGPGERAHSTCGTKVFPERSGSGSASGSGGGGDLGFLHLDCAPSNSDFFLNGGYSYRGVIFPTLRNSFKSRDLERLYQRYFLGQRRKSEVVMNVLDVLTKLTLLVLHLSLASAPMDPLKGILLGFFTGIEVVICALVVVRKDTTSHTYLQYSGVVTWVAMTTQILAAGLGYGLLGDGIGYVLFTLFATYSMLPLPLTWAILAGLGTSLLQVILQVVIPRLAVISINQVVAQAVLFMCMNTAGIFISYLSDRAQRQAFLETRRCVEARLRLETENQRQERLVLSVLPRFVVLEMINDMTNVEDEHLQHQFHRIYIHRYENVSILFADVKGFTNLSTTLSAQELVRMLNELFARFDRLAHEHHCLRIKILGDCYYCVSGLPEPRQDHAHCCVEMGLSMIKTIRYVRSRTKHDVDMRIGIHSGSVLCGVLGLRKWQFDVWSWDVDIANKLESGGIPGRIHISKATLDCLNGDYNVEEGHGKERNEFLRKHNIETYLIKQPEDSLLSLPEDIVKESVSSSDRRNSGATFTEGSWSPELPFDNIVGKQNTLAALTRNSINLLPNHLAQALHVQSGPEEINKRIEHTIDLRSGDKLRREHIKPFSLMFKDSSLEHKYFVFTGVLAMVTCAVFLRLNSVLKLAVLLIMIAIYALLTETVYAGLFLRYDNLNHSGEDFLGTKEVSLLLMAMFLLAVFYHGQQLEYTARLDFLWRVQAKEEINEMKELREHNENMLRNILPSHVARHFLEKDRDNEELYSQSYDAVGVMFASIPGFADFYSQTEMNNQGVECLRLLNEIIADFDELLGEDRFQDIEKIKTIGSTYMAVSGLSPEKQQCEDKWGHLCALADFSLALTESIQEINKHSFNNFELRIGISHGSVVAGVIGAKKPQYDIWGKTVNLASRMDSTGVSGRIQVPEETYLILKDQGFAFDYRGEIYVKGISEQEGKIKTYFLLGRVQPNPFILPPRRLPGQYSLAAVVLGLVQSLNRQRQKQLLNENNNTGIIKGHYNRRTLLSPSGTEPGAQAEGTDKSDLP

SEQ ID NO: 2831 - protein, 252 aa, Homo sapiens
  Payload ID: 654;
  Gene Symbol: ADCY8;
  Gene Name: adenylate cyclase 8 (brain);
  ENSP ID: ENSP00000428010
MINDMTNVEDEHLQHQFHRIYIHRYENVSILFADVKGFTNLSTTLSAQELVRMLNELFARFDRLAHEHHCLRIKILGDCYYCVSGLPEPRQDHAHCCVEMGLSMIKTIRYVRSRTKHDVDMRIGIHSGSVLCGVLGLRKWQFDVWSWDVDIANKLESGGIPGRIHISKATLDCLNGDYNVEEGHGKERNEFLRKHNIETYLIKQPEDSLLSLPEDIVKESVSSSDRRNSGATFTEGSWSPELPFDNIVGKQN

SEQ ID NO: 2832 - protein, 1353 aa, Homo sapiens
  Payload ID: 655;
  Gene Symbol: ADCY9;
  Gene Name: adenylate cyclase 9;
  Uniprot ID:  O60503;
  ENSP ID: ENSP00000294016
MASPPHQQLLHHHSTEVSCDSSGDSNSVRVKINPKQLSSNSHPKHCKYSISSSCSSSGDSGGVPRRVGGGGRLRRQKKLPQLFERASSRWWDPKFDSVNLEEACLERCFPQTQRRFRYALFYIGFACLLWSIYFAVHMRSRLIVMVAPALCFLLVCVGFFLFTFTKLYARHYAWTSLALTLLVFALTLAAQFQVLTPVSGRGDSSNLTATARPTDTCLSQVGSFSMCIEVLFLLYTVMHLPLYLSLCLGVAYSVLFETFGYHFRDEACFPSPGAGALHWELLSRGLLHGCIHAIGVHLFVMSQVRSRSTFLKVGQSIMHGKDLEVEKALKERMIHSVMPRIIADDLMKQGDEESENSVKRHATSSPKNRKKKSSIQKAPIAFRPFKMQQIEEVSILFADIVGFTKMSANKSAHALVGLLNDLFGRFDRLCEETKCEKISTLGDCYYCVAGCPEPRADHAYCCIEMGLGMIKAIEQFCQEKKEMVNMRVGVHTGTVLCGILGMRRFKFDVWSNDVNLANLMEQLGVAGKVHISEATAKYLDDRYEMEDGKVIERLGQSVVADQLKGLKTYLISGQRAKESRCSCAEALLSGFEVIDGSQVSSGPRGQGTASSGNVSDLAQTVKTFDNLKTCPSCGITFAPKSEAGAEGGAPQNGCQDEHKNSTKASGGPNPKTQNGLLSPPQEEKLTNSQTSLCEILQEKGRWAGVSLDQSALLPLRFKNIREKTDAHFVDVIKEDSLMKDYFFKPPINQFSLNFLDQELERSYRTSYQEEVIKNSPVKTFASPTFSSLLDVFLSTTVFLTLSTTCFLKYEAATVPPPPAALAVFSAALLLEVLSLAVSIRMVFFLEDVMACTKRLLEWIAGWLPRHCIGAILVSLPALAVYSHVTSEYETNIHFPVFTGSAALIAVVHYCNFCQLSSWMRSSLATVVGAGPLLLLYVSLCPDSSVLTSPLDAVQNFSSERNPCNSSVPRDLRRPASLIGQEVVLVFFLLLLLVWFLNREFEVSYRLHYHGDVEADLHRTKIQSMRDQADWLLRNIIPYHVAEQLKVSQTYSKNHDSGGVIFASIVNFSEFYEENYEGGKECYRVLNELIGDFDELLSKPDYSSIEKIKTIGATYMAASGLNTAQAQDGSHPQEHLQILFEFAKEMMRVVDDFNNNMLWFNFKLRVGFNHGPLTAGVIGTTKLLYDIWGDTVNIASRMDTTGVECRIQVSEESYRVLSKMGYDFDYRGTVNVKGKGQMKTYLYPKCTDHRVIPQHQLSISPDIRVQVDGSIGRSPTDEIANLVPSVQYVDKTSLGSDSSTQAKDAHLSPKRPWKEPVKAEERGRFGKAIEKDDCDETGIEEANELTKLNVSKSV

SEQ ID NO: 2833 - protein, 215 aa, Homo sapiens
  Payload ID: 655;
  Gene Symbol: ADCY9;
  Gene Name: adenylate cyclase 9;
  ENSP ID: ENSP00000460066
  MOD_RES (1)..(1): Any amino acid
XEEVIKNSPVKTFASPTFSSLLDVFLSTTVFLTLSTTCFLKYEAATVPPPPAALAVFSAALLLEVLSLAVSIRMVFFLEDVMACTKRLLEWIAGWLPRHCIGAILVSLPALAVYSHVTSEYETNIHFPVFTGSAALIAVVHYCNFCQLSSWMRSSLATVVGAGPLLLLYVSLCPDSSVLTSPLDAVQNFRRREPCGEGDSKFPFSSQEESCRAGA

SEQ ID NO: 2834 - protein, 72 aa, Homo sapiens
  Payload ID: 655;
  Gene Symbol: ADCY9;
  Gene Name: adenylate cyclase 9;
  ENSP ID: ENSP00000460160
  MOD_RES (1)..(1): Any amino acid
XFDVWSNDVNLANLMEQLGVAGKVHISEATAKYLDDRYEMEDGKVIERLGQSVVADQLKDLPFVRNHICSQI

SEQ ID NO: 2835 - protein, 257 aa, Homo sapiens
  Payload ID: 655;
  Gene Symbol: ADCY9;
  Gene Name: adenylate cyclase 9;
  ENSP ID: ENSP00000461825
IEQFCQEKKEMVNMRVGVHTGTVLCGILGMRRFKFDVWSNDVNLANLMEQLGVAGKVHISEATAKYLDDRYEMEDGKVIERLGQSVVADQLKGLKTYLISGQRAKESRCSCAEALLSGFEVIDGSQVSSGPRGQGTASSGNVSDLAQTVKTFDNLKTCPSCGITFAPKSEAGAEGGAPQNGCQDEHKNSTKVTSSWLLFLSVPLLAHPPKASGGPNPKTQNGLLSPPQEEKLTNSQTSLCEILQEKGRWAGVSLDQS

SEQ ID NO: 2836 - protein, 176 aa, Homo sapiens
  Payload ID: 656;
  Gene Symbol: ADCYAP1;
  Gene Name: adenylate cyclase activating polypeptide 1 (pituitary);
  Uniprot ID:  P18509;
  ENSP ID: ENSP00000411658
MTMCSGARLALLVYGIIMHSSVYSSPAAAGLRFPGIRPEEEAYGEDGNPLPDFDGSEPPGAGSPASAPRAAAAWYRPAGRRDVAHGILNEAYRKVLDQLSAGKHLQSLVARGVGGSLGGGAGDDAEPLSKRHSDGIFTDSYSRYRKQMAVKKYLAAVLGKRYKQRVKNKGRRIAYL

SEQ ID NO: 2837 - protein, 176 aa, Homo sapiens; identical to SEQ ID NO: 2836
  Payload ID: 656;
  Gene Symbol: ADCYAP1;
  Gene Name: adenylate cyclase activating polypeptide 1 (pituitary);
  Uniprot ID:  P18509;
  ENSP ID: ENSP00000462647

SEQ ID NO: 2838 - protein, 468 aa, Homo sapiens
  Payload ID: 657;
  Gene Symbol: ADCYAP1R1;
  Gene Name: adenylate cyclase activating polypeptide 1 (pituitary) receptor type I;
  Uniprot ID:  P41586;
  ENSP ID: ENSP00000306620
MAGVVHVSLAALLLLPMAPAMHSDCIFKKEQAMCLEKIQRANELMGFNDSSPGCPGMWDNITCWKPAHVGEMVLVSCPELFRIFNPDQVWETETIGESDFGDSNSLDLSDMGVVSRNCTEDGWSEPFPHYFDACGFDEYESETGDQDYYYLSVKALYTVGYSTSLVTLTTAMVILCRFRKLHCTRNFIHMNLFVSFMLRAISVFIKDWILYAEQDSNHCFISTVECKAVMVFFHYCVVSNYFWLFIEGLYLFTLLVETFFPERRYFYWYTIIGWGTPTVCVTVWATLRLYFDDTGCWDMNDSTALWWVIKGPVVGSIMVNFVLFIGIIVILVQKLQSPDMGGNESSIYLRLARSTLLLIPLFGIHYTVFAFSPENVSKRERLVFELGLGSFQGFVVAVLYCFLNGEVQAEIKRKWRSWKVNRYFAVDFKHRHPSLASSGVNGGTQLSILSKSSSQIRMSGLPADNLAT

SEQ ID NO: 2839 - protein, 496 aa, Homo sapiens
  Payload ID: 657;
  Gene Symbol: ADCYAP1R1;
  Gene Name: adenylate cyclase activating polypeptide 1 (pituitary) receptor type I;
  Uniprot ID:  P41586;
  ENSP ID: ENSP00000379514
MAGVVHVSLAALLLLPMAPAMHSDCIFKKEQAMCLEKIQRANELMGFNDSSPGCPGMWDNITCWKPAHVGEMVLVSCPELFRIFNPDQVWETETIGESDFGDSNSLDLSDMGVVSRNCTEDGWSEPFPHYFDACGFDEYESETGDQDYYYLSVKALYTVGYSTSLVTLTTAMVILCRFRKLHCTRNFIHMNLFVSFMLRAISVFIKDWILYAEQDSNHCFISTVECKAVMVFFHYCVVSNYFWLFIEGLYLFTLLVETFFPERRYFYWYTIIGWGTPTVCVTVWATLRLYFDDTGCWDMNDSTALWWVIKGPVVGSIMVNFVLFIGIIVILVQKLQSPDMGGNESSIYFSCVQKCYCKPQRAQQHSCKMSELSTITLRLARSTLLLIPLFGIHYTVFAFSPENVSKRERLVFELGLGSFQGFVVAVLYCFLNGEVQAEIKRKWRSWKVNRYFAVDFKHRHPSLASSGVNGGTQLSILSKSSSQIRMSGLPADNLAT

SEQ ID NO: 2840 - protein, 524 aa, Homo sapiens
  Payload ID: 657;
  Gene Symbol: ADCYAP1R1;
  Gene Name: adenylate cyclase activating polypeptide 1 (pituitary) receptor type I;
  ENSP ID: ENSP00000386395
MAGVVHVSLAALLLLPMAPAMHSDCIFKKEQAMCLEKIQRANELMGFNDSSPGCPGMWDNITCWKPAHVGEMVLVSCPELFRIFNPDQVWETETIGESDFGDSNSLDLSDMGVVSRNCTEDGWSEPFPHYFDACGFDEYESETGDQDYYYLSVKALYTVGYSTSLVTLTTAMVILCRFRKLHCTRNFIHMNLFVSFMLRAISVFIKDWILYAEQDSNHCFISTVECKAVMVFFHYCVVSNYFWLFIEGLYLFTLLVETFFPERRYFYWYTIIGWGTPTVCVTVWATLRLYFDDTGCWDMNDSTALWWVIKGPVVGSIMVNFVLFIGIIVILVQKLQSPDMGGNESSIYLTNLSPRVPKKAREDPLPVPSDQHSLPFLSCVQKCYCKPQRAQQHSCKMSELSTITLRLARSTLLLIPLFGIHYTVFAFSPENVSKRERLVFELGLGSFQGFVVAVLYCFLNGEVQAEIKRKWRSWKVNRYFAVDFKHRHPSLASSGVNGGTQLSILSKSSSQIRMSGLPADNLAT

SEQ ID NO: 2841 - protein, 447 aa, Homo sapiens
  Payload ID: 657;
  Gene Symbol: ADCYAP1R1;
  Gene Name: adenylate cyclase activating polypeptide 1 (pituitary) receptor type I;
  Uniprot ID:  P41586;
  ENSP ID: ENSP00000387335
MAGVVHVSLAALLLLPMAPAMHSDCIFKKEQAMCLEKIQRANELMGFNDSSPGCPGMWDNITCWKPAHVGEMVLVSCPELFRIFNPDQDMGVVSRNCTEDGWSEPFPHYFDACGFDEYESETGDQDYYYLSVKALYTVGYSTSLVTLTTAMVILCRFRKLHCTRNFIHMNLFVSFMLRAISVFIKDWILYAEQDSNHCFISTVECKAVMVFFHYCVVSNYFWLFIEGLYLFTLLVETFFPERRYFYWYTIIGWGTPTVCVTVWATLRLYFDDTGCWDMNDSTALWWVIKGPVVGSIMVNFVLFIGIIVILVQKLQSPDMGGNESSIYLRLARSTLLLIPLFGIHYTVFAFSPENVSKRERLVFELGLGSFQGFVVAVLYCFLNGEVQAEIKRKWRSWKVNRYFAVDFKHRHPSLASSGVNGGTQLSILSKSSSQIRMSGLPADNLAT

SEQ ID NO: 2842 - protein, 74 aa, Homo sapiens
  Payload ID: 657;
  Gene Symbol: ADCYAP1R1;
  Gene Name: adenylate cyclase activating polypeptide 1 (pituitary) receptor type I;
  ENSP ID: ENSP00000400893
MAGVVHVSLAALLLLPMAPAMHSDCIFKKEQAMCLEKIQRANELMGFNDSSPGCPGMWDNITCWKPAHVGEMVL

SEQ ID NO: 2843 - protein, 147 aa, Homo sapiens
  Payload ID: 657;
  Gene Symbol: ADCYAP1R1;
  Gene Name: adenylate cyclase activating polypeptide 1 (pituitary) receptor type I;
  ENSP ID: ENSP00000416622
  MOD_RES (1)..(1): Any amino acid
XATLRLYFDDTGCWDMNDSTALWWVIKGPVVGSIMVNFVLFIGIIVILVQKLQSPDMGGNESSIYLTNLSPRVPKKAREDPLPVPSDQHSLPFLRLARSTLLLIPLFGIHYTVFAFSPENVSKRERLVFELGLGSFQGFVVAVLYCF

SEQ ID NO: 2844 - protein, 496 aa, Homo sapiens; identical to SEQ ID NO: 2839
  Payload ID: 657;
  Gene Symbol: ADCYAP1R1;
  Gene Name: adenylate cyclase activating polypeptide 1 (pituitary) receptor type I;
  Uniprot ID:  P41586;
  ENSP ID: ENSP00000483721

SEQ ID NO: 2845 - protein, 210 aa, Homo sapiens
  Payload ID: 658;
  Gene Symbol: AK1;
  Gene Name: adenylate kinase 1;
  ENSP ID: ENSP00000223836
MGCCSSSDPRREDDLRAREKLKKTKIIFVVGGPGSGKGTQCEKIVQKYGYTHLSTGDLLRSEVSSGSARGKKLSEIMEKGQLVPLETVLDMLRDAMVAKVNTSKGFLIDGYPREVQQGEEFERRIGQPTLLLYVDAGPETMTQRLLKRGETSGRVDDNEETIKKRLETYYKATEPVIAFYEKRGIVRKVNAEGSVDSVFSQVCTHLDALK

SEQ ID NO: 2846 - protein, 194 aa, Homo sapiens
  Payload ID: 658;
  Gene Symbol: AK1;
  Gene Name: adenylate kinase 1;
  Uniprot ID:  P00568;
  ENSP ID: ENSP00000362249
MEEKLKKTKIIFVVGGPGSGKGTQCEKIVQKYGYTHLSTGDLLRSEVSSGSARGKKLSEIMEKGQLVPLETVLDMLRDAMVAKVNTSKGFLIDGYPREVQQGEEFERRIGQPTLLLYVDAGPETMTQRLLKRGETSGRVDDNEETIKKRLETYYKATEPVIAFYEKRGIVRKVNAEGSVDSVFSQVCTHLDALK

SEQ ID NO: 2847 - protein, 194 aa, Homo sapiens; identical to SEQ ID NO: 2846
  Payload ID: 658;
  Gene Symbol: AK1;
  Gene Name: adenylate kinase 1;
  Uniprot ID:  P00568;
  ENSP ID: ENSP00000362271

SEQ ID NO: 2848 - protein, 135 aa, Homo sapiens
  Payload ID: 658;
  Gene Symbol: AK1;
  Gene Name: adenylate kinase 1;
  ENSP ID: ENSP00000392314
  MOD_RES (1)..(1): Any amino acid
XRKPRSSLWWETVLDMLRDAMVAKVNTSKGFLIDGYPREVQQGEEFERRIGQPTLLLYVDAGPETMTQRLLKRGETSGRVDDNEETIKKRLETYYKATEPVIAFYEKRGIVRKVNAEGSVDSVFSQVCTHLDALK

SEQ ID NO: 2849 - protein, 32 aa, Homo sapiens
  Payload ID: 658;
  Gene Symbol: AK1;
  Gene Name: adenylate kinase 1;
  ENSP ID: ENSP00000448741
MEGAPAVSVPPPGAQHRPGTPEVPLAVGPASD

SEQ ID NO: 2850 - protein, 51 aa, Homo sapiens
  Payload ID: 658;
  Gene Symbol: AK1;
  Gene Name: adenylate kinase 1;
  ENSP ID: ENSP00000449130
EKGQLVPLETVLDMLRDAMVAKVNTSKGFLIDGYPREVQQGEEFERRALRP

SEQ ID NO: 2851 - protein, 239 aa, Homo sapiens
  Payload ID: 659;
  Gene Symbol: AK2;
  Gene Name: adenylate kinase 2;
  Uniprot ID:  P54819;
  ENSP ID: ENSP00000346921
MAPSVPAAEPEYPKGIRAVLLGPPGAGKGTQAPRLAENFCVCHLATGDMLRAMVASGSELGKKLKATMDAGKLVSDEMVVELIEKNLETPLCKNGFLLDGFPRTVRQAEMLDDLMEKRKEKLDSVIEFSIPDSLLIRRITGRLIHPKSGRSYHEEFNPPKEPMKDDITGEPLIRRSDDNEKALKIRLQAYHTQTTPLIEYYRKRGIHSAIDASQTPDVVFASILAAFSKATCKDLVMFI

SEQ ID NO: 2852 - protein, 232 aa, Homo sapiens
  Payload ID: 659;
  Gene Symbol: AK2;
  Gene Name: adenylate kinase 2;
  Uniprot ID:  P54819;
  ENSP ID: ENSP00000362548
MAPSVPAAEPEYPKGIRAVLLGPPGAGKGTQAPRLAENFCVCHLATGDMLRAMVASGSELGKKLKATMDAGKLVSDEMVVELIEKNLETPLCKNGFLLDGFPRTVRQAEMLDDLMEKRKEKLDSVIEFSIPDSLLIRRITGRLIHPKSGRSYHEEFNPPKEPMKDDITGEPLIRRSDDNEKALKIRLQAYHTQTTPLIEYYRKRGIHSAIDASQTPDVVFASILAAFSKATS

SEQ ID NO: 2853 - protein, 162 aa, Homo sapiens
  Payload ID: 659;
  Gene Symbol: AK2;
  Gene Name: adenylate kinase 2;
  ENSP ID: ENSP00000446849
MAPSVPAAEPEYPKGIRAVLLGPPGAGKGTQAPRLAENFCVCHLATGDMLRAMVASGSELGKKLKATMDAGKLVSDEMVVELIEKNLETPLCKNGFLLDGFPRTVRQAEMLDDLMEKRKEKLDSVIEFSIPDSLLIRRITGSIEHRNASASGHVCSDRPTLL

SEQ ID NO: 2854 - protein, 232 aa, Homo sapiens
  Payload ID: 659;
  Gene Symbol: AK2;
  Gene Name: adenylate kinase 2;
  ENSP ID: ENSP00000447082
MAPSVPAAEPEYPKGIRAVLLGPPGAGKGTQAPRLAENFCVCHLATGDMLRAMVASGSELGKKLKATMDAGKLVSDEMVVELIEKNLETPLCKNGFLLDGFPRTVRQAEMLDDLMEKRKEKLDSVIEFSIPDSLLIRRITGRLIHPKSGRSYHEEFNPPKEPMKDDITGEPLIRRSDDNEKALKIRLQAYHTQTTPLIEYYRKRGIHSAIDASQTPDVVFASILAAFSKATC

SEQ ID NO: 2855 - protein, 190 aa, Homo sapiens
  Payload ID: 659;
  Gene Symbol: AK2;
  Gene Name: adenylate kinase 2;
  ENSP ID: ENSP00000449003
MAPSVPAAEPEYPKGIRAVLLGPPGAGKGTQVSDEMVVELIEKNLETPLCKNGFLLDGFPRTVRQAEMLDDLMEKRKEKLDSVIEFSIPDSLLIRRITGRLIHPKSGRSYHEEFNPPKEPMKDDITGEPLIRRSDDNEKALKIRLQAYHTQTTPLIEYYRKRGIHSAIDASQTPDVVFASILAAFSKATS

SEQ ID NO: 2856 - protein, 42 aa, Homo sapiens
  Payload ID: 659;
  Gene Symbol: AK2;
  Gene Name: adenylate kinase 2;
  ENSP ID: ENSP00000450008
MAPSVPAAEPEYPKGIRAVLLGPPGAGKGTQLEKLKFEWLVL

SEQ ID NO: 2857 - protein, 133 aa, Homo sapiens
  Payload ID: 659;
  Gene Symbol: AK2;
  Gene Name: adenylate kinase 2;
  ENSP ID: ENSP00000450109
MAPSVPAAEPEYPKGIRAVLLGPPGAGKGTQAPRLAENFCVCHLATGDMLRAMVASGSELGKKLKATMDAGKLVSDEMVVELIEKNLETPLCKNGFLLDGFPRTVRQAEMADSPQEWPFLPRGVQPSKRAHER

SEQ ID NO: 2858 - protein, 42 aa, Homo sapiens; identical to SEQ ID NO: 2856
  Payload ID: 659;
  Gene Symbol: AK2;
  Gene Name: adenylate kinase 2;
  ENSP ID: ENSP00000486342

SEQ ID NO: 2859 - protein, 133 aa, Homo sapiens; identical to SEQ ID NO: 2857
  Payload ID: 659;
  Gene Symbol: AK2;
  Gene Name: adenylate kinase 2;
  ENSP ID: ENSP00000486507

SEQ ID NO: 2860 - protein, 157 aa, Homo sapiens
  Payload ID: 660;
  Gene Symbol: AK3;
  Gene Name: adenylate kinase 3;
  Uniprot ID:  Q9UIJ7;
  ENSP ID: ENSP00000352948
MTRLALHELKNLTQYSWLLDGFPRTLPQAEALDRAYQIDTVINLNVPFEVIKQRLTARWIHPASGRVYNIEFNPPKTVGIDDLTGEPLIQREDDKPETVIKRLKAYEDQTKPVLEYYQKKGVLETFSGTETNKIWPYVYAFLQTKVPQRSQKASVTP

SEQ ID NO: 2861 - protein, 227 aa, Homo sapiens
  Payload ID: 660;
  Gene Symbol: AK3;
  Gene Name: adenylate kinase 3;
  Uniprot ID:  Q9UIJ7;
  ENSP ID: ENSP00000371230
MGASARLLRAVIMGAPGSGKGTVSSRITTHFELKHLSSGDLLRDNMLRGTEIGVLAKAFIDQGKLIPDDVMTRLALHELKNLTQYSWLLDGFPRTLPQAEALDRAYQIDTVINLNVPFEVIKQRLTARWIHPASGRVYNIEFNPPKTVGIDDLTGEPLIQREDDKPETVIKRLKAYEDQTKPVLEYYQKKGVLETFSGTETNKIWPYVYAFLQTKVPQRSQKASVTP

SEQ ID NO: 2862 - protein, 187 aa, Homo sapiens
  Payload ID: 660;
  Gene Symbol: AK3;
  Gene Name: adenylate kinase 3;
  Uniprot ID:  Q9UIJ7;
  ENSP ID: ENSP00000413933
MGASARLLRAVIMGAPGSGKGTVSSRITTHFELKHLSSGDLLRDNMLRGTGFPRTLPQAEALDRAYQIDTVINLNVPFEVIKQRLTARWIHPASGRVYNIEFNPPKTVGIDDLTGEPLIQREDDKPETVIKRLKAYEDQTKPVLEYYQKKGVLETFSGTETNKIWPYVYAFLQTKVPQRSQKASVTP

SEQ ID NO: 2863 - protein, 157 aa, Homo sapiens; identical to SEQ ID NO: 2860
  Payload ID: 660;
  Gene Symbol: AK3;
  Gene Name: adenylate kinase 3;
  Uniprot ID:  Q9UIJ7;
  ENSP ID: ENSP00000482308

SEQ ID NO: 2864 - protein, 223 aa, Homo sapiens
  Payload ID: 661;
  Gene Symbol: AK4;
  Gene Name: adenylate kinase 4;
  Uniprot ID:  P27144;
  ENSP ID: ENSP00000322175
MASKLLRAVILGPPGSGKGTVCQRIAQNFGLQHLSSGHFLRENIKASTEVGEMAKQYIEKSLLVPDHVITRLMMSELENRRGQHWLLDGFPRTLGQAEALDKICEVDLVISLNIPFETLKDRLSRRWIHPPSGRVYNLDFNPPHVHGIDDVTGEPLVQQEDDKPEAVAARLRQYKDVAKPVIELYKSRGVLHQFSGTETNKIWPYVYTLFSNKITPIQSKEAY

SEQ ID NO: 2865 - protein, 223 aa, Homo sapiens; identical to SEQ ID NO: 2864
  Payload ID: 661;
  Gene Symbol: AK4;
  Gene Name: adenylate kinase 4;
  Uniprot ID:  P27144;
  ENSP ID: ENSP00000378743

SEQ ID NO: 2866 - protein, 223 aa, Homo sapiens; identical to SEQ ID NO: 2864
  Payload ID: 661;
  Gene Symbol: AK4;
  Gene Name: adenylate kinase 4;
  Uniprot ID:  P27144;
  ENSP ID: ENSP00000445912

SEQ ID NO: 2867 - protein, 171 aa, Homo sapiens
  Payload ID: 661;
  Gene Symbol: AK4;
  Gene Name: adenylate kinase 4;
  ENSP ID: ENSP00000448458
MAKQYIEKSLLVPDHVITRLMMSELENRRGQHWLLDGFPRTLGQAEALDKICEVDLVISLNIPFETLKDRLSRRWIHPPSGRVYNLDFNPPHVHGIDDVTGEPLVQQEDDKPEAVAARLRQYKDVAKPVIELYKSRGVLHQFSGTETNKIWPYVYTLFSNKITPIQSKEAY

SEQ ID NO: 2868 - protein, 536 aa, Homo sapiens
  Payload ID: 662;
  Gene Symbol: AK5;
  Gene Name: adenylate kinase 5;
  Uniprot ID:  Q9Y6K8;
  ENSP ID: ENSP00000341430
MCSKPEDPVEYLESCLQKVKELGGCDKVKWDTFVSQEKKTLPPLNGGQSRRSFLRNVMPENSNFPYRRYDRLPPIHQFSIESDTDLSETAELIEEYEVFDPTRPRPKIILVIGGPGSGKGTQSLKIAERYGFQYISVGELLRKKIHSTSSNRKWSLIAKIITTGELAPQETTITEIKQKLMQIPDEEGIVIDGFPRDVAQALSFEDQICTPDLVVFLACANQRLKERLLKRAEQQGRPDDNVKATQRRLMNFKQNAAPLVKYFQEKGLIMTFDADRDEDEVFYDISMAVDNKLFPNKEAAAGSSDLDPSMILDTGEIIDTGSDYEDQGDDQLNVFGEDTMGGFMEDLRKCKIIFIIGGPGSGKGTQCEKLVEKYGFTHLSTGELLREELASESERSKLIRDIMERGDLVPSGIVLELLKEAMVASLGDTRGFLIDGYPREVKQGEEFGRRIGDPQLVICMDCSADTMTNRLLQRSRSSLPVDDTTKTIAKRLEAYYRASIPVIAYYETKTQLHKINAEGTPEDVFLQLCTAIDSIF

SEQ ID NO: 2869 - protein, 562 aa, Homo sapiens
  Payload ID: 662;
  Gene Symbol: AK5;
  Gene Name: adenylate kinase 5;
  Uniprot ID:  Q9Y6K8;
  ENSP ID: ENSP00000346577
MNTNDAKEYLARREIPQLFESLLNGLMCSKPEDPVEYLESCLQKVKELGGCDKVKWDTFVSQEKKTLPPLNGGQSRRSFLRNVMPENSNFPYRRYDRLPPIHQFSIESDTDLSETAELIEEYEVFDPTRPRPKIILVIGGPGSGKGTQSLKIAERYGFQYISVGELLRKKIHSTSSNRKWSLIAKIITTGELAPQETTITEIKQKLMQIPDEEGIVIDGFPRDVAQALSFEDQICTPDLVVFLACANQRLKERLLKRAEQQGRPDDNVKATQRRLMNFKQNAAPLVKYFQEKGLIMTFDADRDEDEVFYDISMAVDNKLFPNKEAAAGSSDLDPSMILDTGEIIDTGSDYEDQGDDQLNVFGEDTMGGFMEDLRKCKIIFIIGGPGSGKGTQCEKLVEKYGFTHLSTGELLREELASESERSKLIRDIMERGDLVPSGIVLELLKEAMVASLGDTRGFLIDGYPREVKQGEEFGRRIGDPQLVICMDCSADTMTNRLLQRSRSSLPVDDTTKTIAKRLEAYYRASIPVIAYYETKTQLHKINAEGTPEDVFLQLCTAIDSIF

SEQ ID NO: 2870 - protein, 77 aa, Homo sapiens
  Payload ID: 662;
  Gene Symbol: AK5;
  Gene Name: adenylate kinase 5;
  ENSP ID: ENSP00000433915
MDCSADTMTNRLLQRSRSSLPVDDTTKTIAKRLEAYYRASIPVIAYYETKTQLHKINAEGTPEDVFLQLCTAIDSIF

SEQ ID NO: 2871 - protein, 176 aa, Homo sapiens
  Payload ID: 662;
  Gene Symbol: AK5;
  Gene Name: adenylate kinase 5;
  ENSP ID: ENSP00000434409
MCSKPEDPVEYLESCLQKVKELGGCDKVKWDTFVSQEKKTLPPLNGGQSRRSFLRNVMPENSNFPYRRYDRLPPIHQFSIESDTDLSETAELIEEYEVFDPTRPRPKIILVIGGPGSGKGTQSLKIAERYGFQYISVGELLRKKIHSTSSNRKWSLIAKIITTGELAPQETTITEI

SEQ ID NO: 2872 - protein, 62 aa, Homo sapiens
  Payload ID: 662;
  Gene Symbol: AK5;
  Gene Name: adenylate kinase 5;
  ENSP ID: ENSP00000436859
  MOD_RES (1)..(1): Any amino acid
XGSDYEDQGDDQLNVFGEDTMGGFMEDLRKCKIIFIIGGPGSGKGAGAACLWTTPPRPSPSA

SEQ ID NO: 2873 - protein, 169 aa, Homo sapiens
  Payload ID: 663;
  Gene Symbol: AK6;
  Gene Name: adenylate kinase 6;
  Uniprot ID:  Q9Y3D8;
  ENSP ID: ENSP00000370197
MCHRKPGTPGVGKTTLGKELASKSGLKYINVGDLAREEQLYDGYDEEYDCPILDEDRVVDELDNQMREGGVIVDYHGCDFFPERWFHIVFVLRTDTNVLYERLETRGYNEKKLTDNIQCEIFQVLYEEATASYKEEIVHQLPSNKPEELENNVDQILKWIEQWIKDHNS

SEQ ID NO: 2874 - protein, 172 aa, Homo sapiens
  Payload ID: 663;
  Gene Symbol: AK6;
  Gene Name: adenylate kinase 6;
  Uniprot ID:  Q9Y3D8;
  ENSP ID: ENSP00000370201
MLLPNILLTGTPGVGKTTLGKELASKSGLKYINVGDLAREEQLYDGYDEEYDCPILDEDRVVDELDNQMREGGVIVDYHGCDFFPERWFHIVFVLRTDTNVLYERLETRGYNEKKLTDNIQCEIFQVLYEEATASYKEEIVHQLPSNKPEELENNVDQILKWIEQWIKDHNS

SEQ ID NO: 2875 - protein, 141 aa, Homo sapiens
  Payload ID: 663;
  Gene Symbol: AK6;
  Gene Name: adenylate kinase 6;
  ENSP ID: ENSP00000420947
MLLPNILLTEQLYDGYDEEYDCPILDEDRVVDELDNQMREGGVIVDYHGCDFFPERWFHIVFVLRTDTNVLYERLETRGYNEKKLTDNIQCEIFQVLYEEATASYKEEIVHQLPSNKPEELENNVDQILKWIEQWIKDHNS

SEQ ID NO: 2876 - protein, 264 aa, Homo sapiens
  Payload ID: 663;
  Gene Symbol: AK6;
  Gene Name: adenylate kinase 6;
  ENSP ID: ENSP00000477611
MESGKTASPKSMPKDAQMMAQILKDMGITEYEPRVINQMLEFAFRYVTTILDDAKIYSSHAKKATVDADDVRLAIQCRADQSFTSPPPRDFLLDIARQRNQTPLPLIKPYSGPRLPPDRYCLTAPNYRLKSLQKKASTSAGRITVPRLSVGSVTSRPSTPTLGTPTPQTMSVSTKVGTPMSLTGQRFTVQMPTSQSPAVKASIPATSAVQNVLINPSLIGSKNILITTNMMSSQNTANESSNALKRKREDDDDDDDDDDDYDNL

SEQ ID NO: 2877 - protein, 264 aa, Homo sapiens; identical to SEQ ID NO: 2876
  Payload ID: 663;
  Gene Symbol: AK6;
  Gene Name: adenylate kinase 6;
  ENSP ID: ENSP00000477750

SEQ ID NO: 2878 - protein, 102 aa, Homo sapiens
  Payload ID: 663;
  Gene Symbol: AK6;
  Gene Name: adenylate kinase 6;
  ENSP ID: ENSP00000478838
MESGKTASPKSMPKDAQMMAQILKDMGITEYEPRVINQMLEFAFRYVTTILDDAKIYSSHAKKATVDADDVRLAIQCRADQSFTSPPPRDFLLDIARQRNQT

SEQ ID NO: 2879 - protein, 264 aa, Homo sapiens; identical to SEQ ID NO: 2876
  Payload ID: 663;
  Gene Symbol: AK6;
  Gene Name: adenylate kinase 6;
  ENSP ID: ENSP00000478935

SEQ ID NO: 2880 - protein, 109 aa, Homo sapiens
  Payload ID: 663;
  Gene Symbol: AK6;
  Gene Name: adenylate kinase 6;
  ENSP ID: ENSP00000479366
MLLPNILLTGTPGVGKTTLGKELASKSGLKYINVGDLAREEQLYDGYDEEYDCPILDEDRVVDELDNQMREGGVIVDYHGCDFFPERWFHIVFVLRTDTNVLYERLETR

SEQ ID NO: 2881 - protein, 127 aa, Homo sapiens
  Payload ID: 663;
  Gene Symbol: AK6;
  Gene Name: adenylate kinase 6;
  ENSP ID: ENSP00000480119
MESGKTASPKSMPKDAQMMAQILKDMGITEYEPRVINQMLEFAFRYVTTILDDAKIYSSHAKKATVDADDVRLAIQCRADQSFTSPPPRDFLLDIARQRNQTPLPLIKPYSGPRLPPDRYCLTAPNY

SEQ ID NO: 2882 - protein, 197 aa, Homo sapiens
  Payload ID: 663;
  Gene Symbol: AK6;
  Gene Name: adenylate kinase 6;
  ENSP ID: ENSP00000481041
MESGKTASPKSMPKDAQMMAQILKDMGITEYEPRVINQMLEFAFRYVTTILDDAKIYSSHAKKATVDADDVRLAIQCRADQSFTSPPPRDFLLDIARQRNQTPLPLIKPYSGPRLPPDRYCLTAPNYRLKSLQKKASTSAGRITVPRLSVGSVTSRPSTPTLGTPTPQTMSVSTKVGTPMSLTGQRFTVQMPTSQSP

SEQ ID NO: 2883 - protein, 47 aa, Homo sapiens
  Payload ID: 663;
  Gene Symbol: AK6;
  Gene Name: adenylate kinase 6;
  ENSP ID: ENSP00000481620
MLLPNILLTGTPGVGKTTLGKELASKSGLKYINVGDLAREGVIMRRN

SEQ ID NO: 2884 - protein, 135 aa, Homo sapiens
  Payload ID: 663;
  Gene Symbol: AK6;
  Gene Name: adenylate kinase 6;
  ENSP ID: ENSP00000482215
MESGKTASPKSMPKDAQMMAQILKDMGITEYEPRVINQMLEFAFRYVTTILDDAKIYSSHAKKATVDADDVRLAIQCRADQSFTSPPPRDFLLDIARQRNQTPLPLIKPYSGPRLPPDRYCLTAPNYRLKSLQKK

SEQ ID NO: 2885 - protein, 166 aa, Homo sapiens
  Payload ID: 663;
  Gene Symbol: AK6;
  Gene Name: adenylate kinase 6;
  ENSP ID: ENSP00000483457
MESGKTASPKSMPKDAQMMAQILKDMGITEYEPRVINQMLEFAFRYVTTILDDAKIYSSHAKKATVDADDVRLAIQCRADQSFTSPPPRDFLLDIARQRNQTPLPLIKPYSGPRLPPDRYCLTAPNYRLKSLQKKASTSAGRITVPRLSVGSVTSRPSTPTLGTPT

SEQ ID NO: 2886 - protein, 723 aa, Homo sapiens
  Payload ID: 664;
  Gene Symbol: AK7;
  Gene Name: adenylate kinase 7;
  Uniprot ID:  Q96M32;
  ENSP ID: ENSP00000267584
MAEEEETAALTEKVIRTQRVFINLLDSYSSGNIGKFLSNCVVGASLEEITEEEEEEDENKSAMLEASSTKVKEGTFQIVGTLSKPDSPRPDFAVETYSAISREDLLMRLLECDVIIYNITESSQQMEEAIWAVSALSEEVSHFEKRKLFILLSTVMTWARSKALDPEDSEVPFTEEDYRRRKSHPNFLDHINAEKMVLKFGKKARKFAAYVVAAGLQYGAEGGMLHTFFKMAWLGEIPALPVFGDGTNVIPTIHVLDLAGVIQNVIDHVPKPHYLVAVDESVHTLEDIVKCISKNTGPGKIQKIPRENAYLTKDLTQDCLDHLLVNLRMEALFVKENFNIRWAAQTGFVENINTILKEYKQSRGLMPIKICILGPPAVGKSSIAKELANYYKLHHIQLKDVISEAIAKLEAIVAPNDVGEGEEEVEEEEEEENVEDAQELLDGIKESMEQNAGQLDDQYIIRFMKEKLKSMPCRNQGYILDGFPKTYDQAKDLFNQEDEEEEDDVRGRMFPFDKLIIPEFVCALDASDEFLKERVINLPESIVAGTHYSQDRFLRALSNYRDINIDDETVFNYFDELEIHPIHIDVGKLEDAQNRLAIKQLIKEIGEPRNYGLTDEEKAEEERKAAEERLAREAAEEAEREHQEAVEMAEKIARWEEWNKRLEEVKREERELLEAQSIPLRNYLMTYVMPTLIQGLNECCNVRPEDPVDFLAEYLFKNNPEAQ

SEQ ID NO: 2887 - protein, 152 aa, Homo sapiens
  Payload ID: 664;
  Gene Symbol: AK7;
  Gene Name: adenylate kinase 7;
  ENSP ID: ENSP00000450453
  MOD_RES (1)..(1): Any amino acid
XLLVFKDVGKLEDAQNRLAIKQLIKEIGEPRNYGLTDEEKAEEERKAAEERLAREAAEEAEREHQEAVEMAEKIARWEEWNKRLEEVKREERELLEAQSIPLRNYLMTYVMPTLIQGLNECCNVRPEDPVDFLVGMQWHNLGLLQPPPPGFK

SEQ ID NO: 2888 - protein, 107 aa, Homo sapiens
  Payload ID: 664;
  Gene Symbol: AK7;
  Gene Name: adenylate kinase 7;
  ENSP ID: ENSP00000451068
MAEEEETAALTEKVIRTQRVFINLLDSYSSGNIGKFLSNCVVGASLEEITEEEEEEDENKSAMLEASSTKVKEGTFQIVGTLSKPDSPRPDFAVETYSVSPGGSGQE

SEQ ID NO: 2889 - protein, 479 aa, Homo sapiens
  Payload ID: 665;
  Gene Symbol: AK8;
  Gene Name: adenylate kinase 8;
  Uniprot ID:  Q96MA6;
  ENSP ID: ENSP00000298545
MDATIAPHRIPPEMPQYGEENHIFELMQNMLEQLLIHQPEDPIPFMIQHLHRDNDNVPRIVILGPPASGKTTIAMWLCKHLNSSLLTLENLILNEFSYTATEARRLYLQRKTVPSALLVQLIQERLAEEDCIKQGWILDGIPETREQALRIQTLGITPRHVIVLSAPDTVLIERNLGKRIDPQTGEIYHTTFDWPPESEIQNRLMVPEDISELETAQKLLEYHRNIVRVIPSYPKILKVISADQPCVDVFYQALTYVQSNHRTNAPFTPRVLLLGPVGSGKSLQAALLAQKYRLVNVCCGQLLKEAVADRTTFGELIQPFFEKEMAVPDSLLMKVLSQRLDQQDCIQKGWVLHGVPRDLDQAHLLNRLGYNPNRVFFLNVPFDSIMERLTLRRIDPVTGERYHLMYKPPPTMEIQARLLQNPKDAEEQVKLKMDLFYRNSADLEQLYGSAITLNGDQDPYTVFEYIESGIINPLPKKIP

SEQ ID NO: 2890 - protein, 421 aa, Homo sapiens
  Payload ID: 666;
  Gene Symbol: AK9;
  Gene Name: adenylate kinase 9;
  Uniprot ID:  Q5TCS8;
  ENSP ID: ENSP00000285397
MTSQEKTEEYPFADIFDEDETERNFLLSKPVCFVVFGKPGVGKTTLARYITQAWKCIRVEALPILEEQIAAETESGVMLQSMLISGQSIPDELVIKLMLEKLNSPEVCHFGYIITEIPSLSQDAMTTLQQIELIKNLNLKPDVIINIKCPDYDLCQRISGQRQHNNTGYIYSRDQWDPEVIENHRKKKKEAQKDGKGEEEEEEEEQEEEEAFIAEMQMVAEILHHLVQRPEDYLENVENIVKLYKETILQTLEEVMAEHNPQYLIELNGNKPAEELFMIVMDRLKYLNLKRAAILTKLQGAEEEINDTMENDELFRTLASYKLIAPRYRWQRSKWGRTCPVNLKDGNIYSGLPDYSVSFLGKIYCLSSEEALKPFLLNPRPYLLPPMPGPPCKVFILGPQYSGKTTLCNMLAENYKGKVTN

SEQ ID NO: 2891 - protein, 336 aa, Homo sapiens
  Payload ID: 666;
  Gene Symbol: AK9;
  Gene Name: adenylate kinase 9;
  Uniprot ID:  Q5TCS8;
  ENSP ID: ENSP00000347431
MKERKRHLGDTKHFCPVVLKENFILQPGNTEEAAKYREKIYYFSSAEAKEKFLEHPEDYVAHEEPLKAPPLRICLVGPQGSGKTMCGRQLAEKLNIFHIQFEEVLQEKLLLKTEKKVGPEFEEDSENEQAAKQELEELAIQANVKVEEENTKKQLPEVQLTEEEEVIKSSLMENEPLPPEILEVILSEWWLKEPIRSTGFILDGFPRYPEEAQFLGDRGFFPDAAVFIQVDDQDIFDRLLPAQIEKWKLKQKKKLERKKLIKDMKAKIRVDTIAKRRAELILERDKKRREVSSFVFFFKTGSHSVAQGRVQWHNHSSLQPRTPGLKGSSHLSLSKC

SEQ ID NO: 2892 - protein, 736 aa, Homo sapiens
  Payload ID: 666;
  Gene Symbol: AK9;
  Gene Name: adenylate kinase 9;
  ENSP ID: ENSP00000357944
MTSQEKTEEYPFADIFDEDETERNFLLSKPVCFVVFGKPGVGKTTLARYITQAWKCIRVEALPILEEQIAAETESGVMLQSMLISGQSIPDELVIKLMLEKLNSPEVCHFGYIITEIPSLSQDAMTTLQQIELIKNLNLKPDVIINIKCPDYDLCQRISGQRQHNNTGYIYSRDQWDPEVIENHRKKKKEAQKDGKGEEEEEEEEQEEEEAFIAEMQMVAEILHHLVQRPEDYLENVENIVKLYKETILQTLEEVMAEHNPQYLIELNGNKPAEELFMIVMDRLKYLNLKRAAILTKLQGAEEEINDTMENDELFRTLASYKLIAPRYRWQRSKWGRTCPVNLKDGNIYSGLPDYSVSFLGKIYCLSSEEALKPFLLNPRPYLLPPMPGPPCKVFILGPQYSGKTTLCNMLAENYKGKVVDYAQLVQPRFDKARETLVENTIAEATAAAIKVVKEKLLRELQARKQAETALREFQRQYEKMEFGVFPMEATHSSIDEEGYIQGSQRDRGSSLVDTEEAKTKSENVLHDQAAKVDKDDGKETGETFTFKRHSQDASQDVKLYSDTAPTEDLIEEVTADHPEVVTMIEETIKMSQDINFEQPYEKHAEILQEVLGEVMEENKDRFPGAPKYGGWIVDNCPIVKELWMALIKKGIIPDLVIYLSDTENNGKCLFNRIYLQKKSEIDSKILERLLEELQKKKKEEEEARKATEEELRLEEENRRLLELMKVKAKGKHRLL

SEQ ID NO: 2893 - protein, 227 aa, Homo sapiens
  Payload ID: 666;
  Gene Symbol: AK9;
  Gene Name: adenylate kinase 9;
  ENSP ID: ENSP00000407510
MLQSMLISGQSIPDELVIKLMLEKLNSPEVCHFGYIITEIPSLSQDAMTTLQQIELIKNLNLKPDVIINIKCPDYDLCQRISGQRQHNNTGYIYSRDQWDPEVIENHRKKKKEAQKDGKGEEEEEEEEQEEEEAFIAEMQMVAEILHHLVQRPEDYLENVENIVKLYKETILQTLEEVMAEHNPQYLIELNGNKPAEELFMIVMDRLKYLNLKRAAILTKLQGAEEE

SEQ ID NO: 2894 - protein, 1911 aa, Homo sapiens [sequence omitted]

SEQ ID NO: 2895 - protein, 218 aa, Homo sapiens
  Payload ID: 666;
  Gene Symbol: AK9;
  Gene Name: adenylate kinase 9;
  ENSP ID: ENSP00000418670
  MOD_RES (1)..(1): Any amino acid
XVEEENTKKQLPEVQLTEEEEVIKSSLMENEPLPPEILEVILSEWWLKEPIRSTGFILDGFPRYPEEAQFLGDRGFFPDAAVFIQVDDQDIFDRLLPAQIEKWKLKQKKKLERKKLIKDMKAKIRVDTIAKRRAELILERDKKRREPNKEKRKRGISENTTCYKCNHMSPWCEYAGLPYRGLLILYSATATATAGTKHCRSGAKVIVALSKQNIHNQK

SEQ ID NO: 2896 - protein, 749 aa, Homo sapiens
  Payload ID: 666;
  Gene Symbol: AK9;
  Gene Name: adenylate kinase 9;
  ENSP ID: ENSP00000418771
  MOD_RES (1)..(1): Any amino acid
XQIEKWKLKQKKKLERKKLIKDMKAKIRVDTIAKRRAELILERDKKRRENVVRDDEEISEEELEEDNDDIENILEDEFPKDEEEMSGEEDEEQETDAIERLRGELGEKFEADTHNLQIIQDELERYLIPIISINGARRNHIVQYTLNMKLKPLVENRASIFEKCHPIPAPLAQKMLTFTYKYISSFGYWDPVKLSEGETIKPVENAENPIYPVIHRQYIYFLSSKETKEKFMKNPIKYIRQPKPKPTVPIRIIIVGPPKSGKTTVAKKITSEYGLKHLSIGGALRYVLNNHPETELALMLNWHLHKGMTAPDELAIQALELSLMESVCNTAGVVIDGYPVTKHQMNLLEARSIIPMVIFELSVPSKEIFKRLLLEKENEQRLPYPLHNSAQIVAVNNVKYRKNIGEIRQYYQEQHQNWYVIDGFHSKWWVWNEVIKNVQMVNKYMQTYLERIKAGKAACIDKLCITPQELLSRLGEFEQFCPVSLAESQELFDCSATDSLEFAAEFRGHYYKMSSQEKLNKFLENPELYVPPLAPHPLPSADMIPKRLTLSELKSRFPKCAELQGYCPVTYKDGNQRYEALVPGSINYALEYHNRIYICENKEKLQKFLRSPLKYWEQKLPHKLPPLREPILLTSLPLPGYLEQGIATSLIKAMNAAGCLKPKFPFLSIRRSALLYIALHLKAFNPKGSEYTRKKYKKKMEQFMESCELITYLGAKMTRKYKEPQFRAIDFDHKLKTFLSLRNIDPING

SEQ ID NO: 2897 - protein, 312 aa, Homo sapiens
  Payload ID: 666;
  Gene Symbol: AK9;
  Gene Name: adenylate kinase 9;
  ENSP ID: ENSP00000419758
  MOD_RES (1)..(1): Any amino acid
XHSKWWVWNEVIKNVQMVNKYMQTYLERIKAELLSRLGEFEQFCPVSLAESQELFDCSATDSLEFAAEFRGHYYKMSSQEKLNKFLENPELYVPPLAPHPLPSADMIPKRLTLSELKSRFPKCAELQGYCPVTYKDGNQRYEALVPGSINYALEYHNRIYICENKEKLQKFLRSPLKYWEQKLPHKLPPLREPILLTSLPLPGYLEQGIATSLIKAMNAAGCLKPKFPFLSIRRSALLYIALHLKAFNPKGSEYTRKKYKKKMEQFMESCELITYLGAKMTRKYKEPQFRAIDFDHKLKTFLSLRNIDPING

SEQ ID NO: 2898 - protein, 192 aa, Homo sapiens
  Payload ID: 666;
  Gene Symbol: AK9;
  Gene Name: adenylate kinase 9;
  ENSP ID: ENSP00000431394
  MOD_RES (1)..(1): Any amino acid
XITEIPSLSQDAMTTLQQIELIKNLNLKPDVIINIKCPDYDLCQRISGQRQHNNTGYIYSRDQWDPEVIENHRKKKKEAQKDGKGEEEEEEEEQEEEEAFIAEMQMVAEILHHLVQRPEDYLENVENIVKLYKETILQTLEEVMAEHNPQYLIELNGNKPAEELFMDELFRTLASYKLIAPRYRWQRSKWGR

SEQ ID NO: 2899 - protein, 259 aa, Homo sapiens
  Payload ID: 666;
  Gene Symbol: AK9;
  Gene Name: adenylate kinase 9;
  ENSP ID: ENSP00000436325
MTSQEKTEEYPFADIFDEDETERNFLLSKPVCFVVFGKPGVGKTTLARYITQAWKCIRVEALPILEEQIAAETESGVMLQSMLISGQSIPDELVIKLMLEKLNSPEVCHFGYIITEIPSLSQDAMTTLQQIELIKNLNLKPDVIINIKCPDYDLCQRISGQRQHNNTGYIYSRDQWDPEVIENHRKKKKEAQKDGKGEEEEEEEEQEEEEAFIAEMQMVAEILHHLVQRPEDYLENVENIVKLYKETILQTLEEVMAEH

SEQ ID NO: 2900 - protein, 137 aa, Homo sapiens
  Payload ID: 666;
  Gene Symbol: AK9;
  Gene Name: adenylate kinase 9;
  ENSP ID: ENSP00000475585
  MOD_RES (1)..(1): Any amino acid
XEVIENHRKKKKEAQKDGKGEEEEEEEEQEEEEAFIAEMQMVAEILHHLVQRPEDYLENVENIVKLYKETILQTLEEVMAEHNPQYLIELNGNKPAEELFMVSAVLSRNTSQHGKFKSIDSIVLLLINRSIFIFEHH

SEQ ID NO: 2901 - protein, 498 aa, Homo sapiens
  Payload ID: 667;
  Gene Symbol: ADSL;
  Gene Name: adenylosuccinate lyase;
  ENSP ID: ENSP00000216194
MAAGGDHGSPDSYRSPLASRYASPEMCFVFSDRYKFRTWRQLWLWLAEAEQTLGLPITDEQIQEMKSNLENIDFKMAAEEEKRLRHDVMAHVHTFGHCCPKAAGIIHLGATSCYVGDNTSLILSRGVIKAYCNLRLPGSDSSPVSVSQLARVISRLADFAKERASLPTLGFTHFQPAQLTTVGKRCCLWIQDLCMDLQNLKRVRDDLRFRGVKGTTGTQASFLQLFEGDDHKVEQLDKMVTEKAGFKRAFIITGQTYTRKVDIEVLSVLASLGASVHKICTDIRLLANLKEMEEPFEKQQIGSSAMPYKRNPMRSERCCSLARHLMTLVMDPLQTASVQWFERTLDDSANRRICLAEAFLTADTILNTLQNISEGLVVYPKVIERRIRQELPFMATENIIMAMVKAGGSRQDCHEKIRVLSQQAASVVKQEGGDNDLIERIQVDAYFSPIHSQLDHLLDPSSFTGRASQQVQRFLEEEVYPLLKPYESVMKVKAELCL

SEQ ID NO: 2902 - protein, 425 aa, Homo sapiens
  Payload ID: 667;
  Gene Symbol: ADSL;
  Gene Name: adenylosuccinate lyase;
  Uniprot ID:  P30566;
  ENSP ID: ENSP00000341429
MAAGGDHGSPDSYRSPLASRYASPEMCFVFSDRYKFRTWRQLWLWLAEAEQTLGLPITDEQIQEMKSNLENIDFKMAAEEEKRLRHDVMAHVHTFGHCCPKAAGIIHLGATSCYVGDNTDLIILRNALDLLLPKLARVISRLADFAKERASLPTLGFTHFQPAQLTTVGKRCCLWIQDLCMDLQNLKRVRDDLRFRGVKGTTGTQASFLQLFEGDDHKVEQLDKMVTEKAGFKRAFIITGQTYTRKVDIEVLSVLASLGASVHKICTDIRLLANLKEMEEPFEKQQIGSSAMPYKRNPMRSERCCSLARHLMTLVMDPLQTASVQWFERTLDDSANRRICLAEAFLTADTILNTLQNISEGLVVYPKVIERRIRQELPFMATENIIMAMVKAGGSRQVQRFLEEEVYPLLKPYESVMKVKAELCL

SEQ ID NO: 2903 - protein, 127 aa, Homo sapiens
  Payload ID: 667;
  Gene Symbol: ADSL;
  Gene Name: adenylosuccinate lyase;
  ENSP ID: ENSP00000485073
MAAGGDHGSPDSYRSPLASRYASPEMCFVFSDRYKFRTWRQLWLWLAEAEQTLGLPITDEQIQEMKSNLENIDFKMAAEEEKRLRHDVMAHVHTFGHCCPKAAGIIHLGATSCYVGDNTVGACVVYT

SEQ ID NO: 2904 - protein, 81 aa, Homo sapiens
  Payload ID: 667;
  Gene Symbol: ADSL;
  Gene Name: adenylosuccinate lyase;
  ENSP ID: ENSP00000485202
  MOD_RES (1)..(1): Any amino acid
XRIQVDAYFSPIHSQLDHLLDPSSFTGRASQQCKQVPLDKNVVCVIPCCISNSKSTSDTWQLGSLPASATAPDFLVAWIYS

SEQ ID NO: 2905 - protein, 164 aa, Homo sapiens
  Payload ID: 667;
  Gene Symbol: ADSL;
  Gene Name: adenylosuccinate lyase;
  ENSP ID: ENSP00000485286
MAAGGDHGSPDSYRSPLASRYASPEMCFVFSDRYKFRTWRQLWLWLAEAEQTLGLPITDEQIQEMKSNLENIDFKMAAEEEKRLRHDVMAHVHTFGHCCPKAAGIIHLGATSCYVGDNTDLIILRNALDLLLPKACTADHSWETLLSLDSGSLHGSPELEACPR

SEQ ID NO: 2906 - protein, 262 aa, Homo sapiens
  Payload ID: 667;
  Gene Symbol: ADSL;
  Gene Name: adenylosuccinate lyase;
  ENSP ID: ENSP00000485288
MAAGGDHGSPDSYRSPLASRYASPEMCFVFSDRYKFRTWRQLWLWLAEAEQTLGLPITDEQIQEMKSNLENIDFKMAAEEEKRLRHDVMAHVHTFGHCCPKAAGIIHLGATSCYVGDNTLARVISRLADFAKERASLPTLGFTHFQPAQLTTVGKRCCLWIQDLCMDLQNLKRVRDDLRFRGVKGTTGTQASFLQLFEGDDHKVEQLDKMVTEKAGFKRAFIITGQTYTRKVDIEVLSVLASLGASVHKICTDIRLLANLKE

SEQ ID NO: 2907 - protein, 360 aa, Homo sapiens
  Payload ID: 667;
  Gene Symbol: ADSL;
  Gene Name: adenylosuccinate lyase;
  ENSP ID: ENSP00000485289
  MOD_RES (1)..(1): Any amino acid
XISRLADFAKERASLPTLGFTHFQPAQLTTVGKRCCLWIQDLCMDLQNLKRVRDDLRFRGVKGTTGTQASFLQLFEGDDHKVEQLDKMVTEKAGFKRAFIITGQTYTRKVDIEVLSVLASLGASVHKICTDIRLLANLKEMEEPFEKQQIGSSAMPYKRNPMRSERCCSLARHLMTLVMDPLQTASVQWFERTLDDSANRSVAQGHHIHQVEWRRICLAEAFLTADTILNTLQNISEGLVVYPKVIERRIRQELPFMATENIIMAMVKAGGSRQDCHEKIRVLSQQAASVVKQEGGDNDLIERIQVDAYFSPIHSQLDHLLDPSSFTGRASQQVQRFLEEEVYPLLKPYESVMKVKAELC

SEQ ID NO: 2908 - protein, 149 aa, Homo sapiens
  Payload ID: 667;
  Gene Symbol: ADSL;
  Gene Name: adenylosuccinate lyase;
  ENSP ID: ENSP00000485437
MAAGGDHGSPDSYRSPLASRYASPEMCFVFSDRYKFRTWRQLWLWLAEAEQTLGLPITDEQIQEMKSNLENIDFKMAAEEEKRLRHDVMAHVHTFGHCCPKAAGIIHLGATSCYVGDNTACTADHSWETLLSLDSGSLHGSPELEACPR

SEQ ID NO: 2909 - protein, 102 aa, Homo sapiens
  Payload ID: 667;
  Gene Symbol: ADSL;
  Gene Name: adenylosuccinate lyase;
  ENSP ID: ENSP00000485443
  MOD_RES (1)..(1): Any amino acid
XRIQVDAYFSPIHSQLDHLLDPSSFTGRASQQVQRFLEEEVYPLLKPYESVMKCKQVPLDKNVVCVIPCCISNSKSTSDTWQLGSLPASATAPDFLVAWIYS

SEQ ID NO: 2910 - protein, 78 aa, Homo sapiens
  Payload ID: 667;
  Gene Symbol: ADSL;
  Gene Name: adenylosuccinate lyase;
  ENSP ID: ENSP00000485462
  MOD_RES (1)..(1): Any amino acid
XGVKGTTGTQASFLQLFEGDDHKVEQLDKMVTEKAGFKRAFIITGQTYTRKVDIEVLSVLASLGASVHKSFGNREESE

SEQ ID NO: 2911 - protein, 133 aa, Homo sapiens
  Payload ID: 667;
  Gene Symbol: ADSL;
  Gene Name: adenylosuccinate lyase;
  ENSP ID: ENSP00000485477
MDLQNLKRVRDDLRFRGVKGTTGTQASFLQLFEGDDHKVEQLDKMVTEKAGFKRAFIITGQTYTRKVDIEVLSVLASLGASVHKICTDIRLLANLKEMEEPFEKQQIGSSAMPYKRNPMRSERCCSLARHLMT

SEQ ID NO: 2912 - protein, 484 aa, Homo sapiens
  Payload ID: 667;
  Gene Symbol: ADSL;
  Gene Name: adenylosuccinate lyase;
  Uniprot ID:  P30566;
  ENSP ID: ENSP00000485525
MAAGGDHGSPDSYRSPLASRYASPEMCFVFSDRYKFRTWRQLWLWLAEAEQTLGLPITDEQIQEMKSNLENIDFKMAAEEEKRLRHDVMAHVHTFGHCCPKAAGIIHLGATSCYVGDNTDLIILRNALDLLLPKLARVISRLADFAKERASLPTLGFTHFQPAQLTTVGKRCCLWIQDLCMDLQNLKRVRDDLRFRGVKGTTGTQASFLQLFEGDDHKVEQLDKMVTEKAGFKRAFIITGQTYTRKVDIEVLSVLASLGASVHKICTDIRLLANLKEMEEPFEKQQIGSSAMPYKRNPMRSERCCSLARHLMTLVMDPLQTASVQWFERTLDDSANRRICLAEAFLTADTILNTLQNISEGLVVYPKVIERRIRQELPFMATENIIMAMVKAGGSRQDCHEKIRVLSQQAASVVKQEGGDNDLIERIQVDAYFSPIHSQLDHLLDPSSFTGRASQQVQRFLEEEVYPLLKPYESVMKVKAELCL

SEQ ID NO: 2913 - protein, 456 aa, Homo sapiens
  Payload ID: 668;
  Gene Symbol: ADSS;
  Gene Name: adenylosuccinate synthase;
  Uniprot ID:  P30520;
  ENSP ID: ENSP00000355493
MAFAETYPAASSLPNGDCGRPRARPGGNRVTVVLGAQWGDEGKGKVVDLLAQDADIVCRCQGGNNAGHTVVVDSVEYDFHLLPSGIINPNVTAFIGNGVVIHLPGLFEEAEKNVQKGKGLEGWEKRLIISDRAHIVFDFHQAADGIQEQQRQEQAGKNLGTTKKGIGPVYSSKAARSGLRMCDLVSDFDGFSERFKVLANQYKSIYPTLEIDIEGELQKLKGYMEKIKPMVRDGVYFLYEALHGPPKKILVEGANAALLDIDFGTYPFVTSSNCTVGGVCTGLGMPPQNVGEVYGVVKAYTTRVGIGAFPTEQDNEIGELLQTRGREFGVTTGRKRRCGWLDLVLLKYAHMINGFTALALTKLDILDMFTEIKVGVAYKLDGEIIPHIPANQEVLNKVEVQYKTLPGWNTDISNARAFKELPVNAQNYVRFIEDELQIPVKWIGVGKSRESMIQLF

SEQ ID NO: 2914 - protein, 457 aa, Homo sapiens
  Payload ID: 669;
  Gene Symbol: ADSSL1;
  Gene Name: adenylosuccinate synthase like 1;
  Uniprot ID:  Q8N142;
  ENSP ID: ENSP00000331260
MSGTRASNDRPPGAGGVKRGRLQQEAAATGSRVTVVLGAQWGDEGKGKVVDLLATDADIISRCQGGNNAGHTVVVDGKEYDFHLLPSGIINTKAVSFIGNGVVIHLPGLFEEAEKNEKKGLKDWEKRLIISDRAHLVFDFHQAVDGLQEVQRQAQEGKNIGTTKKGIGPTYSSKAARTGLRICDLLSDFDEFSSRFKNLAHQHQSMFPTLEIDIEGQLKRLKGFAERIRPMVRDGVYFMYEALHGPPKKILVEGANAALLDIDFGTYPFVTSSNCTVGGVCTGLGIPPQNIGDVYGVVKAYTTRVGIGAFPTEQINEIGGLLQTRGHEWGVTTGRKRRCGWLDLMILRYAHMVNGFTALALTKLDILDVLGEVKVGVSYKLNGKRIPYFPANQEMLQKVEVEYETLPGWKADTTGARRWEDLPPQAQNYIRFVENHVGVAVKWVGVGKSRESMIQLF

SEQ ID NO: 2915 - protein, 500 aa, Homo sapiens
  Payload ID: 669;
  Gene Symbol: ADSSL1;
  Gene Name: adenylosuccinate synthase like 1;
  Uniprot ID:  Q8N142;
  ENSP ID: ENSP00000333019
MVGRSCGVATQRQGGGQRPTNLALTLSSSPAHSTALPWLPPRSLQLLSGHSVPAQPTPHLPSACGGPTRVTLGEERAWRSHGSNAGGHTCLPRRTAGAGSLTPGGERGGNNAGHTVVVDGKEYDFHLLPSGIINTKAVSFIGNGVVIHLPGLFEEAEKNEKKGLKDWEKRLIISDRAHLVFDFHQAVDGLQEVQRQAQEGKNIGTTKKGIGPTYSSKAARTGLRICDLLSDFDEFSSRFKNLAHQHQSMFPTLEIDIEGQLKRLKGFAERIRPMVRDGVYFMYEALHGPPKKILVEGANAALLDIDFGTYPFVTSSNCTVGGVCTGLGIPPQNIGDVYGVVKAYTTRVGIGAFPTEQINEIGGLLQTRGHEWGVTTGRKRRCGWLDLMILRYAHMVNGFTALALTKLDILDVLGEVKVGVSYKLNGKRIPYFPANQEMLQKVEVEYETLPGWKADTTGARRWEDLPPQAQNYIRFVENHVGVAVKWVGVGKSRESMIQLF

SEQ ID NO: 2916 - protein, 74 aa, Homo sapiens
  Payload ID: 669;
  Gene Symbol: ADSSL1;
  Gene Name: adenylosuccinate synthase like 1;
  ENSP ID: ENSP00000450433
MLQKVEVEYETLPGWKADTTGARRWEDLPPQAQNYIRFVENHVGVAVCIITVFSALSVKWVGVGKSRESMIQLF

SEQ ID NO: 2917 - protein, 226 aa, Homo sapiens
  Payload ID: 669;
  Gene Symbol: ADSSL1;
  Gene Name: adenylosuccinate synthase like 1;
  ENSP ID: ENSP00000450759
MVGRSCGVATQRQGGGQRPTNLALTLSSSPAHSTALPWLPPRSLQLLSGHSVPAQPTPHLPSACGGPTRVTLGEERAWRSHGSNAGGHTCLPRRTAGAGSLTPGGERGGNNAGHTVVVDGKEYDFHLLPSGIINTKAVSFIGNGVVIHLPGLFEEAEKNEKKGLKDWEKRLIISDRAHLGCRRTSGSAAPGTRGEEYRHHQEGNRTNLLFQSCPDRPPHLRPPVRF

SEQ ID NO: 2918 - protein, 63 aa, Homo sapiens
  Payload ID: 669;
  Gene Symbol: ADSSL1;
  Gene Name: adenylosuccinate synthase like 1;
  ENSP ID: ENSP00000452303
MLQKVEVEYETLPGWKADTTGARRWEDLPPQAQNYIRFVENHVGVAVKWVGVGKSRESMIQLF

SEQ ID NO: 2919 - protein, 181 aa, Homo sapiens
  Payload ID: 669;
  Gene Symbol: ADSSL1;
  Gene Name: adenylosuccinate synthase like 1;
  ENSP ID: ENSP00000473778
GVVGRSVASASWGGAWRRRRGEERGVGVVGRSVASASWGGAWRRRRGEERGVGMGGNNAGHTVVVDGKEYDFHLLPSGIINTKAVSFIGNGVVIHLPGLFEEAEKNEKKGLKDWEKRLIISDRAHLGDSGQQEVRSMYTHLSSASLLSPAALTWPARQCLIFTRLSTDFRKCSARHKRGRI

SEQ ID NO: 2920 - protein, 411 aa, Homo sapiens
  Payload ID: 670;
  Gene Symbol: AJAP1;
  Gene Name: adherens junctions associated prt 1;
  Uniprot ID:  Q9UKB5;
  ENSP ID: ENSP00000367432
MWIQQLLGLSSMSIRWPGRPLGSHAWILIAMFQLAVDLPACEALGPGPEFWLLPRSPPRPPRLWSFRSGQPARVPAPVWSPRPPRVERIHGQMQMPRARRAHRPRDQAAALVPKAGLAKPPAAAKSSPSLASSSSSSSSAVAGGAPEQQALLRRGKRHLQGDGLSSFDSRGSRPTTETEFIAWGPTGDEEALESNTFPGVYGPTTVSILQTRKTTVAATTTTTTTATPMTLQTKGFTESLDPRRRIPGGVSTTEPSTSPSNNGEVTQPPRILGEASGLAVHQIITITVSLIMVIAALITTLVLKNCCAQSGNTRRNSHQRKTNQQEESCQNLTDFPSARVPSSLDIFTAYNETLQCSHECVRASVPVYTDETLHSTTGEYKSTFNGNRPSSSDRHLIPVAFVSEKWFEISC

SEQ ID NO: 2921 - protein, 411 aa, Homo sapiens; identical to SEQ ID NO: 2920
  Payload ID: 670;
  Gene Symbol: AJAP1;
  Gene Name: adherens junctions associated prt 1;
  Uniprot ID:  Q9UKB5;
  ENSP ID: ENSP00000367433

SEQ ID NO: 2922 - protein, 463 aa, Homo sapiens
  Payload ID: 671;
  Gene Symbol: ADGRA1;
  Gene Name: adhesion G prt-coupled receptor A1;
  Uniprot ID:  Q86SQ6;
  ENSP ID: ENSP00000376383
MLWIGVTARNIYKQVTKKAPLCLDTDQPPYPRQPLLRFYLVSGGVPFIICGVTAATNIRNYGTEDEDTAYCWMAWEPSLGAFYGPAAIITLVTCVYFLGTYVQLRRHPGRRYELRTQPEEQRRLATPEGGRGIRPGTPPAHDAPGASVLQNEHSFQAQLRAAAFTLFLFTATWAFGALAVSQGHFLDMVFSCLYGAFCVTLGLFVLIHHCAKREDVWQCWWACCPPRKDAHPALDANGAALGRAACLHSPGLGQPRGFAHPPGPCKMTNLQAAQGHASCLSPATPCCAKMHCEPLTADEAHVHLQEEGAFGHDPHLHGCLQGRTKPPYFSRHPAEEPEYAYHIPSSLDGSPRSSRTDSPPSSLDGPAGTHTLACCTQGDPFPMVTQPEGSDGSPALYSCPTQPGREAALGPGHLEMLRRTQSLPFGGPSQNGLPKGKLLEGLPFGTDGTGNIRTGPWKNETTV

SEQ ID NO: 2923 - protein, 560 aa, Homo sapiens
  Payload ID: 671;
  Gene Symbol: ADGRA1;
  Gene Name: adhesion G prt-coupled receptor A1;
  Uniprot ID:  Q86SQ6;
  ENSP ID: ENSP00000376384
MDLKTVLSLPRYPGEFLHPVVYACTAVMLLCLLASFVTYIVHQSAIRISRKGRHTLLNFCFHAALTFTVFAGGINRTKYPILCQAVGIVLHYSTLSTMLWIGVTARNIYKQVTKKAPLCLDTDQPPYPRQPLLRFYLVSGGVPFIICGVTAATNIRNYGTEDEDTAYCWMAWEPSLGAFYGPAAIITLVTCVYFLGTYVQLRRHPGRRYELRTQPEEQRRLATPEGGRGIRPGTPPAHDAPGASVLQNEHSFQAQLRAAAFTLFLFTATWAFGALAVSQGHFLDMVFSCLYGAFCVTLGLFVLIHHCAKREDVWQCWWACCPPRKDAHPALDANGAALGRAACLHSPGLGQPRGFAHPPGPCKMTNLQAAQGHASCLSPATPCCAKMHCEPLTADEAHVHLQEEGAFGHDPHLHGCLQGRTKPPYFSRHPAEEPEYAYHIPSSLDGSPRSSRTDSPPSSLDGPAGTHTLACCTQGDPFPMVTQPEGSDGSPALYSCPTQPGREAALGPGHLEMLRRTQSLPFGGPSQNGLPKGKLLEGLPFGTDGTGNIRTGPWKNETTV

SEQ ID NO: 2924 - protein, 1279 aa, Homo sapiens
  Payload ID: 671;
  Gene Symbol: ADGRA1;
  Gene Name: adhesion G prt-coupled receptor A1;
  Uniprot ID:  Q86SQ6;
  ENSP ID: ENSP00000475778
MRGHGNHSRLKSRCASLGNVHHHQAQMAHGAHCRGGRTPQSPDSRGPTAGGHTRGRWTYRPIEALINVSFPGAKGGRTAEGEPSWAWVFRSGYLQRQALPGLPVSTRVAACWWQHHPGRDSGFLGPGFIDLLREEPSGRADGKAAAQKTGRLYLFPTFLGNKLPEAADSFGEIASGNSVIFTSVLQSSHPPGTPPPSARKPSPGAAMLVCEETLELGAQGCWGSTSPRGQAVSLVGGPTAGGSRLGGAGCTMGLLMALQARRPRDGTWADPRRCSRAVEGSGLTRAALVSPGPSGVEEDTRREGCVLVGSWRSSTHRSRVLIINTPSGRTPWSQGSLGSTGRYNQTRAPGSQQQGLCSDAALHEDFVPEPTPAFFQYPPQAFSKTKVRDLGRGGLYAFSKEEKVSEAQRVEAYETHGLGLSTGRQNPVPSPCKPGCVCQGLALDAEAWPRHPGRRPCAAKEACLGPPGCSGELSLPEEEGIAPGAATAAPAWVPHGRVSRFLTVKLFTYVTMYQCKQERILRLCISGESGRYVRRSRFRNFAALMVSTGVPGVLQLGARPLRGGGHPYGDSQAGKVVEWRAGDRASGLSAGERRFLSQSELQTWPRTPHCVGKKVPQPVGAADLAPDTSLCRKEGSSASRSCRPGPGHLTRREEDSFRQLAFPRFEEVTFPPLTAAERAPSVHGGHSLASQGLVLAGRTRSVASGGKQELSGPLAACIPTQDLKTVLSLPRYPGEFLHPVVYACTAVMLLCLLASFVTYIVHQSAIRISRKGRHTLLNFCFHAALTFTVFAGGINRTKYPILCQAVGIVLHYSTLSTMLWIGVTARNIYKQVTKKAPLCLDTDQPPYPRQPLLRFYLVSGGVPFIICGVTAATNIRNYGTEDEDTACWMAWEPSLGAFYGPAAIITLVTCVYFLGTYVQLRRHPGRRYELRTQPEEQRRLATPEGGRGIRPGTPPAHDAPGASVLQNEHSFQAQLRAAAFTLFLFTATWAFGALAVSQGHFLDMVFSCLYGAFCVTLGLFVLIHHCAKREDVWQCWWACCPPRKDAHPALDANGAALGRAACLHSPGLGQPRGFAHPPGPCKMTNLQAAQGHASCLSPATPCCAKMHCEPLTADEAHVHLQEEGAFGHDPHLHGCLQGRTKPPYFSRHPAEEPEYAYHIPSSLDGSPRSSRTDSPPSSLDGPAGTHTLACCTQGDPFPMVTQPEGSDGSPALYSCPTQPGREAALGPGHLEMLRRTQSLPFGGPSQNGLPKGKLLEGLPFGTDGTGNIRTGPWKNETTV

SEQ ID NO: 2925 - protein, 1121 aa, Homo sapiens
  Payload ID: 672;
  Gene Symbol: ADGRA2;
  Gene Name: adhesion G prt-coupled receptor A2;
  Uniprot ID:  Q96PE1;
  ENSP ID: ENSP00000323508
MGAGGRRMRGAPARLLLPLLPWLLLLLAPEARGAPGCPLSIRSCKCSGERPKGLSGGVPGPARRRVVCSGGDLPEPPEPGLLPNGTVTLLLSNNKITGLRNGSFLGLSLLEKLDLRNNIISTVQPGAFLGLGELKRLDLSNNRIGCLTSETFQGLPRLLRLNISGNIFSSLQPGVFDELPALKVVDLGTEFLTCDCHLRWLLPWAQNRSLQLSEHTLCAYPSALHAQALGSLQEAQLCCEGALELHTHHLIPSLRQVVFQGDRLPFQCSASYLGNDTRIRWYHNRAPVEGDEQAGILLAESLIHDCTFITSELTLSHIGVWASGEWECTVSMAQGNASKKVEIVVLETSASYCPAERVANNRGDFRWPRTLAGITAYQSCLQYPFTSVPLGGGAPGTRASRRCDRAGRWEPGDYSHCLYTNDITRVLYTFVLMPINASNALTLAHQLRVYTAEAASFSDMMDVVYVAQMIQKFLGYVDQIKELVEVMVDMASNLMLVDEHLLWLAQREDKACSRIVGALERIGGAALSPHAQHISVELSAFPREVGGAGAGLHPVVYPCTALLLLCLFATIITYILNHSSIRVSRKGWHMLLNLCFHIAMTSAVFAGGITLTNYQMVCQAVGITLHYSSLSTLLWMGVKARVLHKELTWRAPPPQEGDPALPTPSPMLRFYLIAGGIPLIICGITAAVNIHNYRDHSPYCWLVWRPSLGAFYIPVALILLITWIYFLCAGLRLRGPLAQNPKAGNSRASLEAGEELRGSTRLRGSGPLLSDSGSLLATGSARVGTPGPPEDGDSLYSPGVQLGALVTTHFLYLAMWACGALAVSQRWLPRVVCSCLYGVAASALGLFVFTHHCARRRDVRASWRACCPPASPAAPHAPPRALPAAAEDGSPVFGEGPPSLKSSPSGSSGHPLALGPCKLTNLQLAQSQVCEAGAAAGGEGEPEPAGTRGNLAHRHPNNVHHGRRAHKSRAKGHRAGEACGKNRLKALRGGAAGALELLSSESGSLHNSPTDSYLGSSRNSPGAGLQLEGEPMLTPSEGSDTSAAPLSEAGRAGQRRSASRDSLKGGGALEKESHRRSYPLNAASLNGAPKGGKYDDVTLMGAEVASGGCMKTGLWKSETTV

SEQ ID NO: 2926 - protein, 190 aa, Homo sapiens
  Payload ID: 672;
  Gene Symbol: ADGRA2;
  Gene Name: adhesion G prt-coupled receptor A2;
  ENSP ID: ENSP00000400860
RAAVQGLEPRPAHLSLGCVAAFLYWFPREHLLHGGKGKVPSYLGCLGLLSNNKITGLRNGSFLGLSLLEKLDLRNNIISTVQPGAFLGLGELKRLDLSNNRIGCLTSETFQGLPRLLRLNISGNIFSSLQPGVFDELPALKVVDLGTEFLTCDCHLRWLLPWAQNRSLQLSEHTLCAYPSALHAQALGSL

SEQ ID NO: 2927 - protein, 1338 aa, Homo sapiens
  Payload ID: 672;
  Gene Symbol: ADGRA2;
  Gene Name: adhesion G prt-coupled receptor A2;
  Uniprot ID:  Q96PE1;
  ENSP ID: ENSP00000406367
MGAGGRRMRGAPARLLLPLLPWLLLLLAPEARGAPGCPLSIRSCKCSGERPKGLSGGVPGPARRRVVCSGGDLPEPPEPGLLPNGTVTLLLSNNKITGLRNGSFLGLSLLEKLDLRNNIISTVQPGAFLGLGELKRLDLSNNRIGCLTSETFQGLPRLLRLNISGNIFSSLQPGVFDELPALKVVDLGTEFLTCDCHLRWLLPWAQNRSLQLSEHTLCAYPSALHAQALGSLQEAQLCCEGALELHTHHLIPSLRQVVFQGDRLPFQCSASYLGNDTRIRWYHNRAPVEGDEQAGILLAESLIHDCTFITSELTLSHIGVWASGEWECTVSMAQGNASKKVEIVVLETSASYCPAERVANNRGDFRWPRTLAGITAYQSCLQYPFTSVPLGGGAPGTRASRRCDRAGRWEPGDYSHCLYTNDITRVLYTFVLMPINASNALTLAHQLRVYTAEAASFSDMMDVVYVAQMIQKFLGYVDQIKELVEVMVDMASNLMLVDEHLLWLAQREDKACSRIVGALERIGGAALSPHAQHISVNARNVALEAYLIKPHSYVGLTCTAFQRREGGVPGTRPGSPGQNPPPEPEPPADQQLRFRCTTGRPNVSLSSFHIKNSVALASIQLPPSLFSSLPAALAPPVPPDCTLQLLVFRNGRLFHSHSNTSRPGAAGPGKRRGVATPVIFAGTSGCGVGNLTEPVAVSLRHWAEGAEPVAAWWSQEGPGEAGGWTSEGCQLRSSQPNVSALHCQHLGNVAVLMELSAFPREVGGAGAGLHPVVYPCTALLLLCLFATIITYILNHSSIRVSRKGWHMLLNLCFHIAMTSAVFAGGITLTNYQMVCQAVGITLHYSSLSTLLWMGVKARVLHKELTWRAPPPQEGDPALPTPSPMLRFYLIAGGIPLIICGITAAVNIHNYRDHSPYCWLVWRPSLGAFYIPVALILLITWIYFLCAGLRLRGPLAQNPKAGNSRASLEAGEELRGSTRLRGSGPLLSDSGSLLATGSARVGTPGPPEDGDSLYSPGVQLGALVTTHFLYLAMWACGALAVSQRWLPRVVCSCLYGVAASALGLFVFTHHCARRRDVRASWRACCPPASPAAPHAPPRALPAAAEDGSPVFGEGPPSLKSSPSGSSGHPLALGPCKLTNLQLAQSQVCEAGAAAGGEGEPEPAGTRGNLAHRHPNNVHHGRRAHKSRAKGHRAGEACGKNRLKALRGGAAGALELLSSESGSLHNSPTDSYLGSSRNSPGAGLQLEGEPMLTPSEGSDTSAAPLSEAGRAGQRRSASRDSLKGGGALEKESHRRSYPLNAASLNGAPKGGKYDDVTLMGAEVASGGCMKTGLWKSETTV

SEQ ID NO: 2928 - protein, 1321 aa, Homo sapiens
  Payload ID: 673;
  Gene Symbol: ADGRA3;
  Gene Name: adhesion G prt-coupled receptor A3;
  Uniprot ID:  Q8IWK6;
  ENSP ID: ENSP00000334952
MEPPGRRRGRAQPPLLLPLSLLALLALLGGGGGGGAAALPAGCKHDGRPRGAGRAAGAAEGKVVCSSLELAQVLPPDTLPNRTVTLILSNNKISELKNGSFSGLSLLERLDLRNNLISSIDPGAFWGLSSLKRLDLTNNRIGCLNADIFRGLTNLVRLNLSGNLFSSLSQGTFDYLASLRSLEFQTEYLLCDCNILWMHRWVKEKNITVRDTRCVYPKSLQAQPVTGVKQELLTCDPPLELPSFYMTPSHRQVVFEGDSLPFQCMASYIDQDMQVLWYQDGRIVETDESQGIFVEKNMIHNCSLIASALTISNIQAGSTGNWGCHVQTKRGNNTRTVDIVVLESSAQYCPPERVVNNKGDFRWPRTLAGITAYLQCTRNTHGSGIYPGNPQDERKAWRRCDRGGFWADDDYSRCQYANDVTRVLYMFNQMPLNLTNAVATARQLLAYTVEAANFSDKMDVIFVAEMIEKFGRFTKEEKSKELGDVMVDIASNIMLADERVLWLAQREAKACSRIVQCLQRIATYRLAGGAHVYSTYSPNIALEAYVIKSTGFTGMTCTVFQKVAASDRTGLSDYGRRDPEGNLDKQLSFKCNVSNTFSSLALKNTIVEASIQLPPSLFSPKQKRELRPTDDSLYKLQLIAFRNGKLFPATGNSTNLADDGKRRTVVTPVILTKIDGVNVDTHHIPVNVTLRRIAHGADAVAARWDFDLLNGQGGWKSDGCHILYSDENITTIQCYSLSNYAVLMDLTGSELYTQAASLLHPVVYTTAIILLLCLLAVIVSYIYHHSLIRISLKSWHMLVNLCFHIFLTCVVFVGGITQTRNASICQAVGIILHYSTLATVLWVGVTARNIYKQVTKKAKRCQDPDEPPPPPRPMLRFYLIGGGIPIIVCGITAAANIKNYGSRPNAPYCWMAWEPSLGAFYGPASFITFVNCMYFLSIFIQLKRHPERKYELKEPTEEQQRLAANENGEINHQDSMSLSLISTSALENEHTFHSQLLGASLTLLLYVALWMFGALAVSLYYPLDLVFSFVFGATSLSFSAFFVVHHCVNREDVRLAWIMTCCPGRSSYSVQVNVQPPNSNGTNGEAPKCPNSSAESSCTNKSASSFKNSSQGCKLTNLQAAAAQCHANSLPLNSTPQLDNSLTEHSMDNDIKMHVAPLEVQFRTNVHSSRHHKNRSKGHRASRLTVLREYAYDVPTSVEGSVQNGLPKSRLGNNEGHSRSRRAYLAYRERQYNPPQQDSSDACSTLPKSSRNFEKPVSTTSKKDALRKPAVVELENQQKSYGLNLAIQNGPIKSNGQEGPLLGTDSTGNVRTGLWKHETTV

SEQ ID NO: 2929 - protein, 616 aa, Homo sapiens
  Payload ID: 673;
  Gene Symbol: ADGRA3;
  Gene Name: adhesion G prt-coupled receptor A3;
  Uniprot ID:  Q8IWK6;
  ENSP ID: ENSP00000421006
MEPPGRRRGRAQPPLLLPLSLLALLALLGGGGGGGAAALPAGCKHDGRPRGAGRAAGAAEGKVVCSSLELAQVLPPDTLPNRTVTLILSNNKISELKNGSFSGLSLLERLDLRNNLISSIDPGAFWGLSSLKRLDLTNNRIGCLNADIFRGLTNLVRLNLSGNLFSSLSQGTFDYLASLRSLEFQTEYLLCDCNILWMHRWVKEKNITVRDTRCVYPKSLQAQPVTGVKQELLTCDPPLELPSFYMTPSHRQVVFEGDSLPFQCMASYIDQDMQVLWYQDGRIVETDESQGIFVEKNMIHNCSLIASALTISNIQAGSTGNWGCHVQTKRGNNTRTVDIVVLESSAQYCPPERVVNNKGDFRWPRTLAGITAYLQCTRNTHGSGIYPGNPQDERKAWRRCDRGGFWADDDYSRCQYANDVTRVLYMFNQMPLNLTNAVATARQLLAYTVEAANFSDKMDVIFVAEMIEKFGRFTKEEKSKELGDVMVDIASNIMLADERVLWLAQREAKACSRIVQCLQRIATYRLAGGAHVYSTYSPNIALEAYVIKSTGFTGMTCTVFQKVAASDRTGLSDYGRRDPEGNLDKQLSFKCNVSNTFSSLALKVCYILQSFKTIYS

SEQ ID NO: 2930 - protein, 381 aa, Homo sapiens
  Payload ID: 673;
  Gene Symbol: ADGRA3;
  Gene Name: adhesion G prt-coupled receptor A3;
  Uniprot ID:  Q8IWK6;
  ENSP ID: ENSP00000422606
MPLKRNNSKYPPLELPSFYMTPSHRQVVFEGDSLPFQCMASYIDQDMQVLWYQDGRIVETDESQGIFVEKNMIHNCSLIASALTISNIQAGSTGNWGCHVQTKRGNNTRTVDIVVLESSAQYCPPERVVNNKGDFRWPRTLAGITAYLQCTRNTHGSGIYPGNPQDERKAWRRCDRGGFWADDDYSRCQYANDVTRVLYMFNQMPLNLTNAVATARQLLAYTVEAANFSDKMDVIFVAEMIEKFGRFTKEEKSKELGDVMVDIASNIMLADERVLWLAQREAKACSRIVQCLQRIATYRLAGGAHVYSTYSPNIALEAYVIKSTGFTGMTCTVFQKVAASDRTGLSDYGRRDPEGNLDKQLSFKCNVSNTFSSLALKGKFR

SEQ ID NO: 2931 - protein, 34 aa, Homo sapiens
  Payload ID: 673;
  Gene Symbol: ADGRA3;
  Gene Name: adhesion G prt-coupled receptor A3;
  ENSP ID: ENSP00000424927
MLRFYLIGGGIPIIVCGITAAANIKNYGSRPNAP

SEQ ID NO: 2932 - protein, 97 aa, Homo sapiens
  Payload ID: 673;
  Gene Symbol: ADGRA3;
  Gene Name: adhesion G prt-coupled receptor A3;
  ENSP ID: ENSP00000425223
MASYIDQDMQVLWYQDGRIVETDESQGIFVEKNMIHNCSLIASALTISNIQAGSTGNWGCHVQTKRGNNTRTVDIVVLESSAQYCPPERVVNNKGDF

SEQ ID NO: 2933 - protein, 1584 aa, Homo sapiens
  Payload ID: 674;
  Gene Symbol: ADGRB1;
  Gene Name: adhesion G prt-coupled receptor B1;
  Uniprot ID:  O14514;
  ENSP ID: ENSP00000313046
MRGQAAAPGPVWILAPLLLLLLLLGRRARAAAGADAGPGPEPCATLVQGKFFGYFSAAAVFPANASRCSWTLRNPDPRRYTLYMKVAKAPVPCSGPGRVRTYQFDSFLESTRTYLGVESFDEVLRLCDPSAPLAFLQASKQFLQMRRQQPPQHDGLRPRAGPPGPTDDFSVEYLVVGNRNPSRAACQMLCRWLDACLAGSRSSHPCGIMQTPCACLGGEAGGPAAGPLAPRGDVCLRDAVAGGPENCLTSLTQDRGGHGATGGWKLWSLWGECTRDCGGGLQTRTRTCLPAPGVEGGGCEGVLEEGRQCNREACGPAGRTSSRSQSLRSTDARRREELGDELQQFGFPAPQTGDPAAEEWSPWSVCSSTCGEGWQTRTRFCVSSSYSTQCSGPLREQRLCNNSAVCPVHGAWDEWSPWSLCSSTCGRGFRDRTRTCRPPQFGGNPCEGPEKQTKFCNIALCPGRAVDGNWNEWSSWSACSASCSQGRQQRTRECNGPSYGGAECQGHWVETRDCFLQQCPVDGKWQAWASWGSCSVTCGAGSQRRERVCSGPFFGGAACQGPQDEYRQCGTQRCPEPHEICDEDNFGAVIWKETPAGEVAAVRCPRNATGLILRRCELDEEGIAYWEPPTYIRCVSIDYRNIQMMTREHLAKAQRGLPGEGVSEVIQTLVEISQDGTSYSGDLLSTIDVLRNMTEIFRRAYYSPTPGDVQNFVQILSNLLAEENRDKWEEAQLAGPNAKELFRLVEDFVDVIGFRMKDLRDAYQVTDNLVLSIHKLPASGATDISFPMKGWRATGDWAKVPEDRVTVSKSVFSTGLTEADEASVFVVGTVLYRNLGSFLALQRNTTVLNSKVISVTVKPPPRSLRTPLEIEFAHMYNGTTNQTCILWDETDVPSSSAPPQLGPWSWRGCRTVPLDALRTRCLCDRLSTFAILAQLSADANMEKATLPSVTLIVGCGVSSLTLLMLVIIYVSVWRYIRSERSVILINFCLSIISSNALILIGQTQTRNKVVCTLVAAFLHFFFLSSFCWVLTEAWQSYMAVTGHLRNRLIRKRFLCLGWGLPALVVAISVGFTKAKGYSTMNYCWLSLEGGLLYAFVGPAAAVVLVNMVIGILVFNKLVSKDGITDKKLKERAGASLWSSCVVLPLLALTWMSAVLAVTDRRSALFQILFAVFDSLEGFVIVMVHCILRREVQDAVKCRVVDRQEEGNGDSGGSFQNGHAQLMTDFEKDVDLACRSVLNKDIAACRTATITGTLKRPSLPEEEKLKLAHAKGPPTNFNSLPANVSKLHLHGSPRYPGGPLPDFPNHSLTLKRDKAPKSSFVGDGDIFKKLDSELSRAQEKALDTSYVILPTATATLRPKPKEEPKYSIHIDQMPQTRLIHLSTAPEASLPARSPPSRQPPSGGPPEAPPAQPPPPPPPPPPPPQQPLPPPPNLEPAPPSLGDPGEPAAHPGPSTGPSTKNENVATLSVSSLERRKSRYAELDFEKIMHTRKRHQDMFQDLNRKLQHAAEKDKEVLGPDSKPEKQQTPNKRPWESLRKAHGTPTWVKKELEPLQPSPLELRSVEWERSGATIPLVGQDIIDLQTEV

SEQ ID NO: 2934 - protein, 1159 aa, Homo sapiens
  Payload ID: 674;
  Gene Symbol: ADGRB1;
  Gene Name: adhesion G prt-coupled receptor B1;
  ENSP ID: ENSP00000427783
MRGQAAAPGPVWILAPLLLLLLLLGRRARAAAGADAGPGPEPCATLVQGKFFGYFSAAAVFPANASRCSWTLRNPDPRRYTLYMKVAKAPVPCSGPGRVRTYQFDSFLESTRTYLGVESFDEVLRLCDPSAPLAFLQASKQFLQMRRQQPPQHDGLRPRAGPPGPTDDFSVEYLVVGNRNPSRAACQMLCRWLDACLAGSRSSHPCGIMQTPCACLGGEAGGPAAGPLAPRGDVCLRDAVAGGPENCLTSLTQDRGGHGATGGWKLWSLWGECTRDCGGGLQTRTRTCLPAPGVEGGGCEGVLEEGRQCNREACGPAGRTSSRSQSLRSTDARRREELGDELQQFGFPAPQTGDPAAEEWSPWSVCSSTCGEGWQTRTRFCVSSSYSTQCSGPLREQRLCNNSAVCPVHGAWDEWSPWSLCSSTCGRGFRDRTRTCRPPQFGGNPCEGPEKQTKFCNIALCPGRAVDGNWNEWSSWSACSASCSQGRQQRTRECNGPSYGGAECQGHWVETRDCFLQQCPVDGKWQAWASWGSCSVTCGAGSQRRERVCSGPFFGGAACQGPQDEYRQCGTQRCPEPHEICDEDNFGAVIWKETPAGEVAAVRCPRNATGLILRRCELDEEGIAYWEPPTYIRCVSIDYRNIQMMTREHLAKAQRGLPGEGVSEVIQTLVEISQDGTSYSGDLLSTIDVLRNMTEIFRRAYYSPTPGDVQNFVQILSNLLAEENRDKWEEAQLAGPNAKELFRLVEDFVDVIGFRMKDLRDAYQVTDNLVLSIHKLPASGATDISFPMKGWRATGDWAKVPEDRVTVSKSVFSTGLTEADEASVFVVGTVLYRNLGSFLALQRNTTVLNSKVISVTVKPPPRSLRTPLEIEFAHMYNGTTNQTCILWDETDVPSSSAPPQLGPWSWRGCRTVPLDALRTRCLCDRLSTFAILAQLSADANMEKATLPSVTLIVGCGVSSLTLLMLVIIYVSVWRYIRSERSVILINFCLSIISSNALILIGQTQTRNKVVCTLVAAFLHFFFLSSFCWVLTEAWQSYMAVTGHLRNRLIRKRFLCLGWGLPALVVAISVGFTKAKGYSTMNYCWLSLEGGLLYAFVGPAAAVVLGLPVELLRGAAAAGADLDVGCARRHRPPLRPLPDPLRCLRLAGGLRHRHGALYPP

SEQ ID NO: 2935 - protein, 1584 aa, Homo sapiens; identical to SEQ ID NO: 2933
  Payload ID: 674;
  Gene Symbol: ADGRB1;
  Gene Name: adhesion G prt-coupled receptor B1;
  Uniprot ID:  O14514;
  ENSP ID: ENSP00000430945

SEQ ID NO: 2936 - protein, 1584 aa, Homo sapiens
  Payload ID: 675;
  Gene Symbol: ADGRB2;
  Gene Name: adhesion G prt-coupled receptor B2;
  Uniprot ID:  O60241;
  ENSP ID: ENSP00000362759
MENTGWMGKGHRMTPACPLLLSVILSLRLATAFDPAPSACSALASGVLYGAFSLQDLFPTIASGCSWTLENPDPTKYSLYLRFNRQEQVCAHFAPRLLPLDHYLVNFTCLRPSPEEAVAQAESEVGRPEEEEAEAAAGLELCSGSGPFTFLHFDKNFVQLCLSAEPSEAPRLLAPAALAFRFVEVLLINNNNSSQFTCGVLCRWSEECGRAAGRACGFAQPGCSCPGEAGAGSTTTTSPGPPAAHTLSNALVPGGPAPPAEADLHSGSSNDLFTTEMRYGEEPEEEPKVKTQWPRSADEPGLYMAQTGDPAAEEWSPWSVCSLTCGQGLQVRTRSCVSSPYGTLCSGPLRETRPCNNSATCPVHGVWEEWGSWSLCSRSCGRGSRSRMRTCVPPQHGGKACEGPELQTKLCSMAACPVEGQWLEWGPWGPCSTSCANGTQQRSRKCSVAGPAWATCTGALTDTRECSNLECPATDSKWGPWNAWSLCSKTCDTGWQRRFRMCQATGTQGYPCEGTGEEVKPCSEKRCPAFHEMCRDEYVMLMTWKKAAAGEIIYNKCPPNASGSASRRCLLSAQGVAYWGLPSFARCISHEYRYLYLSLREHLAKGQRMLAGEGMSQVVRSLQELLARRTYYSGDLLFSVDILRNVTDTFKRATYVPSADDVQRFFQVVSFMVDAENKEKWDDAQQVSPGSVHLLRVVEDFIHLVGDALKAFQSSLIVTDNLVISIQREPVSAVSSDITFPMRGRRGMKDWVRHSEDRLFLPKEVLSLSSPGKPATSGAAGSPGRGRGPGTVPPGPGHSHQRLLPADPDESSYFVIGAVLYRTLGLILPPPRPPLAVTSRVMTVTVRPPTQPPAEPLITVELSYIINGTTDPHCASWDYSRADASSGDWDTENCQTLETQAAHTRCQCQHLSTFAVLAQPPKDLTLELAGSPSVPLVIGCAVSCMALLTLLAIYAAFWRFIKSERSIILLNFCLSILASNILILVGQSRVLSKGVCTMTAAFLHFFFLSSFCWVLTEAWQSYLAVIGRMRTRLVRKRFLCLGWGLPALVVAVSVGFTRTKGYGTSSYCWLSLEGGLLYAFVGPAAVIVLVNMLIGIIVFNKLMARDGISDKSKKQRAGSERCPWASLLLPCSACGAVPSPLLSSASARNAMASLWSSCVVLPLLALTWMSAVLAMTDRRSVLFQALFAVFNSAQGFVITAVHCFLRREVQDVVKCQMGVCRADESEDSPDSCKNGQLQILSDFEKDVDLACQTVLFKEVNTCNPSTITGTLSRLSLDEDEEPKSCLVGPEGSLSFSPLPGNILVPMAASPGLGEPPPPQEANPVYMCGEGGLRQLDLTWLRPTEPGSEGDYMVLPRRTLSLQPGGGGGGGEDAPRARPEGTPRRAAKTVAHTEGYPSFLSVDHSGLGLGPAYGSLQNPYGMTFQPPPPTPSARQVPEPGERSRTMPRTVPGSTMKMGSLERKKLRYSDLDFEVMHTRKRHSELYHELNQKFHTFDRYRSQSTAKREKRWSVSSGGAAERSVCTDKPSPGERPSLSQHRRHQSWSTFKSMTLGSLPPKPRERLTLHRAAAWEPTEPPDGDFQTEV

SEQ ID NO: 2937 - protein, 1585 aa, Homo sapiens
  Payload ID: 675;
  Gene Symbol: ADGRB2;
  Gene Name: adhesion G prt-coupled receptor B2;
  Uniprot ID:  O60241;
  ENSP ID: ENSP00000362762
MENTGWMGKGHRMTPACPLLLSVILSLRLATAFDPAPSACSALASGVLYGAFSLQDLFPTIASGCSWTLENPDPTKYSLYLRFNRQEQVCAHFAPRLLPLDHYLVNFTCLRPSPEEAVAQAESEVGRPEEEEAEAAAGLELCSGSGPFTFLHFDKNFVQLCLSAEPSEAPRLLAPAALAFRFVEVLLINNNNSSQFTCGVLCRWSEECGRAAGRACGFAQPGCSCPGEAGAGSTTTTSPGPPAAHTLSNALVPGGPAPPAEADLHSGSSNDLFTTEMRYGEEPEEEPKVKTQWPRSADEPGLYMAQTGDPAAEEWSPWSVCSLTCGQGLQVRTRSCVSSPYGTLCSGPLRETRPCNNSATCPVHGVWEEWGSWSLCSRSCGRGSRSRMRTCVPPQHGGKACEGPELQTKLCSMAACPVEGQWLEWGPWGPCSTSCANGTQQRSRKCSVAGPAWATCTGALTDTRECSNLECPATDSKWGPWNAWSLCSKTCDTGWQRRFRMCQATGTQGYPCEGTGEEVKPCSEKRCPAFHEMCRDEYVMLMTWKKAAAGEIIYNKCPPNASGSASRRCLLSAQGVAYWGLPSFARCISHEYRYLYLSLREHLAKGQRMLAGEGMSQVVRSLQELLARRTYYSGDLLFSVDILRNVTDTFKRATYVPSADDVQRFFQVVSFMVDAENKEKWDDAQQVSPGSVHLLRVVEDFIHLVGDALKAFQSSLIVTDNLVISIQREPVSAVSSDITFPMRGRRGMKDWVRHSEDRLFLPKEVLSLSSPGKPATSGAAGSPGRGRGPGTVPPGPGHSHQRLLPADPDESSYFVIGAVLYRTLGLILPPPRPPLAVTSRVMTVTVRPPTQPPAEPLITVELSYIINGTTDPHCASWDYSRADASSGDWDTENCQTLETQAAHTRCQCQHLSTFAVLAQPPKDLTLELAGSPSVPLVIGCAVSCMALLTLLAIYAAFWRFIKSERSIILLNFCLSILASNILILVGQSRVLSKGVCTMTAAFLHFFFLSSFCWVLTEAWQSYLAVIGRMRTRLVRKRFLCLGWGLPALVVAVSVGFTRTKGYGTSSYCWLSLEGGLLYAFVGPAAVIVLVNMLIGIIVFNKLMARDGISDKSKKQRAGSERCPWASLLLPCSACGAVPSPLLSSASARNAMASLWSSCVVLPLLALTWMSAVLAMTDRRSVLFQALFAVFNSAQGFVITAVHCFLRREVQDVVKCQMGVCRADESEDSPDSCKNGQLQILSDFEKDVDLACQTVLFKEVNTCNPSTITGTLSRLSLDEDEEPKSCLVGPEGSLSFSPLPGNILVPMAASPGLGEPPPPQEANPVYMCGEGGLRQLDLTWLRPTEPGSEGDYMVLPRRTLSLQPGGGGGGGEDAPRARPEGTPRRAAKTVAHTEGYPSFLSVDHSGLGLGPAYGSLQNPYGMTFQPPPPTPSARQVPEPGERSRTMPRTVPGSTMKMGSLERKKLRYSDLDFEKVMHTRKRHSELYHELNQKFHTFDRYRSQSTAKREKRWSVSSGGAAERSVCTDKPSPGERPSLSQHRRHQSWSTFKSMTLGSLPPKPRERLTLHRAAAWEPTEPPDGDFQTEV

SEQ ID NO: 2938 - protein, 1554 aa, Homo sapiens
  Payload ID: 675;
  Gene Symbol: ADGRB2;
  Gene Name: adhesion G prt-coupled receptor B2;
  ENSP ID: ENSP00000381548
MTPACPLLLSVILSLRLATAFDPAPSACSALASGVLYGAFSLQDLFPTIASGCSWTLENPDPTKYSLYLRFNRQEQVCAHFAPRLLPLDHYLVNFTCLRPSPEEAVAQAESEVGRPEEEEAEAAAGLELCSGSGPFTFLHFDKNFVQLCLSAEPSEAPRLLAPAALAFRFVEVLLINNNNSSQFTCGVLCRWSEECGRAAGRACGFAQPGCSCPGEAGAGSTTTTSPGPPAAHTLSNALVPGGPAPPAEADLHSGSSNDLFTTEMRYGEEPEEEPKVKTQWPRSADEPGLYMAQTGDPAAEEWSPWSVCSLTCGQGLQVRTRSCVSSPYGTLCSGPLRETRPCNNSATCPVHGVWEEWGSWSLCSRSCGRGSRSRMRTCVPPQHGGKACEGPELQTKLCSMAACPVEGQWLEWGPWGPCSTSCANGTQQRSRKCSVAGPAWATCTGALTDTRECSNLECPATDSKWGPWNAWSLCSKTCDTGWQRRFRMCQATGTQGYPCEGTGEEVKPCSEKRCPAFHEMCRDEYVMLMTWKKAAAGEIIYNKCPPNASGSASRRCLLSAQGVAYWGLPSFARCISHEYRYLYLSLREHLAKGQRMLAGEGMSQVVRSLQELLARRTYYSGDLLFSVDILRNVTDTFKRATYVPSADDVQRFFQVVSFMVDAENKEKWDDAQQVSPGSVHLLRVVEDFIHLVGDALKAFQSSLIVTDNLVISIQREPVSAVSSDITFPMRGRRGMKDWVRHSEDRLFLPKEVLSLSSPGKPATSGAAGSPGRGRGPGTVPPGPGHSHQRLLPADPDESSYFVIGAVLYRTLGLILPPPRPPLAVTSRVMTVTVRPPTQPPAEPLITVELSYIINGTTDPHCASWDYSRADASSGDWDTENCQTLETQAAHTRCQCQHLSTFAVLAQPPKDLTLELAGSPSVPLVIGCAVSCMALLTLLAIYAAFWRFIKSERSIILLNFCLSILASNILILVGQSRVLSKGVCTMTAAFLHFFFLSSFCWVLTEAWQSYLAVIGRMRTRLVRKRFLCLGWGLPALVVAVSVGFTRTKGYGTSSYCWLSLEGGLLYAFVGPAAVIVLVNMLIGIIVFNKLMARDGISDKSKKQRAGSERCPWASLLLPCSACGAVPSPLLSSASARNAMASLWSSCVVLPLLALTWMSAVLAMTDRRSVLFQALFAVFNSAQGFVITAVHCFLRREVQDVVKCQMGVCRADESEDSPDSCKNGQLQILSDFEKDVDLACQTVLFKEVNTCNPSTITGTLSRLSLDEDEEPKSCLVGPEGSLSFSPLPGNILVPMAASPGLGEPPPPQEANPVYMCGEGGLRQLDLTWLRPTEPGSEGDYMVLPRRTLSLQPGGGGGGGEDAPRARPEGTPRRAAKTVAHTEGYPSFLSVDHSGLGLGPAYGSLQNPYGMTFQPPPPTPSARQVPEPGERSRTMPRTVPGSTMKMGSLERKKLRYSDLDFEKVMHTRKRHSELYHELNQKFHTFDRYRSQSTAKDKPSPGERPSLSQHRRHQSWSTFKSMTLGSLPPKPRERLTLHRAAAWEPTEPPDGDFQTEV

SEQ ID NO: 2939 - protein, 1466 aa, Homo sapiens
  Payload ID: 675;
  Gene Symbol: ADGRB2;
  Gene Name: adhesion G prt-coupled receptor B2;
  ENSP ID: ENSP00000381550
MTPACPLLLSVILSLRLATAFDPAPSACSALASGVLYGAFSLQDLFPTIASGCSWTLENPDPTKYSLYLRFNRQEQVCAHFAPRLLPLDHYLVNFTCLRPSPEEAVAQAESEVGRPEEEEAEAAAGLELCSGSGPFTFLHFDKNFVQLCLSAEPSEAPRLLAPAALAFRFVEVLLINNNNSSQFTCGVLCRWSEECGRAAGRACGFAQPGCSCPGEAGAGSTTTTSPGPPAAHTLSNALVPGGPAPPAEADLHSGSSNDLFTTEMRYGEEPEEEPKVKTQWPRSADEPGLYMAQTGDPAAEEWSPWSVCSLTCGQGLQVRTRSCVSSPYGTLCSGPLRETRPCNNSATCPVEGQWLEWGPWGPCSTSCANGTQQRSRKCSVAGPAWATCTGALTDTRECSNLECPATDSKWGPWNAWSLCSKTCDTGWQRRFRMCQATGTQGYPCEGTGEEVKPCSEKRCPAFHEMCRDEYVMLMTWKKAAAGEIIYNKCPPNASGSASRRCLLSAQGVAYWGLPSFARCISHEYRYLYLSLREHLAKGQRMLAGEGMSQVVRSLQELLARRTYYSGDLLFSVDILRNVTDTFKRATYVPSADDVQRFFQVVSFMVDAENKEKWDDAQQVSPGSVHLLRVVEDFIHLVGDALKAFQSSLIVTDNLVISIQREPVSAVSSDITFPMRGRRGMKDWVRHSEDRLFLPKEVLSLSSPGKPATSGAAGSPGRGRGPGTVPPGPGHSHQRLLPADPDESSYFVIGAVLYRTLGLILPPPRPPLAVTSRVMTVTVRPPTQPPAEPLITVELSYIINGTTDPHCASWDYSRADASSGDWDTENCQTLETQAAHTRCQCQHLSTFAVLAQPPKDLTLELAGSPSVPLVIGCAVSCMALLTLLAIYAAFWRFIKSERSIILLNFCLSILASNILILVGQSRVLSKGVCTMTAAFLHFFFLSSFCWVLTEAWQSYLAVIGRMRTRLVRKRFLCLGWGLPALVVAVSVGFTRTKGYGTSSYCWLSLEGGLLYAFVGPAAVIVLVNMLIGIIVFNKLMARDGISDKSKKQRAGASLWSSCVVLPLLALTWMSAVLAMTDRRSVLFQALFAVFNSAQGFVITAVHCFLRREVQDVVKCQMGVCRADESEDSPDSCKNGQLQILSDFEKDVDLACQTVLFKEVNTCNPSTITGTLSRLSLDEDEEPKSCLVGPEGSLSFSPLPGNILVPMAASPGLGEPPPPQEANPVYMCGEGGLRQLDLTWLRPTEPGSEGDYMVLPRRTLSLQPGGGGGGGEDAPRARPEGTPRRAAKTVAHTEGYPSFLSVDHSGLGLGPAYGSLQNPYGMTFQPPPPTPSARQVPEPGERSRTMPRTVPGSTMKMGSLERKKLRYSDLDFEKVMHTRKRHSELYHELNQKFHTFDRYRSQSTAKDKPSPGERPSLSQHRRHQSWSTFKSMTLGSLPPKPRERLTLHRAAAWEPTEPPDGDFQTEV

SEQ ID NO: 2940 - protein, 1499 aa, Homo sapiens
  Payload ID: 675;
  Gene Symbol: ADGRB2;
  Gene Name: adhesion G prt-coupled receptor B2;
  ENSP ID: ENSP00000381555
MTPACPLLLSVILSLRLATAFDPAPSACSALASGVLYGAFSLQDLFPTIASGCSWTLENPDPTKYSLYLRFNRQEQVCAHFAPRLLPLDHYLVNFTCLRPSPEEAVAQAESEVGRPEEEEAEAAAGLELCSGSGPFTFLHFDKNFVQLCLSAEPSEAPRLLAPAALAFRFVEVLLINNNNSSQFTCGVLCRWSEECGRAAGRACGFAQPGCSCPGEAGAGSTTTTSPGPPAAHTLSNALVPGGPAPPAEADLHSGSSNDLFTTEMRYGEEPEEEPKVKTQWPRSADEPGLYMAQTVHGVWEEWGSWSLCSRSCGRGSRSRMRTCVPPQHGGKACEGPELQTKLCSMAACPVEGQWLEWGPWGPCSTSCANGTQQRSRKCSVAGPAWATCTGALTDTRECSNLECPATDSKWGPWNAWSLCSKTCDTGWQRRFRMCQATGTQGYPCEGTGEEVKPCSEKRCPAFHEMCRDEYVMLMTWKKAAAGEIIYNKCPPNASGSASRRCLLSAQGVAYWGLPSFARCISHEYRYLYLSLREHLAKGQRMLAGEGMSQVVRSLQELLARRTYYSGDLLFSVDILRNVTDTFKRATYVPSADDVQRFFQVVSFMVDAENKEKWDDAQQVSPGSVHLLRVVEDFIHLVGDALKAFQSSLIVTDNLVISIQREPVSAVSSDITFPMRGRRGMKDWVRHSEDRLFLPKEVLSLSSPGKPATSGAAGSPGRGRGPGTVPPGPGHSHQRLLPADPDESSYFVIGAVLYRTLGLILPPPRPPLAVTSRVMTVTVRPPTQPPAEPLITVELSYIINGTTDPHCASWDYSRADASSGDWDTENCQTLETQAAHTRCQCQHLSTFAVLAQPPKDLTLELAGSPSVPLVIGCAVSCMALLTLLAIYAAFWRFIKSERSIILLNFCLSILASNILILVGQSRVLSKGVCTMTAAFLHFFFLSSFCWVLTEAWQSYLAVIGRMRTRLVRKRFLCLGWGLPALVVAVSVGFTRTKGYGTSSYCWLSLEGGLLYAFVGPAAVIVLVNMLIGIIVFNKLMARDGISDKSKKQRAGSERCPWASLLLPCSACGAVPSPLLSSASARNAMASLWSSCVVLPLLALTWMSAVLAMTDRRSVLFQALFAVFNSAQGFVITAVHCFLRREVQDVVKCQMGVCRADESEDSPDSCKNGQLQILSDFEKDVDLACQTVLFKEVNTCNPSTITGTLSRLSLDEDEEPKSCLVGPEGSLSFSPLPGNILVPMAASPGLGEPPPPQEANPVYMCGEGGLRQLDLTWLRPTEPGSEGDYMVLPRRTLSLQPGGGGGGGEDAPRARPEGTPRRAAKTVAHTEGYPSFLSVDHSGLGLGPAYGSLQNPYGMTFQPPPPTPSARQVPEPGERSRTMPRTVPGSTMKMGSLERKKLRYSDLDFEKVMHTRKRHSELYHELNQKFHTFDRYRSQSTAKDKPSPGERPSLSQHRRHQSWSTFKSMTLGSLPPKPRERLTLHRAAAWEPTEPPDGDFQTEV

SEQ ID NO: 2941 - protein, 1500 aa, Homo sapiens
  Payload ID: 675;
  Gene Symbol: ADGRB2;
  Gene Name: adhesion G prt-coupled receptor B2;
  ENSP ID: ENSP00000381564
MLSLRGPDTHGKGHRMTPACPLLLSVILSLRLATAFDPAPSACSALASGVLYGAFSLQDLFPTIASGCSWTLENPDPTKYSLYLRFNRQEQVCAHFAPRLLPLDHYLVNFTCLRPSPEEAVAQAESEVGRPEEEEAEAAAGLELCSGSGPFTFLHFDKNFVQLCLSAEPSEAPRLLAPAALAFRFVEVLLINNNNSSQFTCGVLCRWSEECGRAAGRACGFAQPGCSCPGEAGAGSTTTTSPGPPAAHTLSNALVPGGPAPPAEADLHSGSSNDLFTTEMRYGEEPEEEPKVKTQWPRSADEPGLYMAQTVHGVWEEWGSWSLCSRSCGRGSRSRMRTCVPPQHGGKACEGPELQTKLCSMAACPVEGQWLEWGPWGPCSTSCANGTQQRSRKCSVAGPAWATCTGALTDTRECSNLECPATDSKWGPWNAWSLCSKTCDTGWQRRFRMCQATGTQGYPCEGTGEEVKPCSEKRCPAFHEMCRDEYVMLMTWKKAAAGEIIYNKCPPNASGSASRRCLLSAQGVAYWGLPSFARCISHEYRYLYLSLREHLAKGQRMLAGEGMSQVVRSLQELLARRTYYSGDLLFSVDILRNVTDTFKRATYVPSADDVQRFFQVVSFMVDAENKEKWDDAQQVSPGSVHLLRVVEDFIHLVGDALKAFQSSLIVTDNLVISIQREPVSAVSSDITFPMRGRRGMKDWVRHSEDRLFLPKEVLSLSSPGKPATSGAAGSPGRGRGPGTVPPGPGHSHQRLLPADPDESSYFVIGAVLYRTLGLILPPPRPPLAVTSRVMTVTVRPPTQPPAEPLITVELSYIINGTTDPHCASWDYSRADASSGDWDTENCQTLETQAAHTRCQCQHLSTFAVLAQPPKDLTLELAGSPSVPLVIGCAVSCMALLTLLAIYAAFWRFIKSERSIILLNFCLSILASNILILVGQSRVLSKGVCTMTAAFLHFFFLSSFCWVLTEAWQSYLAVIGRMRTRLVRKRFLCLGWGLPALVVAVSVGFTRTKGYGTSSYCWLSLEGGLLYAFVGPAAVIVLVNMLIGIIVFNKLMARDGISDKSKKQRAGASLWSSCVVLPLLALTWMSAVLAMTDRRSVLFQALFAVFNSAQGFVITAVHCFLRREVQDVVKCQMGVCRADESEDSPDSCKNGQLQILSDFEKDVDLACQTVLFKEVNTCNPSTITGTLSRLSLDEDEEPKSCLVGPEGSLSFSPLPGNILVPMAASPGLGEPPPPQEANPVYMCGEGGLRQLDLTWLRPTEPGSEGDYMVLPRRTLSLQPGGGGGGGEDAPRARPEGTPRRAAKTVAHTEGYPSFLSVDHSGLGLGPAYGSLQNPYGMTFQPPPPTPSARQVPEPGERSRTMPRTVPGSTMKMGSLERKKLRYSDLDFEKVMHTRKRHSELYHELNQKFHTFDRYRSQSTAKREKRWSVSSGGAAERSVCTDKPSPGERPSLSQHRRHQSWSTFKSMTLGSLPPKPRERLTLHRAAAWEPTEPPDGDFQTEV

SEQ ID NO: 2942 - protein, 847 aa, Homo sapiens
  Payload ID: 675;
  Gene Symbol: ADGRB2;
  Gene Name: adhesion G prt-coupled receptor B2;
  ENSP ID: ENSP00000410921
GKGHRMTPACPLLLSVILSLRLATAFDPAPSACSALASGVLYGAFSLQDLFPTIASGCSWTLENPDPTKYSLYLRFNRQEQVCAHFAPRLLPLDHYLVNFTCLRPSPEEAVAQAESEVGRPEEEEAEAAAGLELCSGSGPFTFLHFDKNFVQLCLSAEPSEAPRLLAPAALAFRFVEVLLINNNNSSQFTCGVLCRWSEECGRAAGRACGFAQPGCSCPGEAGAGSTTTTSPGPPAAHTLSNALVPGGPAPPAEADLHSGSSNDLFTTEMRYGEEPEEEPKVKTQWPRSADEPGLYMAQTGDPAAEEWSPWSVCSLTCGQGLQVRTRSCVSSPYGTLCSGPLRETRPCNNSATCPVEGQWLEWGPWGPCSTSCANGTQQRSRKCSVAGPAWATCTGALTDTRECSNLECPATDSKWGPWNAWSLCSKTCDTGWQRRFRMCQATGTQGYPCEGTGEEVKPCSEKRCPAFHEMCRDEYVMLMTWKKAAAGEIIYNKCPPNASGSASRRCLLSAQGVAYWGLPSFARCISHEYRYLYLSLREHLAKGQRMLAGEGMSQVVRSLQELLARRTYYSGDLLFSVDILRNVTDTFKRATYVPSADDVQRFFQVVSFMVDAENKEKWDDAQQVSPGSVHLLRVVEDFIHLVGDALKAFQSSLIVTDNLVISIQREPVSAVSSDITFPMRGRRGMKDWVRHSEDRLFLPKEVLSLSSPGKPATSGAAGSPGRGRGPGTVPPGPGHSHQRLLPADPDESSYFVIGAVLYRTLGLILPPPRPPLAVTSRVMTVTVRPPTQPPAEPLITVELSYIINGTTDPHCASWDYSRADASSGDWDTENCQTLETQAAHTRCQCQ

SEQ ID NO: 2943 - protein, 1 aa, Homo sapiens
  Payload ID: 675;
  Gene Symbol: ADGRB2;
  Gene Name: adhesion G prt-coupled receptor B2;
  ENSP ID: ENSP00000414758
M

SEQ ID NO: 2944 - protein, 1551 aa, Homo sapiens
  Payload ID: 675;
  Gene Symbol: ADGRB2;
  Gene Name: adhesion G prt-coupled receptor B2;
  Uniprot ID:  O60241;
  ENSP ID: ENSP00000435397
MENTGWMGKGHRMTPACPLLLSVILSLRLATAFDPAPSACSALASGVLYGAFSLQDLFPTIASGCSWTLENPDPTKYSLYLRFNRQEQVCAHFAPRLLPLDHYLVNFTCLRPSPEEAVAQAESEVGRPEEEEAEAAAGLELCSGSGPFTFLHFDKNFVQLCLSAEPSEAPRLLAPAALAFRFVEVLLINNNNSSQFTCGVLCRWSEECGRAAGRACGFAQPGCSCPGEAGAGSTTTTSPGPPAAHTLSNALVPGGPAPPAEADLHSGSSNDLFTTEMRYGEEPEEEPKVKTQWPRSADEPGLYMAQTGDPAAEEWSPWSVCSLTCGQGLQVRTRSCVSSPYGTLCSGPLRETRPCNNSATCPVHGVWEEWGSWSLCSRSCGRGSRSRMRTCVPPQHGGKACEGPELQTKLCSMAACPVEGQWLEWGPWGPCSTSCANGTQQRSRKCSVAGPAWATCTGALTDTRECSNLECPATDSKWGPWNAWSLCSKTCDTGWQRRFRMCQATGTQGYPCEGTGEEVKPCSEKRCPAFHEMCRDEYVMLMTWKKAAAGEIIYNKCPPNASGSASRRCLLSAQGVAYWGLPSFARCISHEYRYLYLSLREHLAKGQRMLAGEGMSQVVRSLQELLARRTYYSGDLLFSVDILRNVTDTFKRATYVPSADDVQRFFQVVSFMVDAENKEKWDDAQQVSPGSVHLLRVVEDFIHLVGDALKAFQSSLIVTDNLVISIQREPVSAVSSDITFPMRGRRGMKDWVRHSEDRLFLPKEVLSLSSPGKPATSGAAGSPGRGRGPGTVPPGPGHSHQRLLPADPDESSYFVIGAVLYRTLGLILPPPRPPLAVTSRVMTVTVRPPTQPPAEPLITVELSYIINGTTDPHCASWDYSRADASSGDWDTENCQTLETQAAHTRCQCQHLSTFAVLAQPPKDLTLELAGSPSVPLVIGCAVSCMALLTLLAIYAAFWRFIKSERSIILLNFCLSILASNILILVGQSRVLSKGVCTMTAAFLHFFFLSSFCWVLTEAWQSYLAVIGRMRTRLVRKRFLCLGWGLPALVVAVSVGFTRTKGYGTSSYCWLSLEGGLLYAFVGPAAVIVLVNMLIGIIVFNKLMARDGISDKSKKQRAGASLWSSCVVLPLLALTWMSAVLAMTDRRSVLFQALFAVFNSAQGFVITAVHCFLRREVQDVVKCQMGVCRADESEDSPDSCKNGQLQILSDFEKDVDLACQTVLFKEVNTCNPSTITGTLSRLSLDEDEEPKSCLVGPEGSLSFSPLPGNILVPMAASPGLGEPPPPQEANPVYMCGEGGLRQLDLTWLRPTEPGSEGDYMVLPRRTLSLQPGGGGGGGEDAPRARPEGTPRRAAKTVAHTEGYPSFLSVDHSGLGLGPAYGSLQNPYGMTFQPPPPTPSARQVPEPGERSRTMPRTVPGSTMKMGSLERKKLRYSDLDFEVMHTRKRHSELYHELNQKFHTFDRYRSQSTAKREKRWSVSSGGAAERSVCTDKPSPGERPSLSQHRRHQSWSTFKSMTLGSLPPKPRERLTLHRAAAWEPTEPPDGDFQTEV

SEQ ID NO: 2945 - protein, 507 aa, Homo sapiens
  Payload ID: 675;
  Gene Symbol: ADGRB2;
  Gene Name: adhesion G prt-coupled receptor B2;
  ENSP ID: ENSP00000437219
MHLPRQHGSAHLGHLYAYAKFSAHDWHLHAQGHAICNAHGKGKGHRMTPACPLLLSVILSLRLATAFDPAPSACSALASGVLYGAFSLQDLFPTIASGCSWTLENPDPTKYSLYLRFNRQEQVCAHFAPRLLPLDHYLVNFTCLRPSPEEAVAQAESEVGRPEEEEAEAAAGLELCSGSGPFTFLHFDKNFVQLCLSAEPSEAPRLLAPAALAFRFVEVLLINNNNSSQFTCGVLCRWSEECGRAAGRACGFAQPGCSCPGEAGAGSTTTTSPGPPAAHTLSNALVPGGPAPPAEADLHSGSSNDLFTTEMRYGEEPEEEPKVKTQWPRSADEPGLYMAQTVHGVWEEWGSWSLCSRSCGRGSRSRMRTCVPPQHGGKACEGPELQTKLCSMAACPVEGQWLEWGPWGPCSTSCANGTQQRSRKCSVAGPAWATCTGALTDTRECSNLECPATDSKWGPWNAWSLCSKTCDTGWQRRFRMCQATGTQGYPCEGTGEEVKPCSEKRCP

SEQ ID NO: 2946 - protein, 728 aa, Homo sapiens
  Payload ID: 676;
  Gene Symbol: ADGRB3;
  Gene Name: adhesion G prt-coupled receptor B3;
  ENSP ID: ENSP00000238918
MLLPQGKEAVEGKKCQGRQRRAGLSEVWSRKLRNESLGTWSTQGCKTVLTDASHTKCLCDRLSTFAILAQQPREIIMESSGTPSVTLIVGSGLSCLALITLAVVYAALWRYIRSERSIILINFCLSIISSNILILVGQTQTHNKSICTTTTAFLHFFFLASFCWVLTEAWQSYMAVTGKIRTRLIRKRFLCLGWGLPALVVATSVGFTRTKGYGTDHYCWLSLEGGLLYAFVGPAAAVVLVNMVIGILVFNKLVSRDGILDKKLKHRAGQMSEPHSGLTLKCAKCGVVSTTALSATTASNAMASLWSSCVVLPLLALTWMSAVLAMTDKRSILFQILFAVFDSLQGFVIVMVHCILRREVQDAFRCRLRNCQDPINADSSSSFPNGHAQIMTDFEKDVDIACRSVLHKDIGPCRAATITGTLSRISLNDDEEEKGTNPEGLSYSTLPGNVISKVIIQQPTGLHMPMSMNELSNPCLKKENSELRRTVYLCTDDNLRGADMDIVHPQERMMESDYIVMPRSSVNNQPSMKEESKMNIGMETLPHERLLHYKVNPEFNMNPPVMDQFNMNLEQHLAPQEHMQNLPFEPRTAVKNFMASELDDNAGLSRSETGSTISMSSLERRKSRYSDLDFEKVMHTRKRHMELFQELNQKFQTLDRFRDIPNTSSMENPAPNKNPWDTFKNPSEYPHYTTINVLDTEAKDALELRPAEWEKCLNLPLDVQEGDFQTEV

SEQ ID NO: 2947 - protein, 1522 aa, Homo sapiens
  Payload ID: 676;
  Gene Symbol: ADGRB3;
  Gene Name: adhesion G prt-coupled receptor B3;
  Uniprot ID:  O60242;
  ENSP ID: ENSP00000359630
MKAVRNLLIYIFSTYLLVMFGFNAAQDFWCSTLVKGVIYGSYSVSEMFPKNFTNCTWTLENPDPTKYSIYLKFSKKDLSCSNFSLLAYQFDHFSHEKIKDLLRKNHSIMQLCNSKNAFVFLQYDKNFIQIRRVFPTNFPGLQKKGEEDQKSFFEFLVLNKVSPSQFGCHVLCTWLESCLKSENGRTESCGIMYTKCTCPQHLGEWGIDDQSLILLNNVVLPLNEQTEGCLTQELQTTQVCNLTREAKRPPKEEFGMMGDHTIKSQRPRSVHEKRVPQEQADAAKFMAQTGESGVEEWSQWSTCSVTCGQGSQVRTRTCVSPYGTHCSGPLRESRVCNNTALCPVHGVWEEWSPWSLCSFTCGRGQRTRTRSCTPPQYGGRPCEGPETHHKPCNIALCPVDGQWQEWSSWSQCSVTCSNGTQQRSRQCTAAAHGGSECRGPWAESRECYNPECTANGQWNQWGHWSGCSKSCDGGWERRIRTCQGAVITGQQCEGTGEEVRRCNEQRCPAPYEICPEDYLMSMVWKRTPAGDLAFNQCPLNATGTTSRRCSLSLHGVAFWEQPSFARCISNEYRHLQHSIKEHLAKGQRMLAGDGMSQVTKTLLDLTQRKNFYAGDLLMSVEILRNVTDTFKRASYIPASDGVQNFFQIVSNLLDEENKEKWEDAQQIYPGSIELMQVIEDFIHIVGMGMMDFQNSYLMTGNVVASIQKLPAASVLTDINFPMKGRKGMVDWARNSEDRVVIPKSIFTPVSSKELDESSVFVLGAVLYKNLDLILPTLRNYTVINSKIIVVTIRPEPKTTDSFLEIELAHLANGTLNPYCVLWDDSKTNESLGTWSTQGCKTVLTDASHTKCLCDRLSTFAILAQQPREIIMESSGTPSVTLIVGSGLSCLALITLAVVYAALWRYIRSERSIILINFCLSIISSNILILVGQTQTHNKSICTTTTAFLHFFFLASFCWVLTEAWQSYMAVTGKIRTRLIRKRFLCLGWGLPALVVATSVGFTRTKGYGTDHYCWLSLEGGLLYAFVGPAAAVVLVNMVIGILVFNKLVSRDGILDKKLKHRAGQMSEPHSGLTLKCAKCGVVSTTALSATTASNAMASLWSSCVVLPLLALTWMSAVLAMTDKRSILFQILFAVFDSLQGFVIVMVHCILRREVQDAFRCRLRNCQDPINADSSSSFPNGHAQIMTDFEKDVDIACRSVLHKDIGPCRAATITGTLSRISLNDDEEEKGTNPEGLSYSTLPGNVISKVIIQQPTGLHMPMSMNELSNPCLKKENSELRRTVYLCTDDNLRGADMDIVHPQERMMESDYIVMPRSSVNNQPSMKEESKMNIGMETLPHERLLHYKVNPEFNMNPPVMDQFNMNLEQHLAPQEHMQNLPFEPRTAVKNFMASELDDNAGLSRSETGSTISMSSLERRKSRYSDLDFEKVMHTRKRHMELFQELNQKFQTLDRFRDIPNTSSMENPAPNKNPWDTFKNPSEYPHYTTINVLDTEAKDALELRPAEWEKCLNLPLDVQEGDFQTEV

SEQ ID NO: 2948 - protein, 1522 aa, Homo sapiens; identical to SEQ ID NO: 2947
  Payload ID: 676;
  Gene Symbol: ADGRB3;
  Gene Name: adhesion G prt-coupled receptor B3;
  Uniprot ID:  O60242;
  ENSP ID: ENSP00000441821

SEQ ID NO: 2949 - protein, 145 aa, Homo sapiens
  Payload ID: 676;
  Gene Symbol: ADGRB3;
  Gene Name: adhesion G prt-coupled receptor B3;
  ENSP ID: ENSP00000473827
MHLNYILFNNKNESLGTWSTQGCKTVLTDASHTKCLCDRLSTFAILAQQPREIIMESSGTPSVTLIVGSGLSCLALITLAVVYAALWRYIRSERSIILINFCLSIISSNILILVGQTQTHNKSICTTTTAFLHFFFLASFCWVLT

SEQ ID NO: 2950 - protein, 68 aa, Homo sapiens
  Payload ID: 676;
  Gene Symbol: ADGRB3;
  Gene Name: adhesion G prt-coupled receptor B3;
  ENSP ID: ENSP00000474165
MESSGTPSVTLIVGSGLSCLALITLAVVYAALWRYIRSERSIILINFCLSIISSNILILVGQTQTHNK

SEQ ID NO: 2951 - protein, 874 aa, Homo sapiens
  Payload ID: 677;
  Gene Symbol: ADGRD1;
  Gene Name: adhesion G prt-coupled receptor D1;
  Uniprot ID:  Q6QNK2;
  ENSP ID: ENSP00000261654
MEKLLRLCCWYSWLLLFYYNFQVRGVYSRSQDHPGFQVLASASHYWPLENVDGIHELQDTTGDIVEGKVNKGIYLKEEKGVTLLYYGRYNSSCISKPEQCGPEGVTFSFFWKTQGEQSRPIPSAYGGQVISNGFKVCSSGGRGSVELYTRDNSMTWEASFSPPGPYWTHVLFTWKSKEGLKVYVNGTLSTSDPSGKVSRDYGESNVNLVIGSEQDQAKCYENGAFDEFIIWERALTPDEIAMYFTAAIGKHALLSSTLPSLFMTSTASPVMPTDAYHPIITNLTEERKTFQSPGVILSYLQNVSLSLPSKSLSEQTALNLTKTFLKAVGEILLLPGWIALSEDSAVVLSLIDTIDTVMGHVSSNLHGSTPQVTVEGSSAMAEFSVAKILPKTVNSSHYRFPAHGQSFIQIPHEAFHRHAWSTVVGLLYHSMHYYLNNIWPAHTKIAEAMHHQDCLLFATSHLISLEVSPPPTLSQNLSGSPLITVHLKHRLTRKQHSEATNSSNRVFVYCAFLDFSSGEGVWSNHGCALTRGNLTYSVCRCTHLTNFAILMQVVPLELARGHQVALSSISYVGCSLSVLCLVATLVTFAVLSSVSTIRNQRYHIHANLSFAVLVAQVLLLISFRLEPGTTPCQVMAVLLHYFFLSAFAWMLVEGLHLYSMVIKVFGSEDSKHRYYYGMGWGFPLLICIISLSFAMDSYGTSNNCWLSLASGAIWAFVAPALFVIVVNIGILIAVTRVISQISADNYKIHGDPSAFKLTAKAVAVLLPILGTSWVFGVLAVNGCAVVFQYMFATLNSLQGLFIFLFHCLLNSEVRAAFKHKTKVWSLTSSSARTSNAKPFHSDLMNGTRPGMASTKLSPWDKSSHSAHRVDLSAV

SEQ ID NO: 2952 - protein, 156 aa, Homo sapiens
  Payload ID: 677;
  Gene Symbol: ADGRD1;
  Gene Name: adhesion G prt-coupled receptor D1;
  ENSP ID: ENSP00000334127
MQVVPLEVNIGILIAVTRVISQISADNYKIHGDPSAFKLTAKAVAVLLPILGTSWVFGVLAVNGCAVVFQYMFATLNSLQGLFIFLFHCLLNSEVRAAFKHKTKVWSLTSSSARTSNAKPFHSDLMNGTRPGMASTKLSPWDKSSHSAHRVDLSAV

SEQ ID NO: 2953 - protein, 393 aa, Homo sapiens
  Payload ID: 677;
  Gene Symbol: ADGRD1;
  Gene Name: adhesion G prt-coupled receptor D1;
  Uniprot ID:  Q6QNK2;
  ENSP ID: ENSP00000438021
MHRVCFLSFQTRKQHSEATNSSNRVFVYCAFLDFSSGEGVWSNHGCALTRGNLTYSVCRCTHLTNFAILMQVVPLELARGHQVALSSISYVGCSLSVLCLVATLVTFAVLSSVSTIRNQRYHIHANLSFAVLVAQVLLLISFRLEPGTTPCQVMAVLLHYFFLSAFAWMLVEGLHLYSMVIKVFGSEDSKHRYYYGMGWGFPLLICIISLSFAMDSYGTSNNCWLSLASGAIWAFVAPALFVIVVNIGILIAVTRVISQISADNYKIHGDPSAFKLTAKAVAVLLPILGTSWVFGVLAVNGCAVVFQYMFATLNSLQGLFIFLFHCLLNSEVRAAFKHKTKVWSLTSSSARTSNAKPFHSDLMNGTRPGMASTKLSPWDKSSHSAHRVDLSAV

SEQ ID NO: 2954 - protein, 220 aa, Homo sapiens
  Payload ID: 677;
  Gene Symbol: ADGRD1;
  Gene Name: adhesion G prt-coupled receptor D1;
  ENSP ID: ENSP00000442501
MEKLLRLCCWYSWLLLFYYNFQVRGVYSRSQDHPGFQVLASASHYWPLENVDGIHELQDTTGDIVEGKVNKGIYLKEEKGVTLLYYGRYNSSCISKPEQCGPEGPYWTHVLFTWKSKEGLKVYVNGTLSTSDPSGKVSRDYGESNVNLVIGSEQDQAKCYENGAFDEFIIWERALTPDEIAMYFTAAIGKHALLSSTLPSLFMTSTASPVMPTDAYHPII

SEQ ID NO: 2955 - protein, 906 aa, Homo sapiens
  Payload ID: 677;
  Gene Symbol: ADGRD1;
  Gene Name: adhesion G prt-coupled receptor D1;
  Uniprot ID:  Q6QNK2;
  ENSP ID: ENSP00000444425
MEKLLRLCCWYSWLLLFYYNFQVRGVYSRSQDHPGFQVLASASHYWPLENVDGIHELQDTTGASRTHKLTVLPSRNATFVYSNDSAYSNLSATVDIVEGKVNKGIYLKEEKGVTLLYYGRYNSSCISKPEQCGPEGVTFSFFWKTQGEQSRPIPSAYGGQVISNGFKVCSSGGRGSVELYTRDNSMTWEASFSPPGPYWTHVLFTWKSKEGLKVYVNGTLSTSDPSGKVSRDYGESNVNLVIGSEQDQAKCYENGAFDEFIIWERALTPDEIAMYFTAAIGKHALLSSTLPSLFMTSTASPVMPTDAYHPIITNLTEERKTFQSPGVILSYLQNVSLSLPSKSLSEQTALNLTKTFLKAVGEILLLPGWIALSEDSAVVLSLIDTIDTVMGHVSSNLHGSTPQVTVEGSSAMAEFSVAKILPKTVNSSHYRFPAHGQSFIQIPHEAFHRHAWSTVVGLLYHSMHYYLNNIWPAHTKIAEAMHHQDCLLFATSHLISLEVSPPPTLSQNLSGSPLITVHLKHRLTRKQHSEATNSSNRVFVYCAFLDFSSGEGVWSNHGCALTRGNLTYSVCRCTHLTNFAILMQVVPLELARGHQVALSSISYVGCSLSVLCLVATLVTFAVLSSVSTIRNQRYHIHANLSFAVLVAQVLLLISFRLEPGTTPCQVMAVLLHYFFLSAFAWMLVEGLHLYSMVIKVFGSEDSKHRYYYGMGWGFPLLICIISLSFAMDSYGTSNNCWLSLASGAIWAFVAPALFVIVVNIGILIAVTRVISQISADNYKIHGDPSAFKLTAKAVAVLLPILGTSWVFGVLAVNGCAVVFQYMFATLNSLQGLFIFLFHCLLNSEVRAAFKHKTKVWSLTSSSARTSNAKPFHSDLMNGTRPGMASTKLSPWDKSSHSAHRVDLSAV

SEQ ID NO: 2956 - protein, 345 aa, Homo sapiens
  Payload ID: 677;
  Gene Symbol: ADGRD1;
  Gene Name: adhesion G prt-coupled receptor D1;
  ENSP ID: ENSP00000482235
MQVVPLELARGHQVALSSISYVGCSLSVLCLVATLVTFAVLSSVSTIRNQRYHIHANLSFAVLVAQVLLLISFRLEPGTTPCQVMAVLLHYFFLSAFAWMLVEGLHLYSMVIKVFGSEDSKHRYYYGMGWGFPLLICIISLSFAMDSYGTSNNCWLSLASGAIWAFVAPALFVIVVNIGILIAVTRVISQISADNYKIHGDPSAFKLTAKAVAVLLPILGTSWVFGVLAVNGCAVVFQYMFATLNSLQGLFIFLFHCLLNSEARWAKEGRAESLSRMVAGQKGCMITKPSDPLIATPSDPLQGLRWIPVAGRQCSHGSPPAHPPACPPRICLFASLSHSPRDIHC

SEQ ID NO: 2957 - protein, 972 aa, Homo sapiens
  Payload ID: 678;
  Gene Symbol: ADGRD2;
  Gene Name: adhesion G prt-coupled receptor D2;
  Uniprot ID:  Q7Z7M1;
  ENSP ID: ENSP00000335156
  MOD_RES (1)..(1): Any amino acid
XSGVSLGPPPTPQVNQGTLGPQVAPVAAGEVVKTAGGVCKFSGQRLSWWQAQESCEQQFGHLALQPPDGVLASRLRDPVWVGQREAPLRRPPQRRARTTAVLVFDERTADRAARLRSPLPELAALTACTHVQWDCASPDPAALFSVAAPALPNALQLRAFAEPGGVVRAALVVRGQHAPFLAAFRADGRWHHVCATWEQRGGRWALFSDGRRRAGARGLGAGHPVPSGGILVLGQDQDSLGGGFSVRHALSGNLTDFHLWARALSPAQLHRARACAPPSEGLLFRWDPGALDVTPSLLPTVWVRLLCPVPSEECPTWNPGPRSEGSELCLEPQPFLCCYRTEPYRRLQDAQSWPGQDVISRVNALANDIVLLPDPLSEVHGALSPAEASSFLGLLEHVLAMEMAPLGPAALLAVVRFLKRVVALGAGDPELLLTGPWEQLSQGVVSVASLVLEEQVADTWLSLREVIGGPMALVASVQRLAPLLSTSMTSERPRMRIQHRHAGLEVRSLRLREASTRGCLFTMPGGRPEGPGHIHIPASEVRRLLRKGLSGVTVIHSWFTSRVFQHTLEGPDLEPQAPASSEEANRVQRFLSTQVGSAIISSEVWDVTGEVNVAMTFHLQHRAQSPLFPPHPPSPYTGGAWATTGCSVAALYLDSTACFCNHSTSFAILLQIYEVQRGPEEESLLRTLSFVGCGVSFCALTTTFLLFLVAGVPKSERTTVHKNLTFSLASAEGFLMTSEWAKANEVACVAVTVAMHFLFLVAFSWMLVEGLLLWRKVVAVSMHPGPGMRLYHATGWGVPVGIVAVTLAMLPHDYVAPGHCWLNVHTNAIWAFVGPVLFVLTANTCILARVVMITVSSARRRARMLSPQPCLQQQIWTQIWATVKPVLVLLPVLGLTWLAGILVHLSPAWAYAAVGLNSIQGLYIFLVYAACNEEVRSALQRMAEKKVAEGPMALELPQHSPPLQTRRDRLWN

SEQ ID NO: 2958 - protein, 41 aa, Homo sapiens
  Payload ID: 678;
  Gene Symbol: ADGRD2;
  Gene Name: adhesion G prt-coupled receptor D2;
  ENSP ID: ENSP00000480501
FLVAFSWMLVEGLLLWRKVVAVSMHPGPGMRLYHATGWGPR

SEQ ID NO: 2959 - protein, 821 aa, Homo sapiens
  Payload ID: 679;
  Gene Symbol: ADGRE1;
  Gene Name: adhesion G prt-coupled receptor E1;
  Uniprot ID:  Q14246;
  ENSP ID: ENSP00000250572
MRGFNLLLFWGCCVMHSWEGHIRPTRKPNTKGNNCRDSTLCPAYATCTNTVDSYYCACKQGFLSSNGQNHFKDPGVRCKDIDECSQSPQPCGPNSSCKNLSGRYKCSCLDGFSSPTGNDWVPGKPGNFSCTDINECLTSSVCPEHSDCVNSMGSYSCSCQVGFISRNSTCEDVDECADPRACPEHATCNNTVGNYSCFCNPGFESSSGHLSFQGLKASCEDIDECTEMCPINSTCTNTPGSYFCTCHPGFAPSNGQLNFTDQGVECRDIDECRQDPSTCGPNSICTNALGSYSCGCIAGFHPNPEGSQKDGNFSCQRVLFKCKEDVIPDNKQIQQCQEGTAVKPAYVSFCAQINNIFSVLDKVCENKTTVVSLKNTTESFVPVLKQISTWTKFTKEETSSLATVFLESVESMTLASFWKPSANITPAVRTEYLDIESKVINKECSEENVTLDLVAKGDKMKIGCSTIEESESTETTGVAFVSFVGMESVLNERFFKDHQAPLTTSEIKLKMNSRVVGGIMTGEKKDGFSDPIIYTLENIQPKQKFERPICVSWSTDVKGGRWTSFGCVILEASETYTICSCNQMANLAVIMASGELTMGCAIIAGFLHYLFLACFFWMLVEAVILFLMVRNLKVVNYFSSRNIKMLHICAFGYGLPMLVVVISASVQPQGYGMHNRCWLNTETGFIWSFLGPVCTVIVINSLLLTWTLWILRQRLSSVNAEVSTLKDTRLLTFKAFAQLFILGCSWVLGIFQIGPVAGVMAYLFTIINSLQGAFIFLIHCLLNGQVREEYKRWITGKTKPSSQSQTSRILLSSMPSASKTG

SEQ ID NO: 2960 - protein, 886 aa, Homo sapiens
  Payload ID: 679;
  Gene Symbol: ADGRE1;
  Gene Name: adhesion G prt-coupled receptor E1;
  Uniprot ID:  Q14246;
  ENSP ID: ENSP00000311545
MRGFNLLLFWGCCVMHSWEGHIRPTRKPNTKGNNCRDSTLCPAYATCTNTVDSYYCACKQGFLSSNGQNHFKDPGVRCKDIDECSQSPQPCGPNSSCKNLSGRYKCSCLDGFSSPTGNDWVPGKPGNFSCTDINECLTSSVCPEHSDCVNSMGSYSCSCQVGFISRNSTCEDVDECADPRACPEHATCNNTVGNYSCFCNPGFESSSGHLSFQGLKASCEDIDECTEMCPINSTCTNTPGSYFCTCHPGFAPSNGQLNFTDQGVECRDIDECRQDPSTCGPNSICTNALGSYSCGCIAGFHPNPEGSQKDGNFSCQRVLFKCKEDVIPDNKQIQQCQEGTAVKPAYVSFCAQINNIFSVLDKVCENKTTVVSLKNTTESFVPVLKQISTWTKFTKEETSSLATVFLESVESMTLASFWKPSANITPAVRTEYLDIESKVINKECSEENVTLDLVAKGDKMKIGCSTIEESESTETTGVAFVSFVGMESVLNERFFKDHQAPLTTSEIKLKMNSRVVGGIMTGEKKDGFSDPIIYTLENIQPKQKFERPICVSWSTDVKGGRWTSFGCVILEASETYTICSCNQMANLAVIMASGELTMDFSLYIISHVGIIISLVCLVLAIATFLLCRSIRNHNTYLHLHLCVCLLLAKTLFLAGIHKTDNKMGCAIIAGFLHYLFLACFFWMLVEAVILFLMVRNLKVVNYFSSRNIKMLHICAFGYGLPMLVVVISASVQPQGYGMHNRCWLNTETGFIWSFLGPVCTVIVINSLLLTWTLWILRQRLSSVNAEVSTLKDTRLLTFKAFAQLFILGCSWVLGIFQIGPVAGVMAYLFTIINSLQGAFIFLIHCLLNGQVREEYKRWITGKTKPSSQSQTSRILLSSMPSASKTG

SEQ ID NO: 2961 - protein, 867 aa, Homo sapiens
  Payload ID: 679;
  Gene Symbol: ADGRE1;
  Gene Name: adhesion G prt-coupled receptor E1;
  Uniprot ID:  Q14246;
  ENSP ID: ENSP00000370811
MRGFNLLLFWGCCVMHSWEGHIRPTRKPNTKGNNCRDSTLCPAYATCTNTVDSYYCACKQGFLSSNGQNHFKDPGVRCKDINECLTSSVCPEHSDCVNSMGSYSCSCQVGFISRNSTCEDVDECADPRACPEHATCNNTVGNYSCFCNPGFESSSGHLSFQGLKASCEDIDECTEMCPINSTCTNTPGSYFCTCHPGFAPSNGQLNFTDQGVECRDIDECRQDPSTCGPNSICTNALGSYSCGCIAGFHPNPEGSQKDGNFSCQRVLFKCKEDVIPDNKQIQQCQEGTAVKPAYVSFCAQINNIFSVLDKVCENKTTVVSLKNTTESFVPVLKQISTWTKFTKEETSSLATVFLESVESMTLASFWKPSANITPAVRTEYLDIESKVINKECSEENVTLDLVAKGDKMKIGCSTIEESESTETTGVAFVSFVGMESVLNERFFKDHQAPLTTSEIKLKMNSRVVGGIMTGEKKDGFSDPIIYTLENIQPKQKFERPICVSWSTDVKGGRWTSFGCVILEASETYTICSCNQMANLAVIMASGELTMDFSLYIISHVGIIISLVCLVLAIATFLLCRSIRNHNTYLHLHLCVCLLLAKTLFLAGIHKTDNKMGCAIIAGFLHYLFLACFFWMLVEAVILFLMVRNLKVVNYFSSRNIKMLHICAFGYGLPMLVVVISASVQPQGYGMHNRCWLNTETGFIWSFLGPVCTVIVVSKYYNSLAKCVLKEEQGDLRDLEFPGTCAAERINSLLLTWTLWILRQRLSSVNAEVSTLKDTRLLTFKAFAQLFILGCSWVLGIFQIGPVAGVMAYLFTIINSLQGAFIFLIHCLLNGQVREEYKRWITGKTKPSSQSQTSRILLSSMPSASKTG

SEQ ID NO: 2962 - protein, 745 aa, Homo sapiens
  Payload ID: 679;
  Gene Symbol: ADGRE1;
  Gene Name: adhesion G prt-coupled receptor E1;
  Uniprot ID:  Q14246;
  ENSP ID: ENSP00000370814
MRGFNLLLFWGCCVMHSWEGHIRPTRKPNTKGNNCRDSTLCPAYATCTNTVDSYYCACKQGFLSSNGQNHFKDPGVRCKDIDECTEMCPINSTCTNTPGSYFCTCHPGFAPSNGQLNFTDQGVECRDIDECRQDPSTCGPNSICTNALGSYSCGCIAGFHPNPEGSQKDGNFSCQRVLFKCKEDVIPDNKQIQQCQEGTAVKPAYVSFCAQINNIFSVLDKVCENKTTVVSLKNTTESFVPVLKQISTWTKFTKEETSSLATVFLESVESMTLASFWKPSANITPAVRTEYLDIESKVINKECSEENVTLDLVAKGDKMKIGCSTIEESESTETTGVAFVSFVGMESVLNERFFKDHQAPLTTSEIKLKMNSRVVGGIMTGEKKDGFSDPIIYTLENIQPKQKFERPICVSWSTDVKGGRWTSFGCVILEASETYTICSCNQMANLAVIMASGELTMDFSLYIISHVGIIISLVCLVLAIATFLLCRSIRNHNTYLHLHLCVCLLLAKTLFLAGIHKTDNKMGCAIIAGFLHYLFLACFFWMLVEAVILFLMVRNLKVVNYFSSRNIKMLHICAFGYGLPMLVVVISASVQPQGYGMHNRCWLNTETGFIWSFLGPVCTVIVINSLLLTWTLWILRQRLSSVNAEVSTLKDTRLLTFKAFAQLFILGCSWVLGIFQIGPVAGVMAYLFTIINSLQGAFIFLIHCLLNGQVREEYKRWITGKTKPSSQSQTSRILLSSMPSASKTG

SEQ ID NO: 2963 - protein, 709 aa, Homo sapiens
  Payload ID: 679;
  Gene Symbol: ADGRE1;
  Gene Name: adhesion G prt-coupled receptor E1;
  Uniprot ID:  Q14246;
  ENSP ID: ENSP00000405974
MRGFNLLLFWGCCVMHSWEGHIRPTRKPNTKGNNCRDSTLCPAYATCTNTVDSYYCACKQGFLSSNGQNHFKDPGVRCKDIDECSQSPQPCGPNSSCKNLSGRYKCSCLDGFSSPTGNDWVPGKPGNFSCTDINECLTSRVLFKCKEDVIPDNKQIQQCQEGTAVKPAYVSFCAQINNIFSVLDKVCENKTTVVSLKNTTESFVPVLKQISTWTKFTKEETSSLATVFLESVESMTLASFWKPSANITPAVRTEYLDIESKVINKECSEENVTLDLVAKGDKMKIGCSTIEESESTETTGVAFVSFVGMESVLNERFFKDHQAPLTTSEIKLKMNSRVVGGIMTGEKKDGFSDPIIYTLENIQPKQKFERPICVSWSTDVKGGRWTSFGCVILEASETYTICSCNQMANLAVIMASGELTMDFSLYIISHVGIIISLVCLVLAIATFLLCRSIRNHNTYLHLHLCVCLLLAKTLFLAGIHKTDNKMGCAIIAGFLHYLFLACFFWMLVEAVILFLMVRNLKVVNYFSSRNIKMLHICAFGYGLPMLVVVISASVQPQGYGMHNRCWLNTETGFIWSFLGPVCTVIVINSLLLTWTLWILRQRLSSVNAEVSTLKDTRLLTFKAFAQLFILGCSWVLGIFQIGPVAGVMAYLFTIINSLQGAFIFLIHCLLNGQVREEYKRWITGKTKPSSQSQTSRILLSSMPSASKTG

SEQ ID NO: 2964 - protein, 318 aa, Homo sapiens
  Payload ID: 679;
  Gene Symbol: ADGRE1;
  Gene Name: adhesion G prt-coupled receptor E1;
  ENSP ID: ENSP00000472553
CRDSTLCPAYATCTNTVDSYYCACKQGFLSSNGQNHFKDPGVRCKDIDECSQSPQPCGPNSSCKNLSGRYKCSCLDGFSSPTGNDWVPGKPGNFSCTDINECLTSSVCPEHSDCVNSMGSYSCSCQVGFISRNSTCEDVDECADPRACPEHATCNNTVGNYSCFCNPGFESSSGHLSFQGLKASCEDIDECTEMCPINSTCTNTPGSYFCTCHPGFAPSNGQLNFTDQGVECRGVLFKCKEDVIPDNKQIQQCQEGTAVKPAYVSFCAQINNIFSVLDKVCENKTTVVSLKNTTESFVPVLKQISTWTKFTKEETSSL

SEQ ID NO: 2965 - protein, 823 aa, Homo sapiens
  Payload ID: 680;
  Gene Symbol: ADGRE2;
  Gene Name: adhesion G prt-coupled receptor E2;
  Uniprot ID:  Q9UHX3;
  ENSP ID: ENSP00000319883
MGGRVFLVFLAFCVWLTLPGAETQDSRGCARWCPQDSSCVNATACRCNPGFSSFSEIITTPMETCDDINECATLSKVSCGKFSDCWNTEGSYDCVCSPGYEPVSGAKTFKNESENTCQDVDECQQNPRLCKSYGTCVNTLGSYTCQCLPGFKLKPEDPKLCTDVNECTSGQNPCHSSTHCLNNVGSYQCRCRPGWQPIPGSPNGPNNTVCEDVDECSSGQHQCDSSTVCFNTVGSYSCRCRPGWKPRHGIPNNQKDTVCEDMTFSTWTPPPGVHSQTLSRFFDKVQDLGRDYKPGLANNTIQSILQALDELLEAPGDLETLPRLQQHCVASHLLDGLEDVLRGLSKNLSNGLLNFSYPAGTELSLEVQKQVDRSVTLRQNQAVMQLDWNQAQKSGDPGPSVVGLVSIPGMGKLLAEAPLVLEPEKQMLLHETHQGLLQDGSPILLSDVISAFLSNNDTQNLSSPVTFTFSHRSVIPRQKVLCVFWEHGQNGCGHWATTGCSTIGTRDTSTICRCTHLSSFAVLMAHYDVQEEDPVLTVITYMGLSVSLLCLLLAALTFLLCKAIQNTSTSLHLQLSLCLFLAHLLFLVAIDQTGHKVLCSIIAGTLHYLYLATLTWMLLEALYLFLTARNLTVVNYSSINRFMKKLMFPVGYGVPAVTVAISAASRPHLYGTPSRCWLQPEKGFIWGFLGPVCAIFSVNLVLFLVTLWILKNRLSSLNSEVSTLRNTRMLAFKATAQLFILGCTWCLGILQVGPAARVMAYLFTIINSLQGVFIFLVYCLLSQQVREQYGKWSKGIRKLKTESEMHTLSSSAKADTSKPSTVN

SEQ ID NO: 2966 - protein, 379 aa, Homo sapiens
  Payload ID: 680;
  Gene Symbol: ADGRE2;
  Gene Name: adhesion G prt-coupled receptor E2;
  ENSP ID: ENSP00000376689
MGGRVFLVFLAFCVWLTLPGAETQDSRGCARWCPQDSSCVNATACRCNPGFSSFSEIITTPMETCDDINECATLSKVSCGKFSDCWNTEGSYDCVCSPGYEPVSGAKTFKNESENTCQDVDECQQNPRLCKSYGTCVNTLGSYTCQCLPGFKLKPEDPKLCTDVDECSSGQHQCDSSTVCFNTVGSYSCRCRPGWKPRHGIPNNQKDTVCEDMTFSTWTPPPGVHSQTLSRFFDKVQDLGRDYKPGLANNTIQSILQALDELLEAPGDLETLPRLQQHCVASHLLDGLEDVLRGLSKNLSNGLLNFSYPAGTELSLEVQKQVDRSVTLRQNQAVMQLDWNQAQKSGDPGGGSRADCHHLHGAERLSAVPPPGGPHFSPV

SEQ ID NO: 2967 - protein, 765 aa, Homo sapiens
  Payload ID: 680;
  Gene Symbol: ADGRE2;
  Gene Name: adhesion G prt-coupled receptor E2;
  Uniprot ID:  Q9UHX3;
  ENSP ID: ENSP00000376692
MGGRVFLVFLAFCVWLTLPGAETQDSRGCARWCPQDSSCVNATACRCNPGFSSFSEIITTPMETCDDINECATLSKVSCGKFSDCWNTEGSYDCVCSPGYEPVSGAKTFKNESENTCQDVDECQQNPRLCKSYGTCVNTLGSYTCQCLPGFKLKPEDPKLCTDVNECTSGQNPCHSSTHCLNNVGSYQCRCRPGWQPIPGSPNGPNNTVCEDVDECSSGQHQCDSSTVCFNTVGSYSCRCRPGWKPRHGIPNNQKDTVCEDMTFSTWTPPPGVHSQTLSRFFDKVQDLGRDYKPGLANNTIQSILQALDELLEAPGDLETLPRLQQHCVASHLLDGLEDVLRGLSKNLSNGLLNFSYPAGTELSLEVQKQVDRSVTLRQNQAVMQLDWNQAQKSGDPGPSVVGLVSIPGMGKLLAEAPLVLEPEKQMLLHETHQGLLQDGSPILLSDVISAFLSNNDTQNLSSPVTFTFSHREEDPVLTVITYMGLSVSLLCLLLAALTFLLCKAIQNTSTSLHLQLSLCLFLAHLLFLVAIDQTGHKVLCSIIAGTLHYLYLATLTWMLLEALYLFLTARNLTVVNYSSINRFMKKLMFPVGYGVPAVTVAISAASRPHLYGTPSRCWLQPEKGFIWGFLGPVCAIFSVNLVLFLVTLWILKNRLSSLNSEVSTLRNTRMLAFKATAQLFILGCTWCLGILQVGPAARVMAYLFTIINSLQGVFIFLVYCLLSQQVREQYGKWSKGIRKLKTESEMHTLSSSAKADTSKPSTVN

SEQ ID NO: 2968 - protein, 681 aa, Homo sapiens
  Payload ID: 680;
  Gene Symbol: ADGRE2;
  Gene Name: adhesion G prt-coupled receptor E2;
  Uniprot ID:  Q9UHX3;
  ENSP ID: ENSP00000469277
MGGRVFLVFLAFCVWLTLPGAETQDSRGCARWCPQDSSCVNATACRCNPGFSSFSEIITTPMETCDDINECATLSKVSCGKFSDCWNTEGSYDCVCSPGYEPVSGAKTFKNESENTCQDMTFSTWTPPPGVHSQTLSRFFDKVQDLGRDYKPGLANNTIQSILQALDELLEAPGDLETLPRLQQHCVASHLLDGLEDVLRGLSKNLSNGLLNFSYPAGTELSLEVQKQVDRSVTLRQNQAVMQLDWNQAQKSGDPGPSVVGLVSIPGMGKLLAEAPLVLEPEKQMLLHETHQGLLQDGSPILLSDVISAFLSNNDTQNLSSPVTFTFSHRSVIPRQKVLCVFWEHGQNGCGHWATTGCSTIGTRDTSTICRCTHLSSFAVLMAHYDVQEEDPVLTVITYMGLSVSLLCLLLAALTFLLCKAIQNTSTSLHLQLSLCLFLAHLLFLVAIDQTGHKVLCSIIAGTLHYLYLATLTWMLLEALYLFLTARNLTVVNYSSINRFMKKLMFPVGYGVPAVTVAISAASRPHLYGTPSRCWLQPEKGFIWGFLGPVCAIFSVNLVLFLVTLWILKNRLSSLNSEVSTLRNTRMLAFKATAQLFILGCTWCLGILQVGPAARVMAYLFTIINSLQGVFIFLVYCLLSQQVREQYGKWSKGIRKLKTESEMHTLSSSAKADTSKPSTVN

SEQ ID NO: 2969 - protein, 330 aa, Homo sapiens
  Payload ID: 680;
  Gene Symbol: ADGRE2;
  Gene Name: adhesion G prt-coupled receptor E2;
  ENSP ID: ENSP00000469605
  MOD_RES (1)..(1): Any amino acid
XFKNESENTCQDVDECQQNPRLCKSYGTCVNTLGSYTCQCLPGFKLKPEDPKLCTDVDECSSGQHQCDSSTVCFNTVGSYSCRCRPGWKPRHGIPNNQKDTVCEDMTFSTWTPPPGVHSQTLSRFFDKVQDLGRDYKPGLANNTIQSILQALDELLEAPGDLETLPRLQQHCVASHLLDGLEDVLRGLSKNLSNGLLNFSYPAGTELSLEVQKQVDRSVTLRQNQAVMQLDWNQAQKSGDPVSDPETEGALCLLGAWPEWMWSLGHHRLQHNRHQRHQHHLPLHPPEQLCRPHGPLRCAGGGSRADCHHLHGAERLSAVPPPGGPHFSPV

SEQ ID NO: 2970 - protein, 774 aa, Homo sapiens
  Payload ID: 680;
  Gene Symbol: ADGRE2;
  Gene Name: adhesion G prt-coupled receptor E2;
  Uniprot ID:  Q9UHX3;
  ENSP ID: ENSP00000470725
MGGRVFLVFLAFCVWLTLPGAETQDSRGCARWCPQDSSCVNATACRCNPGFSSFSEIITTPMETCDDINECATLSKVSCGKFSDCWNTEGSYDCVCSPGYEPVSGAKTFKNESENTCQDVDECQQNPRLCKSYGTCVNTLGSYTCQCLPGFKLKPEDPKLCTDVDECSSGQHQCDSSTVCFNTVGSYSCRCRPGWKPRHGIPNNQKDTVCEDMTFSTWTPPPGVHSQTLSRFFDKVQDLGRDYKPGLANNTIQSILQALDELLEAPGDLETLPRLQQHCVASHLLDGLEDVLRGLSKNLSNGLLNFSYPAGTELSLEVQKQVDRSVTLRQNQAVMQLDWNQAQKSGDPGPSVVGLVSIPGMGKLLAEAPLVLEPEKQMLLHETHQGLLQDGSPILLSDVISAFLSNNDTQNLSSPVTFTFSHRSVIPRQKVLCVFWEHGQNGCGHWATTGCSTIGTRDTSTICRCTHLSSFAVLMAHYDVQEEDPVLTVITYMGLSVSLLCLLLAALTFLLCKAIQNTSTSLHLQLSLCLFLAHLLFLVAIDQTGHKVLCSIIAGTLHYLYLATLTWMLLEALYLFLTARNLTVVNYSSINRFMKKLMFPVGYGVPAVTVAISAASRPHLYGTPSRCWLQPEKGFIWGFLGPVCAIFSVNLVLFLVTLWILKNRLSSLNSEVSTLRNTRMLAFKATAQLFILGCTWCLGILQVGPAARVMAYLFTIINSLQGVFIFLVYCLLSQQVREQYGKWSKGIRKLKTESEMHTLSSSAKADTSKPSTVN

SEQ ID NO: 2971 - protein, 831 aa, Homo sapiens
  Payload ID: 680;
  Gene Symbol: ADGRE2;
  Gene Name: adhesion G prt-coupled receptor E2;
  ENSP ID: ENSP00000471297
MGGRVFLVFLAFCVWLTLPGAETQDSRGCARWCPQDSSCVNATACRCNPGFSSFSEIITTPMETCDDINECATLSKVSCGKFSDCWNTEGSYDCVCSPGYEPVSGAKTFKNESENTCQDVDECQQNPRLCKSYGTCVNTLGSYTCQCLPGFKLKPEDPKLCTDVNECTSGQNPCHSSTHCLNNVGSYQCRCRPGWQPIPGSPNGPNNTVCEDVDECSSGQHQCDSSTVCFNTVGSYSCRCRPGWKPRHGIPNNQKDTVCEDMTFSTWTPPPGVHSQTLSRFFDKVQDLGRDYKPGLANNTIQSILQALDELLEAPGDLETLPRLQQHCVASHLLDGLEDVLRGLSKNLSNGLLNFSYPAGTELSLEVQKQVDRSVTLRQNQAVMQLDWNQAQKSGDPGMGKLLAEAPLVLEPEKQMLLHETHQGLLQDGSPILLSDVISAFLSNNDTQNLSSPVTFTFSHRSVIPRQKVLCVFWEHGQNGCGHWATTGCSTIGTRDTSTICRCTHLSSFAVLMAHYDVQEEDPVLTVITYMGLSVSLLCLLLAALTFLLCKAIQNTSTSLHLQLSLCLFLAHLLFLVAIDQTGHKVLCSIIAGTLHYLYLATLTWMLLEALYLFLTARNLTVVNYSSINRFMKKLMFPVGYGVPAVTVAISAASRPHLYGTPSRCWLQPEKGFIWGFLGPVCAIFSVNLVLFLVTLWILKNRLSSLNSEVSTLRNTRMLAFKATAQLFILGCTWCLGILQVGPAARVMAYLFTIINSLQGVFIFLVYCLLSQQVREQYGKWSKGIRKLKTESEMHTLSSSAKADTSKPSTPGTVVQACNASTLGGQSRKIT

SEQ ID NO: 2972 - protein, 812 aa, Homo sapiens
  Payload ID: 680;
  Gene Symbol: ADGRE2;
  Gene Name: adhesion G prt-coupled receptor E2;
  Uniprot ID:  Q9UHX3;
  ENSP ID: ENSP00000472280
MGGRVFLVFLAFCVWLTLPGAETQDSRGCARWCPQDSSCVNATACRCNPGFSSFSEIITTPMETCDDINECATLSKVSCGKFSDCWNTEGSYDCVCSPGYEPVSGAKTFKNESENTCQDVDECQQNPRLCKSYGTCVNTLGSYTCQCLPGFKLKPEDPKLCTDVNECTSGQNPCHSSTHCLNNVGSYQCRCRPGWQPIPGSPNGPNNTVCEDVDECSSGQHQCDSSTVCFNTVGSYSCRCRPGWKPRHGIPNNQKDTVCEDMTFSTWTPPPGVHSQTLSRFFDKVQDLGRDYKPGLANNTIQSILQALDELLEAPGDLETLPRLQQHCVASHLLDGLEDVLRGLSKNLSNGLLNFSYPAGTELSLEVQKQVDRSVTLRQNQAVMQLDWNQAQKSGDPGMGKLLAEAPLVLEPEKQMLLHETHQGLLQDGSPILLSDVISAFLSNNDTQNLSSPVTFTFSHRSVIPRQKVLCVFWEHGQNGCGHWATTGCSTIGTRDTSTICRCTHLSSFAVLMAHYDVQEEDPVLTVITYMGLSVSLLCLLLAALTFLLCKAIQNTSTSLHLQLSLCLFLAHLLFLVAIDQTGHKVLCSIIAGTLHYLYLATLTWMLLEALYLFLTARNLTVVNYSSINRFMKKLMFPVGYGVPAVTVAISAASRPHLYGTPSRCWLQPEKGFIWGFLGPVCAIFSVNLVLFLVTLWILKNRLSSLNSEVSTLRNTRMLAFKATAQLFILGCTWCLGILQVGPAARVMAYLFTIINSLQGVFIFLVYCLLSQQVREQYGKWSKGIRKLKTESEMHTLSSSAKADTSKPSTVN

SEQ ID NO: 2973 - protein, 730 aa, Homo sapiens
  Payload ID: 680;
  Gene Symbol: ADGRE2;
  Gene Name: adhesion G prt-coupled receptor E2;
  Uniprot ID:  Q9UHX3;
  ENSP ID: ENSP00000472735
MGGRVFLVFLAFCVWLTLPGAETQDSRGCARWCPQDSSCVNATACRCNPGFSSFSEIITTPMETCDDINECATLSKVSCGKFSDCWNTEGSYDCVCSPGYEPVSGAKTFKNESENTCQDVDECSSGQHQCDSSTVCFNTVGSYSCRCRPGWKPRHGIPNNQKDTVCEDMTFSTWTPPPGVHSQTLSRFFDKVQDLGRDYKPGLANNTIQSILQALDELLEAPGDLETLPRLQQHCVASHLLDGLEDVLRGLSKNLSNGLLNFSYPAGTELSLEVQKQVDRSVTLRQNQAVMQLDWNQAQKSGDPGPSVVGLVSIPGMGKLLAEAPLVLEPEKQMLLHETHQGLLQDGSPILLSDVISAFLSNNDTQNLSSPVTFTFSHRSVIPRQKVLCVFWEHGQNGCGHWATTGCSTIGTRDTSTICRCTHLSSFAVLMAHYDVQEEDPVLTVITYMGLSVSLLCLLLAALTFLLCKAIQNTSTSLHLQLSLCLFLAHLLFLVAIDQTGHKVLCSIIAGTLHYLYLATLTWMLLEALYLFLTARNLTVVNYSSINRFMKKLMFPVGYGVPAVTVAISAASRPHLYGTPSRCWLQPEKGFIWGFLGPVCAIFSVNLVLFLVTLWILKNRLSSLNSEVSTLRNTRMLAFKATAQLFILGCTWCLGILQVGPAARVMAYLFTIINSLQGVFIFLVYCLLSQQVREQYGKWSKGIRKLKTESEMHTLSSSAKADTSKPSTVN

SEQ ID NO: 2974 - protein, 652 aa, Homo sapiens
  Payload ID: 681;
  Gene Symbol: ADGRE3;
  Gene Name: adhesion G prt-coupled receptor E3;
  Uniprot ID:  Q9BY15;
  ENSP ID: ENSP00000253673
MQGPLLLPGLCFLLSLFGAVTQKTKTSCAKCPPNASCVNNTHCTCNHGYTSGSGQKLFTFPLETCNDINECTPPYSVYCGFNAVCYNVEGSFYCQCVPGYRLHSGNEQFSNSNENTCQDTTSSKTTEGRKELQKIVDKFESLLTNQTLWRTEGRQEISSTATTILRDVESKVLETALKDPEQKVLKIQNDSVAIETQAITDNCSEERKTFNLNVQMNSMDIRCSDIIQGDTQGPSAIAFISYSSLGNIINATFFEEMDKKDQVYLNSQVVSAAIGPKRNVSLSKSVTLTFQHVKMTPSTKKVFCVYWKSTGQGSQWSRDGCFLIHVNKSHTMCNCSHLSSFAVLMALTSQEEDPVLTVITYVGLSVSLLCLLLAALTFLLCKAIRNTSTSLHLQLSLCLFLAHLLFLVGIDRTEPKVLCSIIAGALHYLYLAAFTWMLLEGVHLFLTARNLTVVNYSSINRLMKWIMFPVGYGVPAVTVAISAASWPHLYGTADRCWLHLDQGFMWSFLGPVCAIFSANLVLFILVFWILKRKLSSLNSEVSTIQNTRMLAFKATAQLFILGCTWCLGLLQVGPAAQVMAYLFTIINSLQGFFIFLVYCLLSQQVQKQYQKWFREIVKSKSESETYTLSSKMGPDSKPSEGDVFPGQVKRKY

SEQ ID NO: 2975 - protein, 600 aa, Homo sapiens
  Payload ID: 681;
  Gene Symbol: ADGRE3;
  Gene Name: adhesion G prt-coupled receptor E3;
  Uniprot ID:  Q9BY15;
  ENSP ID: ENSP00000340758
MQGPLLLPGLCFLLSLFGAVTQKTKTSCAKCPPNASCVNNTHCTCNHGYTSGSGQKLFTFPLETCNDTTSSKTTEGRKELQKIVDKFESLLTNQTLWRTEGRQEISSTATTILRDVESKVLETALKDPEQKVLKIQNDSVAIETQAITDNCSEERKTFNLNVQMNSMDIRCSDIIQGDTQGPSAIAFISYSSLGNIINATFFEEMDKKDQVYLNSQVVSAAIGPKRNVSLSKSVTLTFQHVKMTPSTKKVFCVYWKSTGQGSQWSRDGCFLIHVNKSHTMCNCSHLSSFAVLMALTSQEEDPVLTVITYVGLSVSLLCLLLAALTFLLCKAIRNTSTSLHLQLSLCLFLAHLLFLVGIDRTEPKVLCSIIAGALHYLYLAAFTWMLLEGVHLFLTARNLTVVNYSSINRLMKWIMFPVGYGVPAVTVAISAASWPHLYGTADRCWLHLDQGFMWSFLGPVCAIFSANLVLFILVFWILKRKLSSLNSEVSTIQNTRMLAFKATAQLFILGCTWCLGLLQVGPAAQVMAYLFTIINSLQGFFIFLVYCLLSQQVQKQYQKWFREIVKSKSESETYTLSSKMGPDSKPSEGDVFPGQVKRKY

SEQ ID NO: 2976 - protein, 526 aa, Homo sapiens
  Payload ID: 681;
  Gene Symbol: ADGRE3;
  Gene Name: adhesion G prt-coupled receptor E3;
  ENSP ID: ENSP00000396208
MQGPLLLPGLCFLLSLFGAVTQKTKTSCAKCPPNASCVNNTHCTCNHGYTSGSGQKLFTFPLETCNAIETQAITDNCSEERKTFNLNVQMNSMDIRCSDIIQGDTQGPSAIAFISYSSLGNIINATFFEEMDKKDQVYLNSQVVSAAIGPKRNVSLSKSVTLTFQHVKMTPSTKKVFCVYWKSTGQGSQWSRDGCFLIHVNKSHTMCNCSHLSSFAVLMALTSQEEDPVLTVITYVGLSVSLLCLLLAALTFLLCKAIRNTSTSLHLQLSLCLFLAHLLFLVGIDRTEPKVLCSIIAGALHYLYLAAFTWMLLEGVHLFLTARNLTVVNYSSINRLMKWIMFPVGYGVPAVTVAISAASWPHLYGTADRCWLHLDQGFMWSFLGPVCAIFSANLVLFILVFWILKRKLSSLNSEVSTIQNTRMLAFKATAQLFILGCTWCLGLLQVGPAAQVMAYLFTIINSLQGFFIFLVYCLLSQQVQKQYQKWFREIVKSKSESETYTLSSKMGPDSKPSEGDVFPGQVKRKY

SEQ ID NO: 2977 - protein, 57 aa, Homo sapiens
  Payload ID: 681;
  Gene Symbol: ADGRE3;
  Gene Name: adhesion G prt-coupled receptor E3;
  ENSP ID: ENSP00000469965
MQGPLLLPGLCFLLSLFGAVTQKTKSECSEPEQRTCGPRAGPGATHGLQWAGEKCLF

SEQ ID NO: 2978 - protein, 437 aa, Homo sapiens
  Payload ID: 681;
  Gene Symbol: ADGRE3;
  Gene Name: adhesion G prt-coupled receptor E3;
  ENSP ID: ENSP00000471853
MNSMDIRCSDIIQGDTQGPSAIAFISYSSLGNIINATFFEEMDKKDQVYLNSQVVSAAIGPKRNVSLSKSVTLTFQHVKMTPSTKKVFCVYWKSTGQGSQWSRDGCFLIHVNKSHTMCNCSHLSSFAVLMALTSQEEDPVLTVITYVGLSVSLLCLLLAALTFLLCKAIRNTSTSLHLQLSLCLFLAHLLFLVGIDRTEPKVLCSIIAGALHYLYLAAFTWMLLEGVHLFLTARNLTVVNYSSINRLMKWIMFPVGYGVPAVTVAISAASWPHLYGTADRCWLHLDQGFMWSFLGPVCAIFSANLVLFILVFWILKRKLSSLNSEVSTIQNTRMLAFKATAQLFILGCTWCLGLLQVGPAAQVMAYLFTIINSLQGFFIFLVYCLLSQQVQKQYQKWFREIVKSKSESETYTLSSKMGPDSKPSEGDVFPGQVKRKY

SEQ ID NO: 2979 - protein, 835 aa, Homo sapiens
  Payload ID: 682;
  Gene Symbol: ADGRE5;
  Gene Name: adhesion G prt-coupled receptor E5;
  Uniprot ID:  P48960;
  ENSP ID: ENSP00000242786
MGGRVFLAFCVWLTLPGAETQDSRGCARWCPQNSSCVNATACRCNPGFSSFSEIITTPTETCDDINECATPSKVSCGKFSDCWNTEGSYDCVCSPGYEPVSGAKTFKNESENTCQDVDECQQNPRLCKSYGTCVNTLGSYTCQCLPGFKFIPEDPKVCTDVNECTSGQNPCHSSTHCLNNVGSYQCRCRPGWQPIPGSPNGPNNTVCEDVDECSSGQHQCDSSTVCFNTVGSYSCRCRPGWKPRHGIPNNQKDTVCEDMTFSTWTPPPGVHSQTLSRFFDKVQDLGRDSKTSSAEVTIQNVIKLVDELMEAPGDVEALAPPVRHLIATQLLSNLEDIMRILAKSLPKGPFTYISPSNTELTLMIQERGDKNVTMGQSSARMKLNWAVAAGAEDPGPAVAGILSIQNMTTLLANASLNLHSKKQAELEEIYESSIRGVQLRRLSAVNSIFLSHNNTKELNSPILFAFSHLESSDGEAGRDPPAKDVMPGPRQELLCAFWKSDSDRGGHWATEGCQVLGSKNGSTTCQCSHLSSFAILMAHYDVEDWKLTLITRVGLALSLFCLLLCILTFLLVRPIQGSRTTIHLHLCICLFVGSTIFLAGIENEGGQVGLRCRLVAGLLHYCFLAAFCWMSLEGLELYFLVVRVFQGQGLSTRWLCLIGYGVPLLIVGVSAAIYSKGYGRPRYCWLDFEQGFLWSFLGPVTFIILCNAVIFVTTVWKLTQKFSEINPDMKKLKKARALTITAIAQLFLLGCTWVFGLFIFDDRSLVLTYVFTILNCLQGAFLYLLHCLLNKKVREEYRKWACLVAGGSKYSEFTSTTSGTGHNQTRALRASESGI

SEQ ID NO: 2980 - protein, 786 aa, Homo sapiens
  Payload ID: 682;
  Gene Symbol: ADGRE5;
  Gene Name: adhesion G prt-coupled receptor E5;
  Uniprot ID:  P48960;
  ENSP ID: ENSP00000349918
MGGRVFLAFCVWLTLPGAETQDSRGCARWCPQNSSCVNATACRCNPGFSSFSEIITTPTETCDDINECATPSKVSCGKFSDCWNTEGSYDCVCSPGYEPVSGAKTFKNESENTCQDVDECQQNPRLCKSYGTCVNTLGSYTCQCLPGFKFIPEDPKVCTDVDECSSGQHQCDSSTVCFNTVGSYSCRCRPGWKPRHGIPNNQKDTVCEDMTFSTWTPPPGVHSQTLSRFFDKVQDLGRDSKTSSAEVTIQNVIKLVDELMEAPGDVEALAPPVRHLIATQLLSNLEDIMRILAKSLPKGPFTYISPSNTELTLMIQERGDKNVTMGQSSARMKLNWAVAAGAEDPGPAVAGILSIQNMTTLLANASLNLHSKKQAELEEIYESSIRGVQLRRLSAVNSIFLSHNNTKELNSPILFAFSHLESSDGEAGRDPPAKDVMPGPRQELLCAFWKSDSDRGGHWATEGCQVLGSKNGSTTCQCSHLSSFAILMAHYDVEDWKLTLITRVGLALSLFCLLLCILTFLLVRPIQGSRTTIHLHLCICLFVGSTIFLAGIENEGGQVGLRCRLVAGLLHYCFLAAFCWMSLEGLELYFLVVRVFQGQGLSTRWLCLIGYGVPLLIVGVSAAIYSKGYGRPRYCWLDFEQGFLWSFLGPVTFIILCNAVIFVTTVWKLTQKFSEINPDMKKLKKARALTITAIAQLFLLGCTWVFGLFIFDDRSLVLTYVFTILNCLQGAFLYLLHCLLNKKVREEYRKWACLVAGGSKYSEFTSTTSGTGHNQTRALRASESGI

SEQ ID NO: 2981 - protein, 742 aa, Homo sapiens
  Payload ID: 682;
  Gene Symbol: ADGRE5;
  Gene Name: adhesion G prt-coupled receptor E5;
  Uniprot ID:  P48960;
  ENSP ID: ENSP00000351413
MGGRVFLAFCVWLTLPGAETQDSRGCARWCPQNSSCVNATACRCNPGFSSFSEIITTPTETCDDINECATPSKVSCGKFSDCWNTEGSYDCVCSPGYEPVSGAKTFKNESENTCQDVDECSSGQHQCDSSTVCFNTVGSYSCRCRPGWKPRHGIPNNQKDTVCEDMTFSTWTPPPGVHSQTLSRFFDKVQDLGRDSKTSSAEVTIQNVIKLVDELMEAPGDVEALAPPVRHLIATQLLSNLEDIMRILAKSLPKGPFTYISPSNTELTLMIQERGDKNVTMGQSSARMKLNWAVAAGAEDPGPAVAGILSIQNMTTLLANASLNLHSKKQAELEEIYESSIRGVQLRRLSAVNSIFLSHNNTKELNSPILFAFSHLESSDGEAGRDPPAKDVMPGPRQELLCAFWKSDSDRGGHWATEGCQVLGSKNGSTTCQCSHLSSFAILMAHYDVEDWKLTLITRVGLALSLFCLLLCILTFLLVRPIQGSRTTIHLHLCICLFVGSTIFLAGIENEGGQVGLRCRLVAGLLHYCFLAAFCWMSLEGLELYFLVVRVFQGQGLSTRWLCLIGYGVPLLIVGVSAAIYSKGYGRPRYCWLDFEQGFLWSFLGPVTFIILCNAVIFVTTVWKLTQKFSEINPDMKKLKKARALTITAIAQLFLLGCTWVFGLFIFDDRSLVLTYVFTILNCLQGAFLYLLHCLLNKKVREEYRKWACLVAGGSKYSEFTSTTSGTGHNQTRALRASESGI

SEQ ID NO: 2982 - protein, 154 aa, Homo sapiens
  Payload ID: 682;
  Gene Symbol: ADGRE5;
  Gene Name: adhesion G prt-coupled receptor E5;
  ENSP ID: ENSP00000465800
MGGRVFLAFCVWLTLPGAETQDSRGCARWCPQNSSCVNATACRCNPGFSSFSEIITTPTETCDDINECATPSKVSCGKFSDCWNTEGSYDCVCSPGYEPVSGAKTFKNESENTCQGKNHPTSSDFPSMRFGVTRAILAASREQGLGCRVSAWRL

SEQ ID NO: 2983 - protein, 156 aa, Homo sapiens
  Payload ID: 682;
  Gene Symbol: ADGRE5;
  Gene Name: adhesion G prt-coupled receptor E5;
  ENSP ID: ENSP00000467351
MGGRVFLGCARWCPQNSSCVNATACRCNPGFSSFSEIITTPTETCDDINECATPSKVSCGKFSDCWNTEGSYDCVCSPGYEPVSGAKTFKNESENTCQDVDECSSGQHQCDSSTVCFNTVGSYSCRCRPGWKPRHGIPNNQKDTVCEDMTFSTWTP

SEQ ID NO: 2984 - protein, 164 aa, Homo sapiens
  Payload ID: 682;
  Gene Symbol: ADGRE5;
  Gene Name: adhesion G prt-coupled receptor E5;
  ENSP ID: ENSP00000467478
MGGRVFLAFCVWLTLPGAETQDSRGCARWCPQNSSCVNATACRCNPGFSSFSEIITTPTETCDDINECATPSKVSCGKFSDCWNTEGSYDCVCSPGYEPVSGAKTFKNESENTCQDVNECTSGQNPCHSSTHCLNNVGSYQCRCRPGWQPIPGSPNGPNNTVCE

SEQ ID NO: 2985 - protein, 713 aa, Homo sapiens
  Payload ID: 683;
  Gene Symbol: ADGRF1;
  Gene Name: adhesion G prt-coupled receptor F1;
  ENSP ID: ENSP00000283297
MDISIQRNGSIVAGYEVVGSSSASELLSAIEHVAEKAKTALHKLFPLEDGSFRVFGKAQCNDIVFGFGSKDDEYTLPCSSGYRGNITAKCESSGWQVIRETCVLSLLEELNKNFSMIVGNATEAAVSSFVQNLSVIIRQNPSTTVGNLASVVSILSNISSLSLASHFRVSNSTMEDVISIADNILNSASVTNWTVLLREEKYASSRLLETLENISTLVPPTALPLNFSRKFIDWKGIPVNKSQLKRGYSYQIKMCPQNTSIPIRGRVLIGSDQFQRSLPETIISMASLTLGNILPVSKNGNAQVNGPVISTVIQNYSINEVFLFFSKIESNLSQPHCVFWDFSHLQWNDAGCHLVNETQDIVTCQCTHLTSFSILMSPFVPSTIFPVVKWITYVGLGISIGSLILCLIIEALFWKQIKKSQTSHTRRICMVNIALSLLIADVWFIVGATVDTTVNPSGVCTAAVFFTHFFYLSLFFWMLMLGILLAYRIILVFHHMAQHLMMAVGFCLGYGCPLIISVITIAVTQPSNTYKRKDVCWLNWSNGSKPLLAFVVPALAIVAVNFVVVLLVLTKLWRPTVGERLSRDDKATIIRVGKSLLILTPLLGLTWGFGIGTIVDSQNLAWHVIFALLNAFQGFFILCFGILLDSKLRQLLFNKLSALSSWKQTEKQNSSDLSAKPKFSKPFNPLQNKGHYAFSHTGDSSDNIMLTQFVSNE

SEQ ID NO: 2986 - protein, 218 aa, Homo sapiens
  Payload ID: 683;
  Gene Symbol: ADGRF1;
  Gene Name: adhesion G prt-coupled receptor F1;
  Uniprot ID:  Q5T601;
  ENSP ID: ENSP00000360289
MKVGVLWLISFFTFTDGHGGFLGKNDGIKTKKELIVNKKKHLGPVEEYQLLLQVTYRDSKEKRDLRNFLKLLKPPLLWSHGLIRIIRAKATTDCNSLNGVLQCTCEDSYTWFPPSCLDPQNCYLHTAGALPSCECHLNNLSQSVNFCERTKIWGTFKINERFTNDLLNSSSAIYSKYANGIEIQLKKAYERIQGFESVQVTQFRMSLLSPKLECNGTI

SEQ ID NO: 2987 - protein, 910 aa, Homo sapiens
  Payload ID: 683;
  Gene Symbol: ADGRF1;
  Gene Name: adhesion G prt-coupled receptor F1;
  Uniprot ID:  Q5T601;
  ENSP ID: ENSP00000360299
MKVGVLWLISFFTFTDGHGGFLGKNDGIKTKKELIVNKKKHLGPVEEYQLLLQVTYRDSKEKRDLRNFLKLLKPPLLWSHGLIRIIRAKATTDCNSLNGVLQCTCEDSYTWFPPSCLDPQNCYLHTAGALPSCECHLNNLSQSVNFCERTKIWGTFKINERFTNDLLNSSSAIYSKYANGIEIQLKKAYERIQGFESVQVTQFRNGSIVAGYEVVGSSSASELLSAIEHVAEKAKTALHKLFPLEDGSFRVFGKAQCNDIVFGFGSKDDEYTLPCSSGYRGNITAKCESSGWQVIRETCVLSLLEELNKNFSMIVGNATEAAVSSFVQNLSVIIRQNPSTTVGNLASVVSILSNISSLSLASHFRVSNSTMEDVISIADNILNSASVTNWTVLLREEKYASSRLLETLENISTLVPPTALPLNFSRKFIDWKGIPVNKSQLKRGYSYQIKMCPQNTSIPIRGRVLIGSDQFQRSLPETIISMASLTLGNILPVSKNGNAQVNGPVISTVIQNYSINEVFLFFSKIESNLSQPHCVFWDFSHLQWNDAGCHLVNETQDIVTCQCTHLTSFSILMSPFVPSTIFPVVKWITYVGLGISIGSLILCLIIEALFWKQIKKSQTSHTRRICMVNIALSLLIADVWFIVGATVDTTVNPSGVCTAAVFFTHFFYLSLFFWMLMLGILLAYRIILVFHHMAQHLMMAVGFCLGYGCPLIISVITIAVTQPSNTYKRKDVCWLNWSNGSKPLLAFVVPALAIVAVNFVVVLLVLTKLWRPTVGERLSRDDKATIIRVGKSLLILTPLLGLTWGFGIGTIVDSQNLAWHVIFALLNAFQGFFILCFGILLDSKLRQLLFNKLSALSSWKQTEKQNSSDLSAKPKFSKPFNPLQNKGHYAFSHTGDSSDNIMLTQFVSNE

SEQ ID NO: 2988 - protein, 160 aa, Homo sapiens
  Payload ID: 683;
  Gene Symbol: ADGRF1;
  Gene Name: adhesion G prt-coupled receptor F1;
  ENSP ID: ENSP00000417732
EYQLLLQVTYRDSKEKRDLRNFLKLLKPPLLWSHGLIRIIRAKATTDCNSLNGVLQCTCEDSYTWFPPSCLDPQNCYLHTAGALPSCECHLNNLSQSVNFCERTKIWGTFKINERFTNDLLNSSSAIYSKYANGIEIQLKKAYERIQGFESVQVTQFRPV

SEQ ID NO: 2989 - protein, 137 aa, Homo sapiens
  Payload ID: 683;
  Gene Symbol: ADGRF1;
  Gene Name: adhesion G prt-coupled receptor F1;
  ENSP ID: ENSP00000419109
  MOD_RES (1)..(1): Any amino acid
XWSHGLIRIIRAKATTDCNSLNGVLQCTCEDSYTWFPPSCLDPQNCYLHTAGALPSCECHLNNLSQSVNFCERTKIWGTFKINERFTNDLLNSSSAIYSKYANGIEIQLKKAYERIQGFESVQVTQFRTVIHLWNLV

SEQ ID NO: 2990 - protein, 708 aa, Homo sapiens
  Payload ID: 684;
  Gene Symbol: ADGRF2;
  Gene Name: adhesion G prt-coupled receptor F2;
  Uniprot ID:  Q8IZF7;
  ENSP ID: ENSP00000296862
MGLTAYGNRRVQPGELPFGANLTLIHTRAQPVICSKLLLTKRVSPISFFLSKFQNSWGEDGWVQLDQLPSPNAVSSDQVHCSAGCTHRKCGWAASKSKEKVPARPHGVCDGVCTDYSQCTQPCPPDTQGNMGFSCRQKTWHKITDTCQTLNALNIFEEDSRLVQPFEDNIKISVYTGKSETITDMLLQKCPTDLSCVIRNIQQSPWIPGNIAVIVQLLHNISTAIWTGVDEAKMQSYSTIANHILNSKSISNWTFIPDRNSSYILLHSVNSFARRLFIDKHPVDISDVFIHTMGTTISGDNIGKNFTFSMRINDTSNEVTGRVLISRDELRKVPSPSQVISIAFPTIGAILEASLLENVTVNGLVLSAILPKELKRISLIFEKISKSEERRTQCVGWHSVENRWDQQACKMIQENSQQAVCKCRPSKLFTSFSILMSPHILESLILTYITYVGLGISICSLILCLSIEVLVWSQVTKTEITYLRHVCIVNIAATLLMADVWFIVASFLSGPITHHKGCVAATFFVHFFYLSVFFWMLAKALLILYGIMIVFHTLPKSVLVASLFSVGYGCPLAIAAITVAATEPGKGYLRPEICWLNWDMTKALLAFVIPALAIVVVNLITVTLVIVKTQRAAIGNSMFQEVRAIVRISKNIAILTPLLGLTWGFGVATVIDDRSLAFHIIFSLLNAFQVSPDASDQVQSERIHEDVL

SEQ ID NO: 2991 - protein, 642 aa, Homo sapiens
  Payload ID: 684;
  Gene Symbol: ADGRF2;
  Gene Name: adhesion G prt-coupled receptor F2;
  Uniprot ID:  Q8IZF7;
  ENSP ID: ENSP00000381727
MTHILLLYYLVFLLPTESCRTLYQAASKSKEKVPARPHGVCDGVCTDYSQCTQPCPPDTQGNMGFSCRQKTWHKITDTCQTLNALNIFEEDSRLVQPFEDNIKISVYTGKSETITDMLLQKCPTDLSCVIRNIQQSPWIPGNIAVIVQLLHNISTAIWTGVDEAKMQSYSTIANHILNSKSISNWTFIPDRNSSYILLHSVNSFARRLFIDKHPVDISDVFIHTMGTTISGDNIGKNFTFSMRINDTSNEVTGRVLISRDELRKVPSPSQVISIAFPTIGAILEASLLENVTVNGLVLSAILPKELKRISLIFEKISKSEERRTQCVGWHSVENRWDQQACKMIQENSQQAVCKCRPSKLFTSFSILMSPHILESLILTYITYVGLGISICSLILCLSIEVLVWSQVTKTEITYLRHVCIVNIAATLLMADVWFIVASFLSGPITHHKGCVAATFFVHFFYLSVFFWMLAKALLILYGIMIVFHTLPKSVLVASLFSVGYGCPLAIAAITVAATEPGKGYLRPEICWLNWDMTKALLAFVIPALAIVVVNLITVTLVIVKTQRAAIGNSMFQEVRAIVRISKNIAILTPLLGLTWGFGVATVIDDRSLAFHIIFSLLNAFQGFFILVFGTILDPKIREALKG

SEQ ID NO: 2992 - protein, 640 aa, Homo sapiens
  Payload ID: 684;
  Gene Symbol: ADGRF2;
  Gene Name: adhesion G prt-coupled receptor F2;
  ENSP ID: ENSP00000422934
MTHILLLYYLVFLLPTESCRTLYQAASKSKEKVPARPHGVCDGVCTDYSQCTQPCPPDTQGNMGFSCRQKTWHKITDTCQTLNALNIFEEDSRLVQPFEDNIKISVYTGKSETITDMLLQKCPTDLSCVIRNIQQSPWIPGNIAVIVQLLHNISTAIWTGVDEAKMQSYSTIANHILNSKSISNWTFIPDRNSSYILLHSVNSFARRLFIDKHPVDISDVFIHTMGTTISGDNIGKNFTFSMRINDTSNEVTGRVLISRDELRKVPSPSQVISIAFPTIGAILEASLLENVTVNGLVLSAILPKELKRISLIFEKISKSEERRTQCVGWHSVENRWDQQACKMIQENSQQAVCKCRPSKLFTSFSILMSPHILESLILTYITYVGLGISICSLILCLSIEVLVWSQVTKTEITYLRHVCIVNIAATLLMADVWFIVASFLSGPITHHKGCVAATFFVHFFYLSVFFWMLAKALLILYGIMIVFHTLPKSVLVASLFSVGYGCPLAIAAITVAATEPGKGYLRPEICWLNWDMTKALLAFVIPALAIVVVNLITVTLVIVKTQRAAIGNSMFQEVRAIVRISKNIAILTPLLGLTWGFGVATVIDDRSLAFHIIFSLLNAFQVSPDASDQVQSERIHEDVL

SEQ ID NO: 2993 - protein, 642 aa, Homo sapiens; identical to SEQ ID NO: 2991
  Payload ID: 684;
  Gene Symbol: ADGRF2;
  Gene Name: adhesion G prt-coupled receptor F2;
  Uniprot ID:  Q8IZF7;
  ENSP ID: ENSP00000425269

SEQ ID NO: 2994 - protein, 1079 aa, Homo sapiens
  Payload ID: 685;
  Gene Symbol: ADGRF3;
  Gene Name: adhesion G prt-coupled receptor F3;
  Uniprot ID:  Q8IZF5;
  ENSP ID: ENSP00000307831
MVCSAAPLLLLATTLPLLGSPVAQASQPVSETGVRPREGLQRRQWGPLIGRDKAWNERIDRPFPACPIPLSSSFGRWPKGQTMWAQTSTLTLTEEELGQSQAGGESGSGQLLDQENGAGESALVSVYVHLDFPDKTWPPELSRTLTLPAASASSSPRPLLTGLRLTTECNVNHKGNFYCACLSGYQWNTSICLHYPPCQSLHNHQPCGCLVFSHPEPGYCQLLPPGSPVTCLPAVPGILNLNSQLQMPGDTLSLTLHLSQEATNLSWFLRHPGSPSPILLQPGTQVSVTSSHGQAALSVSNMSHHWAGEYMSCFEAQGFKWNLYEVVRVPLKATDVARLPYQLSISCATSPGFQLSCCIPSTNLAYTAAWSPGEGSKASSFNESGSQCFVLAVQRCPMADTTYACDLQSLGLAPLRVPISITIIQDGDITCPEDASVLTWNVTKAGHVAQAPCPESKRGIVRRLCGADGVWGPVHSSCTDARLLALFTRTKLLQAGQGSPAEEVPQILAQLPGQAAEASSPSDLLTLLSTMKYVAKVVAEARIQLDRRALKNLLIATDKVLDMDTRSLWTLAQARKPWAGSTLLLAVETLACSLCPQDHPFAFSLPNVLLQSQLFGPTFPADYSISFPTRPPLQAQIPRHSLAPLVRNGTEISITSLVLRKLDHLLPSNYGQGLGDSLYATPGLVLVISIMAGDRAFSQGEVIMDFGNTDGSPHCVFWDHSLFQGRGGWSKEGCQAQVASASPTAQCLCQHLTAFSVLMSPHTVPEEPALALLTQVGLGASILALLVCLGVYWLVWRVVVRNKISYFRHAALLNMVFCLLAADTCFLGAPFLSPGPRSPLCLAAAFLCHFLYLATFFWMLAQALVLAHQLLFVFHQLAKHRVLPLMVLLGYLCPLGLAGVTLGLYLPQGQYLREGECWLDGKGGALYTFVGPVLAIIGVNGLVLAMAMLKLLRPSLSEGPPAEKRQALLGVIKALLILTPIFGLTWGLGLATLLEEVSTVPHYIFTILNTLQGVFILLFGCLMDRKIQEALRKRFCRAQAPSSTISLVSCCLQILSCASKSMSEGIPWPSSEDMGTARS

SEQ ID NO: 2995 - protein, 873 aa, Homo sapiens
  Payload ID: 685;
  Gene Symbol: ADGRF3;
  Gene Name: adhesion G prt-coupled receptor F3;
  Uniprot ID:  Q8IZF5;
  ENSP ID: ENSP00000327396
MTTRKLSAHSAATPGYKAVTHKHHTGWARMAKTGLPEKGQSQAGGESGSGQLLDQENGAGESALVSVYVHLDFPDKTWPPELSRTLTLPAASASSSPRPLLTGLRLTTGEYMSCFEAQGFKWNLYEVVRVPLKATDVARLPYQLSISCATSPGFQLSCCIPSTNLAYTAAWSPGEGSKASSFNESGSQCFVLAVQRCPMADTTYACDLQSLGLAPLRVPISITIIQDGDITCPEDASVLTWNVTKAGHVAQAPCPESKRGIVRRLCGADGVWGPVHSSCTDARLLALFTRTKLLQAGQGSPAEEVPQILAQLPGQAAEASSPSDLLTLLSTMKYVAKVVAEARIQLDRRALKNLLIATDKVLDMDTRSLWTLAQARKPWAGSTLLLAVETLACSLCPQDHPFAFSLPNVLLQSQLFGPTFPADYSISFPTRPPLQAQIPRHSLAPLVRNGTEISITSLVLRKLDHLLPSNYGQGLGDSLYATPGLVLVISIMAGDRAFSQGEVIMDFGNTDGSPHCVFWDHSLFQGRGGWSKEGCQAQVASASPTAQCLCQHLTAFSVLMSPHTVPEEPALALLTQVGLGASILALLVCLGVYWLVWRVVVRNKISYFRHAALLNMVFCLLAADTCFLGAPFLSPGPRSPLCLAAAFLCHFLYLATFFWMLAQALVLAHQLLFVFHQLAKHRVLPLMVLLGYLCPLGLAGVTLGLYLPQGQYLREGECWLDGKGGALYTFVGPVLAIIGVNGLVLAMAMLKLLRPSLSEGPPAEKRQALLGVIKALLILTPIFGLTWGLGLATLLEEVSTVPHYIFTILNTLQGVFILLFGCLMDRKIQEALRKRFCRAQAPSSTISLATNEGCILEHSKGGSDTARKTDASE

SEQ ID NO: 2996 - protein, 997 aa, Homo sapiens
  Payload ID: 685;
  Gene Symbol: ADGRF3;
  Gene Name: adhesion G prt-coupled receptor F3;
  Uniprot ID:  Q8IZF5;
  ENSP ID: ENSP00000388537
MVCSAAPLLLLATTLPLLGSPVAQASQPGQSQAGGESGSGQLLDQENGAGESALVSVYVHLDFPDKTWPPELSRTLTLPAASASSSPRPLLTGLRLTTECNVNHKGNFYCACLSGYQWNTSICLHYPPCQSLHNHQPCGCLVFSHPEPGYCQLLPPGSPVTCLPAVPGILNLNSQLQMPGDTLSLTLHLSQEATNLSWFLRHPGSPSPILLQPGTQVSVTSSHGQAALSVSNMSHHWAGEYMSCFEAQGFKWNLYEVVRVPLKATDVARLPYQLSISCATSPGFQLSCCIPSTNLAYTAAWSPGEGSKASSFNESGSQCFVLAVQRCPMADTTYACDLQSLGLAPLRVPISITIIQDGDITCPEDASVLTWNVTKAGHVAQAPCPESKRGIVRRLCGADGVWGPVHSSCTDARLLALFTRTKLLQAGQGSPAEEVPQILAQLPGQAAEASSPSDLLTLLSTMKYVAKVVAEARIQLDRRALKNLLIATDKVLDMDTRSLWTLAQARKPWAGSTLLLAVETLACSLCPQDHPFAFSLPNVLLQSQLFGPTFPADYSISFPTRPPLQAQIPRHSLAPLVRNGTEISITSLVLRKLDHLLPSNYGQGLGDSLYATPGLVLVISIMAGDRAFSQGEVIMDFGNTDGSPHCVFWDHSLFQGRGGWSKEGCQAQVASASPTAQCLCQHLTAFSVLMSPHTVPEEPALALLTQVGLGASILALLVCLGVYWLVWRVVVRNKISYFRHAALLNMVFCLLAADTCFLGAPFLSPGPRSPLCLAAAFLCHFLYLATFFWMLAQALVLAHQLLFVFHQLAKHRVLPLMVLLGYLCPLGLAGVTLGLYLPQGQYLREGECWLDGKGGALYTFVGPVLAIIGVNGLVLAMAMLKLLRPSLSEGPPAEKRQALLGVIKALLILTPIFGLTWGLGLATLLEEVSTVPHYIFTILNTLQGVFILLFGCLMDRKIQEALRKRFCRAQAPSSTISLATNEGCILEHSKGGSDTAR

SEQ ID NO: 2997 - protein, 120 aa, Homo sapiens
  Payload ID: 685;
  Gene Symbol: ADGRF3;
  Gene Name: adhesion G prt-coupled receptor F3;
  ENSP ID: ENSP00000394162
MTTRKLSAHSAATPGYKAVTHKHHTGWARMAKTGLPEKLPPSTSQALSALCWLFSAARWLTPRTLVTCRAWAWLHSGSPSPSPSSRMETSPALRTPRCSPGMSPRLATWHRPHVLRARGA

SEQ ID NO: 2998 - protein, 873 aa, Homo sapiens; identical to SEQ ID NO: 2995
  Payload ID: 685;
  Gene Symbol: ADGRF3;
  Gene Name: adhesion G prt-coupled receptor F3;
  Uniprot ID:  Q8IZF5;
  ENSP ID: ENSP00000404775

SEQ ID NO: 2999 - protein, 87 aa, Homo sapiens
  Payload ID: 685;
  Gene Symbol: ADGRF3;
  Gene Name: adhesion G prt-coupled receptor F3;
  ENSP ID: ENSP00000409595
MTTRKLSAHSAATPGYKAVTHKHHTGWARMAKTGLPEKGQSQAGGESGSGQLLDQENGAGESALVSVYVHLDFPDKTWPPELSRTLT

SEQ ID NO: 3000 - protein, 695 aa, Homo sapiens
  Payload ID: 686;
  Gene Symbol: ADGRF4;
  Gene Name: adhesion G prt-coupled receptor F4;
  Uniprot ID:  Q8IZF3;
  ENSP ID: ENSP00000283303
MKMKSQATMICCLVFFLSTECSHYRSKIHLKAGDKLQSPEGKPKTGRIQEKCEGPCISSSNCSQPCAKDFHGEIGFTCNQKKWQKSAETCTSLSVEKLFKDSTGASRLSVAAPSIPLHILDFRAPETIESVAQGIRKNCPFDYACITDMVKSSETTSGNIAFIVELLKNISTDLSDNVTREKMKSYSEVANHILDTAAISNWAFIPNKNASSDLLQSVNLFARQLHIHNNSENIVNELFIQTKGFHINHNTSEKSLNFSMSMNNTTEDILGMVQIPRQELRKLWPNASQAISIAFPTLGAILREAHLQNVSLPRQVNGLVLSVVLPERLQEIILTFEKINKTRNARAQCVGWHSKKRRWDEKACQMMLDIRNEVKCRCNYTSVVMSFSILMSSKSMTDKVLDYITCIGLSVSILSLVLCLIIEATVWSRVVVTEISYMRHVCIVNIAVSLLTANVWFIIGSHFNIKAQDYNMCVAVTFFSHFFYLSLFFWMLFKALLIIYGILVIFRRMMKSRMMVIGFAIGYGCPLIIAVTTVAITEPEKGYMRPEACWLNWDNTKALLAFAIPAFVIVAVNLIVVLVVAVNTQRPSIGSSKSQDVVIIMRISKNVAILTPLLGLTWGFGIATLIEGTSLTFHIIFALLNAFQGFFILLFGTIMDHKIRDALRMRMSSLKGKSRAAENASLGPTNGSKLMNRQG

SEQ ID NO: 3001 - protein, 695 aa, Homo sapiens; identical to SEQ ID NO: 3000
  Payload ID: 686;
  Gene Symbol: ADGRF4;
  Gene Name: adhesion G prt-coupled receptor F4;
  Uniprot ID:  Q8IZF3;
  ENSP ID: ENSP00000328319

SEQ ID NO: 3002 - protein, 752 aa, Homo sapiens
  Payload ID: 686;
  Gene Symbol: ADGRF4;
  Gene Name: adhesion G prt-coupled receptor F4;
  ENSP ID: ENSP00000360264
MYTGPCKVLHLSSGLLPNSGRFGIVLSDEYQVVTSLWCQLYTTHAPQQASGMLLLNYLVIPSKAQVNKPGYIPNLGECSHYRSKIHLKAGDKLQSPEGKPKTGRIQEKCEGPCISSSNCSQPCAKDFHGEIGFTCNQKKWQKSAETCTSLSVEKLFKDSTGASRLSVAAPSIPLHILDFRAPETIESVAQGIRKNCPFDYACITDMVKSSETTSGNIAFIVELLKNISTDLSDNVTREKMKSYSEVANHILDTAAISNWAFIPNKNASSDLLQSVNLFARQLHIHNNSENIVNELFIQTKGFHINHNTSEKSLNFSMSMNNTTEDILGMVQIPRQELRKLWPNASQAISIAFPTLGAILREAHLQNVSLPRQVNGLVLSVVLPERLQEIILTFEKINKTRNARAQCVGWHSKKRRWDEKACQMMLDIRNEVKCRCNYTSVVMSFSILMSSKSMTDKVLDYITCIGLSVSILSLVLCLIIEATVWSRVVVTEISYMRHVCIVNIAVSLLTANVWFIIGSHFNIKAQDYNMCVAVTFFSHFFYLSLFFWMLFKALLIIYGILVIFRRMMKSRMMVIGFAIGYGCPLIIAVTTVAITEPEKGYMRPEACWLNWDNTKALLAFAIPAFVIVAVNLIVVLVVAVNTQRPSIGSSKSQDVVIIMRISKNVAILTPLLGLTWGFGIATLIEGTSLTFHIIFALLNAFQGFFILLFGTIMDHKIRDALRMRMSSLKGKSRAAENASLGPTNGSKLMNRQG

SEQ ID NO: 3003 - protein, 1346 aa, Homo sapiens
  Payload ID: 687;
  Gene Symbol: ADGRF5;
  Gene Name: adhesion G prt-coupled receptor F5;
  Uniprot ID:  Q8IZF2;
  ENSP ID: ENSP00000265417
MKSPRRTTLCLMFIVIYSSKAALNWNYESTIHPLSLHEHEPAGEEALRQKRAVATKSPTAEEYTVNIEISFENASFLDPIKAYLNSLSFPIHGNNTDQITDILSINVTTVCRPAGNEIWCSCETGYGWPRERCLHNLICQERDVFLPGHHCSCLKELPPNGPFCLLQEDVTLNMRVRLNVGFQEDLMNTSSALYRSYKTDLETAFRKGYGILPGFKGVTVTGFKSGSVVVTYEVKTTPPSLELIHKANEQVVQSLNQTYKMDYNSFQAVTINESNFFVTPEIIFEGDTVSLVCEKEVLSSNVSWRYEEQQLEIQNSSRFSIYTALFNNMTSVSKLTIHNITPGDAGEYVCKLILDIFEYECKKKIDVMPIQILANEEMKVMCDNNPVSLNCCSQGNVNWSKVEWKQEGKINIPGTPETDIDSSCSRYTLKADGTQCPSGSSGTTVIYTCEFISAYGARGSANIKVTFISVANLTITPDPISVSEGQNFSIKCISDVSNYDEVYWNTSAGIKIYQRFYTTRRYLDGAESVLTVKTSTREWNGTYHCIFRYKNSYSIATKDVIVHPLPLKLNIMVDPLEATVSCSGSHHIKCCIEEDGDYKVTFHTGSSSLPAAKEVNKKQVCYKHNFNASSVSWCSKTVDVCCHFTNAANNSVWSPSMKLNLVPGENITCQDPVIGVGEPGKVIQKLCRFSNVPSSPESPIGGTITYKCVGSQWEEKRNDCISAPINSLLQMAKALIKSPSQDEMLPTYLKDLSISIDKAEHEISSSPGSLGAIINILDLLSTVPTQVNSEMMTHVLSTVNVILGKPVLNTWKVLQQQWTNQSSQLLHSVERFSQALQSGDSPPLSFSQTNVQMSSMVIKSSHPETYQQRFVFPYFDLWGNVVIDKSYLENLQSDSSIVTMAFPTLQAILAQDIQENNFAESLVMTTTVSHNTTMPFRISMTFKNNSPSGGETKCVFWNFRLANNTGGWDSSGCYVEEGDGDNVTCICDHLTSFSILMSPDSPDPSSLLGILLDIISYVGVGFSILSLAACLVVEAVVWKSVTKNRTSYMRHTCIVNIAASLLVANTWFIVVAAIQDNRYILCKTACVAATFFIHFFYLSVFFWMLTLGLMLFYRLVFILHETSRSTQKAIAFCLGYGCPLAISVITLGATQPREVYTRKNVCWLNWEDTKALLAFAIPALIIVVVNITITIVVITKILRPSIGDKPCKQEKSSLFQISKSIGVLTPLLGLTWGFGLTTVFPGTNLVFHIIFAILNVFQGLFILLFGCLWDLKVQEALLNKFSLSRWSSQHSKSTSLGSSTPVFSMSSPISRRFNNLFGKTGTYNVSTPEATSSSLENSSSASSLLN

SEQ ID NO: 3004 - protein, 1346 aa, Homo sapiens; identical to SEQ ID NO: 3003
  Payload ID: 687;
  Gene Symbol: ADGRF5;
  Gene Name: adhesion G prt-coupled receptor F5;
  Uniprot ID:  Q8IZF2;
  ENSP ID: ENSP00000283296

SEQ ID NO: 3005 - protein, 687 aa, Homo sapiens
  Payload ID: 688;
  Gene Symbol: ADGRG1;
  Gene Name: adhesion G prt-coupled receptor G1;
  Uniprot ID:  Q9Y653;
  ENSP ID: ENSP00000373465
MTPQSLLQTTLFLLSLLFLVQGAHGRGHREDFRFCSQRNQTHRSSLHYKPTPDLRISIENSEEALTVHAPFPAAHPASRSFPDPRGLYHFCLYWNRHAGRLHLLYGKRDFLLSDKASSLLCFQHQEESLAQGPPLLATSVTSWWSPQNISLPSAASFTFSFHSPPHTAAHNASVDMCELKRDLQLLSQFLKHPQKASRRPSAAPASQQLQSLESKLTSVRFMGDMVSFEEDRINATVWKLQPTAGLQDLHIHSRQEEEQSEIMEYSVLLPRTLFQRTKGRSGEAEKRLLLVDFSSQALFQDKNSSQVLGEKVLGIVVQNTKVANLTEPVVLTFQHQLQPKNVTLQCVFWVEDPTLSSPGHWSSAGCETVRRETQTSCFCNHLTYFAVLMVSSVEVDAVHKHYLSLLSYVGCVVSALACLVTIAAYLCSRRKPRDYTIKVHMNLLLAVFLLDTSFLLSEPVALTGSEAGCRASAIFLHFSLLTCLSWMGLEGYNLYRLVVEVFGTYVPGYLLKLSAMGWGFPIFLVTLVALVDVDNYGPIILAVHRTPEGVIYPSMCWIRDSLVSYITNLGLFSLVFLFNMAMLATMVVQILRLRPHTQKWSHVLTLLGLSLVLGLPWALIFFSFASGTFQLVVLYLFSIITSFQGFLIFIWYWSMRLQARGGPSPLKSNSDSARLPISSGSTSSSRI

SEQ ID NO: 3006 - protein, 692 aa, Homo sapiens
  Payload ID: 688;
  Gene Symbol: ADGRG1;
  Gene Name: adhesion G prt-coupled receptor G1;
  Uniprot ID:  Q9Y653;
  ENSP ID: ENSP00000398034
MTPQSLLQTTLFLLSLLFLVQASASSGAHGRGHREDFRFCSQRNQTHRSSLHYKPTPDLRISIENSEEALTVHAPFPAAHPASRSFPDPRGLYHFCLYWNRHAGRLHLLYGKRDFLLSDKASSLLCFQHQEESLAQGPPLLATSVTSWWSPQNISLPSAASFTFSFHSPPHTAAHNASVDMCELKRDLQLLSQFLKHPQKASRRPSAAPASQQLQSLESKLTSVRFMGDMVSFEEDRINATVWKLQPTAGLQDLHIHSRQEEEQSEIMEYSVLLPRTLFQRTKGRSGEAEKRLLLVDFSSQALFQDKNSSQVLGEKVLGIVVQNTKVANLTEPVVLTFQHQLQPKNVTLQCVFWVEDPTLSSPGHWSSAGCETVRRETQTSCFCNHLTYFAVLMVSSVEVDAVHKHYLSLLSYVGCVVSALACLVTIAAYLCSRRKPRDYTIKVHMNLLLAVFLLDTSFLLSEPVALTGSEAGCRASAIFLHFSLLTCLSWMGLEGYNLYRLVVEVFGTYVPGYLLKLSAMGWGFPIFLVTLVALVDVDNYGPIILAVHRTPEGVIYPSMCWIRDSLVSYITNLGLFSLVFLFNMAMLATMVVQILRLRPHTQKWSHVLTLLGLSLVLGLPWALIFFSFASGTFQLVVLYLFSIITSFQGFLIFIWYWSMRLQARGGPSPLKSNSDSARLPISSGSTSSSRI

SEQ ID NO: 3007 - protein, 687 aa, Homo sapiens; identical to SEQ ID NO: 3005
  Payload ID: 688;
  Gene Symbol: ADGRG1;
  Gene Name: adhesion G prt-coupled receptor G1;
  Uniprot ID:  Q9Y653;
  ENSP ID: ENSP00000444911

SEQ ID NO: 3008 - protein, 94 aa, Homo sapiens
  Payload ID: 688;
  Gene Symbol: ADGRG1;
  Gene Name: adhesion G prt-coupled receptor G1;
  ENSP ID: ENSP00000454233
MTPQSLLQTTLFLLSLLFLVQGAHGRGHREDFRFCSQRNQTHRSSLHYKPTPDLRISIENSEEALTVHAPFPAAHPASRSFPDPRGLYHFCLYW

SEQ ID NO: 3009 - protein, 125 aa, Homo sapiens
  Payload ID: 688;
  Gene Symbol: ADGRG1;
  Gene Name: adhesion G prt-coupled receptor G1;
  ENSP ID: ENSP00000454263
MTPQSLLQTTLFLLSLLFLVQASASSGAHGRGHREDFRFCSQRNQTHRSSLHYKPTPDLRISIENSEEALTVHAPFPAAHPASRSFPDPRGLYHFCLYWNRHAGRLHLLYGKRDFLLSDKASSLL

SEQ ID NO: 3010 - protein, 131 aa, Homo sapiens
  Payload ID: 688;
  Gene Symbol: ADGRG1;
  Gene Name: adhesion G prt-coupled receptor G1;
  ENSP ID: ENSP00000454289
MTPQSLLQTTLFLLSLLFLVQGAHGRGHREDFRFCSQRNQTHRSSLHYKPTPDLRISIENSEEALTVHAPFPAAHPASRSFPDPRGLYHFCLYWNRHAGRLHLLYGKRDFLLSDKASSLLCFQHQEESLAQ

SEQ ID NO: 3011 - protein, 81 aa, Homo sapiens
  Payload ID: 688;
  Gene Symbol: ADGRG1;
  Gene Name: adhesion G prt-coupled receptor G1;
  ENSP ID: ENSP00000454321
MTPQSLLQTTLFLLSLLFLVQGRCPRQGPQGRLSLLQPAEPDTQEQPPLQTHTRPAHLHRELRRGPHSPCPFPCSPPCFPI

SEQ ID NO: 3012 - protein, 119 aa, Homo sapiens
  Payload ID: 688;
  Gene Symbol: ADGRG1;
  Gene Name: adhesion G prt-coupled receptor G1;
  ENSP ID: ENSP00000454364
MTPQSLLQTTLFLLSLLFLVQGAHGRGHREDFRFCSQRNQTHRSSLHYKPTPDLRISIENSEEALTVHAPFPAAHPASRSFPDPRGLYHFCLYWNRHAGRLHLLYGKRDFLLSDKASSL

SEQ ID NO: 3013 - protein, 6 aa, Homo sapiens
  Payload ID: 688;
  Gene Symbol: ADGRG1;
  Gene Name: adhesion G prt-coupled receptor G1;
  ENSP ID: ENSP00000454490
MTPQSL

SEQ ID NO: 3014 - protein, 97 aa, Homo sapiens
  Payload ID: 688;
  Gene Symbol: ADGRG1;
  Gene Name: adhesion G prt-coupled receptor G1;
  ENSP ID: ENSP00000454574
MTPQSLLQTTLFLLSLLFLVQASGTRHTGAASTTNPHQTCASPSRTPKRPSQSMPLSLQPTLLPDPSLTPGASTTSASTGTDMLGDYIFSMASVTSC

SEQ ID NO: 3015 - protein, 146 aa, Homo sapiens
  Payload ID: 688;
  Gene Symbol: ADGRG1;
  Gene Name: adhesion G prt-coupled receptor G1;
  ENSP ID: ENSP00000454607
MTPQSLLQTTLFLLSLLFLVQASASSGAHGRGHREDFRFCSQRNQTHRSSLHYKPTPDLRISIENSEEALTVHAPFPAAHPASRSFPDPRGLYHFCLYWNRHAGRLHLLYGKRDFLLSDKASSLLCFQHQEESLAQGPPLLATSVT

SEQ ID NO: 3016 - protein, 97 aa, Homo sapiens
  Payload ID: 688;
  Gene Symbol: ADGRG1;
  Gene Name: adhesion G prt-coupled receptor G1;
  ENSP ID: ENSP00000454779
MTPQSLLQTTLFLLSLLFLVQGSGTRHTGAASTTNPHQTCASPSRTPKRPSQSMPLSLQPTLLPDPSLTPGASTTSASTGTDMLGDYIFSMASVTSC

SEQ ID NO: 3017 - protein, 198 aa, Homo sapiens
  Payload ID: 688;
  Gene Symbol: ADGRG1;
  Gene Name: adhesion G prt-coupled receptor G1;
  ENSP ID: ENSP00000454855
MTPQSLLQTTLFLLSLLFLVQASASSGAHGRGHREDFRFCSQRNQTHRSSLHYKPTPDLRISIENSEEALTVHAPFPAAHPASRSFPDPRGLYHFCLYWNRHAGRLHLLYGKRDFLLSDKASSLLCFQHQEESLAQGPPLLATSVTSWWSPQNISLPSAASFTFSFHSPPHTAAHNASVDMCELKRDLQLLSQFLKHP

SEQ ID NO: 3018 - protein, 97 aa, Homo sapiens; identical to SEQ ID NO: 3014
  Payload ID: 688;
  Gene Symbol: ADGRG1;
  Gene Name: adhesion G prt-coupled receptor G1;
  ENSP ID: ENSP00000454879

SEQ ID NO: 3019 - protein, 94 aa, Homo sapiens; identical to SEQ ID NO: 3008
  Payload ID: 688;
  Gene Symbol: ADGRG1;
  Gene Name: adhesion G prt-coupled receptor G1;
  ENSP ID: ENSP00000454933

SEQ ID NO: 3020 - protein, 116 aa, Homo sapiens
  Payload ID: 688;
  Gene Symbol: ADGRG1;
  Gene Name: adhesion G prt-coupled receptor G1;
  ENSP ID: ENSP00000455074
MTPQSLLQTTLFLLSLLFLVQGAHGRGHREDFRFCSQRNQTHRSSLHYKPTPDLRISIENSEEALTVHAPFPAAHPASRSFPDPRGLYHFCLYWNRHAGRLHLLYGKRDFLLSDKA

SEQ ID NO: 3021 - protein, 168 aa, Homo sapiens
  Payload ID: 688;
  Gene Symbol: ADGRG1;
  Gene Name: adhesion G prt-coupled receptor G1;
  ENSP ID: ENSP00000455176
MTPQSLLQTTLFLLSLLFLVQASASSGAHGRGHREDFRFCSQRNQTHRSSLHYKPTPDLRISIENSEEALTVHAPFPAAHPASRSFPDPRGLYHFCLYWNRHAGRLHLLYGKRDFLLSDKASSLLCFQHQEESLAQGPPLLATSVTSWWSPQNISLPSAASFTFSFHS

SEQ ID NO: 3022 - protein, 78 aa, Homo sapiens
  Payload ID: 688;
  Gene Symbol: ADGRG1;
  Gene Name: adhesion G prt-coupled receptor G1;
  ENSP ID: ENSP00000455209
MTPQSLLQTTLFLLSLLFLVQGRCPRQGPQGRLSLLQPAEPDTQEQPPLQTHTRPAHLHRELRRGPHSPCPFPCSPPC

SEQ ID NO: 3023 - protein, 693 aa, Homo sapiens
  Payload ID: 688;
  Gene Symbol: ADGRG1;
  Gene Name: adhesion G prt-coupled receptor G1;
  Uniprot ID:  Q9Y653;
  ENSP ID: ENSP00000455215
MTPQSLLQTTLFLLSLLFLVQGAHGRGHREDFRFCSQRNQTHRSSLHYKPTPDLRISIENSEEALTVHAPFPAAHPASRSFPDPRGLYHFCLYWNRHAGRLHLLYGKRDFLLSDKASSLLCFQHQEESLAQGPPLLATSVTSWWSPQNISLPSAASFTFSFHSPPHTAAHNASVDMCELKRDLQLLSQFLKHPQKASRRPSAAPASQQLQSLESKLTSVRFMGDMVSFEEDRINATVWKLQPTAGLQDLHIHSRQEEEQSEIMEYSVLLPRTLFQRTKGRSGEAEKRLLLVDFSSQALFQDKNSSQVLGEKVLGIVVQNTKVANLTEPVVLTFQHQLQPKNVTLQCVFWVEDPTLSSPGHWSSAGCETVRRETQTSCFCNHLTYFAVLMVSSVEVDAVHKHYLSLLSYVGCVVSALACLVTIAAYLCSRVPLPCRRKPRDYTIKVHMNLLLAVFLLDTSFLLSEPVALTGSEAGCRASAIFLHFSLLTCLSWMGLEGYNLYRLVVEVFGTYVPGYLLKLSAMGWGFPIFLVTLVALVDVDNYGPIILAVHRTPEGVIYPSMCWIRDSLVSYITNLGLFSLVFLFNMAMLATMVVQILRLRPHTQKWSHVLTLLGLSLVLGLPWALIFFSFASGTFQLVVLYLFSIITSFQGFLIFIWYWSMRLQARGGPSPLKSNSDSARLPISSGSTSSSRI

SEQ ID NO: 3024 - protein, 98 aa, Homo sapiens
  Payload ID: 688;
  Gene Symbol: ADGRG1;
  Gene Name: adhesion G prt-coupled receptor G1;
  ENSP ID: ENSP00000455226
MTPQSLLQTTLFLLSLLFLVQASASSGAHGRGHREDFRFCSQRNQTHRSSLHYKPTPDLRISIENSEEALTVHAPFPAAHPASRSFPDPRGLYHFCLY

SEQ ID NO: 3025 - protein, 97 aa, Homo sapiens; identical to SEQ ID NO: 3016
  Payload ID: 688;
  Gene Symbol: ADGRG1;
  Gene Name: adhesion G prt-coupled receptor G1;
  ENSP ID: ENSP00000455245

SEQ ID NO: 3026 - protein, 687 aa, Homo sapiens; identical to SEQ ID NO: 3005
  Payload ID: 688;
  Gene Symbol: ADGRG1;
  Gene Name: adhesion G prt-coupled receptor G1;
  Uniprot ID:  Q9Y653;
  ENSP ID: ENSP00000455351

SEQ ID NO: 3027 - protein, 95 aa, Homo sapiens
  Payload ID: 688;
  Gene Symbol: ADGRG1;
  Gene Name: adhesion G prt-coupled receptor G1;
  ENSP ID: ENSP00000455553
MTPQSLLQTTLFLLSLLFLVQAHPASRSFPDPRGLYHFCLYWNRHAGRLHLLYGKRDFLLSDKASSLLCFQHQEESLAQGPPLLATSVTSWWSPQ

SEQ ID NO: 3028 - protein, 167 aa, Homo sapiens
  Payload ID: 688;
  Gene Symbol: ADGRG1;
  Gene Name: adhesion G prt-coupled receptor G1;
  ENSP ID: ENSP00000455600
MTPQSLLQTTLFLLSLLFLVQGAHGRGHREDFRFCSQRNQTHRSSLHYKPTPDLRISIENSEEALTVHAPFPAAHPASRSFPDPRGLYHFCLYWNRHAGRLHLLYGKRDFLLSDKASSLLCFQHQEESLAQGPPLLATSVTSWWSPQNISLPSAASFTFSFHSPPHT

SEQ ID NO: 3029 - protein, 90 aa, Homo sapiens
  Payload ID: 688;
  Gene Symbol: ADGRG1;
  Gene Name: adhesion G prt-coupled receptor G1;
  ENSP ID: ENSP00000455812
MTPQSLLQTTLFLLSLLFLVQASASSGAHGRGHREDFRFCSQRNQTHRSSLHYKPTPDLRISIENSEEALTVHAPFPAAHPASRSFPDPR

SEQ ID NO: 3030 - protein, 54 aa, Homo sapiens
  Payload ID: 688;
  Gene Symbol: ADGRG1;
  Gene Name: adhesion G prt-coupled receptor G1;
  ENSP ID: ENSP00000455965
MTPQSLLQTTLFLLSLLFLVQGAHGRGHREDFRFCSQRNQTHRSSLHYKPTPDL

SEQ ID NO: 3031 - protein, 159 aa, Homo sapiens
  Payload ID: 688;
  Gene Symbol: ADGRG1;
  Gene Name: adhesion G prt-coupled receptor G1;
  ENSP ID: ENSP00000456002
MTPQSLLQTTLFLLSLLFLVQGAHGRGHREDFRFCSQRNQTHRSSLHYKPTPDLRISIENSEEALTVHAPFPAAHPASRSFPDPRGLYHFCLYWNRHAGRLHLLYGKRDFLLSDKASSLLCFQHQEESLAQGPPLLATSVTSWWSPQNISLPSAASFTF

SEQ ID NO: 3032 - protein, 111 aa, Homo sapiens
  Payload ID: 688;
  Gene Symbol: ADGRG1;
  Gene Name: adhesion G prt-coupled receptor G1;
  ENSP ID: ENSP00000456147
MTPQSLLQTTLFLLSLLFLVQGAHGRGHREDFRFCSQRNQTHRSSLHYKPTPDLRISIENSEEALTVHAPFPAAHPASRSFPDPRGLYHFCLYWNRHAGRLHLLYGKRDFL

SEQ ID NO: 3033 - protein, 70 aa, Homo sapiens
  Payload ID: 688;
  Gene Symbol: ADGRG1;
  Gene Name: adhesion G prt-coupled receptor G1;
  ENSP ID: ENSP00000456166
MTPQSLLQTTLFLLSLLFLVQGAHGRGHREDFRFCSQRNQTHRSSLHYKPTPDLRISIENSEEALTVHAP

SEQ ID NO: 3034 - protein, 256 aa, Homo sapiens
  Payload ID: 688;
  Gene Symbol: ADGRG1;
  Gene Name: adhesion G prt-coupled receptor G1;
  ENSP ID: ENSP00000456238
MTPQSLLQTTLFLLSLLFLVQGAHGRGHREDFRFCSQRNQTHRSSLHYKPTPDLRISIENSEEALTVHAPFPAAHPASRSFPDPRGLYHFCLYWNRHAGRLHLLYGKRDFLLSDKASSLLCFQHQEESLAQGPPLLATSVTSWWSPQNISLPSAASFTFSFHSPPHTAAHNASVDMCELKRDLQLLSQFLKHPQKASRRPSAAPASQQLQSLESKLTSVRFMGDMVSFEEDRINATVWKLQPTAGLQDLHIHSRQE

SEQ ID NO: 3035 - protein, 118 aa, Homo sapiens
  Payload ID: 688;
  Gene Symbol: ADGRG1;
  Gene Name: adhesion G prt-coupled receptor G1;
  ENSP ID: ENSP00000456256
MTPQSLLQTTLFLLSLLFLVQASASSGAHGRGHREDFRFCSQRNQTHRSSLHYKPTPDLRISIENSEEALTVHAPFPAAHPASRSFPDPRGLYHFCLYWNRHAGRLHLLYGKRDFLLS

SEQ ID NO: 3036 - protein, 154 aa, Homo sapiens
  Payload ID: 688;
  Gene Symbol: ADGRG1;
  Gene Name: adhesion G prt-coupled receptor G1;
  ENSP ID: ENSP00000456263
MTPQSLLQTTLFLLSLLFLVQGAHGRGHREDFRFCSQRNQTHRSSLHYKPTPDLRISIENSEEALTVHAPFPAAHPASRSFPDPRGLYHFCLYWNRHAGRLHLLYGKRDFLLSDKASSLLCFQHQEESLAQGPPLLATSVTSWWSPQNISLPSA

SEQ ID NO: 3037 - protein, 167 aa, Homo sapiens; identical to SEQ ID NO: 3028
  Payload ID: 688;
  Gene Symbol: ADGRG1;
  Gene Name: adhesion G prt-coupled receptor G1;
  ENSP ID: ENSP00000456362

SEQ ID NO: 3038 - protein, 140 aa, Homo sapiens
  Payload ID: 688;
  Gene Symbol: ADGRG1;
  Gene Name: adhesion G prt-coupled receptor G1;
  ENSP ID: ENSP00000456469
MTPQSLLQTTLFLLSLLFLVQGAHGRGHREDFRFCSQRNQTHRSSLHYKPTPDLRISIENSEEALTVHAPFPAAHPASRSFPDPRGLYHFCLYWNRHAGRLHLLYGKRDFLLSDKASSLLCFQHQEESLAQGPPLLATSV

SEQ ID NO: 3039 - protein, 42 aa, Homo sapiens
  Payload ID: 688;
  Gene Symbol: ADGRG1;
  Gene Name: adhesion G prt-coupled receptor G1;
  ENSP ID: ENSP00000456494
MTPQSLLQTTLFLLSLLFLVQGAHGRGHREDFRFCSQRNQTH

SEQ ID NO: 3040 - protein, 118 aa, Homo sapiens
  Payload ID: 688;
  Gene Symbol: ADGRG1;
  Gene Name: adhesion G prt-coupled receptor G1;
  ENSP ID: ENSP00000456544
MTPQSLLQTTLFLLSLLFLVQAPATGSHLQPLPPQVPTAGATGKTFASAASGTRHTGAASTTNPHQTCASPSRTPKRPSQSMPLSLQPTLLPDPSLTPGASTTSASTGTDMLGDYIFS

SEQ ID NO: 3041 - protein, 131 aa, Homo sapiens; identical to SEQ ID NO: 3010
  Payload ID: 688;
  Gene Symbol: ADGRG1;
  Gene Name: adhesion G prt-coupled receptor G1;
  ENSP ID: ENSP00000456599

SEQ ID NO: 3042 - protein, 90 aa, Homo sapiens
  Payload ID: 688;
  Gene Symbol: ADGRG1;
  Gene Name: adhesion G prt-coupled receptor G1;
  ENSP ID: ENSP00000456603
MTPQSLLQTTLFLLSLLFLVQAPATGSHLQPLPPQVPTAGATGKTFASAASGTRHTGAASTTNPHQTCASPSRTPKRPSQSMPLSLQPTL

SEQ ID NO: 3043 - protein, 687 aa, Homo sapiens; identical to SEQ ID NO: 3005
  Payload ID: 688;
  Gene Symbol: ADGRG1;
  Gene Name: adhesion G prt-coupled receptor G1;
  Uniprot ID:  Q9Y653;
  ENSP ID: ENSP00000456620

SEQ ID NO: 3044 - protein, 116 aa, Homo sapiens; identical to SEQ ID NO: 3020
  Payload ID: 688;
  Gene Symbol: ADGRG1;
  Gene Name: adhesion G prt-coupled receptor G1;
  ENSP ID: ENSP00000456632

SEQ ID NO: 3045 - protein, 125 aa, Homo sapiens
  Payload ID: 688;
  Gene Symbol: ADGRG1;
  Gene Name: adhesion G prt-coupled receptor G1;
  ENSP ID: ENSP00000456682
MTPQSLLQTTLFLLSLLFLVQAHPASRSFPDPRGLYHFCLYWNRHAGRLHLLYGKRDFLLSDKASSLLCFQHQEESLAQGPPLLATSVTSWWSPQNISLPSAASFTFSFHSPPHTAAHNASVDMC

SEQ ID NO: 3046 - protein, 187 aa, Homo sapiens
  Payload ID: 688;
  Gene Symbol: ADGRG1;
  Gene Name: adhesion G prt-coupled receptor G1;
  ENSP ID: ENSP00000456731
  MOD_RES (1)..(1): Any amino acid
XSVDMCELKRDLQLLSQFLKHPQKASRRPSAAPASQQLQSLESKLTSVRFMGDMVSFEEDRINATVWKLQPTAGLQDLHIHSRQEEEQSEIMEYSVLLPRTLFQRTKGRSGEAEKRLLLVDFSSQALFQDKNSSQVLGEKVFGTYVPGYLLKLSAMGWGFPIFLVTLVALVDVDNYGPIILAVHRTP

SEQ ID NO: 3047 - protein, 49 aa, Homo sapiens
  Payload ID: 688;
  Gene Symbol: ADGRG1;
  Gene Name: adhesion G prt-coupled receptor G1;
  ENSP ID: ENSP00000456781
MTPQSLLQTTLFLLSLLFLVQGAHGRGHREDFRFCSQRNQTHRSSLHYK

SEQ ID NO: 3048 - protein, 107 aa, Homo sapiens
  Payload ID: 688;
  Gene Symbol: ADGRG1;
  Gene Name: adhesion G prt-coupled receptor G1;
  ENSP ID: ENSP00000456787
MTPQSLLQTTLFLLSLLFLVQGAHGRGHREDFRFCSQRNQTHRSSLHYKPTPDLRISIENSEEALTVHAPFPAAHPASRSFPDPRGLYHFCLYWNRHAGRLHLLYGK

SEQ ID NO: 3049 - protein, 693 aa, Homo sapiens; identical to SEQ ID NO: 3023
  Payload ID: 688;
  Gene Symbol: ADGRG1;
  Gene Name: adhesion G prt-coupled receptor G1;
  Uniprot ID:  Q9Y653;
  ENSP ID: ENSP00000456794

SEQ ID NO: 3050 - protein, 103 aa, Homo sapiens
  Payload ID: 688;
  Gene Symbol: ADGRG1;
  Gene Name: adhesion G prt-coupled receptor G1;
  ENSP ID: ENSP00000456796
MTPQSLLQTTLFLLSLLFLVQASASSGAHGRGHREDFRFCSQRNQTHRSSLHYKPTPDLRISIENSEEALTVHAPFPAAHPASRSFPDPRGLYHFCLYWNRHA

SEQ ID NO: 3051 - protein, 77 aa, Homo sapiens
  Payload ID: 688;
  Gene Symbol: ADGRG1;
  Gene Name: adhesion G prt-coupled receptor G1;
  ENSP ID: ENSP00000456819
MTPQSLLQTTLFLLSLLFLVQGAHGRGHREDFRFCSQRNQTHRSSLHYKPTPDLRISIENSEEALTVHAPFPAAHPA

SEQ ID NO: 3052 - protein, 118 aa, Homo sapiens; identical to SEQ ID NO: 3035
  Payload ID: 688;
  Gene Symbol: ADGRG1;
  Gene Name: adhesion G prt-coupled receptor G1;
  ENSP ID: ENSP00000457063

SEQ ID NO: 3053 - protein, 113 aa, Homo sapiens
  Payload ID: 688;
  Gene Symbol: ADGRG1;
  Gene Name: adhesion G prt-coupled receptor G1;
  ENSP ID: ENSP00000457073
MTPQSLLQTTLFLLSLLFLVQGAHGRGHREDFRFCSQRNQTHRSSLHYKPTPDLRISIENSEEALTVHAPFPAAHPASRSFPDPRGLYHFCLYWNRHAGRLHLLYGKRDFLLS

SEQ ID NO: 3054 - protein, 56 aa, Homo sapiens
  Payload ID: 688;
  Gene Symbol: ADGRG1;
  Gene Name: adhesion G prt-coupled receptor G1;
  ENSP ID: ENSP00000457122
MTPQSLLQTTLFLLSLLFLVQGAHGRGHREDFRFCSQRNQTHRSSLHYKPTPDLRI

SEQ ID NO: 3055 - protein, 84 aa, Homo sapiens
  Payload ID: 688;
  Gene Symbol: ADGRG1;
  Gene Name: adhesion G prt-coupled receptor G1;
  ENSP ID: ENSP00000457143
MTPQSLLQTTLFLLSLLFLVQGAHGRGHREDFRFCSQRNQTHRSSLHYKPTPDLRISIENSEEALTVHAPFPAAHPASRSFPDP

SEQ ID NO: 3056 - protein, 153 aa, Homo sapiens
  Payload ID: 688;
  Gene Symbol: ADGRG1;
  Gene Name: adhesion G prt-coupled receptor G1;
  ENSP ID: ENSP00000457178
MTPQSLLQTTLFLLSLLFLVQGAHGRGHREDFRFCSQRNQTHRSSLHYKPTPDLRISIENSEEALTVHAPFPAAHPASRSFPDPRGLYHFCLYWNRHAGRLHLLYGKRDFLLSDKASSLLCFQHQEESLAQGPPLLATSVTSWWSPQNISLPS

SEQ ID NO: 3057 - protein, 100 aa, Homo sapiens
  Payload ID: 688;
  Gene Symbol: ADGRG1;
  Gene Name: adhesion G prt-coupled receptor G1;
  ENSP ID: ENSP00000457223
MTPQSLLQTTLFLLSLLFLVQGAHGRGHREDFRFCSQRNQTHRSSLHYKPTPDLRISIENSEEALTVHAPFPAAHPASRSFPDPRGLYHFCLYWNRHAGR

SEQ ID NO: 3058 - protein, 118 aa, Homo sapiens
  Payload ID: 688;
  Gene Symbol: ADGRG1;
  Gene Name: adhesion G prt-coupled receptor G1;
  ENSP ID: ENSP00000457307
MTPQSLLQTTLFLLSLLFLVQGAHGRGHREDFRFCSQRNQTHRSSLHYKPTPDLRISIENSEEALTVHAPFPAAHPASRSFPDPRGLYHFCLYWNRHAGRLHLLYGKRDFLLSDKASS

SEQ ID NO: 3059 - protein, 687 aa, Homo sapiens; identical to SEQ ID NO: 3005
  Payload ID: 688;
  Gene Symbol: ADGRG1;
  Gene Name: adhesion G prt-coupled receptor G1;
  Uniprot ID:  Q9Y653;
  ENSP ID: ENSP00000457456

SEQ ID NO: 3060 - protein, 97 aa, Homo sapiens; identical to SEQ ID NO: 3014
  Payload ID: 688;
  Gene Symbol: ADGRG1;
  Gene Name: adhesion G prt-coupled receptor G1;
  ENSP ID: ENSP00000457612

SEQ ID NO: 3061 - protein, 122 aa, Homo sapiens
  Payload ID: 688;
  Gene Symbol: ADGRG1;
  Gene Name: adhesion G prt-coupled receptor G1;
  ENSP ID: ENSP00000457635
MTPQSLLQTTLFLLSLLFLVQGAHGRGHREDFRFCSQRNQTHRSSLHYKPTPDLRISIENSEEALTVHAPFPAAHPASRSFPDPRGLYHFCLYWNRHAGRLHLLYGKRDFLLSDKASSLLCF

SEQ ID NO: 3062 - protein, 114 aa, Homo sapiens
  Payload ID: 688;
  Gene Symbol: ADGRG1;
  Gene Name: adhesion G prt-coupled receptor G1;
  ENSP ID: ENSP00000457657
MTPQSLLQTTLFLLSLLFLVQASASSGAHGRGHREDFRFCSQRNQTHRSSLHYKPTPDLRISIENSEEALTVHAPFPAAHPASRSFPDPRGLYHFCLYWNRHAGRLHLLYGKRD

SEQ ID NO: 3063 - protein, 164 aa, Homo sapiens
  Payload ID: 688;
  Gene Symbol: ADGRG1;
  Gene Name: adhesion G prt-coupled receptor G1;
  ENSP ID: ENSP00000457806
MTPQSLLQTTLFLLSLLFLVQASASSGAHGRGHREDFRFCSQRNQTHRSSLHYKPTPDLRISIENSEEALTVHAPFPAAHPASRSFPDPRGLYHFCLYWNRHAGRLHLLYGKRDFLLSDKASSLLCFQHQEESLAQGPPLLATSVTSWWSPQNISLPSAASFTF

SEQ ID NO: 3064 - protein, 199 aa, Homo sapiens
  Payload ID: 688;
  Gene Symbol: ADGRG1;
  Gene Name: adhesion G prt-coupled receptor G1;
  ENSP ID: ENSP00000457953
MTPQSLLQTTLFLLSLLFLVQGAHGRGHREDFRFCSQRNQTHRSSLHYKPTPDLRISIENSEEALTVHAPFPAAHPASRSFPDPRGLYHFCLYWNRHAGRLHLLYGKRDFLLSDKASSLLCFQHQEESLAQGPPLLATSVTSWWSPQNISLPSAASFTFSFHSPPHTAAHNASVDMCELKRDLQLLSQFLKHPQKASRR

SEQ ID NO: 3065 - protein, 110 aa, Homo sapiens
  Payload ID: 688;
  Gene Symbol: ADGRG1;
  Gene Name: adhesion G prt-coupled receptor G1;
  ENSP ID: ENSP00000457979
MTPQSLLQTTLFLLSLLFLVQGAHGRGHREDFRFCSQRNQTHRSSLHYKPTPDLRISIENSEEALTVHAPFPAAHPASRSFPDPRGLYHFCLYWNRHAGRLHLLYGKRDF

SEQ ID NO: 3066 - protein, 68 aa, Homo sapiens
  Payload ID: 688;
  Gene Symbol: ADGRG1;
  Gene Name: adhesion G prt-coupled receptor G1;
  ENSP ID: ENSP00000457994
MTPQSLLQTTLFLLSLLFLVQASSLLCFQHQEESLAQGPPLLATSVTSWWSPQNISLPSAASFTFSFH

SEQ ID NO: 3067 - protein, 144 aa, Homo sapiens
  Payload ID: 688;
  Gene Symbol: ADGRG1;
  Gene Name: adhesion G prt-coupled receptor G1;
  ENSP ID: ENSP00000458014
MTPQSLLQTTLFLLSLLFLVQASASSGAHGRGHREDFRFCSQRNQTHRSSLHYKPTPDLRISIENSEEALTVHAPFPAAHPASRSFPDPRGLYHFCLYWNRHAGRLHLLYGKRDFLLSDKASSLLCFQHQEESLAQGPPLLATS

SEQ ID NO: 3068 - protein, 162 aa, Homo sapiens
  Payload ID: 688;
  Gene Symbol: ADGRG1;
  Gene Name: adhesion G prt-coupled receptor G1;
  ENSP ID: ENSP00000458063
MTPQSLLQTTLFLLSLLFLVQGAHGRGHREDFRFCSQRNQTHRSSLHYKPTPDLRISIENSEEALTVHAPFPAAHPASRSFPDPRGLYHFCLYWNRHAGRLHLLYGKRDFLLSDKASSLLCFQHQEESLAQGPPLLATSVTSWWSPQNISLPSAASFTFSFH

SEQ ID NO: 3069 - protein, 84 aa, Homo sapiens; identical to SEQ ID NO: 3055
  Payload ID: 688;
  Gene Symbol: ADGRG1;
  Gene Name: adhesion G prt-coupled receptor G1;
  ENSP ID: ENSP00000458087

SEQ ID NO: 3070 - protein, 898 aa, Homo sapiens
  Payload ID: 689;
  Gene Symbol: ADGRG2;
  Gene Name: adhesion G prt-coupled receptor G2;
  Uniprot ID:  Q8IZP9;
  ENSP ID: ENSP00000344972
MVFSVRQCGHVGRTEEVLLTFKIFLVIICLHVVLVTSLEEDTDNSSLSPPPEVETTSLNDVTLSLLPSNETGVKPQRNICNLSSICNDSAFFRGEIMFQYDKESTVPQNQHITNGTLTGVLSLSELKRSELNKTLQTLSETYFIMCATAEAQSTLNCTFTIKLNNTMNACAVIAALERVKIRPMEHCCCSVRIPCPSSPEELEKLQCDLQDPIVCLADHPRGPPFSSSQSIPVVPRATVLSQVPKATSFAEPPDYSPVTHNVPSPIGEIQPLSPQPSAPIASSPAIDMPPQSETISSPMPQTHVSGTPPPVKASFSSPTVSAPANVNTTSAPPVQTDIVNTSSISDLENQVLQMEKALSLGSLEPNLAGEMINQVSRLLHSPPDMLAPLAQRLLKVVDDIGLQLNFSNTTISLTSPSLALAVIRVNASSFNTTTFVAQDPANLQDELTVRCVFWDLGRNGGRGGWSDNGCSVKDRRLNETICTCSHLTSFGVLLDLSRTSVLPAQMMALTFITYIGCGLSSIFLSVTLVTYIAFEKIRRDYPSKILIQLCAALLLLNLVFLLDSWIALYKMQGLCISVAVFLHYFLLVSFTWMGLEAFHMYLALVKVFNTYIRKYILKFCIVGWGVPAVVVTIILTISPDNYGLGSYGKFPNGSPDDFCWINNNAVFYITVVGYFCVIFLLNVSMFIVVLVQLCRIKKKKQLGAQRKTSIQDLRSIAGLTFLLGITWGFAFFAWGPVNVTFMYLFAIFNTLQGFFIFIFYCVAKENVRKQWRRYLCCGKLRLAENSDWSKTATNGLKKQTVNQGVSSSSNSLQSSSNSTNSTTLLVNNDCSVHASGNGNASTERNGVSFSVQNGDVCLHDFTGKQHMFNEKEDSCNGKGRMALRRTSKRGSLHFIEQM

SEQ ID NO: 3071 - protein, 898 aa, Homo sapiens; identical to SEQ ID NO: 3070
  Payload ID: 689;
  Gene Symbol: ADGRG2;
  Gene Name: adhesion G prt-coupled receptor G2;
  Uniprot ID:  Q8IZP9;
  ENSP ID: ENSP00000346845

SEQ ID NO: 3072 - protein, 1003 aa, Homo sapiens
  Payload ID: 689;
  Gene Symbol: ADGRG2;
  Gene Name: adhesion G prt-coupled receptor G2;
  Uniprot ID:  Q8IZP9;
  ENSP ID: ENSP00000349015
MVFSVRQCGHVGRTEEVLLTFKIFLVIICLHVVLVTSLEEDTDNSSLSPPPAKLSVVSFAPSSNGTPEVETTSLNDVTLSLLPSNETGVKPQRNICNLSSICNDSAFFRGEIMFQYDKESTVPQNQHITNGTLTGVLSLSELKRSELNKTLQTLSETYFIMCATAEAQSTLNCTFTIKLNNTMNACAVIAALERVKIRPMEHCCCSVRIPCPSSPEELEKLQCDLQDPIVCLADHPRGPPFSSSQSIPVVPRATVLSQVPKATSFAEPPDYSPVTHNVPSPIGEIQPLSPQPSAPIASSPAIDMPPQSETISSPMPQTHVSGTPPPVKASFSSPTVSAPANVNTTSAPPVQTDIVNTSSISDLENQVLQMEKALSLGSLEPNLAGEMINQVSRLLHSPPDMLAPLAQRLLKVVDDIGLQLNFSNTTISLTSPSLALAVIRVNASSFNTTTFVAQDPANLQVSLETQAPENSIGTITLPSSLMNNLPAHDMELASRVQFNFFETPALFQDPSLENLSLISYVISSSVANLTVRNLTRNVTVTLKHINPSQDELTVRCVFWDLGRNGGRGGWSDNGCSVKDRRLNETICTCSHLTSFGVLLDLSRTSVLPAQMMALTFITYIGCGLSSIFLSVTLVTYIAFEKIRRDYPSKILIQLCAALLLLNLVFLLDSWIALYKMQGLCISVAVFLHYFLLVSFTWMGLEAFHMYLALVKVFNTYIRKYILKFCIVGWGVPAVVVTIILTISPDNYGLGSYGKFPNGSPDDFCWINNNAVFYITVVGYFCVIFLLNVSMFIVVLVQLCRIKKKKQLGAQRKTSIQDLRSIAGLTFLLGITWGFAFFAWGPVNVTFMYLFAIFNTLQGFFIFIFYCVAKENVRKQWRRYLCCGKLRLAENSDWSKTATNGLKKQTVNQGVSSSSNSLQSSSNSTNSTTLLVNNDCSVHASGNGNASTERNGVSFSVQNGDVCLHDFTGKQHMFNEKEDSCNGKGRMALRRTSKRGSLHFIEQM

SEQ ID NO: 3073 - protein, 987 aa, Homo sapiens
  Payload ID: 689;
  Gene Symbol: ADGRG2;
  Gene Name: adhesion G prt-coupled receptor G2;
  Uniprot ID:  Q8IZP9;
  ENSP ID: ENSP00000350152
MVFSVRQCGHVGRTEEVLLTFKIFLVIICLHVVLVTSLEEDTDNSSLSPPPEVETTSLNDVTLSLLPSNETGVKPQRNICNLSSICNDSAFFRGEIMFQYDKESTVPQNQHITNGTLTGVLSLSELKRSELNKTLQTLSETYFIMCATAEAQSTLNCTFTIKLNNTMNACAVIAALERVKIRPMEHCCCSVRIPCPSSPEELEKLQCDLQDPIVCLADHPRGPPFSSSQSIPVVPRATVLSQVPKATSFAEPPDYSPVTHNVPSPIGEIQPLSPQPSAPIASSPAIDMPPQSETISSPMPQTHVSGTPPPVKASFSSPTVSAPANVNTTSAPPVQTDIVNTSSISDLENQVLQMEKALSLGSLEPNLAGEMINQVSRLLHSPPDMLAPLAQRLLKVVDDIGLQLNFSNTTISLTSPSLALAVIRVNASSFNTTTFVAQDPANLQVSLETQAPENSIGTITLPSSLMNNLPAHDMELASRVQFNFFETPALFQDPSLENLSLISYVISSSVANLTVRNLTRNVTVTLKHINPSQDELTVRCVFWDLGRNGGRGGWSDNGCSVKDRRLNETICTCSHLTSFGVLLDLSRTSVLPAQMMALTFITYIGCGLSSIFLSVTLVTYIAFEKIRRDYPSKILIQLCAALLLLNLVFLLDSWIALYKMQGLCISVAVFLHYFLLVSFTWMGLEAFHMYLALVKVFNTYIRKYILKFCIVGWGVPAVVVTIILTISPDNYGLGSYGKFPNGSPDDFCWINNNAVFYITVVGYFCVIFLLNVSMFIVVLVQLCRIKKKKQLGAQRKTSIQDLRSIAGLTFLLGITWGFAFFAWGPVNVTFMYLFAIFNTLQGFFIFIFYCVAKENVRKQWRRYLCCGKLRLAENSDWSKTATNGLKKQTVNQGVSSSSNSLQSSSNSTNSTTLLVNNDCSVHASGNGNASTERNGVSFSVQNGDVCLHDFTGKQHMFNEKEDSCNGKGRMALRRTSKRGSLHFIEQM

SEQ ID NO: 3074 - protein, 1014 aa, Homo sapiens
  Payload ID: 689;
  Gene Symbol: ADGRG2;
  Gene Name: adhesion G prt-coupled receptor G2;
  Uniprot ID:  Q8IZP9;
  ENSP ID: ENSP00000350680
MVFSVRQCGHVGRTEEVLLTFKIFLVIICLHVVLVTSLEEDTDNSSLSPPPAKLSVVSFAPSSNEVETTSLNDVTLSLLPSNETEKTKITIVKTFNASGVKPQRNICNLSSICNDSAFFRGEIMFQYDKESTVPQNQHITNGTLTGVLSLSELKRSELNKTLQTLSETYFIMCATAEAQSTLNCTFTIKLNNTMNACAVIAALERVKIRPMEHCCCSVRIPCPSSPEELEKLQCDLQDPIVCLADHPRGPPFSSSQSIPVVPRATVLSQVPKATSFAEPPDYSPVTHNVPSPIGEIQPLSPQPSAPIASSPAIDMPPQSETISSPMPQTHVSGTPPPVKASFSSPTVSAPANVNTTSAPPVQTDIVNTSSISDLENQVLQMEKALSLGSLEPNLAGEMINQVSRLLHSPPDMLAPLAQRLLKVVDDIGLQLNFSNTTISLTSPSLALAVIRVNASSFNTTTFVAQDPANLQVSLETQAPENSIGTITLPSSLMNNLPAHDMELASRVQFNFFETPALFQDPSLENLSLISYVISSSVANLTVRNLTRNVTVTLKHINPSQDELTVRCVFWDLGRNGGRGGWSDNGCSVKDRRLNETICTCSHLTSFGVLLDLSRTSVLPAQMMALTFITYIGCGLSSIFLSVTLVTYIAFEKIRRDYPSKILIQLCAALLLLNLVFLLDSWIALYKMQGLCISVAVFLHYFLLVSFTWMGLEAFHMYLALVKVFNTYIRKYILKFCIVGWGVPAVVVTIILTISPDNYGLGSYGKFPNGSPDDFCWINNNAVFYITVVGYFCVIFLLNVSMFIVVLVQLCRIKKKKQLGAQRKTSIQDLRSIAGLTFLLGITWGFAFFAWGPVNVTFMYLFAIFNTLQGFFIFIFYCVAKENVRKQWRRYLCCGKLRLAENSDWSKTATNGLKKQTVNQGVSSSSNSLQSSSNSTNSTTLLVNNDCSVHASGNGNASTERNGVSFSVQNGDVCLHDFTGKQHMFNEKEDSCNGKGRMALRRTSKRGSLHFIEQM

SEQ ID NO: 3075 - protein, 995 aa, Homo sapiens
  Payload ID: 689;
  Gene Symbol: ADGRG2;
  Gene Name: adhesion G prt-coupled receptor G2;
  Uniprot ID:  Q8IZP9;
  ENSP ID: ENSP00000353421
MVFSVRQCGHVGRTEEVLLTFKIFLVIICLHVVLVTSLEEDTDNSSLSPPPAKLSVVSFAPSSNGTPDVTLSLLPSNETGVKPQRNICNLSSICNDSAFFRGEIMFQYDKESTVPQNQHITNGTLTGVLSLSELKRSELNKTLQTLSETYFIMCATAEAQSTLNCTFTIKLNNTMNACAVIAALERVKIRPMEHCCCSVRIPCPSSPEELEKLQCDLQDPIVCLADHPRGPPFSSSQSIPVVPRATVLSQVPKATSFAEPPDYSPVTHNVPSPIGEIQPLSPQPSAPIASSPAIDMPPQSETISSPMPQTHVSGTPPPVKASFSSPTVSAPANVNTTSAPPVQTDIVNTSSISDLENQVLQMEKALSLGSLEPNLAGEMINQVSRLLHSPPDMLAPLAQRLLKVVDDIGLQLNFSNTTISLTSPSLALAVIRVNASSFNTTTFVAQDPANLQVSLETQAPENSIGTITLPSSLMNNLPAHDMELASRVQFNFFETPALFQDPSLENLSLISYVISSSVANLTVRNLTRNVTVTLKHINPSQDELTVRCVFWDLGRNGGRGGWSDNGCSVKDRRLNETICTCSHLTSFGVLLDLSRTSVLPAQMMALTFITYIGCGLSSIFLSVTLVTYIAFEKIRRDYPSKILIQLCAALLLLNLVFLLDSWIALYKMQGLCISVAVFLHYFLLVSFTWMGLEAFHMYLALVKVFNTYIRKYILKFCIVGWGVPAVVVTIILTISPDNYGLGSYGKFPNGSPDDFCWINNNAVFYITVVGYFCVIFLLNVSMFIVVLVQLCRIKKKKQLGAQRKTSIQDLRSIAGLTFLLGITWGFAFFAWGPVNVTFMYLFAIFNTLQGFFIFIFYCVAKENVRKQWRRYLCCGKLRLAENSDWSKTATNGLKKQTVNQGVSSSSNSLQSSSNSTNSTTLLVNNDCSVHASGNGNASTERNGVSFSVQNGDVCLHDFTGKQHMFNEKEDSCNGKGRMALRRTSKRGSLHFIEQM

SEQ ID NO: 3076 - protein, 1017 aa, Homo sapiens
  Payload ID: 689;
  Gene Symbol: ADGRG2;
  Gene Name: adhesion G prt-coupled receptor G2;
  Uniprot ID:  Q8IZP9;
  ENSP ID: ENSP00000369198
MVFSVRQCGHVGRTEEVLLTFKIFLVIICLHVVLVTSLEEDTDNSSLSPPPAKLSVVSFAPSSNGTPEVETTSLNDVTLSLLPSNETEKTKITIVKTFNASGVKPQRNICNLSSICNDSAFFRGEIMFQYDKESTVPQNQHITNGTLTGVLSLSELKRSELNKTLQTLSETYFIMCATAEAQSTLNCTFTIKLNNTMNACAVIAALERVKIRPMEHCCCSVRIPCPSSPEELEKLQCDLQDPIVCLADHPRGPPFSSSQSIPVVPRATVLSQVPKATSFAEPPDYSPVTHNVPSPIGEIQPLSPQPSAPIASSPAIDMPPQSETISSPMPQTHVSGTPPPVKASFSSPTVSAPANVNTTSAPPVQTDIVNTSSISDLENQVLQMEKALSLGSLEPNLAGEMINQVSRLLHSPPDMLAPLAQRLLKVVDDIGLQLNFSNTTISLTSPSLALAVIRVNASSFNTTTFVAQDPANLQVSLETQAPENSIGTITLPSSLMNNLPAHDMELASRVQFNFFETPALFQDPSLENLSLISYVISSSVANLTVRNLTRNVTVTLKHINPSQDELTVRCVFWDLGRNGGRGGWSDNGCSVKDRRLNETICTCSHLTSFGVLLDLSRTSVLPAQMMALTFITYIGCGLSSIFLSVTLVTYIAFEKIRRDYPSKILIQLCAALLLLNLVFLLDSWIALYKMQGLCISVAVFLHYFLLVSFTWMGLEAFHMYLALVKVFNTYIRKYILKFCIVGWGVPAVVVTIILTISPDNYGLGSYGKFPNGSPDDFCWINNNAVFYITVVGYFCVIFLLNVSMFIVVLVQLCRIKKKKQLGAQRKTSIQDLRSIAGLTFLLGITWGFAFFAWGPVNVTFMYLFAIFNTLQGFFIFIFYCVAKENVRKQWRRYLCCGKLRLAENSDWSKTATNGLKKQTVNQGVSSSSNSLQSSSNSTNSTTLLVNNDCSVHASGNGNASTERNGVSFSVQNGDVCLHDFTGKQHMFNEKEDSCNGKGRMALRRTSKRGSLHFIEQM

SEQ ID NO: 3077 - protein, 966 aa, Homo sapiens
  Payload ID: 689;
  Gene Symbol: ADGRG2;
  Gene Name: adhesion G prt-coupled receptor G2;
  Uniprot ID:  Q8IZP9;
  ENSP ID: ENSP00000369202
MVFSVRQCGHVGRTEEVLLTFKIFLVIICLHVVLVTSLEEDTDNSSLSPPPAKLSVVSFAPSSNGTPEVETTSLNDVTLSLLPSNETEKTKITIVKTFNASGVKPQRNICNLSSICNDSAFFRGEIMFQYDKESTVPQNQHITNGTLTGVLSLSELKRSELNKTLQTLSETYFIMCATAEAQSTLNCTFTIKLNNTMNACAVIAALERVKIRPMEHCCCSVRIPCPSSPEELEKLQCDLQDPIVCLADHPRGPPFSSSQSIPVVPRATVLSQVPKATSFAEPPDYSPVTHNVPSPIGEIQPLSPQPSAPIASSPAIDMPPQSETISSPMPQTHVSGTPPPVKASFSSPTVSAPANVNTTSAPPVQTDIVNTSSISDLENQVLQMEKALSLGSLEPNLAGEMINQVSRLLHSPPDMLAPLAQRLLKVVDDIGLQLNFSNTTISLTSPSLALAVIRVNASSFNTTTFVAQDPANLQVSLETQAPENSIGTITLPSSLMNNLPAHDMELASRVQFNFFETPALFQDPSLENLSLISYVISSSVANLTVRNLTRNVTVTLKHINPSQDELTVRCVFWDLGRNGGRGGWSDNGCSVKDRRLNETICTCSHLTSFGVLLDLSRTSVLPAQMMALTFITYIGCGLSSIFLSVTLVTYIAFEKIRRDYPSKILIQLCAALLLLNLVFLLDSWIALYKMQGLCISVAVFLHYFLLVSFTWMGLEAFHMYLALVKVFNTYIRKYILKFCIVGWGVPAVVVTIILTISPDNYGLGSYGKFPNGSPDDFCWINNNAVFYITVVGYFCVIFLLNVSMFIVVLVQLCRIKKKKQLGAQRKTSIQDLRSIAGLTFLLGITWGFAFFAWGPVNVTFMYLFAIFNTLQGFFIFIFYCVAKENVRKQWRRYLCCGKLRLAENSGNASTERNGVSFSVQNGDVCLHDFTGKQHMFNEKEDSCNGKGRMALRRTSKRGSLHFIEQM

SEQ ID NO: 3078 - protein, 993 aa, Homo sapiens
  Payload ID: 689;
  Gene Symbol: ADGRG2;
  Gene Name: adhesion G prt-coupled receptor G2;
  Uniprot ID:  Q8IZP9;
  ENSP ID: ENSP00000369205
MVFSVRQCGHVGRTEEVLLTFKIFLVIICLHVVLVTSLEEDTDNSSLSPPPDVTLSLLPSNETEKTKITIVKTFNASGVKPQRNICNLSSICNDSAFFRGEIMFQYDKESTVPQNQHITNGTLTGVLSLSELKRSELNKTLQTLSETYFIMCATAEAQSTLNCTFTIKLNNTMNACAVIAALERVKIRPMEHCCCSVRIPCPSSPEELEKLQCDLQDPIVCLADHPRGPPFSSSQSIPVVPRATVLSQVPKATSFAEPPDYSPVTHNVPSPIGEIQPLSPQPSAPIASSPAIDMPPQSETISSPMPQTHVSGTPPPVKASFSSPTVSAPANVNTTSAPPVQTDIVNTSSISDLENQVLQMEKALSLGSLEPNLAGEMINQVSRLLHSPPDMLAPLAQRLLKVVDDIGLQLNFSNTTISLTSPSLALAVIRVNASSFNTTTFVAQDPANLQVSLETQAPENSIGTITLPSSLMNNLPAHDMELASRVQFNFFETPALFQDPSLENLSLISYVISSSVANLTVRNLTRNVTVTLKHINPSQDELTVRCVFWDLGRNGGRGGWSDNGCSVKDRRLNETICTCSHLTSFGVLLDLSRTSVLPAQMMALTFITYIGCGLSSIFLSVTLVTYIAFEKIRRDYPSKILIQLCAALLLLNLVFLLDSWIALYKMQGLCISVAVFLHYFLLVSFTWMGLEAFHMYLALVKVFNTYIRKYILKFCIVGWGVPAVVVTIILTISPDNYGLGSYGKFPNGSPDDFCWINNNAVFYITVVGYFCVIFLLNVSMFIVVLVQLCRIKKKKQLGAQRKTSIQDLRSIAGLTFLLGITWGFAFFAWGPVNVTFMYLFAIFNTLQGFFIFIFYCVAKENVRKQWRRYLCCGKLRLAENSDWSKTATNGLKKQTVNQGVSSSSNSLQSSSNSTNSTTLLVNNDCSVHASGNGNASTERNGVSFSVQNGDVCLHDFTGKQHMFNEKEDSCNGKGRMALRRTSKRGSLHFIEQM

SEQ ID NO: 3079 - protein, 1001 aa, Homo sapiens
  Payload ID: 689;
  Gene Symbol: ADGRG2;
  Gene Name: adhesion G prt-coupled receptor G2;
  Uniprot ID:  Q8IZP9;
  ENSP ID: ENSP00000369207
MVFSVRQCGHVGRTEEVLLTFKIFLVIICLHVVLVTSLEEDTDNSSLSPPPEVETTSLNDVTLSLLPSNETEKTKITIVKTFNASGVKPQRNICNLSSICNDSAFFRGEIMFQYDKESTVPQNQHITNGTLTGVLSLSELKRSELNKTLQTLSETYFIMCATAEAQSTLNCTFTIKLNNTMNACAVIAALERVKIRPMEHCCCSVRIPCPSSPEELEKLQCDLQDPIVCLADHPRGPPFSSSQSIPVVPRATVLSQVPKATSFAEPPDYSPVTHNVPSPIGEIQPLSPQPSAPIASSPAIDMPPQSETISSPMPQTHVSGTPPPVKASFSSPTVSAPANVNTTSAPPVQTDIVNTSSISDLENQVLQMEKALSLGSLEPNLAGEMINQVSRLLHSPPDMLAPLAQRLLKVVDDIGLQLNFSNTTISLTSPSLALAVIRVNASSFNTTTFVAQDPANLQVSLETQAPENSIGTITLPSSLMNNLPAHDMELASRVQFNFFETPALFQDPSLENLSLISYVISSSVANLTVRNLTRNVTVTLKHINPSQDELTVRCVFWDLGRNGGRGGWSDNGCSVKDRRLNETICTCSHLTSFGVLLDLSRTSVLPAQMMALTFITYIGCGLSSIFLSVTLVTYIAFEKIRRDYPSKILIQLCAALLLLNLVFLLDSWIALYKMQGLCISVAVFLHYFLLVSFTWMGLEAFHMYLALVKVFNTYIRKYILKFCIVGWGVPAVVVTIILTISPDNYGLGSYGKFPNGSPDDFCWINNNAVFYITVVGYFCVIFLLNVSMFIVVLVQLCRIKKKKQLGAQRKTSIQDLRSIAGLTFLLGITWGFAFFAWGPVNVTFMYLFAIFNTLQGFFIFIFYCVAKENVRKQWRRYLCCGKLRLAENSDWSKTATNGLKKQTVNQGVSSSSNSLQSSSNSTNSTTLLVNNDCSVHASGNGNASTERNGVSFSVQNGDVCLHDFTGKQHMFNEKEDSCNGKGRMALRRTSKRGSLHFIEQM

SEQ ID NO: 3080 - protein, 549 aa, Homo sapiens
  Payload ID: 690;
  Gene Symbol: ADGRG3;
  Gene Name: adhesion G prt-coupled receptor G3;
  Uniprot ID:  Q86Y34;
  ENSP ID: ENSP00000332900
MATPRGLGALLLLLLLPTSGQEKPTEGPRNTCLGSNNMYDIFNLNDKALCFTKCRQSGSDSCNVENLQRYWLNYEAHLMKEGLTQKVNTPFLKALVQNLSTNTAEDFYFSLEPSQVPRQVMKDEDKPPDRVRLPKSLFRSLPGNRSVVRLAVTILDIGPGTLFKGPRLGLGDGSGVLNNRLVGLSVGQMHVTKLAEPLEIVFSHQRPPPNMTLTCVFWDVTKGTTGDWSSEGCSTEVRPEGTVCCCDHLTFFALLLRPTLDQSTVHILTRISQAGCGVSMIFLAFTIILYAFLRLSRERFKSEDAPKIHVALGGSLFLLNLAFLVNVGSGSKGSDAACWARGAVFHYFLLCAFTWMGLEAFHLYLLAVRVFNTYFGHYFLKLSLVGWGLPALMVIGTGSANSYGLYTIRDRENRTSLELCWFREGTTMYALYITVHGYFLITFLFGMVVLALVVWKIFTLSRATAVKERGKNRKKVLTLLGLSSLVGVTWGLAIFTPLGLSTVYIFALFNSLQGVFICCWFTILYLPSQSTTVSSSTARLDQAHSASQE

SEQ ID NO: 3081 - protein, 429 aa, Homo sapiens
  Payload ID: 690;
  Gene Symbol: ADGRG3;
  Gene Name: adhesion G prt-coupled receptor G3;
  ENSP ID: ENSP00000404803
MKDEDKPPDRVRLPKSLFRSLPGNRSVVRLAVTILDIGPGTLFKGPRLGLGDGSGVLNNRLVGLSVGQMHVTKLAEPLEIVFSHQRPPPNMTLTCVFWDVTKGTTGDWSSEGCSTEVRPEGTVCCCDHLTFFALLLRPTLDQSTVHILTRISQAGCGVSMIFLAFTIILYAFLRLSRERFKSEDAPKIHVALGGSLFLLNLAFLVNVGSGSKGSDAACWARGAVFHYFLLCAFTWMGLEAFHLYLLAVRVFNTYFGHYFLKLSLVGWGLPALMVIGTGSANSYGLYTIRDRENRTSLELCWFREGTTMYALYITVHGYFLITFLFGMVVLALVVWKIFTLSRATAVKERGKNRKKVLTLLGLSSLVGVTWGLAIFTPLGLSTVYIFALFNSLQGVFICCWFTILYLPSQSTTVSSSTARLDQAHSASQE

SEQ ID NO: 3082 - protein, 315 aa, Homo sapiens
  Payload ID: 690;
  Gene Symbol: ADGRG3;
  Gene Name: adhesion G prt-coupled receptor G3;
  ENSP ID: ENSP00000456409
MATPRGLGALLLLLLLPTSGQEKPTEGPRNTCLGSNNMYDIFNLNDKALCFTKCRQSGSDSCNVENLQRYWLNYEAHLMKEGLTQKVNTPFLKALVQNLSTNTAEDFYFSLEPSQVPRQVMKDEDKPPDRVRLPKSLFRSLPGNRSVVRLAVTILDIGPGTLFKGPRLGLGDGSGVLNNRLVGLSVGQMHVTKLAEPLEIVFSHQRPPPNMTLTCVFWDVTKGTTGDWSSEGCSTEVRPEGTVCCCDHLTFFALLLRPTLDQSTVHILTRISQAGCGVSMIFLAFTIILYAFLRPARPDGHRHWECQQLRPLHHP

SEQ ID NO: 3083 - protein, 69 aa, Homo sapiens
  Payload ID: 690;
  Gene Symbol: ADGRG3;
  Gene Name: adhesion G prt-coupled receptor G3;
  ENSP ID: ENSP00000456576
MATPRGLGALLLLLLLPTSGQEKPTEGPRNTCLGSNNMYDIFNLNDKALCFTKCRQSGSDSCNVENLQR

SEQ ID NO: 3084 - protein, 3080 aa, Homo sapiens
  Payload ID: 691;
  Gene Symbol: ADGRG4;
  Gene Name: adhesion G prt-coupled receptor G4;
  Uniprot ID:  Q8IZF6;
  ENSP ID: ENSP00000359686
MKEHIIYQKLYGLILMSSFIFLSDTLSLKGKKLDFFGRGDTYVSLIDTIPELSRFTACIDLVFMDDNSRYWMAFSYITNNALLGREDIDLGLAGDHQQLILYRLGKTFSIRHHLASFQWHTICLIWDGVKGKLELFLNKERILEVTDQPHNLTPHGTLFLGHFLKNESSEVKSMMRSFPGSLYYFQLWDHILENEEFMKCLDGNIVSWEEDVWLVNKIIPTVDRTLRCFVPENMTIQEKSTTVSQQIDMTTPSQITGVKPQNTAHSSTLLSQSIPIFATDYTTISYSNTTSPPLETMTAQKILKTLVDETATFAVDVLSTSSAISLPTQSISIDNTTNSMKKTKSPSSESTKTTKMVEAMATEIFQPPTPSNFLSTSRFTKNSVVSTTSAIKSQSAVTKTTSLFSTIESTSMSTTPCLKQKSTNTGALPISTAGQEFIESTAAGTVPWFTVEKTSPASTHVGTASSFPPEPVLISTAAPVDSVFPRNQTAFPLATTDMKIAFTVHSLTLPTRLIETTPAPRTAETELTSTNFQDVSLPRVEDAMSTSMSKETSSKTFSFLTSFSFTGTESVQTVIDAEATRTALTPEITLASTVAETMLSSTITGRVYTQNTPTADGHLLTLMSTRSASTSKAPESGPTSTTDEAAHLFSSNETIWTSRPDQALLASMNTTTILTFVPNENFTSAFHENTTYTEYLSATTNITPLKASPEGKGTTANDATTARYTTAVSKLTSPWFANFSIVSGTTSITNMPEFKLTTLLLKTIPMSTKPANELPLTPRETVVPSVDIISTLACIQPNFSTEESASETTQTEINGAIVFGGTTTPVPKSATTQRLNATVTRKEATSHYLMRKSTIAAVAEVSPFSTMLEVTDESAQRVTASVTVSSFPDIEKLSTPLDNKTATTEVRESWLLTKLVKTTPRSSYNEMTEMFNFNHTYVAHWTSETSEGISAGSPTSGSTHIFGEPLGASTTRISETSFSTTPTDRTATSLSDGILPPQPTAAHSSATPVPVTHMFSLPVNGSSVVAEETEVTMSEPSTLARAFSTSVLSDVSNLSSTTMTTALVPPLDQTASTTIVIVPTHGDLIRTTSEATVISVRKTSMAVPSLTETPFHSLRLSTPVTAKAETTLFSTSVDTVTPSTHTLVCSKPPPDNIPPASSTHVISTTSTPEATQPISQVEETSTYALSFPYTFSGGGVVASLATGTTETSVVDETTPSHISANKLTTSVNSHISSSATYRVHTPVSIQLVTSTSVLSSDKDQMTISLGKTPRTMEVTEMSPSKNSFISYSRGTPSLEMTDTGFPETTKISSHQTHSPSEIPLGTPSDGNLASSPTSGSTQITPTLTSSNTVGVHIPEMSTSLGKTALPSQALTITTFLCPEKESTSALPAYTPRTVEMIVNSTYVTHSVSYGQDTSFVDTTTSSSTRISNPMDINTTFSHLHSLRTQPEVTSVASFISESTQTFPESLSLSTAGLYNDGFTVLSDRITTAFSVPNVPTMLPRESSMATSTPIYQMSSLPVNVTAFTSKKVSDTPPIVITKSSKTMHPGCLKSPCTATSGPMSEMSSIPVNNSAFTPATVSSDTSTRVGLFSTLLSSVTPRTTMTMQTSTLDVTPVIYAGATSKNKMVSSAFTTEMIEAPSRITPTTFLSPTEPTLPFVKTVPTTIMAGIVTPFVGTTAFSPLSSKSTGAISSIPKTTFSPFLSATQQSSQADEATTLGILSGITNRSLSTVNSGTGVALTDTYSRITVPENMLSPTHADSLHTSFNIQVSPSLTSFKSASGPTKNVKTTTNCFSSNTRKMTSLLEKTSLTNYATSLNTPVSYPPWTPSSATLPSLTSFVYSPHSTEAEISTPKTSPPPTSQMVEFPVLGTRMTSSNTQPLLMTSWNIPTAEGSQFPISTTINVPTSNEMETETLHLVPGPLSTFTASQTGLVSKDVMAMSSIPMSGILPNHGLSENPSLSTSLRAITSTLADVKHTFEKMTTSVTPGTTLPSILSGATSGSVISKSPILTWLLSSLPSGSPPATVSNAPHVMTSSTVEVSKSTFLTSDMISAHPFTNLTTLPSATMSTILTRTIPTPTLGGITTGFPTSLPMSINVTDDIVYISTHPEASSRTTITANPRTVSHPSSFSRKTMSPSTTDHTLSVGAMPLPSSTITSSWNRIPTASSPSTLIIPKPTLDSLLNIMTTTSTVPGASFPLISTGVTYPFTATVSSPISSFFETTWLDSTPSFLSTEASTSPTATKSTVSFYNVEMSFSVFVEEPRIPITSVINEFTENSLNSIFQNSEFSLATLETQIKSRDISEEEMVMDRAILEQREGQEMATISYVPYSCVCQVIIKASSSLASSELMRKIKSKIHGNFTHGNFTQDQLTLLVNCEHVAVKKLEPGNCKADETASKYKGTYKWLLTNPTETAQTRCIKNEDGNATRFCSISINTGKSQWEKPKFKQCKLLQELPDKIVDLANITISDENAEDVAEHILNLINESPALGKEETKIIVSKISDISQCDEISMNLTHVMLQIINVVLEKQNNSASDLHEISNEILRIIERTGHKMEFSGQIANLTVAGLALAVLRGDHTFDGMAFSIHSYEEGTDPEIFLGNVPVGGILASIYLPKSLTERIPLSNLQTILFNFFGQTSLFKTKNVTKALTTYVVSASISDDMFIQNLADPVVITLQHIGGNQNYGQVHCAFWDFENNNGLGGWNSSGCKVKETNVNYTICQCDHLTHFGVLMDLSRSTVDSVNEQILALITYTGCGISSIFLGVAVVTYIAFHKLRKDYPAKILINLCTALLMLNLVFLINSWLSSFQKVGVCITAAVALHYFLLVSFTWMGLEAVHMYLALVKVFNIYIPNYILKFCLVGWGIPAIMVAITVSVKKDLYGTLSPTTPFCWIKDDSIFYISVVAYFCLIFLMNLSMFCTVLVQLNSVKSQIQKTRRKMILHDLKGTMSLTFLLGLTWGFAFFAWGPMRNFFLYLFAIFNTLQGFFIFVFHCVMKESVREQWQIHLCCGWLRLDNSSDGSSRCQIKVGYKQEGLKKIFEHKLLTPSLKSTATSSTFKSLGSAQGTPSEISFPNDDFDKDPYCSSP

SEQ ID NO: 3085 - protein, 2875 aa, Homo sapiens
  Payload ID: 691;
  Gene Symbol: ADGRG4;
  Gene Name: adhesion G prt-coupled receptor G4;
  Uniprot ID:  Q8IZF6;
  ENSP ID: ENSP00000377697
MKEHIIYQKLYGLILMSSFIFLSVVPENMTIQEKSTTVSQQIDMTTPSQITGVKPQNTAHSSTLLSQSIPIFATDYTTISYSNTTSPPLETMTAQKILKTLVDETATFAVDVLSTSSAISLPTQSISIDNTTNSMKKTKSPSSESTKTTKMVEAMATEIFQPPTPSNFLSTSRFTKNSVVSTTSAIKSQSAVTKTTSLFSTIESTSMSTTPCLKQKSTNTGALPISTAGQEFIESTAAGTVPWFTVEKTSPASTHVGTASSFPPEPVLISTAAPVDSVFPRNQTAFPLATTDMKIAFTVHSLTLPTRLIETTPAPRTAETELTSTNFQDVSLPRVEDAMSTSMSKETSSKTFSFLTSFSFTGTESVQTVIDAEATRTALTPEITLASTVAETMLSSTITGRVYTQNTPTADGHLLTLMSTRSASTSKAPESGPTSTTDEAAHLFSSNETIWTSRPDQALLASMNTTTILTFVPNENFTSAFHENTTYTEYLSATTNITPLKASPEGKGTTANDATTARYTTAVSKLTSPWFANFSIVSGTTSITNMPEFKLTTLLLKTIPMSTKPANELPLTPRETVVPSVDIISTLACIQPNFSTEESASETTQTEINGAIVFGGTTTPVPKSATTQRLNATVTRKEATSHYLMRKSTIAAVAEVSPFSTMLEVTDESAQRVTASVTVSSFPDIEKLSTPLDNKTATTEVRESWLLTKLVKTTPRSSYNEMTEMFNFNHTYVAHWTSETSEGISAGSPTSGSTHIFGEPLGASTTRISETSFSTTPTDRTATSLSDGILPPQPTAAHSSATPVPVTHMFSLPVNGSSVVAEETEVTMSEPSTLARAFSTSVLSDVSNLSSTTMTTALVPPLDQTASTTIVIVPTHGDLIRTTSEATVISVRKTSMAVPSLTETPFHSLRLSTPVTAKAETTLFSTSVDTVTPSTHTLVCSKPPPDNIPPASSTHVISTTSTPEATQPISQVEETSTYALSFPYTFSGGGVVASLATGTTETSVVDETTPSHISANKLTTSVNSHISSSATYRVHTPVSIQLVTSTSVLSSDKDQMTISLGKTPRTMEVTEMSPSKNSFISYSRGTPSLEMTDTGFPETTKISSHQTHSPSEIPLGTPSDGNLASSPTSGSTQITPTLTSSNTVGVHIPEMSTSLGKTALPSQALTITTFLCPEKESTSALPAYTPRTVEMIVNSTYVTHSVSYGQDTSFVDTTTSSSTRISNPMDINTTFSHLHSLRTQPEVTSVASFISESTQTFPESLSLSTAGLYNDGFTVLSDRITTAFSVPNVPTMLPRESSMATSTPIYQMSSLPVNVTAFTSKKVSDTPPIVITKSSKTMHPGCLKSPCTATSGPMSEMSSIPVNNSAFTPATVSSDTSTRVGLFSTLLSSVTPRTTMTMQTSTLDVTPVIYAGATSKNKMVSSAFTTEMIEAPSRITPTTFLSPTEPTLPFVKTVPTTIMAGIVTPFVGTTAFSPLSSKSTGAISSIPKTTFSPFLSATQQSSQADEATTLGILSGITNRSLSTVNSGTGVALTDTYSRITVPENMLSPTHADSLHTSFNIQVSPSLTSFKSASGPTKNVKTTTNCFSSNTRKMTSLLEKTSLTNYATSLNTPVSYPPWTPSSATLPSLTSFVYSPHSTEAEISTPKTSPPPTSQMVEFPVLGTRMTSSNTQPLLMTSWNIPTAEGSQFPISTTINVPTSNEMETETLHLVPGPLSTFTASQTGLVSKDVMAMSSIPMSGILPNHGLSENPSLSTSLRAITSTLADVKHTFEKMTTSVTPGTTLPSILSGATSGSVISKSPILTWLLSSLPSGSPPATVSNAPHVMTSSTVEVSKSTFLTSDMISAHPFTNLTTLPSATMSTILTRTIPTPTLGGITTGFPTSLPMSINVTDDIVYISTHPEASSRTTITANPRTVSHPSSFSRKTMSPSTTDHTLSVGAMPLPSSTITSSWNRIPTASSPSTLIIPKPTLDSLLNIMTTTSTVPGASFPLISTGVTYPFTATVSSPISSFFETTWLDSTPSFLSTEASTSPTATKSTVSFYNVEMSFSVFVEEPRIPITSVINEFTENSLNSIFQNSEFSLATLETQIKSRDISEEEMVMDRAILEQREGQEMATISYVPYSCVCQVIIKASSSLASSELMRKIKSKIHGNFTHGNFTQDQLTLLVNCEHVAVKKLEPGNCKADETASKYKGTYKWLLTNPTETAQTRCIKNEDGNATRFCSISINTGKSQWEKPKFKQCKLLQELPDKIVDLANITISDENAEDVAEHILNLINESPALGKEETKIIVSKISDISQCDEISMNLTHVMLQIINVVLEKQNNSASDLHEISNEILRIIERTGHKMEFSGQIANLTVAGLALAVLRGDHTFDGMAFSIHSYEEGTDPEIFLGNVPVGGILASIYLPKSLTERIPLSNLQTILFNFFGQTSLFKTKNVTKALTTYVVSASISDDMFIQNLADPVVITLQHIGGNQNYGQVHCAFWDFENNNGLGGWNSSGCKVKETNVNYTICQCDHLTHFGVLMDLSRSTVDSVNEQILALITYTGCGISSIFLGVAVVTYIAFHKLRKDYPAKILINLCTALLMLNLVFLINSWLSSFQKVGVCITAAVALHYFLLVSFTWMGLEAVHMYLALVKVFNIYIPNYILKFCLVGWGIPAIMVAITVSVKKDLYGTLSPTTPFCWIKDDSIFYISVVAYFCLIFLMNLSMFCTVLVQLNSVKSQIQKTRRKMILHDLKGTMSLTFLLGLTWGFAFFAWGPMRNFFLYLFAIFNTLQGFFIFVFHCVMKESVREQWQIHLCCGWLRLDNSSDGSSRCQIKVGYKQEGLKKIFEHKLLTPSLKSTATSSTFKSLGSAQGTPSEISFPNDDFDKDPYCSSP

SEQ ID NO: 3086 - protein, 3080 aa, Homo sapiens; identical to SEQ ID NO: 3084
  Payload ID: 691;
  Gene Symbol: ADGRG4;
  Gene Name: adhesion G prt-coupled receptor G4;
  Uniprot ID:  Q8IZF6;
  ENSP ID: ENSP00000377699

SEQ ID NO: 3087 - protein, 528 aa, Homo sapiens
  Payload ID: 692;
  Gene Symbol: ADGRG5;
  Gene Name: adhesion G prt-coupled receptor G5;
  Uniprot ID:  Q8IZF4;
  ENSP ID: ENSP00000290823
MDHCGALFLCLCLLTLQNATTETWEELLSYMENMQVSRGRSSVFSSRQLHQLEQMLLNTSFPGYNLTLQTPTIQSLAFKLSCDFSGLSLTSATLKRVPQAGGQHARGQHAMQFPAELTRDACKTRPRELRLICIYFSNTHFFKDENNSSLLNNYVLGAQLSHGHVNNLRDPVNISFWHNQSLEGYTLTCVFWKEGARKQPWGGWSPEGCRTEQPSHSQVLCRCNHLTYFAVLMQLSPALVPAELLAPLTYISLVGCSISIVASLITVLLHFHFRKQSDSLTRIHMNLHASVLLLNIAFLLSPAFAMSPVPGSACTALAAALHYALLSCLTWMAIEGFNLYLLLGRVYNIYIRRYVFKLGVLGWGAPALLVLLSLSVKSSVYGPCTIPVFDSWENGTGFQNMSICWVRSPVVHSVLVMGYGGLTSLFNLVVLAWALWTLRRLRERADAPSVRACHDTVTVLGLTVLLGTTWALAFFSFGVFLLPQLFLFTILNSLYGFFLFLWFCSQRCRSEAEAKAQIEAFSSSQTTQ

SEQ ID NO: 3088 - protein, 528 aa, Homo sapiens; identical to SEQ ID NO: 3087
  Payload ID: 692;
  Gene Symbol: ADGRG5;
  Gene Name: adhesion G prt-coupled receptor G5;
  Uniprot ID:  Q8IZF4;
  ENSP ID: ENSP00000342981

SEQ ID NO: 3089 - protein, 221 aa, Homo sapiens
  Payload ID: 692;
  Gene Symbol: ADGRG5;
  Gene Name: adhesion G prt-coupled receptor G5;
  ENSP ID: ENSP00000482481
MDHCGALFLCLCLLTLQNATTETWEELLSYMENMQVSRGRSSVFSSRQLHQLEQMLLNTSFPGYNLTLQTPTIQSLAFKLSCDFSGLSLTSATLKRVPQAGGQHARGQHAMQFPAELTRDACKTRPRELRLICIYFSNTHFFKDENNSSLLNNYVLGAQLSHGHVNNLRDPVNISFWHNQSLVLLGAPPFPLHPCPSVTLLLNTGLTRPKPVEPSWKSITL

SEQ ID NO: 3090 - protein, 1221 aa, Homo sapiens
  Payload ID: 693;
  Gene Symbol: ADGRG6;
  Gene Name: adhesion G prt-coupled receptor G6;
  Uniprot ID:  Q86SQ4;
  ENSP ID: ENSP00000230173
MMFRSDRMWSCHWKWKPSPLLFLFALYIMCVPHSVWGCANCRVVLSNPSGTFTSPCYPNDYPNSQACMWTLRAPTGYIIQITFNDFDIEEAPNCIYDSLSLDNGESQTKFCGATAKGLSFNSSANEMHVSFSSDFSIQKKGFNASYIRVAVSLRNQKVILPQTSDAYQVSVAKSISIPELSAFTLCFEATKVGHEDSDWTAFSYSNASFTQLLSFGKAKSGYFLSISDSKCLLNNALPVKEKEDIFAESFEQLCLVWNNSLGSIGVNFKRNYETVPCDSTISKVIPGNGKLLLGSNQNEIVSLKGDIYNFRLWNFTMNAKILSNLSCNVKGNVVDWQNDFWNIPNLALKAESNLSCGSYLIPLPAAELASCADLGTLCQATVNSPSTTPPTVTTNMPVTNRIDKQRNDGIIYRISVVIQNILRHPEVKVQSKVAEWLNSTFQNWNYTVYVVNISFHLSAGEDKIKVKRSLEDEPRLVLWALLVYNATNNTNLEGKIIQQKLLKNNESLDEGLRLHTVNVRQLGHCLAMEEPKGYYWPSIQPSEYVLPCPDKPGFSASRICFYNATNPLVTYWGPVDISNCLKEANEVANQILNLTADGQNLTSANITNIVEQVKRIVNKEENIDITLGSTLMNIFSNILSSSDSDLLESSSEALKTIDELAFKIDLNSTSHVNITTRNLALSVSSLLPGTNAISNFSIGLPSNNESYFQMDFESGQVDPLASVILPPNLLENLSPEDSVLVRRAQFTFFNKTGLFQDVGPQRKTLVSYVMACSIGNITIQNLKDPVQIKIKHTRTQEVHHPICAFWDLNKNKSFGGWNTSGCVAHRDSDASETVCLCNHFTHFGVLMDLPRSASQLDARNTKVLTFISYIGCGISAIFSAATLLTYVAFEKLRRDYPSKILMNLSTALLFLNLLFLLDGWITSFNVDGLCIAVAVLLHFFLLATFTWMGLEAIHMYIALVKVFNTYIRRYILKFCIIGWGLPALVVSVVLASRNNNEVYGKESYGKEKGDEFCWIQDPVIFYVTCAGYFGVMFFLNIAMFIVVMVQICGRNGKRSNRTLREEVLRNLRSVVSLTFLLGMTWGFAFFAWGPLNIPFMYLFSIFNSLQGLFIFIFHCAMKENVQKQWRQHLCCGRFRLADNSDWSKTATNIIKKSSDNLGKSLSSSSIGSNSTYLTSKSKSSSTTYFKRNSHTDNVSYEHSFNKSGSLRQCFHGQVLVKTGPC

SEQ ID NO: 3091 - protein, 1193 aa, Homo sapiens
  Payload ID: 693;
  Gene Symbol: ADGRG6;
  Gene Name: adhesion G prt-coupled receptor G6;
  Uniprot ID:  Q86SQ4;
  ENSP ID: ENSP00000296932
MMFRSDRMWSCHWKWKPSPLLFLFALYIMCVPHSVWGCANCRVVLSNPSGTFTSPCYPNDYPNSQACMWTLRAPTGYIIQITFNDFDIEEAPNCIYDSLSLDNGESQTKFCGATAKGLSFNSSANEMHVSFSSDFSIQKKGFNASYIRVAVSLRNQKVILPQTSDAYQVSVAKSISIPELSAFTLCFEATKVGHEDSDWTAFSYSNASFTQLLSFGKAKSGYFLSISDSKCLLNNALPVKEKEDIFAESFEQLCLVWNNSLGSIGVNFKRNYETVPCDSTISKVIPGNGKLLLGSNQNEIVSLKGDIYNFRLWNFTMNAKILSNLSCNVKGNVVDWQNDFWNIPNLALKAESNLSCGSYLIPLPAAELASCADLGTLCQDGIIYRISVVIQNILRHPEVKVQSKVAEWLNSTFQNWNYTVYVVNISFHLSAGEDKIKVKRSLEDEPRLVLWALLVYNATNNTNLEGKIIQQKLLKNNESLDEGLRLHTVNVRQLGHCLAMEEPKGYYWPSIQPSEYVLPCPDKPGFSASRICFYNATNPLVTYWGPVDISNCLKEANEVANQILNLTADGQNLTSANITNIVEQVKRIVNKEENIDITLGSTLMNIFSNILSSSDSDLLESSSEALKTIDELAFKIDLNSTSHVNITTRNLALSVSSLLPGTNAISNFSIGLPSNNESYFQMDFESGQVDPLASVILPPNLLENLSPEDSVLVRRAQFTFFNKTGLFQDVGPQRKTLVSYVMACSIGNITIQNLKDPVQIKIKHTRTQEVHHPICAFWDLNKNKSFGGWNTSGCVAHRDSDASETVCLCNHFTHFGVLMDLPRSASQLDARNTKVLTFISYIGCGISAIFSAATLLTYVAFEKLRRDYPSKILMNLSTALLFLNLLFLLDGWITSFNVDGLCIAVAVLLHFFLLATFTWMGLEAIHMYIALVKVFNTYIRRYILKFCIIGWGLPALVVSVVLASRNNNEVYGKESYGKEKGDEFCWIQDPVIFYVTCAGYFGVMFFLNIAMFIVVMVQICGRNGKRSNRTLREEVLRNLRSVVSLTFLLGMTWGFAFFAWGPLNIPFMYLFSIFNSLQGLFIFIFHCAMKENVQKQWRQHLCCGRFRLADNSDWSKTATNIIKKSSDNLGKSLSSSSIGSNSTYLTSKSKSSSTTYFKRNSHTDNVSYEHSFNKSGSLRQCFHGQVLVKTGPC

SEQ ID NO: 3092 - protein, 1222 aa, Homo sapiens
  Payload ID: 693;
  Gene Symbol: ADGRG6;
  Gene Name: adhesion G prt-coupled receptor G6;
  Uniprot ID:  Q86SQ4;
  ENSP ID: ENSP00000356580
MMFRSDRMWSCHWKWKPSPLLFLFALYIMCVPHSVWGCANCRVVLSNPSGTFTSPCYPNDYPNSQACMWTLRAPTGYIIQITFNDFDIEEAPNCIYDSLSLDNGESQTKFCGATAKGLSFNSSANEMHVSFSSDFSIQKKGFNASYIRVAVSLRNQKVILPQTSDAYQVSVAKSISIPELSAFTLCFEATKVGHEDSDWTAFSYSNASFTQLLSFGKAKSGYFLSISDSKCLLNNALPVKEKEDIFAESFEQLCLVWNNSLGSIGVNFKRNYETVPCDSTISKVIPGNGKLLLGSNQNEIVSLKGDIYNFRLWNFTMNAKILSNLSCNVKGNVVDWQNDFWNIPNLALKAESNLSCGSYLIPLPAAELASCADLGTLCQDGIIYRISVVIQNILRHPEVKVQSKVAEWLNSTFQNWNYTVYVVNISFHLSAGEDKIKVKRSLEDEPRLVLWALLVYNATNNTNLEGKIIQQKLLKNNESLDEGLRLHTVNVRQLGHCLAMEEPKGYYWPSIQPSEYVLPCPDKPGFSASRICFYNATNPLVTYWGPVDISNCLKEANEVANQILNLTADGQNLTSANITNIVEQVKRIVNKEENIDITLGSTLMNIFSNILSSSDSDLLESSSEALKTIDELAFKIDLNSTSHVNITTRNLALSVSSLLPGTNAISNFSIGLPSNNESYFQMDFESGQVDPLASVILPPNLLENLSPEDSVLVRRAQFTFFNKTGLFQDVGPQRKTLVSYVMACSIGNITIQNLKDPVQIKIKHTRTQEVHHPICAFWDLNKNKSFGGWNTSGCVAHRDSDASETVCLCNHFTHFGVLMDLPRSASQLDARNTKVLTFISYIGCGISAIFSAATLLTYVAFEKLRRDYPSKILMNLSTALLFLNLLFLLDGWITSFNVDGLCIAVAVLLHFFLLATFTWMGLEAIHMYIALVKVFNTYIRRYILKFCIIGWGLPALVVSVVLASRNNNEVYGKESYGKEKGDEFCWIQDPVIFYVTCAGYFGVMFFLNIAMFIVVMVQICGRNGKRSNRTLREEVLRNLRSVVSLTFLLGMTWGFAFFAWGPLNIPFMYLFSIFNSLQGLFIFIFHCAMKENVQKQWRQHLCCGRFRLADNSDWSKTATNIIKKSSDNLGKSLSSSSIGSNSTYLTSKSKSSSTTYFKRNSHTDSASMDKSLSKLAHADGDQTSIIPVHQVIDKVKGYCNAHSDNFYKNIIMSDTFSHSTKF

SEQ ID NO: 3093 - protein, 1250 aa, Homo sapiens
  Payload ID: 693;
  Gene Symbol: ADGRG6;
  Gene Name: adhesion G prt-coupled receptor G6;
  Uniprot ID:  Q86SQ4;
  ENSP ID: ENSP00000356581
MMFRSDRMWSCHWKWKPSPLLFLFALYIMCVPHSVWGCANCRVVLSNPSGTFTSPCYPNDYPNSQACMWTLRAPTGYIIQITFNDFDIEEAPNCIYDSLSLDNGESQTKFCGATAKGLSFNSSANEMHVSFSSDFSIQKKGFNASYIRVAVSLRNQKVILPQTSDAYQVSVAKSISIPELSAFTLCFEATKVGHEDSDWTAFSYSNASFTQLLSFGKAKSGYFLSISDSKCLLNNALPVKEKEDIFAESFEQLCLVWNNSLGSIGVNFKRNYETVPCDSTISKVIPGNGKLLLGSNQNEIVSLKGDIYNFRLWNFTMNAKILSNLSCNVKGNVVDWQNDFWNIPNLALKAESNLSCGSYLIPLPAAELASCADLGTLCQATVNSPSTTPPTVTTNMPVTNRIDKQRNDGIIYRISVVIQNILRHPEVKVQSKVAEWLNSTFQNWNYTVYVVNISFHLSAGEDKIKVKRSLEDEPRLVLWALLVYNATNNTNLEGKIIQQKLLKNNESLDEGLRLHTVNVRQLGHCLAMEEPKGYYWPSIQPSEYVLPCPDKPGFSASRICFYNATNPLVTYWGPVDISNCLKEANEVANQILNLTADGQNLTSANITNIVEQVKRIVNKEENIDITLGSTLMNIFSNILSSSDSDLLESSSEALKTIDELAFKIDLNSTSHVNITTRNLALSVSSLLPGTNAISNFSIGLPSNNESYFQMDFESGQVDPLASVILPPNLLENLSPEDSVLVRRAQFTFFNKTGLFQDVGPQRKTLVSYVMACSIGNITIQNLKDPVQIKIKHTRTQEVHHPICAFWDLNKNKSFGGWNTSGCVAHRDSDASETVCLCNHFTHFGVLMDLPRSASQLDARNTKVLTFISYIGCGISAIFSAATLLTYVAFEKLRRDYPSKILMNLSTALLFLNLLFLLDGWITSFNVDGLCIAVAVLLHFFLLATFTWMGLEAIHMYIALVKVFNTYIRRYILKFCIIGWGLPALVVSVVLASRNNNEVYGKESYGKEKGDEFCWIQDPVIFYVTCAGYFGVMFFLNIAMFIVVMVQICGRNGKRSNRTLREEVLRNLRSVVSLTFLLGMTWGFAFFAWGPLNIPFMYLFSIFNSLQGLFIFIFHCAMKENVQKQWRQHLCCGRFRLADNSDWSKTATNIIKKSSDNLGKSLSSSSIGSNSTYLTSKSKSSSTTYFKRNSHTDSASMDKSLSKLAHADGDQTSIIPVHQVIDKVKGYCNAHSDNFYKNIIMSDTFSHSTKF

SEQ ID NO: 3094 - protein, 141 aa, Homo sapiens
  Payload ID: 693;
  Gene Symbol: ADGRG6;
  Gene Name: adhesion G prt-coupled receptor G6;
  ENSP ID: ENSP00000438366
MFRSDRMWSCHWKWKPSPLLFLFALYIMCVPHSAVWGCANCRVVLSNPSGTFTSPCYPNDYPNSQACMWTLRAPTGYIIQITFNDFDIEEAPNCIYDSLSLDNGESQTKFCGATAKGLSFNSSANEMHVSFSSDFSIQKKG

SEQ ID NO: 3095 - protein, 103 aa, Homo sapiens
  Payload ID: 693;
  Gene Symbol: ADGRG6;
  Gene Name: adhesion G prt-coupled receptor G6;
  ENSP ID: ENSP00000439371
  MOD_RES (1)..(1): Any amino acid
XLGSTLMNIFSNILSSSDSDLLESSSEALKTIDELAFKIDLNSTSHVNITTRNLALSVSSLLPGTNAISNFSIGLPSNNESYFQLLSFTTCFEKTSKSAADGF

SEQ ID NO: 3096 - protein, 135 aa, Homo sapiens
  Payload ID: 693;
  Gene Symbol: ADGRG6;
  Gene Name: adhesion G prt-coupled receptor G6;
  ENSP ID: ENSP00000444123
  MOD_RES (1)..(1): Any amino acid
XVKVQSKVAEWLNSTFQNWNYTVYVVNISFHLSAGEDKIKVKRSLEDEPRLVLWALLVYNATNNTNLEGKIIQQKLLKNNESLDEGLRLHTVNVRQLGHCLAMEEPKGYYWPSIQPSEYVLPCPDKPGFSASRIW

SEQ ID NO: 3097 - protein, 241 aa, Homo sapiens
  Payload ID: 693;
  Gene Symbol: ADGRG6;
  Gene Name: adhesion G prt-coupled receptor G6;
  ENSP ID: ENSP00000446287
MFRSDRMWSCHWKWKPSPLLFLFALYIMCVPHSVWGCANCRVVLSNPSGTFTSPCYPNDYPNSQACMWTLRAPTGYIIQITFNDFDIEEAPNCIYDSLSLDNGESQTKFCGATAKGLSFNSSANEMHVSFSSDFSIQKKGFNASYIRVAVSLRNQKVILPQTSDAYQVSVAKSISIPELSAFTLCFEATKVGHEDSDWTAFSYSNASFTQLLSFGKAKSGYFLSISDSKCLLNNALPVKEK

SEQ ID NO: 3098 - protein, 797 aa, Homo sapiens
  Payload ID: 694;
  Gene Symbol: ADGRG7;
  Gene Name: adhesion G prt-coupled receptor G7;
  Uniprot ID:  Q96K78;
  ENSP ID: ENSP00000273352
MASCRAWNLRVLVAVVCGLLTGIILGLGIWRIVIRIQRGKSTSSSSTPTEFCRNGGTWENGRCICTEEWKGLRCTIANFCENSTYMGFTFARIPVGRYGPSLQTCGKDTPNAGNPMAVRLCSLSLYGEIELQKVTIGNCNENLETLEKQVKDVTAPLNNISSEVQILTSDANKLTAENITSATRVVGQIFNTSRNASPEAKKVAIVTVSQLLDASEDAFQRVAATANDDALTTLIEQMETYSLSLGNQSVVEPNIAIQSANFSSENAVGPSNVRFSVQKGASSSLVSSSTFIHTNVDGLNPDAQTELQVLLNMTKNYTKTCGFVVYQNDKLFQSKTFTAKSDFSQKIISSKTDENEQDQSASVDMVFSPKYNQKEFQLYSYACVYWNLSAKDWDTYGCQKDKGTDGFLRCRCNHTTNFAVLMTFKKDYQYPKSLDILSNVGCALSVTGLALTVIFQIVTRKVRKTSVTWVLVNLCISMLIFNLLFVFGIENSNKNLQTSDGDINNIDFDNNDIPRTDTINIPNPMCTAIAALLHYFLLVTFTWNALSAAQLYYLLIRTMKPLPRHFILFISLIGWGVPAIVVAITVGVIYSQNGNNPQWELDYRQEKICWLAIPEPNGVIKSPLLWSFIVPVTIILISNVVMFITISIKVLWKNNQNLTSTKKVSSMKKIVSTLSVAVVFGITWILAYLMLVNDDSIRIVFSYIFCLFNTTQGLQIFILYTVRTKVFQSEASKVLMLLSSIGRRKSLPSVTRPRLRVKMYNFLRSLPTLHERFRLLETSPSTEEITLSESDNAKESI

SEQ ID NO: 3099 - protein, 502 aa, Homo sapiens
  Payload ID: 694;
  Gene Symbol: ADGRG7;
  Gene Name: adhesion G prt-coupled receptor G7;
  ENSP ID: ENSP00000419788
MPVKMLFKELLLLLMMMPLQHYTKTCGFVVYQNDKLFQSKTFTAKSDFSQKIISSKTDENEQDQSASVDMVFSPKYNQKEFQLYSYACVYWNLSAKDWDTYGCQKDKGTDGFLRCRCNHTTNFAVLMTFKKDYQYPKSLDILSNVGCALSVTGLALTVIFQIVTRKVRKTSVTWVLVNLCISMLIFNLLFVFGIENSNKNLQTSDGDINNIDFDNNDIPRTDTINIPNPMCTAIAALLHYFLLVTFTWNALSAAQLYYLLIRTMKPLPRHFILFISLIGWGVPAIVVAITVGVIYSQNGNNPQWELDYRQEKICWLAIPEPNGVIKSPLLWSFIVPVTIILISNVVMFITISIKVLWKNNQNLTSTKKVSSMKKIVSTLSVAVVFGITWILAYLMLVNDDSIRIVFSYIFCLFNTTQGLQIFILYTVRTKVFQSEASKVLMLLSSIGRRKSLPSVTRPRLRVKMYNFLRSLPTLHERFRLLETSPSTEEITLSESDNAKESI

SEQ ID NO: 3100 - protein, 1474 aa, Homo sapiens
  Payload ID: 695;
  Gene Symbol: ADGRL1;
  Gene Name: adhesion G prt-coupled receptor L1;
  Uniprot ID:  O94910;
  ENSP ID: ENSP00000340688
MARLAAVLWNLCVTAVLVTSATQGLSRAGLPFGLMRRELACEGYPIELRCPGSDVIMVENANYGRTDDKICDADPFQMENVQCYLPDAFKIMSQRCNNRTQCVVVAGSDAFPDPCPGTYKYLEVQYDCVPYKVEQKVFVCPGTLQKVLEPTSTHESEHQSGAWCKDPLQAGDRIYVMPWIPYRTDTLTEYASWEDYVAARHTTTYRLPNRVDGTGFVVYDGAVFYNKERTRNIVKYDLRTRIKSGETVINTANYHDTSPYRWGGKTDIDLAVDENGLWVIYATEGNNGRLVVSQLNPYTLRFEGTWETGYDKRSASNAFMVCGVLYVLRSVYVDDDSEAAGNRVDYAFNTNANREEPVSLTFPNPYQFISSVDYNPRDNQLYVWNNYFVVRYSLEFGPPDPSAGPATSPPLSTTTTARPTPLTSTASPAATTPLRRAPLTTHPVGAINQLGPDLPPATAPVPSTRRPPAPNLHVSPELFCEPREVRRVQWPATQQGMLVERPCPKGTRGIASFQCLPALGLWNPRGPDLSNCTSPWVNQVAQKIKSGENAANIASELARHTRGSIYAGDVSSSVKLMEQLLDILDAQLQALRPIERESAGKNYNKMHKRERTCKDYIKAVVETVDNLLRPEALESWKDMNATEQVHTATMLLDVLEEGAFLLADNVREPARFLAAKENVVLEVTVLNTEGQVQELVFPQEEYPRKNSIQLSAKTIKQNSRNGVVKVVFILYNNLGLFLSTENATVKLAGEAGPGGPGGASLVVNSQVIAASINKESSRVFLMDPVIFTVAHLEDKNHFNANCSFWNYSERSMLGYWSTQGCRLVESNKTHTTCACSHLTNFAVLMAHREIYQGRINELLLSVITWVGIVISLVCLAICISTFCFLRGLQTDRNTIHKNLCINLFLAELLFLVGIDKTQYEIACPIFAGLLHYFFLAAFSWLCLEGVHLYLLLVEVFESEYSRTKYYYLGGYCFPALVVGIAAAIDYRSYGTEKACWLRVDNYFIWSFIGPVSFVIVVNLVFLMVTLHKMIRSSSVLKPDSSRLDNIKSWALGAIALLFLLGLTWAFGLLFINKESVVMAYLFTTFNAFQGVFIFVFHCALQKKVHKEYSKCLRHSYCCIRSPPGGTHGSLKTSAMRSNTRYYTGTQSRIRRMWNDTVRKQTESSFMAGDINSTPTLNRGTMGNHLLTNPVLQPRGGTSPYNTLIAESVGFNPSSPPVFNSPGSYREPKHPLGGREACGMDTLPLNGNFNNSYSLRSGDFPPGDGGPEPPRGRNLADAAAFEKMIISELVHNNLRGSSSAAKGPPPPEPPVPPVPGGGGEEEAGGPGGADRAEIELLYKALEEPLLLPRAQSVLYQSDLDESESCTAEDGATSRPLSSPPGRDSLYASGANLRDSPSYPDSSPEGPSEALPPPPPAPPGPPEIYYTSRPPALVARNPLQGYYQVRRPSHEGYLAAPGLEGPGPDGDGQMQLVTSL

SEQ ID NO: 3101 - protein, 1469 aa, Homo sapiens
  Payload ID: 695;
  Gene Symbol: ADGRL1;
  Gene Name: adhesion G prt-coupled receptor L1;
  Uniprot ID:  O94910;
  ENSP ID: ENSP00000355328
MARLAAVLWNLCVTAVLVTSATQGLSRAGLPFGLMRRELACEGYPIELRCPGSDVIMVENANYGRTDDKICDADPFQMENVQCYLPDAFKIMSQRCNNRTQCVVVAGSDAFPDPCPGTYKYLEVQYDCVPYIFVCPGTLQKVLEPTSTHESEHQSGAWCKDPLQAGDRIYVMPWIPYRTDTLTEYASWEDYVAARHTTTYRLPNRVDGTGFVVYDGAVFYNKERTRNIVKYDLRTRIKSGETVINTANYHDTSPYRWGGKTDIDLAVDENGLWVIYATEGNNGRLVVSQLNPYTLRFEGTWETGYDKRSASNAFMVCGVLYVLRSVYVDDDSEAAGNRVDYAFNTNANREEPVSLTFPNPYQFISSVDYNPRDNQLYVWNNYFVVRYSLEFGPPDPSAGPATSPPLSTTTTARPTPLTSTASPAATTPLRRAPLTTHPVGAINQLGPDLPPATAPVPSTRRPPAPNLHVSPELFCEPREVRRVQWPATQQGMLVERPCPKGTRGIASFQCLPALGLWNPRGPDLSNCTSPWVNQVAQKIKSGENAANIASELARHTRGSIYAGDVSSSVKLMEQLLDILDAQLQALRPIERESAGKNYNKMHKRERTCKDYIKAVVETVDNLLRPEALESWKDMNATEQVHTATMLLDVLEEGAFLLADNVREPARFLAAKENVVLEVTVLNTEGQVQELVFPQEEYPRKNSIQLSAKTIKQNSRNGVVKVVFILYNNLGLFLSTENATVKLAGEAGPGGPGGASLVVNSQVIAASINKESSRVFLMDPVIFTVAHLEDKNHFNANCSFWNYSERSMLGYWSTQGCRLVESNKTHTTCACSHLTNFAVLMAHREIYQGRINELLLSVITWVGIVISLVCLAICISTFCFLRGLQTDRNTIHKNLCINLFLAELLFLVGIDKTQYEIACPIFAGLLHYFFLAAFSWLCLEGVHLYLLLVEVFESEYSRTKYYYLGGYCFPALVVGIAAAIDYRSYGTEKACWLRVDNYFIWSFIGPVSFVIVVNLVFLMVTLHKMIRSSSVLKPDSSRLDNIKSWALGAIALLFLLGLTWAFGLLFINKESVVMAYLFTTFNAFQGVFIFVFHCALQKKVHKEYSKCLRHSYCCIRSPPGGTHGSLKTSAMRSNTRYYTGTQSRIRRMWNDTVRKQTESSFMAGDINSTPTLNRGTMGNHLLTNPVLQPRGGTSPYNTLIAESVGFNPSSPPVFNSPGSYREPKHPLGGREACGMDTLPLNGNFNNSYSLRSGDFPPGDGGPEPPRGRNLADAAAFEKMIISELVHNNLRGSSSAAKGPPPPEPPVPPVPGGGGEEEAGGPGGADRAEIELLYKALEEPLLLPRAQSVLYQSDLDESESCTAEDGATSRPLSSPPGRDSLYASGANLRDSPSYPDSSPEGPSEALPPPPPAPPGPPEIYYTSRPPALVARNPLQGYYQVRRPSHEGYLAAPGLEGPGPDGDGQMQLVTSL

SEQ ID NO: 3102 - protein, 264 aa, Homo sapiens
  Payload ID: 695;
  Gene Symbol: ADGRL1;
  Gene Name: adhesion G prt-coupled receptor L1;
  ENSP ID: ENSP00000465453
  MOD_RES (1)..(1): Any amino acid
XGTHGSLKTSAMRSNTRYYTGTQSRIRRMWNDTVRKQTESSFMAGDINSTPTLNRGTMGNHLLTNPVLQPRGGTSPYNTLIAESVGFNPSSPPVFNSPELEPGLAFRAHPCLFSSLFWLPPAGSYREPKHPLGGREACGMDTLPLNGNFNNSYSLRSGDFPPGDGGPEPPRGRNLADAAAFEKMIISELVHNNLRGSSSAAKGPPPPEPPVPPVPGGGGEEEAGGPGGADRAEIELLYKALEEPLLLPRAQSVLYQSDLDESES

SEQ ID NO: 3103 - protein, 243 aa, Homo sapiens
  Payload ID: 695;
  Gene Symbol: ADGRL1;
  Gene Name: adhesion G prt-coupled receptor L1;
  ENSP ID: ENSP00000468197
  MOD_RES (1)..(1): Any amino acid
XSLKTSAMRSNTRYYTGTQSRIRRMWNDTVRKQTESSFMAGDINSTPTLNRGTMGNHLLTNPVLQPRGGTSPYNTLIAESVGFNPSSPPVFNSPEHPLGGREACGMDTLPLNGNFNNSYSLRSGDFPPGDGGPEPPRGRNLADAAAFEKMIISELVHNNLRGSSSAAKGPPPPEPPVPPVPGGGGEEEAGGPGGADRAEIELLYKALEEPLLLPRAQSVLYQSDLDESESCTAEDGATSRPLS

SEQ ID NO: 3104 - protein, 225 aa, Homo sapiens
  Payload ID: 695;
  Gene Symbol: ADGRL1;
  Gene Name: adhesion G prt-coupled receptor L1;
  ENSP ID: ENSP00000468711
SAGHPSPRTQWVPSTSWDLICLQPQPQSPAPGGPQPRIYTCPLSSSASPERYGGSSGRPPSRACWWRGPAPRGLEIKSGENAANIASELARHTRGSIYAGDVSSSVKLMEQLLDILDAQLQALRPIERESAGKNYNKMHKRERTCKDYIKAVVETVDNLLRPEALESWKDMNATEQVHTATMLLDVLEEGAFLLADNVREPARFLAAKENVVLEVTVLNTEGQVQ

SEQ ID NO: 3105 - protein, 1403 aa, Homo sapiens
  Payload ID: 696;
  Gene Symbol: ADGRL2;
  Gene Name: adhesion G prt-coupled receptor L2;
  Uniprot ID:  O95490;
  ENSP ID: ENSP00000322270
MVSSGCRMRSLWFIIVISFLPNTEGFSRAALPFGLVRRELSCEGYSIDLRCPGSDVIMIESANYGRTDDKICDADPFQMENTDCYLPDAFKIMTQRCNNRTQCIVVTGSDVFPDPCPGTYKYLEVQYECVPYIFVCPGTLKAIVDSPCIYEAEQKAGAWCKDPLQAADKIYFMPWTPYRTDTLIEYASLEDFQNSRQTTTYKLPNRVDGTGFVVYDGAVFFNKERTRNIVKFDLRTRIKSGEAIINYANYHDTSPYRWGGKTDIDLAVDENGLWVIYATEQNNGMIVISQLNPYTLRFEATWETVYDKRAASNAFMICGVLYVVRSVYQDNESETGKNSIDYIYNTRLNRGEYVDVPFPNQYQYIAAVDYNPRDNQLYVWNNNFILRYSLEFGPPDPAQVPTTAVTITSSAELFKTIISTTSTTSQKGPMSTTVAGSQEGSKGTKPPPAVSTTKIPPITNIFPLPERFCEALDSKGIKWPQTQRGMMVERPCPKGTRGTASYLCMISTGTWNPKGPDLSNCTSHWVNQLAQKIRSGENAASLANELAKHTKGPVFAGDVSSSVRLMEQLVDILDAQLQELKPSEKDSAGRSYNKAIVDTVDNLLRPEALESWKHMNSSEQAHTATMLLDTLEEGAFVLADNLLEPTRVSMPTENIVLEVAVLSTEGQIQDFKFPLGIKGAGSSIQLSANTVKQNSRNGLAKLVFIIYRSLGQFLSTENATIKLGADFIGRNSTIAVNSHVISVSINKESSRVYLTDPVLFTLPHIDPDNYFNANCSFWNYSERTMMGYWSTQGCKLVDTNKTRTTCACSHLTNFAILMAHREIAYKDGVHELLLTVITWVGIVISLVCLAICIFTFCFFRGLQSDRNTIHKNLCINLFIAEFIFLIGIDKTKYAIACPIFAGLLHFFFLAAFAWMCLEGVQLYLMLVEVFESEYSRKKYYYVAGYLFPATVVGVSAAIDYKSYGTEKACWLHVDNYFIWSFIGPVTFIILLNIIFLVITLCKMVKHSNTLKPDSSRLENIKSWVLGAFALLCLLGLTWSFGLLFINEETIVMAYLFTIFNAFQGVFIFIFHCALQKKVRKEYGKCFRHSYCCGGLPTESPHSSVKASTTRTSARYSSGTQSRIRRMWNDTVRKQSESSFISGDINSTSTLNQGHSLNNARDTSAMDTLPLNGNFNNSYSLHKGDYNDSVQVVDCGLSLNDTAFEKMIISELVHNNLRGSSKTHNLELTLPVKPVIGGSSSEDDAIVADASSLMHSDNPGLELHHKELEAPLIPQRTHSLLYQPQKKVKSEGTDSYVSQLTAEAEDHLQSPNRDSLYTSMPNLRDSPYPESSPDMEEDLSPSRRSENEDIYYKSMPNLGAGHQLQMCYQISRGNSDGYIIPINKEGCIPEGDVREGQMQLVTSL

SEQ ID NO: 3106 - protein, 1403 aa, Homo sapiens; identical to SEQ ID NO: 3105
  Payload ID: 696;
  Gene Symbol: ADGRL2;
  Gene Name: adhesion G prt-coupled receptor L2;
  Uniprot ID:  O95490;
  ENSP ID: ENSP00000353006

SEQ ID NO: 3107 - protein, 1123 aa, Homo sapiens
  Payload ID: 696;
  Gene Symbol: ADGRL2;
  Gene Name: adhesion G prt-coupled receptor L2;
  Uniprot ID:  O95490;
  ENSP ID: ENSP00000359748
MVSSGCRMRSLWFIIVISFLPNTEGFSRAALPFGLVRRELSCEGYSIDLRCPGSDVIMIESANYGRTDDKICDADPFQMENTDCYLPDAFKIMTQRCNNRTQCIVVTGSDVFPDPCPGTYKYLEVQYECVPYIFVCPGTLKAIVDSPCIYEAEQKAGAWCKDPLQAADKIYFMPWTPYRTDTLIEYASLEDFQNSRQTTTYKLPNRVDGTGFVVYDGAVFFNKERTRNIVKFDLRTRIKSGEAIINYANYHDTSPYRWGGKTDIDLAVDENGLWVIYATEQNNGMIVISQLNPYTLRFEATWETVYDKRAASNAFMICGVLYVVRSVYQDNESETGKNSIDYIYNTRLNRGEYVDVPFPNQYQYIAAVDYNPRDNQLYVWNNNFILRYSLEFGPPDPAQVPTTAVTITSSAELFKTIISTTSTTSQKGPMSTTVAGSQEGSKGTKPPPAVSTTKIPPITNIFPLPERFCEALDSKGIKWPQTQRGMMVERPCPKGTRGTASYLCMISTGTWNPKGPDLSNCTSHWVNQLAQKIRSGENAASLANELAKHTKGPVFAGDVSSSVRLMEQLVDILDAQLQELKPSEKDSAGRSYNKAIVDTVDNLLRPEALESWKHMNSSEQAHTATMLLDTLEEGAFVLADNLLEPTRVSMPTENIVLEVAVLSTEGQIQDFKFPLGIKGAGSSIQLSANTVKQNSRNGLAKLVFIIYRSLGQFLSTENATIKLGADFIGRNSTIAVNSHVISVSINKESSRVYLTDPVLFTLPHIDPDNYFNANCSFWNYSERTMMGYWSTQGCKLVDTNKTRTTCACSHLTNFAILMAHREIAYKDGVHELLLTVITWVGIVISLVCLAICIFTFCFFRGLQSDRNTIHKNLCINLFIAEFIFLIGIDKTKYAIACPIFAGLLHFFFLAAFAWMCLEGVQLYLMLVEVFESEYSRKKYYYVAGYLFPATVVGVSAAIDYKSYGTEKACWLHVDNYFIWSFIGPVTFIILLNIIFLVITLCKMVKHSNTLKPDSSRLENIKSWVLGAFALLCLLGLTWSFGLLFINEETIVMAYLFTIFNAFQGVFIFIFHCALQKKVRKEYGKCFRHSYCCGGLPTESPHSSVKASTTRTSARYSSGTQDIH

SEQ ID NO: 3108 - protein, 1177 aa, Homo sapiens
  Payload ID: 696;
  Gene Symbol: ADGRL2;
  Gene Name: adhesion G prt-coupled receptor L2;
  Uniprot ID:  O95490;
  ENSP ID: ENSP00000359750
MVSSGCRMRSLWFIIVISFLPNTEGFSRAALPFGLVRRELSCEGYSIDLRCPGSDVIMIESANYGRTDDKICDADPFQMENTDCYLPDAFKIMTQRCNNRTQCIVVTGSDVFPDPCPGTYKYLEVQYECVPYIFVCPGTLKAIVDSPCIYEAEQKAGAWCKDPLQAADKIYFMPWTPYRTDTLIEYASLEDFQNSRQTTTYKLPNRVDGTGFVVYDGAVFFNKERTRNIVKFDLRTRIKSGEAIINYANYHDTSPYRWGGKTDIDLAVDENGLWVIYATEQNNGMIVISQLNPYTLRFEATWETVYDKRAASNAFMICGVLYVVRSVYQDNESETGKNSIDYIYNTRLNRGEYVDVPFPNQYQYIAAVDYNPRDNQLYVWNNNFILRYSLEFGPPDPAQVPTTAVTITSSAELFKTIISTTSTTSQKGPMSTTVAGSQEGSKGTKPPPAVSTTKIPPITNIFPLPERFCEALDSKGIKWPQTQRGMMVERPCPKGTRGTASYLCMISTGTWNPKGPDLSNCTSHWVNQLAQKIRSGENAASLANELAKHTKGPVFAGDVSSSVRLMEQLVDILDAQLQELKPSEKDSAGRSYNKAIVDTVDNLLRPEALESWKHMNSSEQAHTATMLLDTLEEGAFVLADNLLEPTRVSMPTENIVLEVAVLSTEGQIQDFKFPLGIKGAGSSIQLSANTVKQNSRNGLAKLVFIIYRSLGQFLSTENATIKLGADFIGRNSTIAVNSHVISVSINKESSRVYLTDPVLFTLPHIDPDNYFNANCSFWNYSERTMMGYWSTQGCKLVDTNKTRTTCACSHLTNFAILMAHREIAYKDGVHELLLTVITWVGIVISLVCLAICIFTFCFFRGLQSDRNTIHKNLCINLFIAEFIFLIGIDKTKYAIACPIFAGLLHFFFLAAFAWMCLEGVQLYLMLVEVFESEYSRKKYYYVAGYLFPATVVGVSAAIDYKSYGTEKACWLHVDNYFIWSFIGPVTFIILLNIIFLVITLCKMVKHSNTLKPDSSRLENIKSWVLGAFALLCLLGLTWSFGLLFINEETIVMAYLFTIFNAFQGVFIFIFHCALQKKVRKEYGKCFRHSYCCGGLPTESPHSSVKASTTRTSARYSSGTQSRIRRMWNDTVRKQSESSFISGDINSTSTLNQGLTSHGLRAHLQDLYHLELLLGQIA

SEQ ID NO: 3109 - protein, 1459 aa, Homo sapiens
  Payload ID: 696;
  Gene Symbol: ADGRL2;
  Gene Name: adhesion G prt-coupled receptor L2;
  Uniprot ID:  O95490;
  ENSP ID: ENSP00000359752
MVSSGCRMRSLWFIIVISFLPNTEGFSRAALPFGLVRRELSCEGYSIDLRCPGSDVIMIESANYGRTDDKICDADPFQMENTDCYLPDAFKIMTQRCNNRTQCIVVTGSDVFPDPCPGTYKYLEVQYECVPYIFVCPGTLKAIVDSPCIYEAEQKAGAWCKDPLQAADKIYFMPWTPYRTDTLIEYASLEDFQNSRQTTTYKLPNRVDGTGFVVYDGAVFFNKERTRNIVKFDLRTRIKSGEAIINYANYHDTSPYRWGGKTDIDLAVDENGLWVIYATEQNNGMIVISQLNPYTLRFEATWETVYDKRAASNAFMICGVLYVVRSVYQDNESETGKNSIDYIYNTRLNRGEYVDVPFPNQYQYIAAVDYNPRDNQLYVWNNNFILRYSLEFGPPDPAQVPTTAVTITSSAELFKTIISTTSTTSQKGPMSTTVAGSQEGSKGTKPPPAVSTTKIPPITNIFPLPERFCEALDSKGIKWPQTQRGMMVERPCPKGTRGTASYLCMISTGTWNPKGPDLSNCTSHWVNQLAQKIRSGENAASLANELAKHTKGPVFAGDVSSSVRLMEQLVDILDAQLQELKPSEKDSAGRSYNKLQKREKTCRAYLKAIVDTVDNLLRPEALESWKHMNSSEQAHTATMLLDTLEEGAFVLADNLLEPTRVSMPTENIVLEVAVLSTEGQIQDFKFPLGIKGAGSSIQLSANTVKQNSRNGLAKLVFIIYRSLGQFLSTENATIKLGADFIGRNSTIAVNSHVISVSINKESSRVYLTDPVLFTLPHIDPDNYFNANCSFWNYSERTMMGYWSTQGCKLVDTNKTRTTCACSHLTNFAILMAHREIAYKDGVHELLLTVITWVGIVISLVCLAICIFTFCFFRGLQSDRNTIHKNLCINLFIAEFIFLIGIDKTKYAIACPIFAGLLHFFFLAAFAWMCLEGVQLYLMLVEVFESEYSRKKYYYVAGYLFPATVVGVSAAIDYKSYGTEKACWLHVDNYFIWSFIGPVTFIILLNIIFLVITLCKMVKHSNTLKPDSSRLENIKSWVLGAFALLCLLGLTWSFGLLFINEETIVMAYLFTIFNAFQGVFIFIFHCALQKKVRKEYGKCFRHSYCCGGLPTESPHSSVKASTTRTSARYSSGTQSRIRRMWNDTVRKQSESSFISGDINSTSTLNQGMTGNYLLTNPLLRPHGTNNPYNTLLAETVVCNAPSAPVFNSPGHSLNNARDTSAMDTLPLNGNFNNSYSLHKGDYNDSVQVVDCGLSLNDTAFEKMIISELVHNNLRGSSKTHNLELTLPVKPVIGGSSSEDDAIVADASSLMHSDNPGLELHHKELEAPLIPQRTHSLLYQPQKKVKSEGTDSYVSQLTAEAEDHLQSPNRDSLYTSMPNLRDSPYPESSPDMEEDLSPSRRSENEDIYYKSMPNLGAGHQLQMCYQISRGNSDGYIIPINKEGCIPEGDVREGQMQLVTSL

SEQ ID NO: 3110 - protein, 1384 aa, Homo sapiens
  Payload ID: 696;
  Gene Symbol: ADGRL2;
  Gene Name: adhesion G prt-coupled receptor L2;
  ENSP ID: ENSP00000359756
MVSSGCRMRSLWFIIVISFLPNTEGFSRAALPFGLVRRELSCEGYSIDLRCPGSDVIMIESANYGRTDDKICDADPFQMENTDCYLPDAFKIMTQRCNNRTQCIVVTGSDVFPDPCPGTYKYLEVQYECVPYMEQKVFVCPGTLKAIVDSPCIYEAEQKAGAWCKDPLQAADKIYFMPWTPYRTDTLIEYASLEDFQNSRQTTTYKLPNRVDGTGFVVYDGAVFFNKERTRNIVKFDLRTRIKSGEAIINYANYHDTSPYRWGGKTDIDLAVDENGLWVIYATEQNNGMIVISQLNPYTLRFEATWETVYDKRAASNAFMICGVLYVVRSVYQDNESETGKNSIDYIYNTRLNRGEYVDVPFPNQYQYIAAVDYNPRDNQLYVWNNNFILRYSLEFGPPDPAQERFCEALDSKGIKWPQTQRGMMVERPCPKGTRGTASYLCMISTGTWNPKGPDLSNCTSHWVNQLAQKIRSGENAASLANELAKHTKGPVFAGDVSSSVRLMEQLVDILDAQLQELKPSEKDSAGRSYNKAIVDTVDNLLRPEALESWKHMNSSEQAHTATMLLDTLEEGAFVLADNLLEPTRVSMPTENIVLEVAVLSTEGQIQDFKFPLGIKGAGSSIQLSANTVKQNSRNGLAKLVFIIYRSLGQFLSTENATIKLGADFIGRNSTIAVNSHVISVSINKESSRVYLTDPVLFTLPHIDPDNYFNANCSFWNYSERTMMGYWSTQGCKLVDTNKTRTTCACSHLTNFAILMAHREIAYKDGVHELLLTVITWVGIVISLVCLAICIFTFCFFRGLQSDRNTIHKNLCINLFIAEFIFLIGIDKTKYAIACPIFAGLLHFFFLAAFAWMCLEGVQLYLMLVEVFESEYSRKKYYYVAGYLFPATVVGVSAAIDYKSYGTEKACWLHVDNYFIWSFIGPVTFIILLNIIFLVITLCKMVKHSNTLKPDSSRLENIKSWVLGAFALLCLLGLTWSFGLLFINEETIVMAYLFTIFNAFQGVFIFIFHCALQKKVRKEYGKCFRHSYCCGGLPTESPHSSVKASTTRTSARYSSGTQSRIRRMWNDTVRKQSESSFISGDINSTSTLNQGMTGNYLLTNPLLRPHGTNNPYNTLLAETVVCNAPSAPVFNSPGHSLNNARDTSAMDTLPLNGNFNNSYSLHKGDYNDSVQVVDCGLSLNDTAFEKMIISELVHNNLRGSSKTHNLELTLPVKPVIGGSSSEDDAIVADASSLMHSDNPGLELHHKELEAPLIPQRTHSLLYQPQKKVKSEGTDSYVSQLTAEAEDHLQSPNRDSLYTSMPNLRDSPYPESSPDMEEDLSPSRRSENEDIYYKSMPNLGAGHQLQMCYQISRGNSDGYIIPINKEGCIPEGDVREGQMQLVTSL

SEQ ID NO: 3111 - protein, 1461 aa, Homo sapiens
  Payload ID: 696;
  Gene Symbol: ADGRL2;
  Gene Name: adhesion G prt-coupled receptor L2;
  Uniprot ID:  O95490;
  ENSP ID: ENSP00000359758
MVSSGCRMRSLWFIIVISFLPNTEGFSRAALPFGLVRRELSCEGYSIDLRCPGSDVIMIESANYGRTDDKICDADPFQMENTDCYLPDAFKIMTQRCNNRTQCIVVTGSDVFPDPCPGTYKYLEVQYECVPYIFVCPGTLKAIVDSPCIYEAEQKAGAWCKDPLQAADKIYFMPWTPYRTDTLIEYASLEDFQNSRQTTTYKLPNRVDGTGFVVYDGAVFFNKERTRNIVKFDLRTRIKSGEAIINYANYHDTSPYRWGGKTDIDLAVDENGLWVIYATEQNNGMIVISQLNPYTLRFEATWETVYDKRAASNAFMICGVLYVVRSVYQDNESETGKNSIDYIYNTRLNRGEYVDVPFPNQYQYIAAVDYNPRDNQLYVWNNNFILRYSLEFGPPDPAQVPTTAVTITSSAELFKTIISTTSTTSQKGPMSTTVAGSQEGSKGTKPPPAVSTTKIPPITNIFPLPERFCEALDSKGIKWPQTQRGMMVERPCPKGTRGTASYLCMISTGTWNPKGPDLSNCTSHWVNQLAQKIRSGENAASLANELAKHTKGPVFAGDVSSSVRLMEQLVDILDAQLQELKPSEKDSAGRSYNKAIVDTVDNLLRPEALESWKHMNSSEQAHTATMLLDTLEEGAFVLADNLLEPTRVSMPTENIVLEVAVLSTEGQIQDFKFPLGIKGAGSSIQLSANTVKQNSRNGLAKLVFIIYRSLGQFLSTENATIKLGADFIGRNSTIAVNSHVISVSINKESSRVYLTDPVLFTLPHIDPDNYFNANCSFWNYSERTMMGYWSTQGCKLVDTNKTRTTCACSHLTNFAILMAHREIAYKDGVHELLLTVITWVGIVISLVCLAICIFTFCFFRGLQSDRNTIHKNLCINLFIAEFIFLIGIDKTKYAIACPIFAGLLHFFFLAAFAWMCLEGVQLYLMLVEVFESEYSRKKYYYVAGYLFPATVVGVSAAIDYKSYGTEKACWLHVDNYFIWSFIGPVTFIILLNIIFLVITLCKMVKHSNTLKPDSSRLENINNYRVCDGYYNTDLPGSWVLGAFALLCLLGLTWSFGLLFINEETIVMAYLFTIFNAFQGVFIFIFHCALQKKVRKEYGKCFRHSYCCGGLPTESPHSSVKASTTRTSARYSSGTQSRIRRMWNDTVRKQSESSFISGDINSTSTLNQGMTGNYLLTNPLLRPHGTNNPYNTLLAETVVCNAPSAPVFNSPGHSLNNARDTSAMDTLPLNGNFNNSYSLHKGDYNDSVQVVDCGLSLNDTAFEKMIISELVHNNLRGSSKTHNLELTLPVKPVIGGSSSEDDAIVADASSLMHSDNPGLELHHKELEAPLIPQRTHSLLYQPQKKVKSEGTDSYVSQLTAEAEDHLQSPNRDSLYTSMPNLRDSPYPESSPDMEEDLSPSRRSENEDIYYKSMPNLGAGHQLQMCYQISRGNSDGYIIPINKEGCIPEGDVREGQMQLVTSL

SEQ ID NO: 3112 - protein, 1474 aa, Homo sapiens
  Payload ID: 696;
  Gene Symbol: ADGRL2;
  Gene Name: adhesion G prt-coupled receptor L2;
  Uniprot ID:  O95490;
  ENSP ID: ENSP00000359760
MVSSGCRMRSLWFIIVISFLPNTEGFSRAALPFGLVRRELSCEGYSIDLRCPGSDVIMIESANYGRTDDKICDADPFQMENTDCYLPDAFKIMTQRCNNRTQCIVVTGSDVFPDPCPGTYKYLEVQYECVPYIFVCPGTLKAIVDSPCIYEAEQKAGAWCKDPLQAADKIYFMPWTPYRTDTLIEYASLEDFQNSRQTTTYKLPNRVDGTGFVVYDGAVFFNKERTRNIVKFDLRTRIKSGEAIINYANYHDTSPYRWGGKTDIDLAVDENGLWVIYATEQNNGMIVISQLNPYTLRFEATWETVYDKRAASNAFMICGVLYVVRSVYQDNESETGKNSIDYIYNTRLNRGEYVDVPFPNQYQYIAAVDYNPRDNQLYVWNNNFILRYSLEFGPPDPAQVPTTAVTITSSAELFKTIISTTSTTSQKGPMSTTVAGSQEGSKGTKPPPAVSTTKIPPITNIFPLPERFCEALDSKGIKWPQTQRGMMVERPCPKGTRGTASYLCMISTGTWNPKGPDLSNCTSHWVNQLAQKIRSGENAASLANELAKHTKGPVFAGDVSSSVRLMEQLVDILDAQLQELKPSEKDSAGRSYNKLQKREKTCRAYLKAIVDTVDNLLRPEALESWKHMNSSEQAHTATMLLDTLEEGAFVLADNLLEPTRVSMPTENIVLEVAVLSTEGQIQDFKFPLGIKGAGSSIQLSANTVKQNSRNGLAKLVFIIYRSLGQFLSTENATIKLGADFIGRNSTIAVNSHVISVSINKESSRVYLTDPVLFTLPHIDPDNYFNANCSFWNYSERTMMGYWSTQGCKLVDTNKTRTTCACSHLTNFAILMAHREIAYKDGVHELLLTVITWVGIVISLVCLAICIFTFCFFRGLQSDRNTIHKNLCINLFIAEFIFLIGIDKTKYAIACPIFAGLLHFFFLAAFAWMCLEGVQLYLMLVEVFESEYSRKKYYYVAGYLFPATVVGVSAAIDYKSYGTEKACWLHVDNYFIWSFIGPVTFIILLNIIFLVITLCKMVKHSNTLKPDSSRLENINNYRVCDGYYNTDLPGSWVLGAFALLCLLGLTWSFGLLFINEETIVMAYLFTIFNAFQGVFIFIFHCALQKKVRKEYGKCFRHSYCCGGLPTESPHSSVKASTTRTSARYSSGTQSRIRRMWNDTVRKQSESSFISGDINSTSTLNQGMTGNYLLTNPLLRPHGTNNPYNTLLAETVVCNAPSAPVFNSPGHSLNNARDTSAMDTLPLNGNFNNSYSLHKGDYNDSVQVVDCGLSLNDTAFEKMIISELVHNNLRGSSKTHNLELTLPVKPVIGGSSSEDDAIVADASSLMHSDNPGLELHHKELEAPLIPQRTHSLLYQPQKKVKSEGTDSYVSQLTAEAEDHLQSPNRDSLYTSMPNLRDSPYPESSPDMEEDLSPSRRSENEDIYYKSMPNLGAGHQLQMCYQISRGNSDGYIIPINKEGCIPEGDVREGQMQLVTSL

SEQ ID NO: 3113 - protein, 1431 aa, Homo sapiens
  Payload ID: 696;
  Gene Symbol: ADGRL2;
  Gene Name: adhesion G prt-coupled receptor L2;
  ENSP ID: ENSP00000359762
MVSSGCRMRSLWFIIVISFLPNTEGFSRAALPFGLVRRELSCEGYSIDLRCPGSDVIMIESANYGRTDDKICDADPFQMENTDCYLPDAFKIMTQRCNNRTQCIVVTGSDVFPDPCPGTYKYLEVQYECVPYIFVCPGTLKAIVDSPCIYEAEQKAGAWCKDPLQAADKIYFMPWTPYRTDTLIEYASLEDFQNSRQTTTYKLPNRVDGTGFVVYDGAVFFNKERTRNIVKFDLRTRIKSGEAIINYANYHDTSPYRWGGKTDIDLAVDENGLWVIYATEQNNGMIVISQLNPYTLRFEATWETVYDKRAASNAFMICGVLYVVRSVYQDNESETGKNSIDYIYNTRLNRGEYVDVPFPNQYQYIAAVDYNPRDNQLYVWNNNFILRYSLEFGPPDPAQVPTTAVTITSSAELFKTIISTTSTTSQKGPMSTTVAGSQEGSKGTKPPPAVSTTKIPPITNIFPLPERFCEALDSKGIKWPQTQRGMMVERPCPKGTRGTASYLCMISTGTWNPKGPDLSNCTSHWVNQLAQKIRSGENAASLANELAKHTKGPVFAGDVSSSVRLMEQLVDILDAQLQELKPSEKDSAGRSYNKLQKREKTCRAYLKAIVDTVDNLLRPEALESWKHMNSSEQAHTATMLLDTLEEGAFVLADNLLEPTRVSMPTENIVLEVAVLSTEGQIQDFKFPLGIKGAGSSIQLSANTVKQNSRNGLAKLVFIIYRSLGQFLSTENATIKLGADFIGRNSTIAVNSHVISVSINKESSRVYLTDPVLFTLPHIDPDNYFNANCSFWNYSERTMMGYWSTQGCKLVDTNKTRTTCACSHLTNFAILMAHREIAYKDGVHELLLTVITWVGIVISLVCLAICIFTFCFFRGLQSDRNTIHKNLCINLFIAEFIFLIGIDKTKYAIACPIFAGLLHFFFLAAFAWMCLEGVQLYLMLVEVFESEYSRKKYYYVAGYLFPATVVGVSAAIDYKSYGTEKACWLHVDNYFIWSFIGPVTFIILLNIIFLVITLCKMVKHSNTLKPDSSRLENINNYRVCDGYYNTDLPGSWVLGAFALLCLLGLTWSFGLLFINEETIVMAYLFTIFNAFQGVFIFIFHCALQKKVRKEYGKCFRHSYCCGGLPTESPHSSVKASTTRTSARYSSGTQSRIRRMWNDTVRKQSESSFISGDINSTSTLNQGHSLNNARDTSAMDTLPLNGNFNNSYSLHKGDYNDSVQVVDCGLSLNDTAFEKMIISELVHNNLRGSSKTHNLELTLPVKPVIGGSSSEDDAIVADASSLMHSDNPGLELHHKELEAPLIPQRTHSLLYQPQKKVKSEGTDSYVSQLTAEAEDHLQSPNRDSLYTSMPNLRDSPYPESSPDMEEDLSPSRRSENEDIYYKSMPNLGAGHQLQMCYQISRGNSDGYIIPINKEGCIPEGDVREGQMQLVTSL

SEQ ID NO: 3114 - protein, 1459 aa, Homo sapiens; identical to SEQ ID NO: 3109
  Payload ID: 696;
  Gene Symbol: ADGRL2;
  Gene Name: adhesion G prt-coupled receptor L2;
  Uniprot ID:  O95490;
  ENSP ID: ENSP00000359763

SEQ ID NO: 3115 - protein, 1416 aa, Homo sapiens
  Payload ID: 696;
  Gene Symbol: ADGRL2;
  Gene Name: adhesion G prt-coupled receptor L2;
  Uniprot ID:  O95490;
  ENSP ID: ENSP00000359765
MVSSGCRMRSLWFIIVISFLPNTEGFSRAALPFGLVRRELSCEGYSIDLRCPGSDVIMIESANYGRTDDKICDADPFQMENTDCYLPDAFKIMTQRCNNRTQCIVVTGSDVFPDPCPGTYKYLEVQYECVPYIFVCPGTLKAIVDSPCIYEAEQKAGAWCKDPLQAADKIYFMPWTPYRTDTLIEYASLEDFQNSRQTTTYKLPNRVDGTGFVVYDGAVFFNKERTRNIVKFDLRTRIKSGEAIINYANYHDTSPYRWGGKTDIDLAVDENGLWVIYATEQNNGMIVISQLNPYTLRFEATWETVYDKRAASNAFMICGVLYVVRSVYQDNESETGKNSIDYIYNTRLNRGEYVDVPFPNQYQYIAAVDYNPRDNQLYVWNNNFILRYSLEFGPPDPAQVPTTAVTITSSAELFKTIISTTSTTSQKGPMSTTVAGSQEGSKGTKPPPAVSTTKIPPITNIFPLPERFCEALDSKGIKWPQTQRGMMVERPCPKGTRGTASYLCMISTGTWNPKGPDLSNCTSHWVNQLAQKIRSGENAASLANELAKHTKGPVFAGDVSSSVRLMEQLVDILDAQLQELKPSEKDSAGRSYNKLQKREKTCRAYLKAIVDTVDNLLRPEALESWKHMNSSEQAHTATMLLDTLEEGAFVLADNLLEPTRVSMPTENIVLEVAVLSTEGQIQDFKFPLGIKGAGSSIQLSANTVKQNSRNGLAKLVFIIYRSLGQFLSTENATIKLGADFIGRNSTIAVNSHVISVSINKESSRVYLTDPVLFTLPHIDPDNYFNANCSFWNYSERTMMGYWSTQGCKLVDTNKTRTTCACSHLTNFAILMAHREIAYKDGVHELLLTVITWVGIVISLVCLAICIFTFCFFRGLQSDRNTIHKNLCINLFIAEFIFLIGIDKTKYAIACPIFAGLLHFFFLAAFAWMCLEGVQLYLMLVEVFESEYSRKKYYYVAGYLFPATVVGVSAAIDYKSYGTEKACWLHVDNYFIWSFIGPVTFIILLNIIFLVITLCKMVKHSNTLKPDSSRLENIKSWVLGAFALLCLLGLTWSFGLLFINEETIVMAYLFTIFNAFQGVFIFIFHCALQKKVRKEYGKCFRHSYCCGGLPTESPHSSVKASTTRTSARYSSGTQSRIRRMWNDTVRKQSESSFISGDINSTSTLNQGHSLNNARDTSAMDTLPLNGNFNNSYSLHKGDYNDSVQVVDCGLSLNDTAFEKMIISELVHNNLRGSSKTHNLELTLPVKPVIGGSSSEDDAIVADASSLMHSDNPGLELHHKELEAPLIPQRTHSLLYQPQKKVKSEGTDSYVSQLTAEAEDHLQSPNRDSLYTSMPNLRDSPYPESSPDMEEDLSPSRRSENEDIYYKSMPNLGAGHQLQMCYQISRGNSDGYIIPINKEGCIPEGDVREGQMQLVTSL

SEQ ID NO: 3116 - protein, 471 aa, Homo sapiens
  Payload ID: 696;
  Gene Symbol: ADGRL2;
  Gene Name: adhesion G prt-coupled receptor L2;
  ENSP ID: ENSP00000385853
  MOD_RES (1)..(1): Any amino acid
XITLCKMVKHSNTLKPDSSRLENINNYRVCDGYYNTDLPGSWVLGAFALLCLLGLTWSFGLLFINEETIVMAYLFTIFNAFQGVFIFIFHCALQKKVRKEYGKCFRHSYCCGGLPTESPHSSVKASTTRTSARYSSGTQSRIRRMWNDTVRKQSESSFISGDINSTSTLNQGMTGNYLLTNPLLRPHGTNNPYNTLLAETVVCNAPSAPVFNSPATYRETRHSLNNARDTSAMDTLPLNGNFNNSYSLHKGDYNDSVQVVDCGLSLNDTAFEKMIISELVHNNLRGSSKTHNLELTLPVKPVIGGSSSEDDAIVADASSLMHSDNPGLELHHKELEAPLIPQRTHSLLYQPQKKVKSEGTDSYVSQLTAEAEDHLQSPNRDSLYTSMPNLRDSPYPESSPDMEEDLSPSRRSENEDIYYKSMPNLGAGHQLQMCYQISRGNSDGYIIPINKEGCIPEGDVREGQMQLVTSL

SEQ ID NO: 3117 - protein, 1351 aa, Homo sapiens
  Payload ID: 696;
  Gene Symbol: ADGRL2;
  Gene Name: adhesion G prt-coupled receptor L2;
  ENSP ID: ENSP00000397740
  MOD_RES (1)..(1): Any amino acid
XFVCPGTLKAIVDSPCIYEAEQKAGAWCKDPLQAADKIYFMPWTPYRTDTLIEYASLEDFQNSRQTTTYKLPNRVDGTGFVVYDGAVFFNKERTRNIVKFDLRTRIKSGEAIINYANYHDTSPYRWGGKTDIDLAVDENGLWVIYATEQNNGMIVISQLNPYTLRFEATWETVYDKRAASNAFMICGVLYVVRSVYQDNESETGKNSIDYIYNTRLNRGEYVDVPFPNQYQYIAAVDYNPRDNQLYVWNNNFILRYSLEFGPPDPAQVPTTAVTITSSAELFKTIISTTSTTSQKGPMSTTVAGSQEGSKGTKPPPAVSTTKIPPITNIFPLPERFCEALDSKGIKWPQTQRGMMVERPCPKGTRGTASYLCMISTGTWNPKGPDLSNCTSHWVNQLAQKIRSGENAASLANELAKHTKGPVFAGDVSSSVRLMEQLVDILDAQLQELKPSEKDSAGRSYNKLQKREKTCRAYLKAIVDTVDNLLRPEALESWKHMNSSEQAHTATMLLDTLEEGAFVLADNLLEPTRVSMPTENIVLEVAVLSTEGQIQDFKFPLGIKGAGSSIQLSANTVKQNSRNGLAKLVFIIYRSLGQFLSTENATIKLGADFIGRNSTIAVNSHVISVSINKESSRVYLTDPVLFTLPHIDPDNYFNANCSFWNYSERTMMGYWSTQGCKLVDTNKTRTTCACSHLTNFAILMAHREIAYKDGVHELLLTVITWVGIVISLVCLAICIFTFCFFRGLQSDRNTIHKNLCINLFIAEFIFLIGIDKTKYAIACPIFAGLLHFFFLAAFAWMCLEGVQLYLMLVEVFESEYSRKKYYYVAGYLFPATVVGVSAAIDYKSYGTEKACWLHVDNYFIWSFIGPVTFIILLNIIFLVITLCKMVKHSNTLKPDSSRLENINNYRVCDGYYNTDLPGYEDNKPFIKSWVLGAFALLCLLGLTWSFGLLFINEETIVMAYLFTIFNAFQGVFIFIFHCALQKKVRKEYGKCFRHSYCCGGLPTESPHSSVKASTTRTSARYSSGTQSRIRRMWNDTVRKQSESSFISGDINSTSTLNQGMTGNYLLTNPLLRPHGTNNPYNTLLAETVVCNAPSAPVFNSPGHSLNNARDTSAMDTLPLNGNFNNSYSLHKGDYNDSVQVVDCGLSLNDTAFEKMIISELVHNNLRGSSKTHNLELTLPVKPVIGGSSSEDDAIVADASSLMHSDNPGLELHHKELEAPLIPQRTHSLLYQPQKKVKSEGTDSYVSQLTAEAEDHLQSPNRDSLYTSMPNLRDSPYPESSPDMEEDLSPSRRSENEDIYYKSMPNLGAGHQLQMCYQISRGNSDGYIIPINKEGCIPEGDVREGQMQLVTSL

SEQ ID NO: 3118 - protein, 1431 aa, Homo sapiens; identical to SEQ ID NO: 3113
  Payload ID: 696;
  Gene Symbol: ADGRL2;
  Gene Name: adhesion G prt-coupled receptor L2;
  ENSP ID: ENSP00000485786

SEQ ID NO: 3119 - protein, 1580 aa, Homo sapiens
  Payload ID: 697;
  Gene Symbol: ADGRL3;
  Gene Name: adhesion G prt-coupled receptor L3;
  ENSP ID: ENSP00000420931
MWPSQLLIFMMLLAPIIHGGKHSERHPALAAPLRHAERSPGGALPPRHLLQQPAAERTAAHRGQGPRGATRGVRGPGAQGAQIAAQAFSRAPIPMAVVRRELSCESYPIELRCPGTDVIMIESANYGRTDDKICDSDPAQMENIRCYLPDAYKIMSQRCNNRTQCAVVAGPDVFPDPCPGTYKYLEVQYECVPYKVEQKVFLCPGLLKGVYQSEHLFESDHQSGAWCKDPLQASDKIYYMPWTPYRTDTLTEYSSKDDFIAGRPTTTYKLPHRVDGTGFVVYDGALFFNKERTRNIVKFDLRTRIKSGEAIIANANYHDTSPYRWGGKSDIDLAVDENGLWVIYATEQNNGKIVISQLNPYTLRIEGTWDTAYDKRSASNAFMICGILYVVKSVYEDDDNEATGNKIDYIYNTDQSKDSLVDVPFPNSYQYIAAVDYNPRDNLLYVWNNYHVVKYSLDFGPLDSRSGQAHHGQVSYISPPIHLDSELERPSVKDISTTGPLGMGSTTTSTTLRTTTLSPGRSTTPSVSGRRNRSTSTPSPAVEVLDDMTTHLPSASSQIPALEESCEAVEAREIMWFKTRQGQIAKQPCPAGTIGVSTYLCLAPDGIWDPQGPDLSNCSSPWVNHITQKLKSGETAANIARELAEQTRNHLNAGDITYSVRAMDQLVGLLDVQLRNLTPGGKDSAARSLNKLQKRERSCRAYVQAMVETVNNLLQPQALNAWRDLTTSDQLRAATMLLHTVEESAFVLADNLLKTDIVRENTDNIKLEVARLSTEGNLEDLKFPENMGHGSTIQLSANTLKQNGRNGEIRVAFVLYNNLGPYLSTENASMKLGTEALSTNHSVIVNSPVITAAINKEFSNKVYLADPVVFTVKHIKQSEENFNPNCSFWSYSKRTMTGYWSTQGCRLLTTNKTHTTCSCNHLTNFAVLMAHVEVKHSDAVHDLLLDVITWVGILLSLVCLLICIFTFCFFRGLQSDRNTIHKNLCISLFVAELLFLIGINRTDQPIACAVFAALLHFFFLAAFTWMFLEGVQLYIMLVEVFESEHSRRKYFYLVGYGMPALIVAVSAAVDYRSYGTDKVCWLRLDTYFIWSFIGPATLIIMLNVIFLGIALYKMFHHTAILKPESGCLDNINYEDNRPFIKSWVIGAIALLCLLGLTWAFGLMYINESTVIMAYLFTIFNSLQGMFIFIFHCVLQKKVRKEYGKCLRTHCCSGKSTESSIGSGKTSGSRTPGRYSTGSQSRIRRMWNDTVRKQSESSFITGDINSSASLNRGAMANHLISNALLRPHGTNNPYNTLLGEPAVCNNPSVSMYNAQEGLLNNARDTSVMDTLPLNGNHGNSYSIASGEYLSNCVQIIDRGYNHNETALEKKILKELTSNYIPSYLNNHERSSEQNRNLMNKLVNNLGSGREDDAIVLDDATSFNHEESLGLELIHEESDAPLLPPRVYSTENHQPHHYTRRRIPQDHSESFFPLLTNEHTEDLQSPHRDSLYTSMPTLAGVAATESVTTSTQTEPPPAKCGDAEDVYYKSMPNLGSRNHVHQLHTYYQLGRGSSDGFIVPPNKDGTPPEGSSKGPAHLVTSL

SEQ ID NO: 3120 - protein, 1528 aa, Homo sapiens
  Payload ID: 697;
  Gene Symbol: ADGRL3;
  Gene Name: adhesion G prt-coupled receptor L3;
  ENSP ID: ENSP00000421372
MWPSQLLIFMMLLAPIIHGGKHSERHPALAAPLRHAERSPGGALPPRHLLQQPAAERTAAHRGQGPRGATRGVRGPGAQGAQIAAQAFSRAPIPMAVVRRELSCESYPIELRCPGTDVIMIESANYGRTDDKICDSDPAQMENIRCYLPDAYKIMSQRCNNRTQCAVVAGPDVFPDPCPGTYKYLEVQYECVPYKVEQKVFLCPGLLKGVYQSEHLFESDHQSGAWCKDPLQASDKIYYMPWTPYRTDTLTEYSSKDDFIAGRPTTTYKLPHRVDGTGFVVYDGALFFNKERTRNIVKFDLRTRIKSGEAIIANANYHDTSPYRWGGKSDIDLAVDENGLWVIYATEQNNGKIVISQLNPYTLRIEGTWDTAYDKRSASNAFMICGILYVVKSVYEDDDNEATGNKIDYIYNTDQSKDSLVDVPFPNSYQYIAAVDYNPRDNLLYVWNNYHVVKYSLDFGPLDSRSGQAHHGQVSYISPPIHLDSELERPSVKDISTTGPLGMGSTTTSTTLRTTTLSPGRSTTPSVSGRRNRSTSTPSPAVEVLDDMTTHLPSASSQIPALEESCEAVEAREIMWFKTRQGQIAKQPCPAGTIGVSTYLCLAPDGIWDPQGPDLSNCSSPWVNHITQKLKSGETAANIARELAEQTRNHLNAGDITYSVRAMDQLVGLLDVQLRNLTPGGKDSAARSLNKLQKRERSCRAYVQAMVETVNNLLQPQALNAWRDLTTSDQLRAATMLLHTVEESAFVLADNLLKTDIVRENTDNIKLEVARLSTEGNLEDLKFPENMGHGSTIQLSANTLKQNGRNGEIRVAFVLYNNLGPYLSTENASMKLGTEALSTNHSVIVNSPVITAAINKEFSNKVYLADPVVFTVKHIKQSEENFNPNCSFWSYSKRTMTGYWSTQGCRLLTTNKTHTTCSCNHLTNFAVLMAHVEVKHSDAVHDLLLDVITWVGILLSLVCLLICIFTFCFFRGLQSDRNTIHKNLCISLFVAELLFLIGINRTDQPIACAVFAALLHFFFLAAFTWMFLEGVQLYIMLVEVFESEHSRRKYFYLVGYGMPALIVAVSAAVDYRSYGTDKVCWLRLDTYFIWSFIGPATLIIMLNVIFLGIALYKMFHHTAILKPESGCLDNIKSWVIGAIALLCLLGLTWAFGLMYINESTVIMAYLFTIFNSLQGMFIFIFHCVLQKKVRKEYGKCLRTHCCSGKSTESSIGSGKTSGSRTPGRYSTGSQSRIRRMWNDTVRKQSESSFITGDINSSASLNREGLLNNARDTSVMDTLPLNGNHGNSYSIASGEYLSNCVQIIDRGYNHNETALEKKILKELTSNYIPSYLNNHERSSEQNRNLMNKLVNNLGSGREDDAIVLDDATSFNHEESLGLELIHEESDAPLLPPRVYSTENHQPHHYTRRRIPQDHSESFFPLLTNEHTEDLQSPHRDSLYTSMPTLAGVAATESVTTSTQTEPPPAKCGDAEDVYYKSMPNLGSRNHVHQLHTYYQLGRGSSDGFIVPPNKDGTPPEGSSKGPAHLVTSL

SEQ ID NO: 3121 - protein, 1342 aa, Homo sapiens
  Payload ID: 697;
  Gene Symbol: ADGRL3;
  Gene Name: adhesion G prt-coupled receptor L3;
  ENSP ID: ENSP00000421476
MWPSQLLIFMMLLAPIIHGGKHSERHPALAAPLRHAERSPGGALPPRHLLQQPAAERTAAHRGQGPRGATRGVRGPGAQGAQIAAQAFSRAPIPMAVVRRELSCESYPIELRCPGTDVIMIESANYGRTDDKICDSDPAQMENIRCYLPDAYKIMSQRCNNRTQCAVVAGPDVFPDPCPGTYKYLEVQYECVPYKVEQKVFLCPGLLKGVYQSEHLFESDHQSGAWCKDPLQASDKIYYMPWTPYRTDTLTEYSSKDDFIAGRPTTTYKLPHRVDGTGFVVYDGALFFNKERTRNIVKFDLRTRIKSGEAIIANANYHDTSPYRWGGKSDIDLAVDENGLWVIYATEQNNGKIVISQLNPYTLRIEGTWDTAYDKRSASNAFMICGILYVVKSVYEDDDNEATGNKIDYIYNTDQSKDSLVDVPFPNSYQYIAAVDYNPRDNLLYVWNNYHVVKYSLDFGPLDSRSGQAHHGQVSYISPPIHLDSELERPSVKDISTTGPLGMGSTTTSTTLRTTTLSPGRSTTPSVSGRRNRSTSTPSPAVEVLDDMTTHLPSASSQIPALEESCEAVEAREIMWFKTRQGQIAKQPCPAGTIGVSTYLCLAPDGIWDPQGPDLSNCSSPWVNHITQKLKSGETAANIARELAEQTRNHLNAGDITYSVRAMDQLVGLLDVQLRNLTPGGKDSAARSLNKLQKRERSCRAYVQAMVETVNNLLQPQALNAWRDLTTSDQLRAATMLLHTVEESAFVLADNLLKTDIVRENTDNIKLEVARLSTEGNLEDLKFPENMGHGSTIQLSANTLKQNGRNGEIRVAFVLYNNLGPYLSTENASMKLGTEALSTNHSVIVNSPVITAAINKEFSNKVYLADPVVFTVKHIKQSEENFNPNCSFWSYSKRTMTGYWSTQGCRLLTTNKTHTTCSCNHLTNFAVLMAHVEVKHSDAVHDLLLDVITWVGILLSLVCLLICIFTFCFFRGLQSDRNTIHKNLCISLFVAELLFLIGINRTDQPIACAVFAALLHFFFLAAFTWMFLEGVQLYIMLVEVFESEHSRRKYFYLVGYGMPALIVAVSAAVDYRSYGTDKVCWLRLDTYFIWSFIGPATLIIMLNVIFLGIALYKMFHHTAILKPESGCLDNIKSWVIGAIALLCLLGLTWAFGLMYINESTVIMAYLFTIFNSLQGMFIFIFHCVLQKKVRKEYGKCLRTHCCSGKSTESSIGSGKTSGSRTPGRYSTGSQSRIRRMWNDTVRKQSESSFITGDINSSASLNRGAMANHLISNALLRPHGTNNPYNTLLGEPAVCNNPSVSMYNAQEPYRETSMGVKLNIAYQIGASEQCQGYKCHGYSTTEW

SEQ ID NO: 3122 - protein, 1512 aa, Homo sapiens
  Payload ID: 697;
  Gene Symbol: ADGRL3;
  Gene Name: adhesion G prt-coupled receptor L3;
  ENSP ID: ENSP00000421627
MWPSQLLIFMMLLAPIIHAFSRAPIPMAVVRRELSCESYPIELRCPGTDVIMIESANYGRTDDKICDSDPAQMENIRCYLPDAYKIMSQRCNNRTQCAVVAGPDVFPDPCPGTYKYLEVQYECVPYKVEQKVFLCPGLLKGVYQSEHLFESDHQSGAWCKDPLQASDKIYYMPWTPYRTDTLTEYSSKDDFIAGRPTTTYKLPHRVDGTGFVVYDGALFFNKERTRNIVKFDLRTRIKSGEAIIANANYHDTSPYRWGGKSDIDLAVDENGLWVIYATEQNNGKIVISQLNPYTLRIEGTWDTAYDKRSASNAFMICGILYVVKSVYEDDDNEATGNKIDYIYNTDQSKDSLVDVPFPNSYQYIAAVDYNPRDNLLYVWNNYHVVKYSLDFGPLDSRSGQAHHGQVSYISPPIHLDSELERPSVKDISTTGPLGMGSTTTSTTLRTTTLSPGRSTTPSVSGRRNRSTSTPSPAVEVLDDMTTHLPSASSQIPALEESCEAVEAREIMWFKTRQGQIAKQPCPAGTIGVSTYLCLAPDGIWDPQGPDLSNCSSPWVNHITQKLKSGETAANIARELAEQTRNHLNAGDITYSVRAMDQLVGLLDVQLRNLTPGGKDSAARSLNKLQKRERSCRAYVQAMVETVNNLLQPQALNAWRDLTTSDQLRAATMLLHTVEESAFVLADNLLKTDIVRENTDNIKLEVARLSTEGNLEDLKFPENMGHGSTIQLSANTLKQNGRNGEIRVAFVLYNNLGPYLSTENASMKLGTEALSTNHSVIVNSPVITAAINKEFSNKVYLADPVVFTVKHIKQSEENFNPNCSFWSYSKRTMTGYWSTQGCRLLTTNKTHTTCSCNHLTNFAVLMAHVEVKHSDAVHDLLLDVITWVGILLSLVCLLICIFTFCFFRGLQSDRNTIHKNLCISLFVAELLFLIGINRTDQPIACAVFAALLHFFFLAAFTWMFLEGVQLYIMLVEVFESEHSRRKYFYLVGYGMPALIVAVSAAVDYRSYGTDKVCWLRLDTYFIWSFIGPATLIIMLNVIFLGIALYKMFHHTAILKPESGCLDNINYEDNRPFIKSWVIGAIALLCLLGLTWAFGLMYINESTVIMAYLFTIFNSLQGMFIFIFHCVLQKKVRKEYGKCLRTHCCSGKSTESSIGSGKTSGSRTPGRYSTGSQSRIRRMWNDTVRKQSESSFITGDINSSASLNRGAMANHLISNALLRPHGTNNPYNTLLGEPAVCNNPSVSMYNAQEGLLNNARDTSVMDTLPLNGNHGNSYSIASGEYLSNCVQIIDRGYNHNETALEKKILKELTSNYIPSYLNNHERSSEQNRNLMNKLVNNLGSGREDDAIVLDDATSFNHEESLGLELIHEESDAPLLPPRVYSTENHQPHHYTRRRIPQDHSESFFPLLTNEHTEDLQSPHRDSLYTSMPTLAGVAATESVTTSTQTEPPPAKCGDAEDVYYKSMPNLGSRNHVHQLHTYYQLGRGSSDGFIVPPNKDGTPPEGSSKGPAHLVTSL

SEQ ID NO: 3123 - protein, 1469 aa, Homo sapiens
  Payload ID: 697;
  Gene Symbol: ADGRL3;
  Gene Name: adhesion G prt-coupled receptor L3;
  Uniprot ID:  Q9HAR2;
  ENSP ID: ENSP00000422533
MWPSQLLIFMMLLAPIIHAFSRAPIPMAVVRRELSCESYPIELRCPGTDVIMIESANYGRTDDKICDSDPAQMENIRCYLPDAYKIMSQRCNNRTQCAVVAGPDVFPDPCPGTYKYLEVQYECVPYKVEQKVFLCPGLLKGVYQSEHLFESDHQSGAWCKDPLQASDKIYYMPWTPYRTDTLTEYSSKDDFIAGRPTTTYKLPHRVDGTGFVVYDGALFFNKERTRNIVKFDLRTRIKSGEAIIANANYHDTSPYRWGGKSDIDLAVDENGLWVIYATEQNNGKIVISQLNPYTLRIEGTWDTAYDKRSASNAFMICGILYVVKSVYEDDDNEATGNKIDYIYNTDQSKDSLVDVPFPNSYQYIAAVDYNPRDNLLYVWNNYHVVKYSLDFGPLDSRSGQAHHGQVSYISPPIHLDSELERPSVKDISTTGPLGMGSTTTSTTLRTTTLSPGRSTTPSVSGRRNRSTSTPSPAVEVLDDMTTHLPSASSQIPALEESCEAVEAREIMWFKTRQGQIAKQPCPAGTIGVSTYLCLAPDGIWDPQGPDLSNCSSPWVNHITQKLKSGETAANIARELAEQTRNHLNAGDITYSVRAMDQLVGLLDVQLRNLTPGGKDSAARSLNKLQKRERSCRAYVQAMVETVNNLLQPQALNAWRDLTTSDQLRAATMLLHTVEESAFVLADNLLKTDIVRENTDNIKLEVARLSTEGNLEDLKFPENMGHGSTIQLSANTLKQNGRNGEIRVAFVLYNNLGPYLSTENASMKLGTEALSTNHSVIVNSPVITAAINKEFSNKVYLADPVVFTVKHIKQSEENFNPNCSFWSYSKRTMTGYWSTQGCRLLTTNKTHTTCSCNHLTNFAVLMAHVEVKHSDAVHDLLLDVITWVGILLSLVCLLICIFTFCFFRGLQSDRNTIHKNLCISLFVAELLFLIGINRTDQPIACAVFAALLHFFFLAAFTWMFLEGVQLYIMLVEVFESEHSRRKYFYLVGYGMPALIVAVSAAVDYRSYGTDKVCWLRLDTYFIWSFIGPATLIIMLNVIFLGIALYKMFHHTAILKPESGCLDNINYEDNRPFIKSWVIGAIALLCLLGLTWAFGLMYINESTVIMAYLFTIFNSLQGMFIFIFHCVLQKKVRKEYGKCLRTHCCSGKSTESSIGSGKTSGSRTPGRYSTGSQSRIRRMWNDTVRKQSESSFITGDINSSASLNREGLLNNARDTSVMDTLPLNGNHGNSYSIASGEYLSNCVQIIDRGYNHNETALEKKILKELTSNYIPSYLNNHERSSEQNRNLMNKLVNNLGSGREDDAIVLDDATSFNHEESLGLELIHEESDAPLLPPRVYSTENHQPHHYTRRRIPQDHSESFFPLLTNEHTEDLQSPHRDSLYTSMPTLAGVAATESVTTSTQTEPPPAKCGDAEDVYYKSMPNLGSRNHVHQLHTYYQLGRGSSDGFIVPPNKDGTPPEGSSKGPAHLVTSL

SEQ ID NO: 3124 - protein, 1240 aa, Homo sapiens
  Payload ID: 697;
  Gene Symbol: ADGRL3;
  Gene Name: adhesion G prt-coupled receptor L3;
  Uniprot ID:  Q9HAR2;
  ENSP ID: ENSP00000423388
MWPSQLLIFMMLLAPIIHAFSRAPIPMAVVRRELSCESYPIELRCPGTDVIMIESANYGRTDDKICDSDPAQMENIRCYLPDAYKIMSQRCNNRTQCAVVAGPDVFPDPCPGTYKYLEVQYECVPYKVEQKVFLCPGLLKGVYQSEHLFESDHQSGAWCKDPLQASDKIYYMPWTPYRTDTLTEYSSKDDFIAGRPTTTYKLPHRVDGTGFVVYDGALFFNKERTRNIVKFDLRTRIKSGEAIIANANYHDTSPYRWGGKSDIDLAVDENGLWVIYATEQNNGKIVISQLNPYTLRIEGTWDTAYDKRSASNAFMICGILYVVKSVYEDDDNEATGNKIDYIYNTDQSKDSLVDVPFPNSYQYIAAVDYNPRDNLLYVWNNYHVVKYSLDFGPLDSRSGQAHHGQVSYISPPIHLDSELERPSVKDISTTGPLGMGSTTTSTTLRTTTLSPGRSTTPSVSGRRNRSTSTPSPAVEVLDDMTTHLPSASSQIPALEESCEAVEAREIMWFKTRQGQIAKQPCPAGTIGVSTYLCLAPDGIWDPQGPDLSNCSSPWVNHITQKLKSGETAANIARELAEQTRNHLNAGDITYSVRAMDQLVGLLDVQLRNLTPGGKDSAARSLNKLQKRERSCRAYVQAMVETVNNLLQPQALNAWRDLTTSDQLRAATMLLHTVEESAFVLADNLLKTDIVRENTDNIKLEVARLSTEGNLEDLKFPENMGHGSTIQLSANTLKQNGRNGEIRVAFVLYNNLGPYLSTENASMKLGTEALSTNHSVIVNSPVITAAINKEFSNKVYLADPVVFTVKHIKQSEENFNPNCSFWSYSKRTMTGYWSTQGCRLLTTNKTHTTCSCNHLTNFAVLMAHVEVKHSDAVHDLLLDVITWVGILLSLVCLLICIFTFCFFRGLQSDRNTIHKNLCISLFVAELLFLIGINRTDQPIACAVFAALLHFFFLAAFTWMFLEGVQLYIMLVEVFESEHSRRKYFYLVGYGMPALIVAVSAAVDYRSYGTDKVCWLRLDTYFIWSFIGPATLIIMLNVIFLGIALYKMFHHTAILKPESGCLDNINYEDNRPFIKSWVIGAIALLCLLGLTWAFGLMYINESTVIMAYLFTIFNSLQGMFIFIFHCVLQKKVRKEYGKCLRTHCCSGKSTESSIGSGKTSGSRTPGRYSTGSQSRIRRMWNDTVRKQSESSFITGDINSSASLNREPYRETSMGVKLNIAYQIGASEQCQGYKCHGYSTTEW

SEQ ID NO: 3125 - protein, 1283 aa, Homo sapiens
  Payload ID: 697;
  Gene Symbol: ADGRL3;
  Gene Name: adhesion G prt-coupled receptor L3;
  ENSP ID: ENSP00000423434
MWPSQLLIFMMLLAPIIHAFSRAPIPMAVVRRELSCESYPIELRCPGTDVIMIESANYGRTDDKICDSDPAQMENIRCYLPDAYKIMSQRCNNRTQCAVVAGPDVFPDPCPGTYKYLEVQYECVPYKVEQKVFLCPGLLKGVYQSEHLFESDHQSGAWCKDPLQASDKIYYMPWTPYRTDTLTEYSSKDDFIAGRPTTTYKLPHRVDGTGFVVYDGALFFNKERTRNIVKFDLRTRIKSGEAIIANANYHDTSPYRWGGKSDIDLAVDENGLWVIYATEQNNGKIVISQLNPYTLRIEGTWDTAYDKRSASNAFMICGILYVVKSVYEDDDNEATGNKIDYIYNTDQSKDSLVDVPFPNSYQYIAAVDYNPRDNLLYVWNNYHVVKYSLDFGPLDSRSGQAHHGQVSYISPPIHLDSELERPSVKDISTTGPLGMGSTTTSTTLRTTTLSPGRSTTPSVSGRRNRSTSTPSPAVEVLDDMTTHLPSASSQIPALEESCEAVEAREIMWFKTRQGQIAKQPCPAGTIGVSTYLCLAPDGIWDPQGPDLSNCSSPWVNHITQKLKSGETAANIARELAEQTRNHLNAGDITYSVRAMDQLVGLLDVQLRNLTPGGKDSAARSLNKLQKRERSCRAYVQAMVETVNNLLQPQALNAWRDLTTSDQLRAATMLLHTVEESAFVLADNLLKTDIVRENTDNIKLEVARLSTEGNLEDLKFPENMGHGSTIQLSANTLKQNGRNGEIRVAFVLYNNLGPYLSTENASMKLGTEALSTNHSVIVNSPVITAAINKEFSNKVYLADPVVFTVKHIKQSEENFNPNCSFWSYSKRTMTGYWSTQGCRLLTTNKTHTTCSCNHLTNFAVLMAHVEVKHSDAVHDLLLDVITWVGILLSLVCLLICIFTFCFFRGLQSDRNTIHKNLCISLFVAELLFLIGINRTDQPIACAVFAALLHFFFLAAFTWMFLEGVQLYIMLVEVFESEHSRRKYFYLVGYGMPALIVAVSAAVDYRSYGTDKVCWLRLDTYFIWSFIGPATLIIMLNVIFLGIALYKMFHHTAILKPESGCLDNINYEDNRPFIKSWVIGAIALLCLLGLTWAFGLMYINESTVIMAYLFTIFNSLQGMFIFIFHCVLQKKVRKEYGKCLRTHCCSGKSTESSIGSGKTSGSRTPGRYSTGSQSRIRRMWNDTVRKQSESSFITGDINSSASLNRGAMANHLISNALLRPHGTNNPYNTLLGEPAVCNNPSVSMYNAQEPYRETSMGVKLNIAYQIGASEQCQGYKCHGYSTTEW

SEQ ID NO: 3126 - protein, 1308 aa, Homo sapiens
  Payload ID: 697;
  Gene Symbol: ADGRL3;
  Gene Name: adhesion G prt-coupled receptor L3;
  ENSP ID: ENSP00000423787
MWPSQLLIFMMLLAPIIHGGKHSERHPALAAPLRHAERSPGGALPPRHLLQQPAAERTAAHRGQGPRGATRGVRGPGAQGAQIAAQAFSRAPIPMAVVRRELSCESYPIELRCPGTDVIMIESANYGRTDDKICDSDPAQMENIRCYLPDAYKIMSQRCNNRTQCAVVAGPDVFPDPCPGTYKYLEVQYECVPYKVEQKVFLCPGLLKGVYQSEHLFESDHQSGAWCKDPLQASDKIYYMPWTPYRTDTLTEYSSKDDFIAGRPTTTYKLPHRVDGTGFVVYDGALFFNKERTRNIVKFDLRTRIKSGEAIIANANYHDTSPYRWGGKSDIDLAVDENGLWVIYATEQNNGKIVISQLNPYTLRIEGTWDTAYDKRSASNAFMICGILYVVKSVYEDDDNEATGNKIDYIYNTDQSKDSLVDVPFPNSYQYIAAVDYNPRDNLLYVWNNYHVVKYSLDFGPLDSRSGQAHHGQVSYISPPIHLDSELERPSVKDISTTGPLGMGSTTTSTTLRTTTLSPGRSTTPSVSGRRNRSTSTPSPAVEVLDDMTTHLPSASSQIPALEESCEAVEAREIMWFKTRQGQIAKQPCPAGTIGVSTYLCLAPDGIWDPQGPDLSNCSSPWVNHITQKLKSGETAANIARELAEQTRNHLNAGDITYSVRAMDQLVGLLDVQLRNLTPGGKDSAARSLNKLQKRERSCRAYVQAMVETVNNLLQPQALNAWRDLTTSDQLRAATMLLHTVEESAFVLADNLLKTDIVRENTDNIKLEVARLSTEGNLEDLKFPENMGHGSTIQLSANTLKQNGRNGEIRVAFVLYNNLGPYLSTENASMKLGTEALSTNHSVIVNSPVITAAINKEFSNKVYLADPVVFTVKHIKQSEENFNPNCSFWSYSKRTMTGYWSTQGCRLLTTNKTHTTCSCNHLTNFAVLMAHVEVKHSDAVHDLLLDVITWVGILLSLVCLLICIFTFCFFRGLQSDRNTIHKNLCISLFVAELLFLIGINRTDQPIACAVFAALLHFFFLAAFTWMFLEGVQLYIMLVEVFESEHSRRKYFYLVGYGMPALIVAVSAAVDYRSYGTDKVCWLRLDTYFIWSFIGPATLIIMLNVIFLGIALYKMFHHTAILKPESGCLDNINYEDNRPFIKSWVIGAIALLCLLGLTWAFGLMYINESTVIMAYLFTIFNSLQGMFIFIFHCVLQKKVRKEYGKCLRTHCCSGKSTESSIGSGKTSGSRTPGRYSTGSQSRIRRMWNDTVRKQSESSFITGDINSSASLNREPYRETSMGVKLNIAYQIGASEQCQGYKCHGYSTTEW

SEQ ID NO: 3127 - protein, 1351 aa, Homo sapiens
  Payload ID: 697;
  Gene Symbol: ADGRL3;
  Gene Name: adhesion G prt-coupled receptor L3;
  ENSP ID: ENSP00000424030
MWPSQLLIFMMLLAPIIHGGKHSERHPALAAPLRHAERSPGGALPPRHLLQQPAAERTAAHRGQGPRGATRGVRGPGAQGAQIAAQAFSRAPIPMAVVRRELSCESYPIELRCPGTDVIMIESANYGRTDDKICDSDPAQMENIRCYLPDAYKIMSQRCNNRTQCAVVAGPDVFPDPCPGTYKYLEVQYECVPYKVEQKVFLCPGLLKGVYQSEHLFESDHQSGAWCKDPLQASDKIYYMPWTPYRTDTLTEYSSKDDFIAGRPTTTYKLPHRVDGTGFVVYDGALFFNKERTRNIVKFDLRTRIKSGEAIIANANYHDTSPYRWGGKSDIDLAVDENGLWVIYATEQNNGKIVISQLNPYTLRIEGTWDTAYDKRSASNAFMICGILYVVKSVYEDDDNEATGNKIDYIYNTDQSKDSLVDVPFPNSYQYIAAVDYNPRDNLLYVWNNYHVVKYSLDFGPLDSRSGQAHHGQVSYISPPIHLDSELERPSVKDISTTGPLGMGSTTTSTTLRTTTLSPGRSTTPSVSGRRNRSTSTPSPAVEVLDDMTTHLPSASSQIPALEESCEAVEAREIMWFKTRQGQIAKQPCPAGTIGVSTYLCLAPDGIWDPQGPDLSNCSSPWVNHITQKLKSGETAANIARELAEQTRNHLNAGDITYSVRAMDQLVGLLDVQLRNLTPGGKDSAARSLNKLQKRERSCRAYVQAMVETVNNLLQPQALNAWRDLTTSDQLRAATMLLHTVEESAFVLADNLLKTDIVRENTDNIKLEVARLSTEGNLEDLKFPENMGHGSTIQLSANTLKQNGRNGEIRVAFVLYNNLGPYLSTENASMKLGTEALSTNHSVIVNSPVITAAINKEFSNKVYLADPVVFTVKHIKQSEENFNPNCSFWSYSKRTMTGYWSTQGCRLLTTNKTHTTCSCNHLTNFAVLMAHVEVKHSDAVHDLLLDVITWVGILLSLVCLLICIFTFCFFRGLQSDRNTIHKNLCISLFVAELLFLIGINRTDQPIACAVFAALLHFFFLAAFTWMFLEGVQLYIMLVEVFESEHSRRKYFYLVGYGMPALIVAVSAAVDYRSYGTDKVCWLRLDTYFIWSFIGPATLIIMLNVIFLGIALYKMFHHTAILKPESGCLDNINYEDNRPFIKSWVIGAIALLCLLGLTWAFGLMYINESTVIMAYLFTIFNSLQGMFIFIFHCVLQKKVRKEYGKCLRTHCCSGKSTESSIGSGKTSGSRTPGRYSTGSQSRIRRMWNDTVRKQSESSFITGDINSSASLNRGAMANHLISNALLRPHGTNNPYNTLLGEPAVCNNPSVSMYNAQEPYRETSMGVKLNIAYQIGASEQCQGYKCHGYSTTEW

SEQ ID NO: 3128 - protein, 1231 aa, Homo sapiens
  Payload ID: 697;
  Gene Symbol: ADGRL3;
  Gene Name: adhesion G prt-coupled receptor L3;
  ENSP ID: ENSP00000424120
MWPSQLLIFMMLLAPIIHAFSRAPIPMAVVRRELSCESYPIELRCPGTDVIMIESANYGRTDDKICDSDPAQMENIRCYLPDAYKIMSQRCNNRTQCAVVAGPDVFPDPCPGTYKYLEVQYECVPYKVEQKVFLCPGLLKGVYQSEHLFESDHQSGAWCKDPLQASDKIYYMPWTPYRTDTLTEYSSKDDFIAGRPTTTYKLPHRVDGTGFVVYDGALFFNKERTRNIVKFDLRTRIKSGEAIIANANYHDTSPYRWGGKSDIDLAVDENGLWVIYATEQNNGKIVISQLNPYTLRIEGTWDTAYDKRSASNAFMICGILYVVKSVYEDDDNEATGNKIDYIYNTDQSKDSLVDVPFPNSYQYIAAVDYNPRDNLLYVWNNYHVVKYSLDFGPLDSRSGQAHHGQVSYISPPIHLDSELERPSVKDISTTGPLGMGSTTTSTTLRTTTLSPGRSTTPSVSGRRNRSTSTPSPAVEVLDDMTTHLPSASSQIPALEESCEAVEAREIMWFKTRQGQIAKQPCPAGTIGVSTYLCLAPDGIWDPQGPDLSNCSSPWVNHITQKLKSGETAANIARELAEQTRNHLNAGDITYSVRAMDQLVGLLDVQLRNLTPGGKDSAARSLNKLQKRERSCRAYVQAMVETVNNLLQPQALNAWRDLTTSDQLRAATMLLHTVEESAFVLADNLLKTDIVRENTDNIKLEVARLSTEGNLEDLKFPENMGHGSTIQLSANTLKQNGRNGEIRVAFVLYNNLGPYLSTENASMKLGTEALSTNHSVIVNSPVITAAINKEFSNKVYLADPVVFTVKHIKQSEENFNPNCSFWSYSKRTMTGYWSTQGCRLLTTNKTHTTCSCNHLTNFAVLMAHVEVKHSDAVHDLLLDVITWVGILLSLVCLLICIFTFCFFRGLQSDRNTIHKNLCISLFVAELLFLIGINRTDQPIACAVFAALLHFFFLAAFTWMFLEGVQLYIMLVEVFESEHSRRKYFYLVGYGMPALIVAVSAAVDYRSYGTDKVCWLRLDTYFIWSFIGPATLIIMLNVIFLGIALYKMFHHTAILKPESGCLDNIKSWVIGAIALLCLLGLTWAFGLMYINESTVIMAYLFTIFNSLQGMFIFIFHCVLQKKVRKEYGKCLRTHCCSGKSTESSIGSGKTSGSRTPGRYSTGSQSRIRRMWNDTVRKQSESSFITGDINSSASLNREPYRETSMGVKLNIAYQIGASEQCQGYKCHGYSTTEW

SEQ ID NO: 3129 - protein, 1503 aa, Homo sapiens
  Payload ID: 697;
  Gene Symbol: ADGRL3;
  Gene Name: adhesion G prt-coupled receptor L3;
  ENSP ID: ENSP00000424258
MWPSQLLIFMMLLAPIIHAFSRAPIPMAVVRRELSCESYPIELRCPGTDVIMIESANYGRTDDKICDSDPAQMENIRCYLPDAYKIMSQRCNNRTQCAVVAGPDVFPDPCPGTYKYLEVQYECVPYKVEQKVFLCPGLLKGVYQSEHLFESDHQSGAWCKDPLQASDKIYYMPWTPYRTDTLTEYSSKDDFIAGRPTTTYKLPHRVDGTGFVVYDGALFFNKERTRNIVKFDLRTRIKSGEAIIANANYHDTSPYRWGGKSDIDLAVDENGLWVIYATEQNNGKIVISQLNPYTLRIEGTWDTAYDKRSASNAFMICGILYVVKSVYEDDDNEATGNKIDYIYNTDQSKDSLVDVPFPNSYQYIAAVDYNPRDNLLYVWNNYHVVKYSLDFGPLDSRSGQAHHGQVSYISPPIHLDSELERPSVKDISTTGPLGMGSTTTSTTLRTTTLSPGRSTTPSVSGRRNRSTSTPSPAVEVLDDMTTHLPSASSQIPALEESCEAVEAREIMWFKTRQGQIAKQPCPAGTIGVSTYLCLAPDGIWDPQGPDLSNCSSPWVNHITQKLKSGETAANIARELAEQTRNHLNAGDITYSVRAMDQLVGLLDVQLRNLTPGGKDSAARSLNKLQKRERSCRAYVQAMVETVNNLLQPQALNAWRDLTTSDQLRAATMLLHTVEESAFVLADNLLKTDIVRENTDNIKLEVARLSTEGNLEDLKFPENMGHGSTIQLSANTLKQNGRNGEIRVAFVLYNNLGPYLSTENASMKLGTEALSTNHSVIVNSPVITAAINKEFSNKVYLADPVVFTVKHIKQSEENFNPNCSFWSYSKRTMTGYWSTQGCRLLTTNKTHTTCSCNHLTNFAVLMAHVEVKHSDAVHDLLLDVITWVGILLSLVCLLICIFTFCFFRGLQSDRNTIHKNLCISLFVAELLFLIGINRTDQPIACAVFAALLHFFFLAAFTWMFLEGVQLYIMLVEVFESEHSRRKYFYLVGYGMPALIVAVSAAVDYRSYGTDKVCWLRLDTYFIWSFIGPATLIIMLNVIFLGIALYKMFHHTAILKPESGCLDNIKSWVIGAIALLCLLGLTWAFGLMYINESTVIMAYLFTIFNSLQGMFIFIFHCVLQKKVRKEYGKCLRTHCCSGKSTESSIGSGKTSGSRTPGRYSTGSQSRIRRMWNDTVRKQSESSFITGDINSSASLNRGAMANHLISNALLRPHGTNNPYNTLLGEPAVCNNPSVSMYNAQEGLLNNARDTSVMDTLPLNGNHGNSYSIASGEYLSNCVQIIDRGYNHNETALEKKILKELTSNYIPSYLNNHERSSEQNRNLMNKLVNNLGSGREDDAIVLDDATSFNHEESLGLELIHEESDAPLLPPRVYSTENHQPHHYTRRRIPQDHSESFFPLLTNEHTEDLQSPHRDSLYTSMPTLAGVAATESVTTSTQTEPPPAKCGDAEDVYYKSMPNLGSRNHVHQLHTYYQLGRGSSDGFIVPPNKDGTPPEGSSKGPAHLVTSL

SEQ ID NO: 3130 - protein, 918 aa, Homo sapiens
  Payload ID: 697;
  Gene Symbol: ADGRL3;
  Gene Name: adhesion G prt-coupled receptor L3;
  ENSP ID: ENSP00000424402
  MOD_RES (1)..(1): Any amino acid
XYLCLAPDGIWDPQGPDLSNCSSPWVNHITQKLKSGETAANIARELAEQTRNHLNAGDITYSVRAMDQLVGLLDVQLRNLTPGGKDSAARSLNKAMVETVNNLLQPQALNAWRDLTTSDQLRAATMLLHTVEESAFVLADNLLKTDIVRENTDNIKLEVARLSTEGNLEDLKFPENMGHGSTIQLSANTLKQNGRNGEIRVAFVLYNNLGPYLSTENASMKLGTEALSTNHSVIVNSPVITAAINKEFSNKVYLADPVVFTVKHIKQSEENFNPNCSFWSYSKRTMTGYWSTQGCRLLTTNKTHTTCSCNHLTNFAVLMAHVEVKHSDAVHDLLLDVITWVGILLSLVCLLICIFTFCFFRGLQSDRNTIHKNLCISLFVAELLFLIGINRTDQPIACAVFAALLHFFFLAAFTWMFLEGVQLYIMLVEVFESEHSRRKYFYLVGYGMPALIVAVSAAVDYRSYGTDKVCWLRLDTYFIWSFIGPATLIIMLNVIFLGIALYKMFHHTAILKPESGCLDNIKSWVIGAIALLCLLGLTWAFGLMYINESTVIMAYLFTIFNSLQGMFIFIFHCVLQKKVRKEYGKCLRTHCCSGKSTESSIGSGKTSGSRTPGRYSTGSQSRIRRMWNDTVRKQSESSFITGDINSSASLNREGLLNNARDTSVMDTLPLNGNHGNSYSIASGEYLSNCVQIIDRGYNHNETALEKKILKELTSNYIPSYLNNHERSSEQNRNLMNKLVNNLGSGREDDAIVLDDATSFNHEESLGLELIHEESDAPLLPPRVYSTENHQPHHYTRRRIPQDHSESFFPLLTNEHTEDLQSPHRDSLYTSMPTLAGVAATESVTTSTQTEPPPAKCGDAEDVYYKSMPNLGSRNHVHQLHTYYQLGRGSSDGFIVPPNKDGTPPEGSSKGPAHLVTSL

SEQ ID NO: 3131 - protein, 1299 aa, Homo sapiens
  Payload ID: 697;
  Gene Symbol: ADGRL3;
  Gene Name: adhesion G prt-coupled receptor L3;
  ENSP ID: ENSP00000425033
MWPSQLLIFMMLLAPIIHGGKHSERHPALAAPLRHAERSPGGALPPRHLLQQPAAERTAAHRGQGPRGATRGVRGPGAQGAQIAAQAFSRAPIPMAVVRRELSCESYPIELRCPGTDVIMIESANYGRTDDKICDSDPAQMENIRCYLPDAYKIMSQRCNNRTQCAVVAGPDVFPDPCPGTYKYLEVQYECVPYKVEQKVFLCPGLLKGVYQSEHLFESDHQSGAWCKDPLQASDKIYYMPWTPYRTDTLTEYSSKDDFIAGRPTTTYKLPHRVDGTGFVVYDGALFFNKERTRNIVKFDLRTRIKSGEAIIANANYHDTSPYRWGGKSDIDLAVDENGLWVIYATEQNNGKIVISQLNPYTLRIEGTWDTAYDKRSASNAFMICGILYVVKSVYEDDDNEATGNKIDYIYNTDQSKDSLVDVPFPNSYQYIAAVDYNPRDNLLYVWNNYHVVKYSLDFGPLDSRSGQAHHGQVSYISPPIHLDSELERPSVKDISTTGPLGMGSTTTSTTLRTTTLSPGRSTTPSVSGRRNRSTSTPSPAVEVLDDMTTHLPSASSQIPALEESCEAVEAREIMWFKTRQGQIAKQPCPAGTIGVSTYLCLAPDGIWDPQGPDLSNCSSPWVNHITQKLKSGETAANIARELAEQTRNHLNAGDITYSVRAMDQLVGLLDVQLRNLTPGGKDSAARSLNKLQKRERSCRAYVQAMVETVNNLLQPQALNAWRDLTTSDQLRAATMLLHTVEESAFVLADNLLKTDIVRENTDNIKLEVARLSTEGNLEDLKFPENMGHGSTIQLSANTLKQNGRNGEIRVAFVLYNNLGPYLSTENASMKLGTEALSTNHSVIVNSPVITAAINKEFSNKVYLADPVVFTVKHIKQSEENFNPNCSFWSYSKRTMTGYWSTQGCRLLTTNKTHTTCSCNHLTNFAVLMAHVEVKHSDAVHDLLLDVITWVGILLSLVCLLICIFTFCFFRGLQSDRNTIHKNLCISLFVAELLFLIGINRTDQPIACAVFAALLHFFFLAAFTWMFLEGVQLYIMLVEVFESEHSRRKYFYLVGYGMPALIVAVSAAVDYRSYGTDKVCWLRLDTYFIWSFIGPATLIIMLNVIFLGIALYKMFHHTAILKPESGCLDNIKSWVIGAIALLCLLGLTWAFGLMYINESTVIMAYLFTIFNSLQGMFIFIFHCVLQKKVRKEYGKCLRTHCCSGKSTESSIGSGKTSGSRTPGRYSTGSQSRIRRMWNDTVRKQSESSFITGDINSSASLNREPYRETSMGVKLNIAYQIGASEQCQGYKCHGYSTTEW

SEQ ID NO: 3132 - protein, 1274 aa, Homo sapiens
  Payload ID: 697;
  Gene Symbol: ADGRL3;
  Gene Name: adhesion G prt-coupled receptor L3;
  ENSP ID: ENSP00000425201
MWPSQLLIFMMLLAPIIHAFSRAPIPMAVVRRELSCESYPIELRCPGTDVIMIESANYGRTDDKICDSDPAQMENIRCYLPDAYKIMSQRCNNRTQCAVVAGPDVFPDPCPGTYKYLEVQYECVPYKVEQKVFLCPGLLKGVYQSEHLFESDHQSGAWCKDPLQASDKIYYMPWTPYRTDTLTEYSSKDDFIAGRPTTTYKLPHRVDGTGFVVYDGALFFNKERTRNIVKFDLRTRIKSGEAIIANANYHDTSPYRWGGKSDIDLAVDENGLWVIYATEQNNGKIVISQLNPYTLRIEGTWDTAYDKRSASNAFMICGILYVVKSVYEDDDNEATGNKIDYIYNTDQSKDSLVDVPFPNSYQYIAAVDYNPRDNLLYVWNNYHVVKYSLDFGPLDSRSGQAHHGQVSYISPPIHLDSELERPSVKDISTTGPLGMGSTTTSTTLRTTTLSPGRSTTPSVSGRRNRSTSTPSPAVEVLDDMTTHLPSASSQIPALEESCEAVEAREIMWFKTRQGQIAKQPCPAGTIGVSTYLCLAPDGIWDPQGPDLSNCSSPWVNHITQKLKSGETAANIARELAEQTRNHLNAGDITYSVRAMDQLVGLLDVQLRNLTPGGKDSAARSLNKLQKRERSCRAYVQAMVETVNNLLQPQALNAWRDLTTSDQLRAATMLLHTVEESAFVLADNLLKTDIVRENTDNIKLEVARLSTEGNLEDLKFPENMGHGSTIQLSANTLKQNGRNGEIRVAFVLYNNLGPYLSTENASMKLGTEALSTNHSVIVNSPVITAAINKEFSNKVYLADPVVFTVKHIKQSEENFNPNCSFWSYSKRTMTGYWSTQGCRLLTTNKTHTTCSCNHLTNFAVLMAHVEVKHSDAVHDLLLDVITWVGILLSLVCLLICIFTFCFFRGLQSDRNTIHKNLCISLFVAELLFLIGINRTDQPIACAVFAALLHFFFLAAFTWMFLEGVQLYIMLVEVFESEHSRRKYFYLVGYGMPALIVAVSAAVDYRSYGTDKVCWLRLDTYFIWSFIGPATLIIMLNVIFLGIALYKMFHHTAILKPESGCLDNIKSWVIGAIALLCLLGLTWAFGLMYINESTVIMAYLFTIFNSLQGMFIFIFHCVLQKKVRKEYGKCLRTHCCSGKSTESSIGSGKTSGSRTPGRYSTGSQSRIRRMWNDTVRKQSESSFITGDINSSASLNRGAMANHLISNALLRPHGTNNPYNTLLGEPAVCNNPSVSMYNAQEPYRETSMGVKLNIAYQIGASEQCQGYKCHGYSTTEW

SEQ ID NO: 3133 - protein, 1571 aa, Homo sapiens
  Payload ID: 697;
  Gene Symbol: ADGRL3;
  Gene Name: adhesion G prt-coupled receptor L3;
  ENSP ID: ENSP00000425884
MWPSQLLIFMMLLAPIIHGGKHSERHPALAAPLRHAERSPGGALPPRHLLQQPAAERTAAHRGQGPRGATRGVRGPGAQGAQIAAQAFSRAPIPMAVVRRELSCESYPIELRCPGTDVIMIESANYGRTDDKICDSDPAQMENIRCYLPDAYKIMSQRCNNRTQCAVVAGPDVFPDPCPGTYKYLEVQYECVPYKVEQKVFLCPGLLKGVYQSEHLFESDHQSGAWCKDPLQASDKIYYMPWTPYRTDTLTEYSSKDDFIAGRPTTTYKLPHRVDGTGFVVYDGALFFNKERTRNIVKFDLRTRIKSGEAIIANANYHDTSPYRWGGKSDIDLAVDENGLWVIYATEQNNGKIVISQLNPYTLRIEGTWDTAYDKRSASNAFMICGILYVVKSVYEDDDNEATGNKIDYIYNTDQSKDSLVDVPFPNSYQYIAAVDYNPRDNLLYVWNNYHVVKYSLDFGPLDSRSGQAHHGQVSYISPPIHLDSELERPSVKDISTTGPLGMGSTTTSTTLRTTTLSPGRSTTPSVSGRRNRSTSTPSPAVEVLDDMTTHLPSASSQIPALEESCEAVEAREIMWFKTRQGQIAKQPCPAGTIGVSTYLCLAPDGIWDPQGPDLSNCSSPWVNHITQKLKSGETAANIARELAEQTRNHLNAGDITYSVRAMDQLVGLLDVQLRNLTPGGKDSAARSLNKLQKRERSCRAYVQAMVETVNNLLQPQALNAWRDLTTSDQLRAATMLLHTVEESAFVLADNLLKTDIVRENTDNIKLEVARLSTEGNLEDLKFPENMGHGSTIQLSANTLKQNGRNGEIRVAFVLYNNLGPYLSTENASMKLGTEALSTNHSVIVNSPVITAAINKEFSNKVYLADPVVFTVKHIKQSEENFNPNCSFWSYSKRTMTGYWSTQGCRLLTTNKTHTTCSCNHLTNFAVLMAHVEVKHSDAVHDLLLDVITWVGILLSLVCLLICIFTFCFFRGLQSDRNTIHKNLCISLFVAELLFLIGINRTDQPIACAVFAALLHFFFLAAFTWMFLEGVQLYIMLVEVFESEHSRRKYFYLVGYGMPALIVAVSAAVDYRSYGTDKVCWLRLDTYFIWSFIGPATLIIMLNVIFLGIALYKMFHHTAILKPESGCLDNIKSWVIGAIALLCLLGLTWAFGLMYINESTVIMAYLFTIFNSLQGMFIFIFHCVLQKKVRKEYGKCLRTHCCSGKSTESSIGSGKTSGSRTPGRYSTGSQSRIRRMWNDTVRKQSESSFITGDINSSASLNRGAMANHLISNALLRPHGTNNPYNTLLGEPAVCNNPSVSMYNAQEGLLNNARDTSVMDTLPLNGNHGNSYSIASGEYLSNCVQIIDRGYNHNETALEKKILKELTSNYIPSYLNNHERSSEQNRNLMNKLVNNLGSGREDDAIVLDDATSFNHEESLGLELIHEESDAPLLPPRVYSTENHQPHHYTRRRIPQDHSESFFPLLTNEHTEDLQSPHRDSLYTSMPTLAGVAATESVTTSTQTEPPPAKCGDAEDVYYKSMPNLGSRNHVHQLHTYYQLGRGSSDGFIVPPNKDGTPPEGSSKGPAHLVTSL

SEQ ID NO: 3134 - protein, 1345 aa, Homo sapiens
  Payload ID: 697;
  Gene Symbol: ADGRL3;
  Gene Name: adhesion G prt-coupled receptor L3;
  ENSP ID: ENSP00000439831
PIEVEQKVFLCPGLLKGVYQSEHLFESDHQSGAWCKDPLQASDKIYYMPWTPYRTDTLTEYSSKDDFIAGRPTTTYKLPHRVDGTGFVVYDGALFFNKERTRNIVKFDLRTRIKSGEAIIANANYHDTSPYRWGGKSDIDLAVDENGLWVIYATEQNNGKIVISQLNPYTLRIEGTWDTAYDKRSASNAFMICGILYVVKSVYEDDDNEATGNKIDYIYNTDQSKDSLVDVPFPNSYQYIAAVDYNPRDNLLYVWNNYHVVKYSLDFGPLDSRSGQAHHGQVSYISPPIHLDSELERPSVKDISTTGPLGMGSTTTSTTLRTTTLSPGRSTTPSVSGRRNRSTSTPSPAVEVLDDMTTHLPSASSQIPALEESCEAVEAREIMWFKTRQGQIAKQPCPAGTIGVSTYLCLAPDGIWDPQGPDLSNCSSPWVNHITQKLKSGETAANIARELAEQTRNHLNAGDITYSVRAMDQLVGLLDVQLRNLTPGGKDSAARSLNKLQKRERSCRAYVQAMVETVNNLLQPQALNAWRDLTTSDQLRAATMLLHTVEESAFVLADNLLKTDIVRENTDNIKLEVARLSTEGNLEDLKFPENMGHGSTIQLSANTLKQNGRNGEIRVAFVLYNNLGPYLSTENASMKLGTEALSTNHSVIVNSPVITAAINKEFSNKVYLADPVVFTVKHIKQSEENFNPNCSFWSYSKRTMTGYWSTQGCRLLTTNKTHTTCSCNHLTNFAVLMAHVEVKHSDAVHDLLLDVITWVGILLSLVCLLICIFTFCFFRGLQSDRNTIHKNLCISLFVAELLFLIGINRTDQPIACAVFAALLHFFFLAAFTWMFLEGVQLYIMLVEVFESEHSRRKYFYLVGYGMPALIVAVSAAVDYRSYGTDKVCWLRLDTYFIWSFIGPATLIIMLNVIFLGIALYKMFHHTAILKPESGCLDNINYEDNRPFIKSWVIGAIALLCLLGLTWAFGLMYINESTVIMAYLFTIFNSLQGMFIFIFHCVLQKKVRKEYGKCLRTHCCSGKSTESSIGSGKTSGSRTPGRYSTGSQSRIRRMWNDTVRKQSESSFITGDINSSASLNREGLLNNARDTSVMDTLPLNGNHGNSYSIASGEYLSNCVQIIDRGYNHNETALEKKILKELTSNYIPSYLNNHERSSEQNRNLMNKLVNNLGSGREDDAIVLDDATSFNHEESLGLELIHEESDAPLLPPRVYSTENHQPHHYTRRRIPQDHSESFFPLLTNEHTEDLQSPHRDSLYTSMPTLAGVAATESVTTSTQTEPPPAKCGDAEDVYYKSMPNLGSRNHVHQLHTYYQLGRGSSDGFIVPPNKDGTPPEGSSKGPAHLVTSL

SEQ ID NO: 3135 - protein, 690 aa, Homo sapiens
  Payload ID: 698;
  Gene Symbol: ADGRL4;
  Gene Name: adhesion G prt-coupled receptor L4;
  Uniprot ID:  Q9HBW9;
  ENSP ID: ENSP00000359778
MKRLPLLVVFSTLLNCSYTQNCTKTPCLPNAKCEIRNGIEACYCNMGFSGNGVTICEDDNECGNLTQSCGENANCTNTEGSYYCMCVPGFRSSSNQDRFITNDGTVCIENVNANCHLDNVCIAANINKTLTKIRSIKEPVALLQEVYRNSVTDLSPTDIITYIEILAESSSLLGYKNNTISAKDTLSNSTLTEFVKTVNNFVQRDTFVVWDKLSVNHRRTHLTKLMHTVEQATLRISQSFQKTTEFDTNSTDIALKVFFFDSYNMKHIHPHMNMDGDYINIFPKRKAAYDSNGNVAVAFVYYKSIGPLLSSSDNFLLKPQNYDNSEEEERVISSVISVSMSSNPPTLYELEKITFTLSHRKVTDRYRSLCAFWNYSPDTMNGSWSSEGCELTYSNETHTSCRCNHLTHFAILMSSGPSIGIKDYNILTRITQLGIIISLICLAICIFTFWFFSEIQSTRTTIHKNLCCSLFLAELVFLVGINTNTNKLFCSIIAGLLHYFFLAAFAWMCIEGIHLYLIVVGVIYNKGFLHKNFYIFGYLSPAVVVGFSAALGYRYYGTTKVCWLSTENNFIWSFIGPACLIILVNLLAFGVIIYKVFRHTAGLKPEVSCFENIRSCARGALALLFLLGTTWIFGVLHVVHASVVTAYLFTVSNAFQGMFIFLFLCVLSRKIQEEYYRLFKNVPCCFGCLR

SEQ ID NO: 3136 - protein, 149 aa, Homo sapiens
  Payload ID: 698;
  Gene Symbol: ADGRL4;
  Gene Name: adhesion G prt-coupled receptor L4;
  ENSP ID: ENSP00000383813
VVVGFSAALGYRYYGTTKVCWLSTENNFIWSFIGPACLIILVNLLAFGVIIYKVFRHTAGLKPEVSCFENIRSCARGALALLFLLGTTWIFGVLHVVHASVVTAYLFTVSNAFQGMFIFLFLCVLSRKIQEEYYRLFKNVPCCFGCLSC

SEQ ID NO: 3137 - protein, 6306 aa, Homo sapiens
  Payload ID: 699;
  Gene Symbol: ADGRV1;
  Gene Name: adhesion G prt-coupled receptor V1;
  Uniprot ID:  Q8WXG9;
  ENSP ID: ENSP00000384582
MSVFLGPGMPSASLLVNLLSALLILFVFGETEIRFTGQTEFVVNETSTTVIRLIIERIGEPANVTAIVSLYGEDAGDFFDTYAAAFIPAGETNRTVYIAVCDDDLPEPDETFIFHLTLQKPSANVKLGWPRTVTVTILSNDNAFGIISFNMLPSIAVSEPKGRNESMPLTLIREKGTYGMVMVTFEVEGGPNPPDEDLSPVKGNITFPPGRATVIYNLTVLDDEVPENDEIFLIQLKSVEGGAEINTSRNSIEIIIKKNDSPVRFLQSIYLVPEEDHILIIPVVRGKDNNGNLIGSDEYEVSISYAVTTGNSTAHAQQNLDFIDLQPNTTVVFPPFIHESHLKFQIVDDTIPEIAESFHIMLLKDTLQGDAVLISPSVVQVTIKPNDKPYGVLSFNSVLFERTVIIDEDRISRYEEITVVRNGGTHGNVSANWVLTRNSTDPSPVTADIRPSSGVLHFAQGQMLATIPLTVVDDDLPEEAEAYLLQILPHTIRGGAEVSEPAELLFYIQDSDDVYGLITFFPMENQKIESSPGERYLSLSFTRLGGTKGDVRLLYSVLYIPAGAVDPLQAKEGILNISRRNDLIFPEQKTQVTTKLPIRNDAFLQNGAHFLVQLETVELLNIIPLIPPISPRFGEICNISLLVTPAIANGEIGFLSNLPIILHEPEDFAAEVVYIPLHRDGTDGQATVYWSLKPSGFNSKAVTPDDIGPFNGSVLFLSGQSDTTINITIKGDDIPEMNETVTLSLDRVNVENQVLKSGYTSRDLIILENDDPGGVFEFSPASRGPYVIKEGESVELHIIRSRGSLVKQFLHYRVEPRDSNEFYGNTGVLEFKPGEREIVITLLARLDGIPELDEHYWVVLSSHGERESKLGSATIVNITILKNDDPHGIIEFVSDGLIVMINESKGDAIYSAVYDVVRNRGNFGDVSVSWVVSPDFTQDVFPVQGTVVFGDQEFSKNITIYSLPDEIPEEMEEFTVILLNGTGGAKVGNRTTATLRIRRNDDPIYFAEPRVVRVQEGETANFTVLRNGSVDVTCMVQYATKDGKATARERDFIPVEKGETLIFEVGSRQQSISIFVNEDGIPETDEPFYIILLNSTGDTVVYQYGVATVIIEANDDPNGIFSLEPIDKAVEEGKTNAFWILRHRGYFGSVSVSWQLFQNDSALQPGQEFYETSGTVNFMDGEEAKPIILHAFPDKIPEFNEFYFLKLVNISGGSPGPGGQLAETNLQVTVMVPFNDDPFGVFILDPECLEREVAEDVLSEDDMSYITNFTILRQQGVFGDVQLGWEILSSEFPAGLPPMIDFLLVGIFPTTVHLQQHMRRHHSGTDALYFTGLEGAFGTVNPKYHPSRNNTIANFTFSAWVMPNANTNGFIIAKDDGNGSIYYGVKIQTNESHVTLSLHYKTLGSNATYIAKTTVMKYLEESVWLHLLIILEDGIIEFYLDGNAMPRGIKSLKGEAITDGPGILRIGAGINGNDRFTGLMQDVRSYERKLTLEEIYELHAMPAKSDLHPISGYLEFRQGETNKSFIISARDDNDEEGEELFILKLVSVYGGARISEENTTARLTIQKSDNANGLFGFTGACIPEIAEEGSTISCVVERTRGALDYVHVFYTISQIETDGINYLVDDFANASGTITFLPWQRSEVLNIYVLDDDIPELNEYFRVTLVSAIPGDGKLGSTPTSGASIDPEKETTDITIKASDHPYGLLQFSTGLPPQPKDAMTLPASSVPHITVEEEDGEIRLLVIRAQGLLGRVTAEFRTVSLTAFSPEDYQNVAGTLEFQPGERYKYIFINITDNSIPELEKSFKVELLNLEGGVAELFRVDGSGSGDGDMEFFLPTIHKRASLGVASQILVTIAASDHAHGVFEFSPESLFVSGTEPEDGYSTVTLNVIRHHGTLSPVTLHWNIDSDPDGDLAFTSGNITFEIGQTSANITVEILPDEDPELDKAFSVSVLSVSSGSLGAHINATLTVLASDDPYGIFIFSEKNRPVKVEEATQNITLSIIRLKGLMGKVLVSYATLDDMEKPPYFPPNLARATQGRDYIPASGFALFGANQSEATIAISILDDDEPERSESVFIELLNSTLVAKVQSRSIPNSPRLGPKVETIAQLIIIANDDAFGTLQLSAPIVRVAENHVGPIINVTRTGGAFADVSVKFKAVPITAIAGEDYSIASSDVVLLEGETSKAVPIYVINDIYPELEESFLVQLMNETTGGARLGALTEAVIIIEASDDPYGLFGFQITKLIVEEPEFNSVKVNLPIIRNSGTLGNVTVQWVATINGQLATGDLRVVSGNVTFAPGETIQTLLLEVLADDVPEIEEVIQVQLTDASGGGTIGLDRIANIIIPANDDPYGTVAFAQMVYRVQEPLERSSCANITVRRSGGHFGRLLLFYSTSDIDVVALAMEEGQDLLSYYESPIQGVPDPLWRTWMNVSAVGEPLYTCATLCLKEQACSAFSFFSASEGPQCFWMTSWISPAVNNSDFWTYRKNMTRVASLFSGQAVAGSDYEPVTRQWAIMQEGDEFANLTVSILPDDFPEMDESFLISLLEVHLMNISASLKNQPTIGQPNISTVVIALNGDAFGVFVIYNISPNTSEDGLFVEVQEQPQTLVELMIHRTGGSLGQVAVEWRVVGGTATEGLDFIGAGEILTFAEGETKKTVILTILDDSEPEDDESIIVSLVYTEGGSRILPSSDTVRVNILANDNVAGIVSFQTASRSVIGHEGEILQFHVIRTFPGRGNVTVNWKIIGQNLELNFANFSGQLFFPEGSLNTTLFVHLLDDNIPEEKEVYQVILYDVRTQGVPPAGIALLDAQGYAAVLTVEASDEPHGVLNFALSSRFVLLQEANITIQLFINREFGSLGAINVTYTTVPGMLSLKNQTVGNLAEPEVDFVPIIGFLILEEGETAAAINITILEDDVPELEEYFLVNLTYVGLTMAASTSFPPRLDSEGLTAQVIIDANDGARGVIEWQQSRFEVNETHGSLTLVAQRSREPLGHVSLFVYAQNLEAQVGLDYIFTPMILHFADGERYKNVNIMILDDDIPEGDEKFQLILTNPSPGLELGKNTIALIIVLANDDGPGVLSFNNSEHFFLREPTALYVQESVAVLYIVREPAQGLFGTVTVQFIVTEVNSSNESKDLTPSKGYIVLEEGVRFKALQISAILDTEPEMDEYFVCTLFNPTGGARLGVHVQTLITVLQNQAPLGLFSISAVENRATSIDIEEANRTVYLNVSRTNGIDLAVSVQWETVSETAFGMRGMDVVFSVFQSFLDESASGWCFFTLENLIYGIMLRKSSVTVYRWQGIFIPVEDLNIENPKTCEAFNIGFSPYFVITHEERNEEKPSLNSVFTFTSGFKLFLVQTIIILESSQVRYFTSDSQDYLIIASQRDDSELTQVFRWNGGSFVLHQKLPVRGVLTVALFNKGGSVFLAISQANARLNSLLFRWSGSGFINFQEVPVSGTTEVEALSSANDIYLIFAENVFLGDQNSIDIFIWEMGQSSFRYFQSVDFAAVNRIHSFTPASGIAHILLIGQDMSALYCWNSERNQFSFVLEVPSAYDVASVTVKSLNSSKNLIALVGAHSHIYELAYISSHSDFIPSSGELIFEPGEREATIAVNILDDTVPEKEESFKVQLKNPKGGAEIGINDSVTITILSNDDAYGIVAFAQNSLYKQVEEMEQDSLVTLNVERLKGTYGRITIAWEADGSISDIFPTSGVILFTEGQVLSTITLTILADNIPELSEVVIVTLTRITTEGVEDSYKGATIDQDRSKSVITTLPNDSPFGLVGWRAASVFIRVAEPKENTTTLQLQIARDKGLLGDIAIHLRAQPNFLLHVDNQATENEDYVLQETIIIMKENIKEAHAEVSILPDDLPELEEGFIVTITEVNLVNSDFSTGQPSVRRPGMEIAEIMIEENDDPRGIFMFHVTRGAGEVITAYEVPPPLNVLQVPVVRLAGSFGAVNVYWKASPDSAGLEDFKPSHGILEFADKQVTAMIEITIIDDAEFELTETFNISLISVAGGGRLGDDVVVTVVIPQNDSPFGVFGFEEKTVMIDESLSSDDPDSYVTLTVVRSPGGKGTVRLEWTIDEKAKHNLSPLNGTLHFDETESQKTIVLHTLQDTVLEEDRRFTIQLISIDEVEISPVKGSASIIIRGDKRASGEVGIAPSSRHILIGEPSAKYNGTAIISLVRGPGILGEVTVFWRIFPPSVGEFAETSGKLTMRDEQSAVIVVIQALNDDIPEEKSFYEFQLTAVSEGGVLSESSSTANITVVASDSPYGRFAFSHEQLRVSEAQRVNITIIRSSGDFGHVRLWYKTMSGTAEAGLDFVPAAGELLFEAGEMRKSLHVEILDDDYPEGPEEFSLTITKVELQGRGYDFTIQENGLQIDQPPEIGNISIVRIIIMKNDNAEGIIEFDPKYTAFEVEEDVGLIMIPVVRLHGTYGYVTADFISQSSSASPGGVDYILHGSTVTFQHGQNLSFINISIIDDNESEFEEPIEILLTGATGGAVLGRHLVSRIIIAKSDSPFGVIRFLNQSKISIANPNSTMILSLVLERTGGLLGEIQVNWETVGPNSQEALLPQNRDIADPVSGLFYFGEGEGGVRTIILTIYPHEEIEVEETFIIKLHLVKGEAKLDSRAKDVTLTIQEFGDPNGVVQFAPETLSKKTYSEPLALEGPLLITFFVRRVKGTFGEIMVYWELSSEFDITEDFLSTSGFFTIADGESEASFDVHLLPDEVPEIEEDYVIQLVSVEGGAELDLEKSITWFSVYANDDPHGVFALYSDRQSILIGQNLIRSIQINITRLAGTFGDVAVGLRISSDHKEQPIVTENAERQLVVKDGATYKVDVVPIKNQVFLSLGSNFTLQLVTVMLVGGRFYGMPTILQEAKSAVLPVSEKAANSQVGFESTAFQLMNITAGTSHVMISRRGTYGALSVAWTTGYAPGLEIPEFIVVGNMTPTLGSLSFSHGEQRKGVFLWTFPSPGWPEAFVLHLSGVQSSAPGGAQLRSGFIVAEIEPMGVFQFSTSSRNIIVSEDTQMIRLHVQRLFGFHSDLIKVSYQTTAGSAKPLEDFEPVQNGELFFQKFQTEVDFEITIINDQLSEIEEFFYINLTSVEIRGLQKFDVNWSPRLNLDFSVAVITILDNDDLAGMDISFPETTVAVAVDTTLIPVETESTTYLSTSKTTTILQPTNVVAIVTEATGVSAIPEKLVTLHGTPAVSEKPDVATVTANVSIHGTFSLGPSIVYIEEEMKNGTFNTAEVLIRRTGGFTGNVSITVKTFGERCAQMEPNALPFRGIYGISNLTWAVEEEDFEEQTLTLIFLDGERERKVSVQILDDDEPEGQEFFYVFLTNPQGGAQIVEEKDDTGFAAFAMVIITGSDLHNGIIGFSEESQSGLELREGAVMRRLHLIVTRQPNRAFEDVKVFWRVTLNKTVVVLQKDGVNLVEELQSVSGTTTCTMGQTKCFISIELKPEKVPQVEVYFFVELYEATAGAAINNSARFAQIKILESDESQSLVYFSVGSRLAVAHKKATLISLQVARDSGTGLMMSVNFSTQELRSAETIGRTIISPAISGKDFVITEGTLVFEPGQRSTVLDVILTPETGSLNSFPKRFQIVLFDPKGGARIDKVYGTANITLVSDADSQAIWGLADQLHQPVNDDILNRVLHTISMKVATENTDEQLSAMMHLIEKITTEGKIQAFSVASRTLFYEILCSLINPKRKDTRGFSHFAEVTENFAFSLLTNVTCGSPGEKSKTILDSCPYLSILALHWYPQQINGHKFEGKEGDYIRIPERLLDVQDAEIMAGKSTCKLVQFTEYSSQQWFISGNNLPTLKNKVLSLSVKGQSSQLLTNDNEVLYRIYAAEPRIIPQTSLCLLWNQAAASWLSDSQFCKVVEETADYVECACSHMSVYAVYARTDNLSSYNEAFFTSGFICISGLCLAVLSHIFCARYSMFAAKLLTHMMAASLGTQILFLASAYASPQLAEESCSAMAAVTHYLYLCQFSWMLIQSVNFWYVLVMNDEHTERRYLLFFLLSWGLPAFVVILLIVILKGIYHQSMSQIYGLIHGDLCFIPNVYAALFTAALVPLTCLVVVFVVFIHAYQVKPQWKAYDDVFRGRTNAAEIPLILYLFALISVTWLWGGLHMAYRHFWMLVLFVIFNSLQGLYVFMVYFILHNQMCCPMKASYTVEMNGHPGPSTAFFTPGSGMPPAGGEISKSTQNLIGAMEEVPPDWERASFQQGSQASPDLKPSPQNGATFPSSGGYGQGSLIADEESQEFDDLIFALKTGAGLSVSDNESGQGSQEGGTLTDSQIVELRRIPIADTHL

SEQ ID NO: 3138 - protein, 1967 aa, Homo sapiens
  Payload ID: 699;
  Gene Symbol: ADGRV1;
  Gene Name: adhesion G prt-coupled receptor V1;
  Uniprot ID:  Q8WXG9;
  ENSP ID: ENSP00000392618
MQLCIFCCCCILFYFDLYDFGRGYDFTIQENGLQIDQPPEIGNISIVRIIIMKNDNAEGIIEFDPKYTAFEVEEDVGLIMIPVVRLHGTYGYVTADFISQSSSASPGGVDYILHGSTVTFQHGQNLSFINISIIDDNESEFEEPIEILLTGATGGAVLGRHLVSRIIIAKSDSPFGVIRFLNQSKISIANPNSTMILSLVLERTGGLLGEIQVNWETVGPNSQEALLPQNRDIADPVSGLFYFGEGEGGVRTIILTIYPHEEIEVEETFIIKLHLVKGEAKLDSRAKDVTLTIQEFGDPNGVVQFAPETLSKKTYSEPLALEGPLLITFFVRRVKGTFGEIMVYWELSSEFDITEDFLSTSGFFTIADGESEASFDVHLLPDEVPEIEEDYVIQLVSVEGGAELDLEKSITWFSVYANDDPHGVFALYSDRQSILIGQNLIRSIQINITRLAGTFGDVAVGLRISSDHKEQPIVTENAERQLVVKDGATYKVDVVPIKNQVFLSLGSNFTLQLVTVMLVGGRFYGMPTILQEAKSAVLPVSEKAANSQVGFESTAFQLMNITAGTSHVMISRRGTYGALSVAWTTGYAPGLEIPEFIVVGNMTPTLGSLSFSHGEQRKGVFLWTFPSPGWPEAFVLHLSGVQSSAPGGAQLRSGFIVAEIEPMGVFQFSTSSRNIIVSEDTQMIRLHVQRLFGFHSDLIKVSYQTTAGSAKPLEDFEPVQNGELFFQKFQTEVDFEITIINDQLSEIEEFFYINLTSVEIRGLQKFDVNWSPRLNLDFSVAVITILDNDDLAGMDISFPETTVAVAVDTTLIPVETESTTYLSTSKTTTILQPTNVVAIVTEATGVSAIPEKLVTLHGTPAVSEKPDVATVTANVSIHGTFSLGPSIVYIEEEMKNGTFNTAEVLIRRTGGFTGNVSITVKTFGERCAQMEPNALPFRGIYGISNLTWAVEEEDFEEQTLTLIFLDGERERKVSVQILDDDEPEGQEFFYVFLTNPQGGAQIVEEKDDTGFAAFAMVIITGSDLHNGIIGFSEESQSGLELREGAVMRRLHLIVTRQPNRAFEDVKVFWRVTLNKTVVVLQKDGVNLVEELQSVSGTTTCTMGQTKCFISIELKPEKVPQVEVYFFVELYEATAGAAINNSARFAQIKILESDESQSLVYFSVGSRLAVAHKKATLISLQVARDSGTGLMMSVNFSTQELRSAETIGRTIISPAISGKDFVITEGTLVFEPGQRSTVLDVILTPETGSLNSFPKRFQIVLFDPKGGARIDKVYGTANITLVSDADSQAIWGLADQLHQPVNDDILNRVLHTISMKVATENTDEQLSAMMHLIEKITTEGKIQAFSVASRTLFYEILCSLINPKRKDTRGFSHFAEVTENFAFSLLTNVTCGSPGEKSKTILDSCPYLSILALHWYPQQINGHKFEGKEGDYIRIPERLLDVQDAEIMAGKSTCKLVQFTEYSSQQWFISGNNLPTLKNKVLSLSVKGQSSQLLTNDNEVLYRIYAAEPRIIPQTSLCLLWNQAAASWLSDSQFCKVVEETADYVECACSHMSVYAVYARTDNLSSYNEAFFTSGFICISGLCLAVLSHIFCARYSMFAAKLLTHMMAASLGTQILFLASAYASPQLAEESCSAMAAVTHYLYLCQFSWMLIQSVNFWYVLVMNDEHTERRYLLFFLLSWGLPAFVVILLIVILKGIYHQSMSQIYGLIHGDLCFIPNVYAALFTAALVPLTCLVVVFVVFIHAYQVKPQWKAYDDVFRGRTNAAEIPLILYLFALISVTWLWGGLHMAYRHFWMLVLFVIFNSLQGLYVFMVYFILHNQMCCPMKASYTVEMNGHPGPSTAFFTPGSGMPPAGGEISKSTQNLIGAMEEVPPDWERASFQQGSQASPDLKPSPQNGATFPSSGGYGQGSLIADEESQEFDDLIFALKTGAGLSVSDNESGQGSQEGGTLTDSQIVELRRIPIADTHL

SEQ ID NO: 3139 - protein, 1608 aa, Homo sapiens
  Payload ID: 699;
  Gene Symbol: ADGRV1;
  Gene Name: adhesion G prt-coupled receptor V1;
  ENSP ID: ENSP00000422153
  MOD_RES (1)..(1): Any amino acid
XLYTCATLCLKEQACSAFSFFSASEGPQCFWMTSWISPAVNNSDFWTYRKNMTRVASLFSGQAVAGSDYEPVTRQWAIMQEGDEFANLTVSILPDDFPEMDESFLISLLEVHLMNISASLKNQPTIGQPNISTVVIALNGDAFGVFVIYNISPNTSEDGLFVEVQEQPQTLVELMIHRTGGSLGQVAVEWRVVGGTATEGLDFIGAGEILTFAEGETKKTVILTILDDSEPEDDESIIVSLVYTEGGSRILPSSDTVRVNILANDNVAGIVSFQTASRSVIGHEGEILQFHVIRTFPGRGNVTVNWKIIGQNLELNFANFSGQLFFPEGSLNTTLFVHLLDDNIPEEKEVYQVILYDVRTQGVPPAGIALLDAQGYAAVLTVEASDEPHGVLNFALSSRFVLLQEANITIQLFINREFGSLGAINVTYTTVPGMLSLKNQTVGNLAEPEVDFVPIIGFLILEEGETAAAINITILEDDVPELEEYFLVNLTYVGLTMAASTSFPPRLDSEGLTAQVIIDANDGARGVIEWQQSRFEVNETHGSLTLVAQRSREPLGHVSLFVYAQNLEAQVGLDYIFTPMILHFADGERYKNVNIMILDDDIPEGDEKFQLILTNPSPGLELGKNTIALIIVLANDDGPGVLSFNNSEHFFLREPTALYVQESVAVLYIVREPAQGLFGTVTVQFIVTEVNSSNESKDLTPSKGYIVLEEGVRFKALQISAILDTEPEMDEYFVCTLFNPTGGARLGVHVQTLITVLQNQAPLGLFSISAVENRATSIDIEEANRTVYLNVSRTNGIDLAVSVQWETVSETAFGMRGMDVVFSVFQSFLDESASGWCFFTLENLIYGIMLRKSSVTVYRWQGIFIPVEDLNIENPKTCEAFNIGFSPYFVITHEERNEEKPSLNSVFTFTSGFKLFLVQTIIILESSQVRYFTSDSQDYLIIASQRDDSELTQVFRWNGGSFVLHQKLPVRGVLTVALFNKGGSVFLAISQANARLNSLLFRWSGSGFINFQEVPVSGTTEVEALSSANDIYLIFAENVFLGDQNSIDIFIWEMGQSSFRYFQSVDFAAVNRIHSFTPASGIAHILLIGQDMSALYCWNSERNQFSFVLEVPSAYDVASVTVKSLNSSKNLIALVGAHSHIYELAYISSHSDFIPSSGELIFEPGEREATIAVNILDDTVPEKEESFKVQLKNPKGGAEIGINDSVTITILSNDDAYGIVAFAQNSLYKQVEEMEQDSLVTLNVERLKGTYGRITIAWEADGSISDIFPTSGVILFTEGQVLSTITLTILADNIPELSEVVIVTLTRITTEGVEDSYKGATIDQDRSKSVITTLPNDSPFGLVGWRAASVFIRVAEPKENTTTLQLQIARDKGLLGDIAIHLRAQPNFLLHVDNQATENEDYVLQETIIIMKENIKEAHAEVSILPDDLPELEEGFIVTITEVNLVNSDFSTGQPSVRRPGMEIAEIMIEENDDPRGIFMFHVTRGAGEVITAYEVPPPLNVLQVPVVRLAGSFGAVNVYWKASPDSAGLEDFKPSHGILEFADKQVTAMIEITIIDDAEFELTETFNISLISVAGGGRLGDDVVVTVVIPQNDSPFGVFGFEEKTVS

SEQ ID NO: 3140 - protein, 1055 aa, Homo sapiens
  Payload ID: 699;
  Gene Symbol: ADGRV1;
  Gene Name: adhesion G prt-coupled receptor V1;
  ENSP ID: ENSP00000424736
  MOD_RES (1)..(1): Any amino acid
XRYEEITVVRNGGTHGNVSANWVLTRNSTDPSPVTADIRPSSGVLHFAQGQMLATIPLTVVDDDLPEEAEAYLLQILPHTIRGGAEVSEPAELLFYIQDSDDVYGLITFFPMENQKIESSPGERYLSLSFTRLGGTKGDVRLLYSVLYIPAGAVDPLQAKEGILNISRRNDLIFPEQKTQVTTKLPIRNDAFLQNGAHFLVQLETVELLNIIPLIPPISPRFGEICNISLLVTPAIANGEIGFLSNLPIILHEPEDFAAEVVYIPLHRDGTDGQATVYWSLKPSGFNSKAVTPDDIGPFNGSVLFLSGQSDTTINITIKGDDIPEMNETVTLSLDRVNVENQVLKSGYTSRDLIILENDDPGGVFEFSPASRGPYVIKEGESVELHIIRSRGSLVKQFLHYRVEPRDSNEFYGNTGVLEFKPGEREIVITLLARLDGIPELDEHYWVVLSSHGERESKLGSATIVNITILKNDDPHGIIEFVSDGLIVMINESKGDAIYSAVYDVVRNRGNFGDVSVSWVVSPDFTQDVFPVQGTVVFGDQEFSKNITIYSLPDEIPEEMEEFTVILLNGTGGAKVGNRTTATLRIRRNDDPIYFAEPRVVRVQEGETANFTVLRNGSVDVTCMVQYATKDGKATARERDFIPVEKGETLIFEVGSRQQSISIFVNEDGIPETDEPFYIILLNSTGDTVVYQYGVATVIIEANDDPNGIFSLEPIDKAVEEGKTNAFWILRHRGYFGSVSVSWQLFQNDSALQPGQEFYETSGTVNFMDGEEAKPIILHAFPDKIPEFNEFYFLKLVNISGGSPGPGGQLAETNLQVTVMVPFNDDPFGVFILDPECLEREVAEDVLSEDDMSYITNFTILRQQGVFGDVQLGWEILSSEFPAGLPPMIDFLLVGIFPTTVHLQQHMRRHHSGTDALYFTGLEGAFGTVNPKYHPSRNNTIANFTFSAWVMPNANTNGFIIAKDDGNGSIYYGVKIQTNESHVTLSLHYKTLGSNATYIAKTTVMKYLEESVWLHLLIILEDGIIEFYLDGNAMPRGIKSLKGEAITDGEGHHHN

SEQ ID NO: 3141 - protein, 148 aa, Homo sapiens
  Payload ID: 699;
  Gene Symbol: ADGRV1;
  Gene Name: adhesion G prt-coupled receptor V1;
  ENSP ID: ENSP00000425936
MAKRSAAAAVPGMPSASLLVNLLSALLILFVFGETEIRFTGQTEFVVNETSTTVIRLIIERIGEPANVTAIVSLYGEDAGDFFDTYAAAFIPAGETNRTVYIAVCDDDLPEPDETFIFHLTLQLPSIAVSEPKGRNESMPLTLIREKG

SEQ ID NO: 3142 - protein, 493 aa, Homo sapiens
  Payload ID: 700;
  Gene Symbol: AMIGO1;
  Gene Name: adhesion molecule with Ig-like domain 1;
  Uniprot ID:  Q86WK6;
  ENSP ID: ENSP00000358878
MHPHRDPRGLWLLLPSLSLLLFEVARAGRAVVSCPAACLCASNILSCSKQQLPNVPHSLPSYTALLDLSHNNLSRLRAEWTPTRLTQLHSLLLSHNHLNFISSEAFSPVPNLRYLDLSSNQLRTLDEFLFSDLQVLEVLLLYNNHIMAVDRCAFDDMAQLQKLYLSQNQISRFPLELVKEGAKLPKLTLLDLSSNKLKNLPLPDLQKLPAWIKNGLYLHNNPLNCDCELYQLFSHWQYRQLSSVMDFQEDLYCMNSKKLHNVFNLSFLNCGEYKERAWEAHLGDTLIIKCDTKQQGMTKVWVTPSNERVLDEVTNGTVSVSKDGSLLFQQVQVEDGGVYTCYAMGETFNETLSVELKVHNFTLHGHHDTLNTAYTTLVGCILSVVLVLIYLYLTPCRCWCRGVEKPSSHQGDSLSSSMLSTTPNHDPMAGGDKDDGFDRRVAFLEPAGPGQGQNGKLKPGNTLPVPEATGKGQRRMSDPESVSSVFSDTPIVV

SEQ ID NO: 3143 - protein, 493 aa, Homo sapiens; identical to SEQ ID NO: 3142
  Payload ID: 700;
  Gene Symbol: AMIGO1;
  Gene Name: adhesion molecule with Ig-like domain 1;
  Uniprot ID:  Q86WK6;
  ENSP ID: ENSP00000358880

SEQ ID NO: 3144 - protein, 522 aa, Homo sapiens
  Payload ID: 701;
  Gene Symbol: AMIGO2;
  Gene Name: adhesion molecule with Ig-like domain 2;
  Uniprot ID:  Q86SJ2;
  ENSP ID: ENSP00000266581
MSLRVHTLPTLLGAVVRPGCRELLCLLMITVTVGPGASGVCPTACICATDIVSCTNKNLSKVPGNLFRLIKRLDLSYNRIGLLDSEWIPVSFAKLNTLILRHNNITSISTGSFSTTPNLKCLDLSSNKLKTVKNAVFQELKVLEVLLLYNNHISYLDPSAFGGLSQLQKLYLSGNFLTQFPMDLYVGRFKLAELMFLDVSYNRIPSMPMHHINLVPGKQLRGIYLHGNPFVCDCSLYSLLVFWYRRHFSSVMDFKNDYTCRLWSDSRHSRQVLLLQDSFMNCSDSIINGSFRALGFIHEAQVGERLMVHCDSKTGNANTDFIWVGPDNRLLEPDKEMENFYVFHNGSLVIESPRFEDAGVYSCIAMNKQRLLNETVDVTINVSNFTVSRSHAHEAFNTAFTTLAACVASIVLVLLYLYLTPCPCKCKTKRQKNMLHQSNAHSSILSPGPASDASADERKAGAGKRVVFLEPLKDTAAGQNGKVRLFPSEAVIAEGILKSTRGKSDSDSVNSVFSDTPFVAST

SEQ ID NO: 3145 - protein, 522 aa, Homo sapiens; identical to SEQ ID NO: 3144
  Payload ID: 701;
  Gene Symbol: AMIGO2;
  Gene Name: adhesion molecule with Ig-like domain 2;
  Uniprot ID:  Q86SJ2;
  ENSP ID: ENSP00000406020

SEQ ID NO: 3146 - protein, 522 aa, Homo sapiens; identical to SEQ ID NO: 3144
  Payload ID: 701;
  Gene Symbol: AMIGO2;
  Gene Name: adhesion molecule with Ig-like domain 2;
  Uniprot ID:  Q86SJ2;
  ENSP ID: ENSP00000449034

SEQ ID NO: 3147 - protein, 504 aa, Homo sapiens
  Payload ID: 702;
  Gene Symbol: AMIGO3;
  Gene Name: adhesion molecule with Ig-like domain 3;
  Uniprot ID:  Q86WK7;
  ENSP ID: ENSP00000323096
MTWLVLLGTLLCMLRVGLGTPDSEGFPPRALHNCPYKCICAADLLSCTGLGLQDVPAELPAATADLDLSHNALQRLRPGWLAPLFQLRALHLDHNELDALGRGVFVNASGLRLLDLSSNTLRALGRHDLDGLGALEKLLLFNNRLVHLDEHAFHGLRALSHLYLGCNELASFSFDHLHGLSATHLLTLDLSSNRLGHISVPELAALPAFLKNGLYLHNNPLPCDCRLYHLLQRWHQRGLSAVRDFAREYVCLAFKVPASRVRFFQHSRVFENCSSAPALGLERPEEHLYALVGRSLRLYCNTSVPAMRIAWVSPQQELLRAPGSRDGSIAVLADGSLAIGNVQEQHAGLFVCLATGPRLHHNQTHEYNVSVHFPRPEPEAFNTGFTTLLGCAVGLVLVLLYLFAPPCRCCRRACRCRRWPQTPSPLQELSAQSSVLSTTPPDAPSRKASVHKHVVFLEPGRRGLNGRVQLAVAEEFDLYNPGGLQLKAGSESASSIGSEGPMTT

SEQ ID NO: 3148 - protein, 384 aa, Homo sapiens
  Payload ID: 703;
  Gene Symbol: AMICA1;
  Gene Name: adhesion molecule, interacts with CXADR antigen 1;
  Uniprot ID:  Q86YT9;
  ENSP ID: ENSP00000292067
MVSGDYSLGLNDLNVSPPELTVHVGDSALMGCVFQSTEDKCIFKIDWTLSPGEHAKDEYVLYYYSNLSVPIGRFQNRVHLMGDILCNDGSLLLQDVQEADQGTYICEIRLKGESQVFKKAVVLHVLPEEPKELMVHVGGLIQMGCVFQSTEVKHVTKVEWIFSGRRAKEEIVFRYYHKLRMSVEYSQSWGHFQNRVNLVGDIFRNDGSIMLQGVRESDGGNYTCSIHLGNLVFKKTIVLHVSPEEPRTLVTPAALRPLVLGGNQLVIIVGIVCATILLLPVLILIVKKTCGNKSSVNSTVLVKNTKKTNPEIKEKPCHFERCEGEKHIYSPIIVREVIEEEEPSEKSEATYMTMHPVWPSLRSDRNNSLEKKSGGGMPKTQQAF

SEQ ID NO: 3149 - protein, 394 aa, Homo sapiens
  Payload ID: 703;
  Gene Symbol: AMICA1;
  Gene Name: adhesion molecule, interacts with CXADR antigen 1;
  Uniprot ID:  Q86YT9;
  ENSP ID: ENSP00000348635
MFCPLKLILLPVLLDYSLGLNDLNVSPPELTVHVGDSALMGCVFQSTEDKCIFKIDWTLSPGEHAKDEYVLYYYSNLSVPIGRFQNRVHLMGDILCNDGSLLLQDVQEADQGTYICEIRLKGESQVFKKAVVLHVLPEEPKELMVHVGGLIQMGCVFQSTEVKHVTKVEWIFSGRRAKEEIVFRYYHKLRMSVEYSQSWGHFQNRVNLVGDIFRNDGSIMLQGVRESDGGNYTCSIHLGNLVFKKTIVLHVSPEEPRTLVTPAALRPLVLGGNQLVIIVGIVCATILLLPVLILIVKKTCGNKSSVNSTVLVKNTKKTNPEIKEKPCHFERCEGEKHIYSPIIVREVIEEEEPSEKSEATYMTMHPVWPSLRSDRNNSLEKKSGGGMPKTQQAF

SEQ ID NO: 3150 - protein, 355 aa, Homo sapiens
  Payload ID: 703;
  Gene Symbol: AMICA1;
  Gene Name: adhesion molecule, interacts with CXADR antigen 1;
  Uniprot ID:  Q86YT9;
  ENSP ID: ENSP00000431218
MGCVFQSTEDKCIFKIDWTLSPGEHAKDEYVLYYYSNLSVPIGRFQNRVHLMGDILCNDGSLLLQDVQEADQGTYICEIRLKGESQVFKKAVVLHVLPEEPKELMVHVGGLIQMGCVFQSTEVKHVTKVEWIFSGRRAKEEIVFRYYHKLRMSVEYSQSWGHFQNRVNLVGDIFRNDGSIMLQGVRESDGGNYTCSIHLGNLVFKKTIVLHVSPEEPRTLVTPAALRPLVLGGNQLVIIVGIVCATILLLPVLILIVKKTCGNKSSVNSTVLVKNTKKTNPEIKEKPCHFERCEGEKHIYSPIIVREVIEEEEPSEKSEATYMTMHPVWPSLRSDRNNSLEKKSGGGMPKTQQAF

SEQ ID NO: 3151 - protein, 305 aa, Homo sapiens
  Payload ID: 703;
  Gene Symbol: AMICA1;
  Gene Name: adhesion molecule, interacts with CXADR antigen 1;
  ENSP ID: ENSP00000431614
MGCVFQSTEDKCIFKIDWTLSPGEHAKDEYVLYYYSNLSVPIGRFQNRVHLMGDILCNDGSLLLQDVQEADQGTYICEIRLKGESQVFKKAVVLHVLPEEPKELMVHVGGLIQMGCVFQSTEVKHVTKVEWIFSGRRAKEEIVFRYYHKLRMSVEYSQSWGHFQNRVNLVGDIFRNDGSIMLQGVRESDGGNYTCSIHLGNLVFKKTIVLHVSPEEPRTLVTPAALRPLVLGGNQLVIIVGIVCATILLLPVLILIVKKTCGNKSSVNSTVLVKNTKKTNPEIKEKPCHFERCEGEVNTRFSLKH

SEQ ID NO: 3152 - protein, 155 aa, Homo sapiens
  Payload ID: 703;
  Gene Symbol: AMICA1;
  Gene Name: adhesion molecule, interacts with CXADR antigen 1;
  ENSP ID: ENSP00000431791
MFCPLKLILLPVLLDYSLGLNDLNVSPPELTVHVGDSALMGCVFQSTEDKCIFKIDWTLSPGEHAKDEYVLYYYSNLSVPIGRFQNRVHLMGDILCNDGSLLLQDVQEADQGTYICEIRLKGESQVFKKAVVLHVLPEEPKELMVHVGGLIQMGC

SEQ ID NO: 3153 - protein, 120 aa, Homo sapiens
  Payload ID: 703;
  Gene Symbol: AMICA1;
  Gene Name: adhesion molecule, interacts with CXADR antigen 1;
  ENSP ID: ENSP00000432769
MGCVFQSTEDKCIFKIDWTLSPGEHAKDEYVLYYYSNLSVPIGRFQNRVHLMGDILCNDGSLLLQDVQEADQGTYICEIRLKGESQVFKKAVVLHVLPEEPKELMVHVGGLIQMGCVFQS

SEQ ID NO: 3154 - protein, 66 aa, Homo sapiens
  Payload ID: 703;
  Gene Symbol: AMICA1;
  Gene Name: adhesion molecule, interacts with CXADR antigen 1;
  ENSP ID: ENSP00000435145
MFCPLKLILLPVLLEHRRQMYIQDRLDSVTRRARQGRICAILLLQSQCAYWALPEPRTLDGGHLMQ

SEQ ID NO: 3155 - protein, 383 aa, Homo sapiens
  Payload ID: 703;
  Gene Symbol: AMICA1;
  Gene Name: adhesion molecule, interacts with CXADR antigen 1;
  ENSP ID: ENSP00000436117
MFCPLKLILLPVLLDYSLGLNDLNVSPPELTVHVGDSALMGCVFQSTEDKCIFKIDWTLSPGEHAKDEYVLYYYSNLSVPIGRFQNRVHLMGDILCNDGSLLLQDVQEADQGTYICEIRLKGESQVFKKAVVLHVLPEEPKELMVHVGGLIQMGCVFQSTEVKHVTKEEIVFRYYHKLRMSVEYSQSWGHFQNRVNLVGDIFRNDGSIMLQGVRESDGGNYTCSIHLGNLVFKKTIVLHVSPEEPRTLVTPAALRPLVLGGNQLVIIVGIVCATILLLPVLILIVKKTCGNKSSVNSTVLVKNTKKTNPEIKEKPCHFERCEGEKHIYSPIIVREVIEEEEPSEKSEATYMTMHPVWPSLRSDRNNSLEKKSGGGMPKTQQAF

SEQ ID NO: 3156 - protein, 407 aa, Homo sapiens
  Payload ID: 704;
  Gene Symbol: ADRM1;
  Gene Name: adhesion regulating molecule 1;
  Uniprot ID:  Q16186;
  ENSP ID: ENSP00000253003
MTTSGALFPSLVPGSRGASNKYLVEFRAGKMSLKGTTVTPDKRKGLVYIQQTDDSLIHFCWKDRTSGNVEDDLIIFPDDCEFKRVPQCPSGRVYVLKFKAGSKRLFFWMQEPKTDQDEEHCRKVNEYLNNPPMPGALGASGSSGHELSALGGEGGLQSLLGNMSHSQLMQLIGPAGLGGLGGLGALTGPGLASLLGSSGPPGSSSSSSSRSQSAAVTPSSTTSSTRATPAPSAPAAASATSPSPAPSSGNGASTAASPTQPIQLSDLQSILATMNVPAGPAGGQQVDLASVLTPEIMAPILANADVQERLLPYLPSGESLPQTADEIQNTLTSPQFQQALGMFSAALASGQLGPLMCQFGLPAEAVEAANKGDVEAFAKAMQNNAKPEQKEGDTKDKKDEEEDMSLD

SEQ ID NO: 3157 - protein, 407 aa, Homo sapiens; identical to SEQ ID NO: 3156
  Payload ID: 704;
  Gene Symbol: ADRM1;
  Gene Name: adhesion regulating molecule 1;
  Uniprot ID:  Q16186;
  ENSP ID: ENSP00000478877

SEQ ID NO: 3158 - protein, 141 aa, Homo sapiens
  Payload ID: 704;
  Gene Symbol: ADRM1;
  Gene Name: adhesion regulating molecule 1;
  ENSP ID: ENSP00000479008
MTTSGALFPSLVPGSRGASNKYLVEFRAGKMSLKGTTVTPDKRKGLVYIQQTDDSLIHFCWKDRTSGNVEDEPKTDQDEEHCRKVNEYLNNPPMPGALGASGSSGHELSALGGEGGLQSLLGNMSHSQLMQLIGPAGLGGL

SEQ ID NO: 3159 - protein, 368 aa, Homo sapiens
  Payload ID: 704;
  Gene Symbol: ADRM1;
  Gene Name: adhesion regulating molecule 1;
  ENSP ID: ENSP00000480756
MTTSGALFPSLVPGSRGASNKYLVEFRAGKMSLKGTTVTPDKRKGLVYIQQTDDSLIHFCWKDRTSGNVEDEPKTDQDEEHCRKVNEYLNNPPMPGALGASGSSGHELSALGGEGGLQSLLGNMSHSQLMQLIGPAGLGGLGGLGALTGPGLASLLGSSGPPGSSSSSSSRSQSAAVTPSSTTSSTRATPAPSAPAAASATSPSPAPSSGNGASTAASPTQPIQLSDLQSILATMNVPAGPAGGQQVDLASVLTPEIMAPILANADVQERLLPYLPSGESLPQTADEIQNTLTSPQFQQALGMFSAALASGQLGPLMCQFGLPAEAVEAANKGDVEAFAKAMQNNAKPEQKEGDTKDKKDEEEDMSLD

SEQ ID NO: 3160 - protein, 416 aa, Homo sapiens
  Payload ID: 705;
  Gene Symbol: APMAP;
  Gene Name: adipocyte plasma membrane associated prt;
  Uniprot ID:  Q9HDC9;
  ENSP ID: ENSP00000217456
MSEADGLRQRRPLRPQVVTDDDGQAPEAKDGSSFSGRVFRVTFLMLAVSLTVPLLGAMMLLESPIDPQPLSFKEPPLLLGVLHPNTKLRQAERLFENQLVGPESIAHIGDVMFTGTADGRVVKLENGEIETIARFGSGPCKTRDDEPVCGRPLGIRAGPNGTLFVADAYKGLFEVNPWKREVKLLLSSETPIEGKNMSFVNDLTVTQDGRKIYFTDSSSKWQRRDYLLLVMEGTDDGRLLEYDTVTREVKVLLDQLRFPNGVQLSPAEDFVLVAETTMARIRRVYVSGLMKGGADLFVENMPGFPDNIRPSSSGGYWVGMSTIRPNPGFSMLDFLSERPWIKRMIFKLFSQETVMKFVPRYSLVLELSDSGAFRRSLHDPDGLVATYISEVHEHDGHLYLGSFRSPFLCRLSLQAV

SEQ ID NO: 3161 - protein, 409 aa, Homo sapiens
  Payload ID: 705;
  Gene Symbol: APMAP;
  Gene Name: adipocyte plasma membrane associated prt;
  ENSP ID: ENSP00000395874
  MOD_RES (1)..(1): Any amino acid
XVVTDDDGQAPEAKDGSSFSGRVFRVTFLMLAVSLTVPLLGAMMLLESPIDPQPLSFKEPPLLLGVLHPNTKLRQAERLFENQLVGPESIAHIGDVMFTGTADGRVVKLENGEIETIARFGSGPCKTRDDEPVCGRPLGIRAGPNGTLFVADAYKGLFEVNPWKREVKLLLSSETPIEGKNMSFVNDLTVTQDGRKIYFTDSSSKWQRRDYLLLVMEGTDDGRLLEYDTVTREVKVLLDQLRFPNGVQLSPAEDFVLVAETTMARIRRVYVSGLMKGGADLFVENMPGFPDNIRPSSSGGYWVGMSTIRPNPGFSMLDFLSERPWIKRMIFKGSCAGCDLLFSQETVMKFVPRYSLVLELSDSGAFRRSLHDPDGLVATYISEVHEHDGHLYLGSFRSPFLCRLSLQAV

SEQ ID NO: 3162 - protein, 147 aa, Homo sapiens
  Payload ID: 706;
  Gene Symbol: AAMDC;
  Gene Name: adipogenesis associated, Mth938 domain containing;
  ENSP ID: ENSP00000307254
MTSPEIASLSWGQMKVKGSNTTYKDCKVWPGGSRTWDWRETGTEHSPGVQPADVKEVVEKGVQTLVIGRGMSEALKAPTQQLPSGVHVRAVVQFHLATASWHILERCKTGAGLSIKHVCELAMSHLSTFLYQIYDAIILKMHLYFMK

SEQ ID NO: 3163 - protein, 122 aa, Homo sapiens
  Payload ID: 706;
  Gene Symbol: AAMDC;
  Gene Name: adipogenesis associated, Mth938 domain containing;
  Uniprot ID:  Q9H7C9;
  ENSP ID: ENSP00000377078
MTSPEIASLSWGQMKVKGSNTTYKDCKVWPGGSRTWDWRETGTEHSPGVQPADVKEVVEKGVQTLVIGRGMSEALKVPSSTVEYLKKHGIDVRVLQTEQAVKEYNALVAQGVRVGGVFHSTC

SEQ ID NO: 3164 - protein, 122 aa, Homo sapiens; identical to SEQ ID NO: 3163
  Payload ID: 706;
  Gene Symbol: AAMDC;
  Gene Name: adipogenesis associated, Mth938 domain containing;
  Uniprot ID:  Q9H7C9;
  ENSP ID: ENSP00000431808

SEQ ID NO: 3165 - protein, 141 aa, Homo sapiens
  Payload ID: 706;
  Gene Symbol: AAMDC;
  Gene Name: adipogenesis associated, Mth938 domain containing;
  ENSP ID: ENSP00000432830
MRVEPSWPNQLLKTSVKFLMTSPEIASLSWGQMKVKGSNTTYKDCKVWPGGSRTWDWRETGTEHSPGVQPADVKEVVEKGVQTLVIGRGMSEALKVPSSTVEYLKKHGIDVRVLQTEQAVKEYNALVAQGVRVGGVFHSTC

SEQ ID NO: 3166 - protein, 137 aa, Homo sapiens
  Payload ID: 706;
  Gene Symbol: AAMDC;
  Gene Name: adipogenesis associated, Mth938 domain containing;
  ENSP ID: ENSP00000433281
MTSPEIASLSWGQMKVKGSNTTYKDCKVWPGGSRTWDWRETGTEHSPGVQPADVKEVVEKGVQTLVIGRGMSEALKAPTQQLPSGVHVRAVVQFHLATASWHILERCKTDQELEQLGVFSTLLWTGEGSWTEHQTCL

SEQ ID NO: 3167 - protein, 88 aa, Homo sapiens
  Payload ID: 706;
  Gene Symbol: AAMDC;
  Gene Name: adipogenesis associated, Mth938 domain containing;
  Uniprot ID:  Q9H7C9;
  ENSP ID: ENSP00000433293
MTSPEIASLSWGQMKVKGSNTTYKDCKVWPGGSRTWDWRETGTEHSPGVQPADVKEVVEKGVQTLVIGRGMSEALKDGIQGAQLDLNC

SEQ ID NO: 3168 - protein, 90 aa, Homo sapiens
  Payload ID: 706;
  Gene Symbol: AAMDC;
  Gene Name: adipogenesis associated, Mth938 domain containing;
  ENSP ID: ENSP00000433956
MTSPEIASLSWGQMKVKGSNTTYKDCKVWPGGSRTWDWRETGTEVPSSTVEYLKKHGIDVRVLQTEQAVKEYNALVAQGVRVGGVFHSTC

SEQ ID NO: 3169 - protein, 93 aa, Homo sapiens
  Payload ID: 706;
  Gene Symbol: AAMDC;
  Gene Name: adipogenesis associated, Mth938 domain containing;
  ENSP ID: ENSP00000435560
MTSPEIASLSWGQMKVKGSNTTYKDCKVWPGGSRTWDWRETGTEHSPGVQPADVKEVVEKGVQTLVIGRGMSEALKGLTLPPRLECSGTIITH

SEQ ID NO: 3170 - protein, 168 aa, Homo sapiens
  Payload ID: 706;
  Gene Symbol: AAMDC;
  Gene Name: adipogenesis associated, Mth938 domain containing;
  ENSP ID: ENSP00000436086
MTSPEIASLSWGQMKVKGSNTTYKDCKVWPGGSRTWDWRETGTESLTLLPRLECSGAISAHCNLHLPGSCHSPASASQVAGTTGACHHTQHSPGVQPADVKEVVEKGVQTLVIGRGMSEALKVPSSTVEYLKKHGIDVRVLQTEQAVKEYNALVAQGVRVGGVFHSTC

SEQ ID NO: 3171 - protein, 51 aa, Homo sapiens
  Payload ID: 706;
  Gene Symbol: AAMDC;
  Gene Name: adipogenesis associated, Mth938 domain containing;
  ENSP ID: ENSP00000437120
RLQPSSCHQVFMSGLWYNSTWLQLHGTSLRDAKQGLTLPPRLECSGTIITH

SEQ ID NO: 3172 - protein, 147 aa, Homo sapiens; identical to SEQ ID NO: 3162
  Payload ID: 706;
  Gene Symbol: AAMDC;
  Gene Name: adipogenesis associated, Mth938 domain containing;
  ENSP ID: ENSP00000486080

SEQ ID NO: 3173 - protein, 76 aa, Homo sapiens
  Payload ID: 707;
  Gene Symbol: ADIRF;
  Gene Name: adipogenesis regulatory factor;
  Uniprot ID:  Q15847;
  ENSP ID: ENSP00000361083
MASKGLQDLKQQVEGTAQEAVSAAGAAAQQVVDQATEAGQKAMDQLAKTTQETIDKTANQASDTFSGIGKKFGLLK

SEQ ID NO: 3174 - protein, 38 aa, Homo sapiens
  Payload ID: 707;
  Gene Symbol: ADIRF;
  Gene Name: adipogenesis regulatory factor;
  ENSP ID: ENSP00000394643
MASKGLQDLKQQVEGTAQEAAMDQLAKTTQETIDKTAN

SEQ ID NO: 3175 - protein, 76 aa, Homo sapiens; identical to SEQ ID NO: 3173
  Payload ID: 707;
  Gene Symbol: ADIRF;
  Gene Name: adipogenesis regulatory factor;
  Uniprot ID:  Q15847;
  ENSP ID: ENSP00000475582

SEQ ID NO: 3176 - protein, 59 aa, Homo sapiens
  Payload ID: 708;
  Gene Symbol: ADIG;
  Gene Name: adipogenin;
  ENSP ID: ENSP00000362445
MKYPLMPLVNDLTFSFLVFWFCLPVGLLLLLIIWLRFLLSQDILQVRRYRYDANILTAS

SEQ ID NO: 3177 - protein, 179 aa, Homo sapiens
  Payload ID: 708;
  Gene Symbol: ADIG;
  Gene Name: adipogenin;
  ENSP ID: ENSP00000416834
  MOD_RES (1)..(1): Any amino acid
XWFCLPVGLLLLLIIWLRFLLSQDSEENDSSVCLDWEPWSKGPAEFCWKGTLHGQEKERPCCLVFLESAGQWQWQKWMGETCQGGKRTLATVVPPWNPQLISSSDRHVKASRGPSPSPASQMTSSPAGSRSSLGGHGSSEQAHGEKLANLIQRGLKAGLGRRVWVHIKEARVFPYPGDP

SEQ ID NO: 3178 - protein, 80 aa, Homo sapiens
  Payload ID: 708;
  Gene Symbol: ADIG;
  Gene Name: adipogenin;
  Uniprot ID:  Q0VDE8;
  ENSP ID: ENSP00000434385
MKYPLMPLVNDLTFSFLVFWFCLPVGLLLLLIIWLRFLLSQDSEENDSSVCLDWEPWSKGPAEFCWKGTLHGQEKERPCW

SEQ ID NO: 3179 - protein, 80 aa, Homo sapiens; identical to SEQ ID NO: 3178
  Payload ID: 708;
  Gene Symbol: ADIG;
  Gene Name: adipogenin;
  Uniprot ID:  Q0VDE8;
  ENSP ID: ENSP00000440331

SEQ ID NO: 3180 - protein, 375 aa, Homo sapiens
  Payload ID: 709;
  Gene Symbol: ADIPOR1;
  Gene Name: adiponectin receptor 1;
  Uniprot ID:  Q96A54;
  ENSP ID: ENSP00000341785
MSSHKGSVVAQGNGAPASNREADTVELAELGPLLEEKGKRVIANPPKAEEEQTCPVPQEEEEEVRVLTLPLQAHHAMEKMEEFVYKVWEGRWRVIPYDVLPDWLKDNDYLLHGHRPPMPSFRACFKSIFRIHTETGNIWTHLLGFVLFLFLGILTMLRPNMYFMAPLQEKVVFGMFFLGAVLCLSFSWLFHTVYCHSEKVSRTFSKLDYSGIALLIMGSFVPWLYYSFYCSPQPRLIYLSIVCVLGISAIIVAQWDRFATPKHRQTRAGVFLGLGLSGVVPTMHFTIAEGFVKATTVGQMGWFFLMAVMYITGAGLYAARIPERFFPGKFDIWFQSHQIFHVLVVAAAFVHFYGVSNLQEFRYGLEGGCTDDTLL

SEQ ID NO: 3181 - protein, 171 aa, Homo sapiens
  Payload ID: 709;
  Gene Symbol: ADIPOR1;
  Gene Name: adiponectin receptor 1;
  ENSP ID: ENSP00000356223
MSSHKGSVVAQGNGAPASNREADTVELAELGPLLEEKGKRVIANPPKAEEEQTCPVPQEEEEEVRVLTLPLQAHHAMEKMEEFVYKVWEGRWRVIPYDVLPDWLKDNDYLLHGHRPPMPSFRACFKSIFRIHTETGNIWTHLLATAHLPLHRLCPGHFCHHCGAVGPVCHS

SEQ ID NO: 3182 - protein, 205 aa, Homo sapiens
  Payload ID: 709;
  Gene Symbol: ADIPOR1;
  Gene Name: adiponectin receptor 1;
  ENSP ID: ENSP00000392946
MSSHKGSVVAQGNGAPASNREADTVELAELGPLLEEKGKRVIANPPKAEEEQTCPVPQEEEEEVRVLTLPLQAHHAMEKMEEFVYKVWEGRWRVIPYDVLPDWLKDNDYLLHGHRPPMPSFRACFKSIFRIHTETGNIWTHLLGFVLFLFLGILTMLRPNMYFMAPLQEKVVFGMFFLGAVLCLSFSWLFHTVYCHSEKVSRTFS

SEQ ID NO: 3183 - protein, 266 aa, Homo sapiens
  Payload ID: 709;
  Gene Symbol: ADIPOR1;
  Gene Name: adiponectin receptor 1;
  ENSP ID: ENSP00000402178
MSSHKGSVVAQGNGAPASNREADTVELAELGPLLEEKGKRVIANPPKAEEEQTCPVPQEEEEEVRVLTLPLQAHHAMEKMEEFVYKVWEGRWRVIPYDVLPDWLKDNDYLLHGHRPPMPSFRACFKSIFRIHTETGNIWTHLLGFVLFLFLGILTMLRPNMYFMAPLQEKVVFGMFFLGAVLCLSFSWLFHTVYCHSEKVSRTFSKLDYSGIALLIMGSFVPWLYYSFYCSPQPRLIYLSIVCVLGISAIIVAQWDRFATPKHRQT

SEQ ID NO: 3184 - protein, 386 aa, Homo sapiens
  Payload ID: 710;
  Gene Symbol: ADIPOR2;
  Gene Name: adiponectin receptor 2;
  Uniprot ID:  Q86V24;
  ENSP ID: ENSP00000349616
MNEPTENRLGCSRTPEPDIRLRKGHQLDGTRRGDNDSHQGDLEPILEASVLSSHHKKSSEEHEYSDEAPQEDEGFMGMSPLLQAHHAMEKMEEFVCKVWEGRWRVIPHDVLPDWLKDNDFLLHGHRPPMPSFRACFKSIFRIHTETGNIWTHLLGCVFFLCLGIFYMFRPNISFVAPLQEKVVFGLFFLGAILCLSFSWLFHTVYCHSEGVSRLFSKLDYSGIALLIMGSFVPWLYYSFYCNPQPCFIYLIVICVLGIAAIIVSQWDMFATPQYRGVRAGVFLGLGLSGIIPTLHYVISEGFLKAATIGQIGWLMLMASLYITGAALYAARIPERFFPGKCDIWFHSHQLFHIFVVAGAFVHFHGVSNLQEFRFMIGGGCSEEDAL

SEQ ID NO: 3185 - protein, 244 aa, Homo sapiens
  Payload ID: 711;
  Gene Symbol: ADIPOQ;
  Gene Name: adiponectin, C1Q and collagen domain containing;
  Uniprot ID:  Q15848;
  ENSP ID: ENSP00000320709
MLLLGAVLLLLALPGHDQETTTQGPGVLLPLPKGACTGWMAGIPGHPGHNGAPGRDGRDGTPGEKGEKGDPGLIGPKGDIGETGVPGAEGPRGFPGIQGRKGEPGEGAYVYRSAFSVGLETYVTIPNMPIRFTKIFYNQQNHYDGSTGKFHCNIPGLYYFAYHITVYMKDVKVSLFKKDKAMLFTYDQYQENNVDQASGSVLLHLEVGDQVWLQVYGEGERNGLYADNDNDSTFTGFLLYHDTN

SEQ ID NO: 3186 - protein, 244 aa, Homo sapiens; identical to SEQ ID NO: 3185
  Payload ID: 711;
  Gene Symbol: ADIPOQ;
  Gene Name: adiponectin, C1Q and collagen domain containing;
  Uniprot ID:  Q15848;
  ENSP ID: ENSP00000389814

SEQ ID NO: 3187 - protein, 1131 aa, Homo sapiens
  Payload ID: 712;
  Gene Symbol: ADNP2;
  Gene Name: ADNP homeobox 2;
  Uniprot ID:  Q6IQ32;
  ENSP ID: ENSP00000262198
MFQIPVENLDNIRKVRKKVKGILVDIGLDSCKELLKDLKGFDPGEKYFHNTSWGDVSLWEPSGKKVRYRTKPYCCGLCKYSTKVLTSFKNHLHRYHEDEIDQELVIPCPNCVFASQPKVVGRHFRMFHAPVRKVQNYTVNILGETKSSRSDVISFTCLKCNFSNTLYYSMKKHVLVAHFHYLINSYFGLRTEEMGEQPKTNDTVSIEKIPPPDKYYCKKCNANASSQDALMYHILTSDIHRDLENKLRSVISEHIKRTGLLKQTHIAPKPAAHLAAPANGSAPSAPAQPPCFHLALPQNSPSPAAGQPVTVAQGAPGSLTHSPPAAGQSHMTLVSSPLPVGQNSLTLQPPAPQPVFLSHGVPLHQSVNPPVLPLSQPVGPVNKSVGTSVLPINQTVRPGVLPLTQPVGPINRPVGPGVLPVSPSVTPGVLQAVSPGVLSVSRAVPSGVLPAGQMTPAGQMTPAGVIPGQTATSGVLPTGQMVQSGVLPVGQTAPSRVLPPGQTAPLRVISAGQVVPSGLLSPNQTVSSSAVVPVNQGVNSGVLQLSQPVVSGVLPVGQPVRPGVLQLNQTVGTNILPVNQPVRPGASQNTTFLTSGSILRQLIPTGKQVNGIPTYTLAPVSVTLPVPPGGLATVAPPQMPIQLLPSGAAAPMAGSMPGMPSPPVLVNAAQSVFVQASSSAADTNQVLKQAKQWKTCPVCNELFPSNVYQVHMEVAHKHSESKSGEKLEPEKLAACAPFLKWMREKTVRCLSCKCLVSEEELIHHLLMHGLGCLFCPCTFHDIKGLSEHSRNRHLGKKKLPMDYSNRGFQLDVDANGNLLFPHLDFITILPKEKLGEREVYLAILAGIHSKSLVPVYVKVRPQAEGTPGSTGKRVSTCPFCFGPFVTTEAYELHLKERHHIMPTVHTVLKSPAFKCIHCCGVYTGNMTLAAIAVHLVRCRSAPKDSSSDLQAQPGFIHNSELLLVSGEVMHDSSFSVKRKLPDGHLGAEDQRHGEEQPPILNADAAPGPEKVTSVVPFKRQRNESRTEGPIVKDEALQILALDPKKYEGRSYEEKKQFLKDYFHKKPYPSKKEIELLSSLFWVWKIDVASFFGKRRYICMKAIKNHKPSVLLGFDMSELKNVKHRLNFEYEP

SEQ ID NO: 3188 - protein, 171 aa, Homo sapiens
  Payload ID: 712;
  Gene Symbol: ADNP2;
  Gene Name: ADNP homeobox 2;
  ENSP ID: ENSP00000453275
MFQIPVENLDNIRKVRKKVKGILVDIGLDSCKELLKDLKGFDPGEKYFHNTSWGDVSLWEPSGKKVRYRTKPYCCGLCKYSTKVLTSFKNHLHRYHEDEIDQELVIPCPNCVFASQPKVVGRHFRMFHAPVRKVQNYTVNILGETKSSRSDVISFTCLKCNFSNTLYYSMK

SEQ ID NO: 3189 - protein, 229 aa, Homo sapiens
  Payload ID: 712;
  Gene Symbol: ADNP2;
  Gene Name: ADNP homeobox 2;
  ENSP ID: ENSP00000453418
MFQIPVENLDNIRKDLKGFDPGEKYFHNTSWGDVSLWEPSGKKVRYRTKPYCCGLCKYSTKVLTSFKNHLHRYHEDEIDQELVIPCPNCVFASQPKVVGRHFRMFHAPVRKVQNYTVNILGETKSSRSDVISFTCLKCNFSNTLYYSMKKHVLVAHFHYLINSYFGLRTEEMGEQPKTNDTVSIEKIPPPDKYYCKKCNANASSQDALMYHILTSDIHRDLENKLRSVI

SEQ ID NO: 3190 - protein, 26 aa, Homo sapiens
  Payload ID: 712;
  Gene Symbol: ADNP2;
  Gene Name: ADNP homeobox 2;
  ENSP ID: ENSP00000467370
  MOD_RES (1)..(1): Any amino acid
XIGLDSCKELLKPDRKSGALRCVRAF

SEQ ID NO: 3191 - protein, 82 aa, Homo sapiens
  Payload ID: 712;
  Gene Symbol: ADNP2;
  Gene Name: ADNP homeobox 2;
  ENSP ID: ENSP00000468397
  MOD_RES (1)..(1): Any amino acid
XLVDIGLDSCKELLKDLKGFDPGEKYFHNTSWGDVSLWEPSGKKVLLAPSSVSDSAHPRLDLAVPSHQLLWSKSCWPWEFGL

SEQ ID NO: 3192 - protein, 496 aa, Homo sapiens
  Payload ID: 713;
  Gene Symbol: ADPGK;
  Gene Name: ADP-dependent glucokinase;
  Uniprot ID:  Q9BRR6;
  ENSP ID: ENSP00000312250
MALWRGSAYAGFLALAVGCVFLLEPELPGSALRSLWSSLCLGPAPAPPGPVSPEGRLAAAWDALIVRPVRRWRRVAVGVNACVDVVLSGVKLLQALGLSPGNGKDHSILHSRNDLEEAFIHFMGKGAAAERFFSDKETFHDIAQVASEFPGAQHYVGGNAALIGQKFAANSDLKVLLCGPVGPKLHELLDDNVFVPPESLQEVDEFHLILEYQAGEEWGQLKAPHANRFIFSHDLSNGAMNMLEVFVSSLEEFQPDLVVLSGLHMMEGQSKELQRKRLLEVVTSISDIPTGIPVHLELASMTNRELMSSIVHQVFPAVTSLGLNEQELLFLTQSASGPHSSLSSWNGVPDVGMVSDILFWILKEHGRSKSRASDLTRIHFHTLVYHILATVDGHWANQLAAVAAGARVAGTQACATETIDTSRVSLRAPQEFMTSHSEAGSRIVLNPNKPVVEWHREGISFHFTPVLVCKDPIRTVGLGDAISAEGLFYSEVHPHY

SEQ ID NO: 3193 - protein, 222 aa, Homo sapiens
  Payload ID: 713;
  Gene Symbol: ADPGK;
  Gene Name: ADP-dependent glucokinase;
  Uniprot ID:  Q9BRR6;
  ENSP ID: ENSP00000397694
MAASCRVVTSISDIPTGIPVHLELASMTNRELMSSIVHQVFPAVTSLGLNEQELLFLTQSASGPHSSLSSWNGVPDVGMVSDILFWILKEHGRSKSRASDLTRIHFHTLVYHILATVDGHWANQLAAVAAGARVAGTQACATETIDTSRVSLRAPQEFMTSHSEAGSRIVLNPNKPVVEWHREGISFHFTPVLVCKDPIRTVGLGDAISAEGLFYSEVHPHY

SEQ ID NO: 3194 - protein, 78 aa, Homo sapiens
  Payload ID: 713;
  Gene Symbol: ADPGK;
  Gene Name: ADP-dependent glucokinase;
  Uniprot ID:  Q9BRR6;
  ENSP ID: ENSP00000454304
MALWRGSAYAGFLALAVGCVFLLEPELPGSALRSLWSSLCLGPAPAPPGPVSPEGRLAAAWDALIVRPVRRWRRVAVG

SEQ ID NO: 3195 - protein, 78 aa, Homo sapiens; identical to SEQ ID NO: 3194
  Payload ID: 713;
  Gene Symbol: ADPGK;
  Gene Name: ADP-dependent glucokinase;
  Uniprot ID:  Q9BRR6;
  ENSP ID: ENSP00000454367

SEQ ID NO: 3196 - protein, 113 aa, Homo sapiens
  Payload ID: 713;
  Gene Symbol: ADPGK;
  Gene Name: ADP-dependent glucokinase;
  ENSP ID: ENSP00000454707
MALWRGSAYAGFLALAVGCVFLLEPELPGSALRSLWSSLCLGPAPAPPGPVSPEGRLAAAWDALIVRPVRRWRRVAVGFFFAVQLVQSYMSFLMTMSLFHQSHCRKWMSSTSF

SEQ ID NO: 3197 - protein, 204 aa, Homo sapiens
  Payload ID: 713;
  Gene Symbol: ADPGK;
  Gene Name: ADP-dependent glucokinase;
  ENSP ID: ENSP00000456387
  MOD_RES (1)..(1): Any amino acid
XEPELPGSALRSLWSSLCLGPAPAPPGPVSPEGRLAAAWDALIVRPVRRWRRVAVGVNACVDVVLSGVKLLQALGLSPGNGKDHSILHSRNDLEEAFIHFMGKGAAAERFFSDKETFHDIAQVASEFPGAQHYVGGNAALIGQKFAANSDLKVLLCGPVGPKLHELLDDNVFVPPESLQEVDEFHLILEYQAAGLSRGDFPWAE

SEQ ID NO: 3198 - protein, 57 aa, Homo sapiens
  Payload ID: 713;
  Gene Symbol: ADPGK;
  Gene Name: ADP-dependent glucokinase;
  ENSP ID: ENSP00000457175
LLEPELPGSALRSLWSSLCLGPAPAPPGPVSPEGRLAAAWDALIVRPVRRWRRVAVG

SEQ ID NO: 3199 - protein, 154 aa, Homo sapiens
  Payload ID: 713;
  Gene Symbol: ADPGK;
  Gene Name: ADP-dependent glucokinase;
  ENSP ID: ENSP00000457447
MGKGAAAERFFSDKETFHDIAQVASEFPGAQHYVGGNAALIGQKFAANSDLKVLLCGPVGPKLHELLDDNVFVPPESLQEVDEFHLILEYQAGEEWGQLKAPHANRFIFSHDLSNGAMNMLEVFVSSLEEFQPDLVVLSGLHMMEGQSKELQRK

SEQ ID NO: 3200 - protein, 26 aa, Homo sapiens
  Payload ID: 713;
  Gene Symbol: ADPGK;
  Gene Name: ADP-dependent glucokinase;
  ENSP ID: ENSP00000457572
  MOD_RES (1)..(1): Any amino acid
XKRLLEVLASQGHILAAGCGACLLLQ

SEQ ID NO: 3201 - protein, 78 aa, Homo sapiens; identical to SEQ ID NO: 3194
  Payload ID: 713;
  Gene Symbol: ADPGK;
  Gene Name: ADP-dependent glucokinase;
  Uniprot ID:  Q9BRR6;
  ENSP ID: ENSP00000458102

SEQ ID NO: 3202 - protein, 342 aa, Homo sapiens
  Payload ID: 714;
  Gene Symbol: ADPRM;
  Gene Name: ADP-ribose/CDP-alcohol diphosphatase, manganese-dependent;
  Uniprot ID:  Q3LIE5;
  ENSP ID: ENSP00000369099
MDDKPNPEALSDSSERLFSFGVIADVQFADLEDGFNFQGTRRRYYRHSLLHLQGAIEDWNNESSMPCCVLQLGDIIDGYNAQYNASKKSLELVMDMFKRLKVPVHHTWGNHEFYNFSREYLTHSKLNTKFLEDQIVHHPETMPSEDYYAYHFVPFPKFRFILLDAYDLSVLGVDQSSPKYEQCMKILREHNPNTELNSPQGLSEPQFVQFNGGFSQEQLNWLNEVLTFSDTNQEKVVIVSHLPIYPDASDNVCLAWNYRDALAVIWSHECVVCFFAGHTHDGGYSEDPFGVYHVNLEGVIETAPDSQAFGTVHVYPDKMMLKGRGRVPDRIMNYKKERAFHC

SEQ ID NO: 3203 - protein, 205 aa, Homo sapiens
  Payload ID: 714;
  Gene Symbol: ADPRM;
  Gene Name: ADP-ribose/CDP-alcohol diphosphatase, manganese-dependent;
  Uniprot ID:  Q3LIE5;
  ENSP ID: ENSP00000431622
MDDKPNPEALSDSSERLFSFGVIADVQFADLEDGFNFQGTRRRYYRHSLLHLQGAIEDWNNESSMPCCVLQLGDIIDGYNAQYNASKKSLELVMDMFKRLKVPVHHTWGNHEFYNFSREYLTHSKLNTKFLEDQIVHHPETMPSEDYYAYHFVPFPKFRFILLDAYDLSVLGVDQSSPKYEQCMKILREHNPNTELNSPQGELFL

SEQ ID NO: 3204 - protein, 294 aa, Homo sapiens
  Payload ID: 714;
  Gene Symbol: ADPRM;
  Gene Name: ADP-ribose/CDP-alcohol diphosphatase, manganese-dependent;
  ENSP ID: ENSP00000477021
MDDKPNPEALSDSSERLFSFGVIADVQFADLEDGFNFQGTRRRYYRHSLLHLQGAIEDWNNESSMPCCVLQLGDIIDGYNAQYNASKKSLELVMDMFKRLKVPVHHTWGNHEFYNFSREYLTHSKLNTKFLEDQIVHHPETMPSEDYYAYHFVPFPKFRFILLDAYDLSVLGVDQSSPKYEQCMKILREHNPNTELNSPQGLSEPQFVQFNGGFSQEQLNWLNEVLTFSDTNQEKVVIAIFPFTRTPLTMCAWPGTTEMPWQSFGLMSVWCVSLLVTPMMVATLRILLVYTTST

SEQ ID NO: 3205 - protein, 357 aa, Homo sapiens
  Payload ID: 715;
  Gene Symbol: ADPRH;
  Gene Name: ADP-ribosylarginine hydrolase;
  Uniprot ID:  P54922;
  ENSP ID: ENSP00000349496
MEKYVAAMVLSAAGDALGYYNGKWEFLQDGEKIHRQLAQLGGLDALDVGRWRVSDDTVMHLATAEALVEAGKAPKLTQLYYLLAKHYQDCMEDMDGRAPGGASVHNAMQLKPGKPNGWRIPFNSHEGGCGAAMRAMCIGLRFPHHSQLDTLIQVSIESGRMTHHHPTGYLGALASALFTAYAVNSRPPLQWGKGLMELLPEAKKYIVQSGYFVEENLQHWSYFQTKWENYLKLRGILDGESAPTFPESFGVKERDQFYTSLSYSGWGGSSGHDAPMIAYDAVLAAGDSWKELAHRAFFHGGDSDSTAAIAGCWWGVMYGFKGVSPSNYEKLEYRNRLEETARALYSLGSKEDTVISL

SEQ ID NO: 3206 - protein, 357 aa, Homo sapiens; identical to SEQ ID NO: 3205
  Payload ID: 715;
  Gene Symbol: ADPRH;
  Gene Name: ADP-ribosylarginine hydrolase;
  Uniprot ID:  P54922;
  ENSP ID: ENSP00000417430

SEQ ID NO: 3207 - protein, 357 aa, Homo sapiens; identical to SEQ ID NO: 3205
  Payload ID: 715;
  Gene Symbol: ADPRH;
  Gene Name: ADP-ribosylarginine hydrolase;
  Uniprot ID:  P54922;
  ENSP ID: ENSP00000417528

SEQ ID NO: 3208 - protein, 125 aa, Homo sapiens
  Payload ID: 715;
  Gene Symbol: ADPRH;
  Gene Name: ADP-ribosylarginine hydrolase;
  ENSP ID: ENSP00000419703
MEKYVAAMVLSAAGDALGYYNGKWEFLQDGEKIHRQLAQLGGLDALDVGRWRVSDDTVMHLATAEALVEAGKAPKLTQLYYLLAKHYQDCMEDMDGRAPGGASVHNAMQLKPGKPNGWRIPFNSH

SEQ ID NO: 3209 - protein, 357 aa, Homo sapiens; identical to SEQ ID NO: 3205
  Payload ID: 715;
  Gene Symbol: ADPRH;
  Gene Name: ADP-ribosylarginine hydrolase;
  Uniprot ID:  P54922;
  ENSP ID: ENSP00000420200

SEQ ID NO: 3210 - protein, 181 aa, Homo sapiens
  Payload ID: 716;
  Gene Symbol: ARF1;
  Gene Name: ADP-ribosylation  factor 1;
  Uniprot ID:  P84077;
  ENSP ID: ENSP00000272102
MGNIFANLFKGLFGKKEMRILMVGLDAAGKTTILYKLKLGEIVTTIPTIGFNVETVEYKNISFTVWDVGGQDKIRPLWRHYFQNTQGLIFVVDSNDRERVNEAREELMRMLAEDELRDAVLLVFANKQDLPNAMNAAEITDKLGLHSLRHRNWYIQATCATSGDGLYEGLDWLSNQLRNQK

SEQ ID NO: 3211 - protein, 181 aa, Homo sapiens; identical to SEQ ID NO: 3210
  Payload ID: 716;
  Gene Symbol: ARF1;
  Gene Name: ADP-ribosylation  factor 1;
  Uniprot ID:  P84077;
  ENSP ID: ENSP00000440005

SEQ ID NO: 3212 - protein, 181 aa, Homo sapiens; identical to SEQ ID NO: 3210
  Payload ID: 716;
  Gene Symbol: ARF1;
  Gene Name: ADP-ribosylation  factor 1;
  Uniprot ID:  P84077;
  ENSP ID: ENSP00000442980

SEQ ID NO: 3213 - protein, 181 aa, Homo sapiens
  Payload ID: 717;
  Gene Symbol: ARF3;
  Gene Name: ADP-ribosylation  factor 3;
  Uniprot ID:  P61204;
  ENSP ID: ENSP00000256682
MGNIFGNLLKSLIGKKEMRILMVGLDAAGKTTILYKLKLGEIVTTIPTIGFNVETVEYKNISFTVWDVGGQDKIRPLWRHYFQNTQGLIFVVDSNDRERVNEAREELMRMLAEDELRDAVLLVFANKQDLPNAMNAAEITDKLGLHSLRHRNWYIQATCATSGDGLYEGLDWLANQLKNKK

SEQ ID NO: 3214 - protein, 144 aa, Homo sapiens
  Payload ID: 717;
  Gene Symbol: ARF3;
  Gene Name: ADP-ribosylation  factor 3;
  Uniprot ID:  P61204;
  ENSP ID: ENSP00000395370
MGNIFGNLLKSLIGKKEMRILMVGLDAAGKTTILYKLKLGEIVTTIPTIGLIFVVDSNDRERVNEAREELMRMLAEDELRDAVLLVFANKQDLPNAMNAAEITDKLGLHSLRHRNWYIQATCATSGDGLYEGLDWLANQLKNKK

SEQ ID NO: 3215 - protein, 50 aa, Homo sapiens
  Payload ID: 717;
  Gene Symbol: ARF3;
  Gene Name: ADP-ribosylation  factor 3;
  ENSP ID: ENSP00000437374
MGNIFGNLLKSLIGKKEMRILMVGLDAAGKTTILYKLKLGEIVTTIPTIG

SEQ ID NO: 3216 - protein, 102 aa, Homo sapiens
  Payload ID: 717;
  Gene Symbol: ARF3;
  Gene Name: ADP-ribosylation  factor 3;
  ENSP ID: ENSP00000438063
MGNIFGNLLKSLIGKKEMRILMVGLDAAGKTTILYKLKLGEIVTTIPTIGFNVETVEYKNISFTVWDVGGQDKIRPLWRHYFQNTQGLIFVVDSNDRERVNE

SEQ ID NO: 3217 - protein, 181 aa, Homo sapiens; identical to SEQ ID NO: 3213
  Payload ID: 717;
  Gene Symbol: ARF3;
  Gene Name: ADP-ribosylation  factor 3;
  Uniprot ID:  P61204;
  ENSP ID: ENSP00000438510

SEQ ID NO: 3218 - protein, 40 aa, Homo sapiens
  Payload ID: 717;
  Gene Symbol: ARF3;
  Gene Name: ADP-ribosylation  factor 3;
  ENSP ID: ENSP00000446353
MGNIFGNLLKSLIGKKEMRILMVGLDAAGKTTILYKLKLG

SEQ ID NO: 3219 - protein, 180 aa, Homo sapiens
  Payload ID: 718;
  Gene Symbol: ARF4;
  Gene Name: ADP-ribosylation  factor 4;
  Uniprot ID:  P18085;
  ENSP ID: ENSP00000306010
MGLTISSLFSRLFGKKQMRILMVGLDAAGKTTILYKLKLGEIVTTIPTIGFNVETVEYKNICFTVWDVGGQDRIRPLWKHYFQNTQGLIFVVDSNDRERIQEVADELQKMLLVDELRDAVLLLFANKQDLPNAMAISEMTDKLGLQSLRNRTWYVQATCATQGTGLYEGLDWLSNELSKR

SEQ ID NO: 3220 - protein, 153 aa, Homo sapiens
  Payload ID: 718;
  Gene Symbol: ARF4;
  Gene Name: ADP-ribosylation  factor 4;
  ENSP ID: ENSP00000417501
MGLTISSLFSRLFGKKQMRILMGFNVETVEYKNICFTVWDVGGQDRIRPLWKHYFQNTQGLIFVVDSNDRERIQEVADELQKMLLVDELRDAVLLLFANKQDLPNAMAISEMTDKLGLQSLRNRTWYVQATCATQGTGLYEGLDWLSNELSKR

SEQ ID NO: 3221 - protein, 22 aa, Homo sapiens
  Payload ID: 718;
  Gene Symbol: ARF4;
  Gene Name: ADP-ribosylation  factor 4;
  ENSP ID: ENSP00000418388
MGLTISSLFSRLFGKKQMRILM

SEQ ID NO: 3222 - protein, 127 aa, Homo sapiens
  Payload ID: 718;
  Gene Symbol: ARF4;
  Gene Name: ADP-ribosylation  factor 4;
  ENSP ID: ENSP00000420254
MGLTISSLFSRLFGKKQMRILMVGLDAAGKTTILYKLKLGEIVTTIPTIGFNVETVEYKNICFTVWDVGGQDRIRPLWKHYFQNTQGLIFVVDSNDRERIQEVADELQKMLLVDELRDAVLLLFANK

SEQ ID NO: 3223 - protein, 59 aa, Homo sapiens
  Payload ID: 718;
  Gene Symbol: ARF4;
  Gene Name: ADP-ribosylation  factor 4;
  ENSP ID: ENSP00000420655
MGLTISSLFSRLFGKKQMRILMVGLDAAGKTTILYKLKLGEIVTTIPTIAVIFVFLCRF

SEQ ID NO: 3224 - protein, 71 aa, Homo sapiens
  Payload ID: 718;
  Gene Symbol: ARF4;
  Gene Name: ADP-ribosylation  factor 4;
  ENSP ID: ENSP00000475828
MLLVDELRDAVLLLFANKQDLPNAMAISEMTDKLGLQSLRNRTWYVQATCATQGTGLYEGLDWLSNELSKR

SEQ ID NO: 3225 - protein, 180 aa, Homo sapiens
  Payload ID: 719;
  Gene Symbol: ARF5;
  Gene Name: ADP-ribosylation  factor 5;
  Uniprot ID:  P84085;
  ENSP ID: ENSP00000000233
MGLTVSALFSRIFGKKQMRILMVGLDAAGKTTILYKLKLGEIVTTIPTIGFNVETVEYKNICFTVWDVGGQDKIRPLWRHYFQNTQGLIFVVDSNDRERVQESADELQKMLQEDELRDAVLLVFANKQDMPNAMPVSELTDKLGLQHLRSRTWYVQATCATQGTGLYDGLDWLSHELSKR

SEQ ID NO: 3226 - protein, 150 aa, Homo sapiens
  Payload ID: 719;
  Gene Symbol: ARF5;
  Gene Name: ADP-ribosylation  factor 5;
  ENSP ID: ENSP00000412701
MGLTVSALFSRIFGKKQMRILMVGLDAAGKTTILYKLKLGEIVTTIPTIGFNVETVEYKNICFTVWDVGGQDKIRPLWRHYFQNTQGLIFVVDSNDRERVQESADELQKMEDELRDAVLLVFANKQDMPNAMPVSELTDKLGLQHLRSRT

SEQ ID NO: 3227 - protein, 175 aa, Homo sapiens
  Payload ID: 720;
  Gene Symbol: ARF6;
  Gene Name: ADP-ribosylation  factor 6;
  Uniprot ID:  P62330;
  ENSP ID: ENSP00000298316
MGKVLSKIFGNKEMRILMLGLDAAGKTTILYKLKLGQSVTTIPTVGFNVETVTYKNVKFNVWDVGGQDKIRPLWRHYYTGTQGLIFVVDCADRDRIDEARQELHRIINDREMRDAIILIFANKQDLPDAMKPHEIQEKLGLTRIRDRNWYVQPSCATSGDGLYEGLTWLTSNYKS

SEQ ID NO: 3228 - protein, 414 aa, Homo sapiens
  Payload ID: 721;
  Gene Symbol: ARFGAP1;
  Gene Name: ADP-ribosylation  factor GTPase activating prt 1;
  Uniprot ID:  Q8N6T3;
  ENSP ID: ENSP00000314615
MASPRTRKVLKEVRVQDENNVCFECGAFNPQWVSVTYGIWICLECSGRHRGLGVHLSFVRSVTMDKWKDIELEKMKAGGNAKFREFLESQEDYDPCWSLQEKYNSRAAALFRDKVVALAEGREWSLESSPAQNWTPPQPRTLPSMVHRVSGQPQSVTASSDKAFEDWLNDDLGSYQGAQGNRYVGFGNTPPPQKKEDDFLNNAMSSLYSGWSSFTTGASRFASAAKEGATKFGSQASQKFWGHKQQPEPASELGHSLNENVLKPAQEKVKEGKIFDDVSSGVSQLASKGVGSKGWRDVTTFFSGKAEGPLDSPSEGHSYQNSGLDHFQNSNIDQSFWETFGSAEPTKTRKSPSSDSWTCADTSTERRSSDSWEVWGSASTNRNSNSDGGEGGEGTKKAVPPAVPTDDGWDNQNW

SEQ ID NO: 3229 - protein, 403 aa, Homo sapiens
  Payload ID: 721;
  Gene Symbol: ARFGAP1;
  Gene Name: ADP-ribosylation  factor GTPase activating prt 1;
  Uniprot ID:  Q8N6T3;
  ENSP ID: ENSP00000359298
MASPRTRKVLKEVRVQDENNVCFECGAFNPQWVSVTYGIWICLECSGRHRGLGVHLSFVRSVTMDKWKDIELEKMKAGGNAKFREFLESQEDYDPCWSLQEKYNSRAAALFRDKVVALAEGREWSLESSPAQNWTPPQPRTLPSMVHRVSGQPQSVTASSDKAFEDWLNDDLGSYQGAQGNRYVGFGNTPPPQKKEDDFLNNAMSSLYSGWSSFTTGASRFASAAKEGATKFGSQASQKASELGHSLNENVLKPAQEKVKEGKIFDDVSSGVSQLASKCQRRLCCHQSHCSAGHLGRAFCPVSWHEALCGQTGREEQASLLPPKHVVGALEVCARGCPRCHVPHTPGTAAEWPGRLCLSRESVVRDGGTSPPFFRGKQRAPWTAPRRATVIRTAVWTTSKTAT

SEQ ID NO: 3230 - protein, 406 aa, Homo sapiens
  Payload ID: 721;
  Gene Symbol: ARFGAP1;
  Gene Name: ADP-ribosylation  factor GTPase activating prt 1;
  Uniprot ID:  Q8N6T3;
  ENSP ID: ENSP00000359306
MASPRTRKVLKEVRVQDENNVCFECGAFNPQWVSVTYGIWICLECSGRHRGLGVHLSFVRSVTMDKWKDIELEKMKAGGNAKFREFLESQEDYDPCWSLQEKYNSRAAALFRDKVVALAEGREWSLESSPAQNWTPPQPRTLPSMVHRVSGQPQSVTASSDKAFEDWLNDDLGSYQGAQGNRYVGFGNTPPPQKKEDDFLNNAMSSLYSGWSSFTTGASRFASAAKEGATKFGSQASQKASELGHSLNENVLKPAQEKVKEGKIFDDVSSGVSQLASKVQGVGSKGWRDVTTFFSGKAEGPLDSPSEGHSYQNSGLDHFQNSNIDQSFWETFGSAEPTKTRKSPSSDSWTCADTSTERRSSDSWEVWGSASTNRNSNSDGGEGGEGTKKAVPPAVPTDDGWDNQNW

SEQ ID NO: 3231 - protein, 130 aa, Homo sapiens
  Payload ID: 721;
  Gene Symbol: ARFGAP1;
  Gene Name: ADP-ribosylation  factor GTPase activating prt 1;
  ENSP ID: ENSP00000427717
MASPRTRKVLKEVRVQDENNVCFECGAFNPQWVSVTYGIWICLECSGRHRGLGVHLSFVRSVTMDKWKDIELEKMKAGGNAKFREFLESQEDYDPCWSLQEKYNSRAAALFRDKSLWPAAECDRLLGQGF

SEQ ID NO: 3232 - protein, 79 aa, Homo sapiens
  Payload ID: 721;
  Gene Symbol: ARFGAP1;
  Gene Name: ADP-ribosylation  factor GTPase activating prt 1;
  ENSP ID: ENSP00000428355
MASPRTRKVLKEVRVQDENNVCFECGAFNPQWVSVTYGIWICLECSGRHRGLGVHLSFVRSVTMDKWKDIELEKMKAGG

SEQ ID NO: 3233 - protein, 244 aa, Homo sapiens
  Payload ID: 721;
  Gene Symbol: ARFGAP1;
  Gene Name: ADP-ribosylation  factor GTPase activating prt 1;
  ENSP ID: ENSP00000429674
MKAGGNAKFREFLESQEDYDPCWSLQEKYNSRAAALFRDKVVALAEGREWSLESSPAQNWTPPQPRTLPSMVHRVSGQPQSVTASSDKAFEDWLNDDLGSYQGAQGNRYVGFGNTPPPQKKEDDFLNNAMSSLYSTESCFVAQAADWRAVVRPQLTATSASQVQGWSSFTTGASRFASAAKEGATKFGSQASQKASELGHSLNENVLKPAQEKVKEGKIFDDVSSGVSQLASKVQGVGSKGWRD

SEQ ID NO: 3234 - protein, 153 aa, Homo sapiens
  Payload ID: 721;
  Gene Symbol: ARFGAP1;
  Gene Name: ADP-ribosylation  factor GTPase activating prt 1;
  ENSP ID: ENSP00000429770
MASPRTRKVLKEVRVKEGKIFDDVSSGVSQLASKVQGVGSKGWRDVTTFFSGKAEGPLDSPSEGHSYQNSGLDHFQNSNIDQSFWETFGSAEPTKTRKSPSSDSWTCADTSTERRSSDSWEVWGSASTNRNSNSDGGEGGEGTKKAVPPAVPT

SEQ ID NO: 3235 - protein, 361 aa, Homo sapiens
  Payload ID: 721;
  Gene Symbol: ARFGAP1;
  Gene Name: ADP-ribosylation  factor GTPase activating prt 1;
  Uniprot ID:  Q8N6T3;
  ENSP ID: ENSP00000430500
MRTTFVRSVTMDKWKDIELEKMKAGGNAKFREFLESQEDYDPCWSLQEKYNSRAAALFRDKVVALAEGREWSLESSPAQNWTPPQPRTLPSMVHRVSGQPQSVTASSDKAFEDWLNDDLGSYQGAQGNRYVGFGNTPPPQKKEDDFLNNAMSSLYSGWSSFTTGASRFASAAKEGATKFGSQASQKFWGHKQQPEPASELGHSLNENVLKPAQEKVKEGKIFDDVSSGVSQLASKGVGSKGWRDVTTFFSGKAEGPLDSPSEGHSYQNSGLDHFQNSNIDQSFWETFGSAEPTKTRKSPSSDSWTCADTSTERRSSDSWEVWGSASTNRNSNSDGGEGGEGTKKAVPPAVPTDDGWDNQNW

SEQ ID NO: 3236 - protein, 261 aa, Homo sapiens
  Payload ID: 721;
  Gene Symbol: ARFGAP1;
  Gene Name: ADP-ribosylation  factor GTPase activating prt 1;
  ENSP ID: ENSP00000430929
MASPRTRKVLKEVRVQDENNVCFECGAFNPQWVSVTYGIWICLECSGRHRGLGVHLSFVRSVTMDKWKDIELEKMKAGGNAKFREFLESQEDYDPCWSLQEKYNSRAAALFRDKVVALAEGREWSLESSPAQNWTPPQPRTLPSMVHRVSGQPQSVTASSDKAFEDWLNDDLGSYQGAQGNRYVGFGNTPPPQKKEDDFLNNAMSSLYSGWSSFTTGASRFASAAKEGATKFGSQASQKASELGHSLNENVLKPAQEKVKE

SEQ ID NO: 3237 - protein, 293 aa, Homo sapiens
  Payload ID: 721;
  Gene Symbol: ARFGAP1;
  Gene Name: ADP-ribosylation  factor GTPase activating prt 1;
  Uniprot ID:  Q8N6T3;
  ENSP ID: ENSP00000443716
MLSSESSWSLRRITILAGPCRRSTTAEPRPSLGIRVSGQPQSVTASSDKAFEDWLNDDLGSYQGAQGNRYVGFGNTPPPQKKEDDFLNNAMSSLYSGWSSFTTGASRFASAAKEGATKFGSQASQKASELGHSLNENVLKPAQEKVKEGKIFDDVSSGVSQLASKVQGVGSKGWRDVTTFFSGKAEGPLDSPSEGHSYQNSGLDHFQNSNIDQSFWETFGSAEPTKTRKSPSSDSWTCADTSTERRSSDSWEVWGSASTNRNSNSDGGEGGEGTKKAVPPAVPTDDGWDNQNW

SEQ ID NO: 3238 - protein, 271 aa, Homo sapiens
  Payload ID: 721;
  Gene Symbol: ARFGAP1;
  Gene Name: ADP-ribosylation  factor GTPase activating prt 1;
  ENSP ID: ENSP00000447037
MKAGGNAKFREFLESQEDYDPCWSLQEKYNSRAAALFRDKVVALAEGREWSLESSPAQNWTPPQPRTLPSMVHRVSGQPQSVTASSDKAFEDWLNDDLGSYQGAQGNRYVGFGNTPPPQKKEDDFLNNAMSSLYSGWSSFTTGASRFASAAKEGATKFGSQASQKASELGHSLNENVLKPAQEKVKEGKIFDDVSSGVSQLASKVQGVGSKGWRDVTTFFSGKAEGPLDSPSEGHSYQNSGLDHFQNSNIDQSFWETFGSAEPTKTRKSPS

SEQ ID NO: 3239 - protein, 122 aa, Homo sapiens
  Payload ID: 721;
  Gene Symbol: ARFGAP1;
  Gene Name: ADP-ribosylation  factor GTPase activating prt 1;
  ENSP ID: ENSP00000449515
MASPRTRKVLKEVRVQDENNVCFECGAFNPQWVSVTYGIWICLECSGRHRGLGVHLSFVRSVTMDKWKDIELEKMKAGGNAKFREFLESQEDYDPCWSLQEKYNSRAAALFRDKVVALAEGR

SEQ ID NO: 3240 - protein, 340 aa, Homo sapiens
  Payload ID: 721;
  Gene Symbol: ARFGAP1;
  Gene Name: ADP-ribosylation  factor GTPase activating prt 1;
  ENSP ID: ENSP00000449800
MKAGGNAKFREFLESQEDYDPCWSLQEKYNSRAAALFRDKVVALAEGREWSLESSPAQNWTPPQPRTLPSMVHRVSGQPQSVTASSDKAFEDWLNDDLGSYQGAQGNRYVGFGNTPPPQKKEDDFLNNAMSSLYSGWSSFTTGASRFASAAKEGATKFGSQASQKFWGHKQQPEPASELGHSLNENVLKPAQEKVKEGKIFDDVSSGVSQLASKGVGSKGWRDVTTFFSGKAEGPLDSPSEGHSYQNSGLDHFQNSNIDQSFWETFGSAEPTKTRKSPSSDSWTCADTSTERRSSDSWEVWGSASTNRNSNSDGGEGGEGTKKAVPPAVPTDDGWDNQNW

SEQ ID NO: 3241 - protein, 104 aa, Homo sapiens
  Payload ID: 721;
  Gene Symbol: ARFGAP1;
  Gene Name: ADP-ribosylation  factor GTPase activating prt 1;
  ENSP ID: ENSP00000449849
  MOD_RES (1)..(1): Any amino acid
XEPTKTRKSPSSDSWTCADTSTERRSSDSWEFFLFEESDWSGKDGNAGNDTGAHAAIRPPSAPESTPAWACAVRPASVVTLCGSPASAPSHHQVHQVHQTRPPQ

SEQ ID NO: 3242 - protein, 493 aa, Homo sapiens
  Payload ID: 722;
  Gene Symbol: ARFGAP2;
  Gene Name: ADP-ribosylation  factor GTPase activating prt 2;
  ENSP ID: ENSP00000400226
MAAEPNKTEIQTLFKRLRAVPTNKACFDCGAKNPSWASITYGVFLCIDCSGVHRSLGVHLSFIRSTELDSNWNWFQLRCMQVGGNANATAFFRQHGCTANDANTKYNSRAAQMYREKIRQLGSAALARHGTDPPAWDAPATEPSGTQQPAPSTESSGLAQPEHGPNTDLLGTSPKASLELKSSIIGKKKPAAAKKGLGAKKGLGAQKVSSQSFSEIERQAQVAEKLREQQAADAKKQAEESMVASMRLAYQELQIDRKKEEKKLQNLEGKKREQAERLGMGLVSRSSVSHSVLSEMQVIEQETPVSAKSSRSQLDLFDDVGTFASGPPKYKDNPFSLGESFGSRWDTDAAWGMDRVEEKEPEVTISSIRPISERATNRREVESRSSGLESSEARQKFAGAKAISSDMFFGREVDAEYEARSRLQQLSGSSAISSSDLFGDMDGAHGAGSVSLGNVLPTADIAQFKQGVKSVAGKMAVLANGVMNSLQDRYGSY

SEQ ID NO: 3243 - protein, 16 aa, Homo sapiens
  Payload ID: 722;
  Gene Symbol: ARFGAP2;
  Gene Name: ADP-ribosylation  factor GTPase activating prt 2;
  ENSP ID: ENSP00000431238
KVREQGARGVSRPAGA

SEQ ID NO: 3244 - protein, 238 aa, Homo sapiens
  Payload ID: 722;
  Gene Symbol: ARFGAP2;
  Gene Name: ADP-ribosylation  factor GTPase activating prt 2;
  ENSP ID: ENSP00000431684
MAAEPNKTEIQTLFKRLRAVPTNKACFDCGAKNPSWASITYGVFLCIDCSGVHRSLGVHLSFIRSTELDSNWNWFQLRCMQVGGNANATAFFRQHGCTANDANTKYNSRAAQMYREKIRQLGSAALARHGTDLWIDNMSSAVPNHSPEKKDSDFFTEHTQVLVGLGASCQQEWLTEASVIWPPFQPPAWDAPATEPSGTQQPAPSTESSGLAQPEHGPNTDLLGTSPKASLELKSSII

SEQ ID NO: 3245 - protein, 17 aa, Homo sapiens
  Payload ID: 722;
  Gene Symbol: ARFGAP2;
  Gene Name: ADP-ribosylation  factor GTPase activating prt 2;
  ENSP ID: ENSP00000431847
NKVREQGARGVSRPAGA

SEQ ID NO: 3246 - protein, 327 aa, Homo sapiens
  Payload ID: 722;
  Gene Symbol: ARFGAP2;
  Gene Name: ADP-ribosylation  factor GTPase activating prt 2;
  ENSP ID: ENSP00000431939
MAAEPNKTEIQTLFKRLRAVPTNKACFDCGAKNPSWASITYGVFLCIDCSGVHRSLGVHLSFIRSTELDSNWNWFQLRCMQVGGNANATAFFRQHGCTANDANTKYNSRAAQMYREKIRQLGSAALARHGTDLWIDNMSSAVPNHSPEKKDSDFFTEHTQEWLTEASVIWPPFQPPAWDAPATEPSGTQQPAPSTESSGLAQPEHGPNTDLLGTSPKASLELKSSIIGKKKPAAAKKGLGAKKGLGAQKVSSQSFSEIERQAQVAEKLREQQAADAKKQAEESMVASMRLAYQELQIDRKKEEKKLQNLEGKKREQAERLGMGLVSR

SEQ ID NO: 3247 - protein, 89 aa, Homo sapiens
  Payload ID: 722;
  Gene Symbol: ARFGAP2;
  Gene Name: ADP-ribosylation  factor GTPase activating prt 2;
  ENSP ID: ENSP00000432978
MAAEPNKTEIQTLFKRLRAVPTNKACFDCGAKNPSWASITYGVFLCIDCSGVHRSLGVHLSFIRSTELDSNWNWFQLRCMQVGGNANAN

SEQ ID NO: 3248 - protein, 94 aa, Homo sapiens
  Payload ID: 722;
  Gene Symbol: ARFGAP2;
  Gene Name: ADP-ribosylation  factor GTPase activating prt 2;
  ENSP ID: ENSP00000433108
MAAEPNKTEIQTLFKRLRAVPTNKACFDCGAKNPSWASITYGVFLCIDCSGVHRSLGVHLSFIRSTELDSNWNWFQLRCMQVGGNANAIITSLS

SEQ ID NO: 3249 - protein, 70 aa, Homo sapiens
  Payload ID: 722;
  Gene Symbol: ARFGAP2;
  Gene Name: ADP-ribosylation  factor GTPase activating prt 2;
  ENSP ID: ENSP00000433210
MAAEPNKTEIQTLFKRLRAVPTNKACFDCGAKNPSWASITYGVFLCIDCSGVHRSLGVHLSFISWVPRKA

SEQ ID NO: 3250 - protein, 237 aa, Homo sapiens
  Payload ID: 722;
  Gene Symbol: ARFGAP2;
  Gene Name: ADP-ribosylation  factor GTPase activating prt 2;
  ENSP ID: ENSP00000434022
  MOD_RES (1)..(1): Any amino acid
XVASMRLAYQELQIDRKKEEKKLQNLEGKKREQAESSVSHSVLSEMQVIEQETPVSAKSSRSQLDLFDDVGTFASGPPKYKDNPFSLGESFGSRWDTDAAWGMDRVEEKEPEVTISSIRPISERATNRREVESRSSGLESSEARQKFAGAKAISSDMFFGREVDAEYEARSRLQQLSGSSAISSSDLFGDMDGAHGAGSVSLGNVLPTADIAQFKQGVKSVAGKMAVLANGVMNSLQ

SEQ ID NO: 3251 - protein, 274 aa, Homo sapiens
  Payload ID: 722;
  Gene Symbol: ARFGAP2;
  Gene Name: ADP-ribosylation  factor GTPase activating prt 2;
  ENSP ID: ENSP00000434433
MAAEPNKTEIQTLFKRLRAVPTNKACFDCGAKNPSWASITYGVFLCIDCSGVHRSLGVHLSFIRSTELDSNWNWFQLRCMQVGGNANALGAKKGLGAQKVSSQSFSEIERQAQVAEKLREQQAADAKKQAEESMVASMRLAYQELQIDRKKEEKKLQNLEGKKREQAERLGMGLVSRSSVSHSVLSEMQVIEQETPVSAKSSRSQLDLFDDVGTFASGPPKYKDNPFSLGESFGSRWDTDAAWGMDRVEEKEPEVTISSIRPISERATNRREVE

SEQ ID NO: 3252 - protein, 521 aa, Homo sapiens
  Payload ID: 722;
  Gene Symbol: ARFGAP2;
  Gene Name: ADP-ribosylation  factor GTPase activating prt 2;
  Uniprot ID:  Q8N6H7;
  ENSP ID: ENSP00000434442
MAAEPNKTEIQTLFKRLRAVPTNKACFDCGAKNPSWASITYGVFLCIDCSGVHRSLGVHLSFIRSTELDSNWNWFQLRCMQVGGNANATAFFRQHGCTANDANTKYNSRAAQMYREKIRQLGSAALARHGTDLWIDNMSSAVPNHSPEKKDSDFFTEHTQPPAWDAPATEPSGTQQPAPSTESSGLAQPEHGPNTDLLGTSPKASLELKSSIIGKKKPAAAKKGLGAKKGLGAQKVSSQSFSEIERQAQVAEKLREQQAADAKKQAEESMVASMRLAYQELQIDRKKEEKKLQNLEGKKREQAERLGMGLVSRSSVSHSVLSEMQVIEQETPVSAKSSRSQLDLFDDVGTFASGPPKYKDNPFSLGESFGSRWDTDAAWGMDRVEEKEPEVTISSIRPISERATNRREVESRSSGLESSEARQKFAGAKAISSDMFFGREVDAEYEARSRLQQLSGSSAISSSDLFGDMDGAHGAGSVSLGNVLPTADIAQFKQGVKSVAGKMAVLANGVMNSLQDRYGSY

SEQ ID NO: 3253 - protein, 133 aa, Homo sapiens
  Payload ID: 722;
  Gene Symbol: ARFGAP2;
  Gene Name: ADP-ribosylation  factor GTPase activating prt 2;
  ENSP ID: ENSP00000434487
  MOD_RES (1)..(1): Any amino acid
XAAEPNKTEIQTLFKRLRAVPTNKACFDCGAKNPSWASITYGVFLCIDCSGVHRSLGVHLSFIRSTELDSNWNWFQLRCMQVGGNANATAFFRQHGCTANDANTKYNSRAAQMYREKIRQLGSAALARHGTDN

SEQ ID NO: 3254 - protein, 252 aa, Homo sapiens [sequence omitted]

SEQ ID NO: 3255 - protein, 173 aa, Homo sapiens
  Payload ID: 722;
  Gene Symbol: ARFGAP2;
  Gene Name: ADP-ribosylation  factor GTPase activating prt 2;
  ENSP ID: ENSP00000435488
MAAEPNKTEIQTLFKRLRAVPTNKACFDCGAKNPSWASITYGVFLCIDCSGVHRSLGVHLSFIRSTELDSNWNWFQLRCMQTAFFRQHGCTANDANTKYNSRAAQMYREKIRQLGSAALARHGTDLWIDNMSSAVPNHSPEKKDSDFFTEHTQPPAWDAPATEPSGTQQPAPS

SEQ ID NO: 3256 - protein, 110 aa, Homo sapiens
  Payload ID: 722;
  Gene Symbol: ARFGAP2;
  Gene Name: ADP-ribosylation  factor GTPase activating prt 2;
  ENSP ID: ENSP00000437070
MAAEPNKTEIQTLFKRLRAVPTNKACFDCGAKNPSWASITYGVFLCIDCSGVHRSLGVHLSFIRRLFFANMDAQPMMPTPNIIAELPRCTGRRSGSWGVRPWLGMALIFG

SEQ ID NO: 3257 - protein, 119 aa, Homo sapiens
  Payload ID: 722;
  Gene Symbol: ARFGAP2;
  Gene Name: ADP-ribosylation  factor GTPase activating prt 2;
  ENSP ID: ENSP00000437194
RSRTRPKSRLFLRGFAQFQPTRSTELDSNWNWFQLRCMQVGGNANATAFFRQHGCTANDANTKYNSRAAQMYREKIRQLGSAALARHGTDLWIDNMSSAVPNHSPEKKDSDFFTEHTQN

SEQ ID NO: 3258 - protein, 156 aa, Homo sapiens
  Payload ID: 722;
  Gene Symbol: ARFGAP2;
  Gene Name: ADP-ribosylation  factor GTPase activating prt 2;
  ENSP ID: ENSP00000437305
MAAEPNKTEIQTLFKRLRAVPTNKACFDCGAKNPSWASITYGVFLCIDCSGVHRSLGVHLSFIRYKDNPFSLGESFGSRWDTDAAWGMDRVEEKEPEVTISSIRPISERATNRREVESRSSGLESSEARQKFAGAKAISSDMFFGREVDAEYEARS

SEQ ID NO: 3259 - protein, 70 aa, Homo sapiens; identical to SEQ ID NO: 3249
  Payload ID: 722;
  Gene Symbol: ARFGAP2;
  Gene Name: ADP-ribosylation  factor GTPase activating prt 2;
  ENSP ID: ENSP00000486229

SEQ ID NO: 3260 - protein, 385 aa, Homo sapiens
  Payload ID: 722;
  Gene Symbol: ARFGAP2;
  Gene Name: ADP-ribosylation  factor GTPase activating prt 2;
  ENSP ID: ENSP00000486339
MAAEPNKTEIQTLFKRLRAVPTNKACFDCGAKNPSWASITYGVFLCIDCSGVHRSLGVHLSFIRSTELDSNWNWFQLRCMQVGGNANALGAKKGLGAQKVSSQSFSEIERQAQVAEKLREQQAADAKKQAEESMVASMRLAYQELQIDRKKEEKKLQNLEGKKREQAERLGMGLVSRSSVSHSVLSEMQVIEQETPVSAKSSRSQLDLFDDVGTFASGPPKYKDNPFSLGESFGSRWDTDAAWGMDRVEEKEPEVTISSIRPISERATNRREVESRSSGLESSEARQKFAGAKAISSDMFFGREVDAEYEARSRLQQLSGSSAISSSDLFGDMDGAHGAGSVSLGNVLPTADIAQFKQGVKSVAGKMAVLANGVMNSLQDRYGSY

SEQ ID NO: 3261 - protein, 516 aa, Homo sapiens
  Payload ID: 723;
  Gene Symbol: ARFGAP3;
  Gene Name: ADP-ribosylation  factor GTPase activating prt 3;
  Uniprot ID:  Q9NP61;
  ENSP ID: ENSP00000263245
MGDPSKQDILTIFKRLRSVPTNKVCFDCGAKNPSWASITYGVFLCIDCSGSHRSLGVHLSFIRSTELDSNWSWFQLRCMQVGGNASASSFFHQHGCSTNDTNAKYNSRAAQLYREKIKSLASQATRKHGTDLWLDSCVVPPLSPPPKEEDFFASHVSPEVSDTAWASAIAEPSSLTSRPVETTLENNEGGQEQGPSVEGLNVPTKATLEVSSIIKKKPNQAKKGLGAKKGSLGAQKLANTCFNEIEKQAQAADKMKEQEDLAKVVSKEESIVSSLRLAYKDLEIQMKKDEKMNISGKKNVDSDRLGMGFGNCRSVISHSVTSDMQTIEQESPIMAKPRKKYNDDSDDSYFTSSSSYFDEPVELRSSSFSSWDDSSDSYWKKETSKDTETVLKTTGYSDRPTARRKPDYEPVENTDEAQKKFGNVKAISSDMYFGRQSQADYETRARLERLSASSSISSADLFEEPRKQPAGNYSLSSVLPNAPDMAQFKQGVRSVAGKLSVFANGVVTSIQDRYGS

SEQ ID NO: 3262 - protein, 472 aa, Homo sapiens
  Payload ID: 723;
  Gene Symbol: ARFGAP3;
  Gene Name: ADP-ribosylation  factor GTPase activating prt 3;
  Uniprot ID:  Q9NP61;
  ENSP ID: ENSP00000388791
MGDPSKQDILTIFKRLRSVPTNKVCFDCGAKNPSWASITYGVFLCIDCSGSHRSLGVHLSFIRSTELDSNWSWFQLRCMQVGGNASALWLDSCVVPPLSPPPKEEDFFASHVSPEVSDTAWASAIAEPSSLTSRPVETTLENNEGGQEQGPSVEGLNVPTKATLEVSSIIKKKPNQAKKGLGAKKGSLGAQKLANTCFNEIEKQAQAADKMKEQEDLAKVVSKEESIVSSLRLAYKDLEIQMKKDEKMNISGKKNVDSDRLGMGFGNCRSVISHSVTSDMQTIEQESPIMAKPRKKYNDDSDDSYFTSSSSYFDEPVELRSSSFSSWDDSSDSYWKKETSKDTETVLKTTGYSDRPTARRKPDYEPVENTDEAQKKFGNVKAISSDMYFGRQSQADYETRARLERLSASSSISSADLFEEPRKQPAGNYSLSSVLPNAPDMAQFKQGVRSVAGKLSVFANGVVTSIQDRYGS

SEQ ID NO: 3263 - protein, 152 aa, Homo sapiens
  Payload ID: 723;
  Gene Symbol: ARFGAP3;
  Gene Name: ADP-ribosylation  factor GTPase activating prt 3;
  ENSP ID: ENSP00000403520
MGDPSKQDILTIFKRLRSVPTNKVCFDCGAKNPSWASITYGVFLCIDCSGSHRSLGVHLSFIRSTELDSNWSWFQLRCMQVGGNASAVSDTAWASAIAEPSSLTSRPVETTLENNEGGQEQGPSVEGLNVPTKATLEVSSIIKKKPNQAKKG

SEQ ID NO: 3264 - protein, 273 aa, Homo sapiens
  Payload ID: 723;
  Gene Symbol: ARFGAP3;
  Gene Name: ADP-ribosylation  factor GTPase activating prt 3;
  ENSP ID: ENSP00000403995
  MOD_RES (1)..(1): Any amino acid
XLALFQVSDTAWASAIAEPSSLTSRPVETTLENNEGGQEQGPSVEGLNVPTKATLEVSSIIKKKPNQAKKGLGAKKGSLGAQKLANTCFNEIEKQAQAADKMKEQEDLAKVVSKEESIVSSLRLAYKDLEIQMKKDEKMNISGKKNVDSDRLGMGFGNCRSVISHSVTSDMQTIEQESPIMAKPRKKYNDDSDDSYFTSSSRPTARRKPDYEPVENTDEAQKKFGNVKAISSDMYFGRQSQADYETRARLERLSASSSISSADLFEEPRKQPA

SEQ ID NO: 3265 - protein, 92 aa, Homo sapiens
  Payload ID: 723;
  Gene Symbol: ARFGAP3;
  Gene Name: ADP-ribosylation  factor GTPase activating prt 3;
  ENSP ID: ENSP00000407734
MVCFDCGAKNPSWASITYGVFLCIDCSGSHRSLGVHLSFIRSTELDSNWSWFQLRCMQVGGNASASSFFHQHGCSTNDTNAKYNSRAAQLYR

SEQ ID NO: 3266 - protein, 1849 aa, Homo sapiens
  Payload ID: 724;
  Gene Symbol: ARFGEF1;
  Gene Name: ADP-ribosylation  factor guanine nucleotide-exchange factor 1 (brefeldin A-inhibited);
  Uniprot ID:  Q9Y6D6;
  ENSP ID: ENSP00000262215
MYEGKKTKNMFLTRALEKILADKEVKKAHHSQLRKACEVALEEIKAETEKQSPPHGEAKAGSSTLPPVKSKTNFIEADKYFLPFELACQSKCPRIVSTSLDCLQKLIAYGHLTGNAPDSTTPGKKLIDRIIETICGCFQGPQTDEGVQLQIIKALLTAVTSQHIEIHEGTVLQAVRTCYNIYLASKNLINQTTAKATLTQMLNVIFARMENQALQEAKQMEKERHRQHHHLLQSPVSHHEPESPQLRYLPPQTVDHISQEHEGDLDLHTNDVDKSLQDDTEPENGSDISSAENEQTEADQATAAETLSKNEVLYDGENHDCEEKPQDIVQNIVEEMVNIVVGDMGEGTTINASADGNIGTIEDGSDSENIQANGIPGTPISVAYTPSLPDDRLSVSSNDTQESGNSSGPSPGAKFSHILQKDAFLVFRSLCKLSMKPLSDGPPDPKSHELRSKILSLQLLLSILQNAGPIFRTNEMFINAIKQYLCVALSKNGVSSVPEVFELSLSIFLTLLSNFKTHLKMQIEVFFKEIFLYILETSTSSFDHKWMVIQTLTRICADAQSVVDIYVNYDCDLNAANIFERLVNDLSKIAQGRGSQELGMSNVQELSLRKKGLECLVSILKCMVEWSKDQYVNPNSQTTLGQEKPSEQEMSEIKHPETINRYGSLNSLESTSSSGIGSYSTQMSGTDNPEQFEVLKQQKEIIEQGIDLFNKKPKRGIQYLQEQGMLGTTPEDIAQFLHQEERLDSTQVGEFLGDNDKFNKEVMYAYVDQHDFSGKDFVSALRMFLEGFRLPGEAQKIDRLMEKFAARYLECNQGQTLFASADTAYVLAYSIIMLTTDLHSPQVKNKMTKEQYIKMNRGINDSKDLPEEYLSAIYNEIAGKKISMKETKELTIPTKSSKQNVASEKQRRLLYNLEMEQMAKTAKALMEAVSHVQAPFTSATHLEHVRPMFKLAWTPFLAAFSVGLQDCDDTEVASLCLEGIRCAIRIACIFSIQLERDAYVQALARFTLLTVSSGITEMKQKNIDTIKTLITVAHTDGNYLGNSWHEILKCISQLELAQLIGTGVKPRYISGTVRGREGSLTGTKDQAPDEFVGLGLVGGNVDWKQIASIQESIGETSSQSVVVAVDRIFTGSTRLDGNAIVDFVRWLCAVSMDELLSTTHPRMFSLQKIVEISYYNMGRIRLQWSRIWEVIGDHFNKVGCNPNEDVAIFAVDSLRQLSMKFLEKGELANFRFQKDFLRPFEHIMKRNRSPTIRDMVVRCIAQMVNSQAANIRSGWKNIFSVFHLAASDQDESIVELAFQTTGHIVTLVFEKHFPATIDSFQDAVKCLSEFACNAAFPDTSMEAIRLIRHCAKYVSDRPQAFKEYTSDDMNVAPEDRVWVRGWFPILFELSCIINRCKLDVRTRGLTVMFEIMKTYGHTYEKHWWQDLFRIVFRIFDNMKLPEQQTEKAEWMTTTCNHALYAICDVFTQYLEVLSDVLLDDIFAQLYWCVQQDNEQLARSGTNCLENVVILNGEKFTLEIWDKTCNCTLDIFKTTIPHALLTWRPNSGETAPPPPSPVSEKPLDTISQKSVDIHDSIQPRSVDNRPQAPLVSASAVNEEVSKIKSTAKFPEQKLFAALLIKCVVQLELIQTIDNIVFFPATSKKEDAENLAAAQRDAVDFDVRVDTQDQGMYRFLTSQQLFKLLDCLLESHRFAKAFNSNNEQRTALWKAGFKGKSKPNLLKQETSSLACGLRILFRMYMDESRVSAWEEVQQRLLNVCSEALSYFLTLTSESHREAWTNLLLLFLTKVLKISDNRFKAHASFYYPLLCEIMQFDLIPELRAVLRRFFLRIGVVFQISQPPEQELGINKQ

SEQ ID NO: 3267 - protein, 1279 aa, Homo sapiens
  Payload ID: 724;
  Gene Symbol: ARFGEF1;
  Gene Name: ADP-ribosylation  factor guanine nucleotide-exchange factor 1 (brefeldin A-inhibited);
  ENSP ID: ENSP00000428429
  MOD_RES (1)..(1): Any amino acid
XIEVFFKEIFLYILETSTSSFDHKWMVIQTLTRICADAQSVVDIYVNYDCDLNAANIFERLVNDLSKIAQGRGSQELGMSNVQELSLRKKGLECLVSILKCMVEWSKDQYVNPNSQTTLGQEKPSEQEMSEIKHPETINRYGSLNSLESTSSSGIGSYSTQMSGTDNPEQFEVLKQQKEIIEQGIDLFNKKPKRGIQYLQEQGMLGTTPEDIAQFLHQEERLDSTQVGEFLGDNDKFNKEVMYAYVDQHDFSGKDFVSALRMFLEGFRLPGEAQKIDRLMEKFAARYLECNQGQTLFASADTAYVLAYSIIMLTTDLHSPQVKNKMTKEQYIKMNRGINDSKDLPEEYLSAIYNEIAGKKISMKETKELTIPTKSSKQNVASEKQRRLLYNLEMEQMAKTAKALMEAVSHVQAPFTSATHLEHVRPMFKLAWTPFLAAFSVGLQDCDDTEVASLCLEGIRCAIRIACIFSIQLERDAYVQALARFTLLTVSSGITEMKQKNIDTIKTLITVAHTDGNYLGNSWHEILKCISQLELAQLIGTGVKPRYISGTVRGREGSLTGTKDQAPDEFVGLGLVGGNVDWKQIASIQESIGETSSQSVVVAVDRIFTGSTRLDGNAIVDFVRWLCAVSMDELLSTTHPRMFSLQKIVEISYYNMGRIRLQWSRIWEVIGDHFNKVGCNPNEDVAIFAVDSLRQLSMKFLEKGELANFRFQKDFLRPFEHIMKRNRSPTIRDMVVRCIAQMVNSQAANIRSGWKNIFSVFHLAASDQDESIVELAFQTTGHIVTLVFEKHFPATIDSFQDAVKCLSEFACNAAFPDTSMEAIRLIRHCAKYVSDRPQAFKEYTSDDMNVAPEDRVWVRGWFPILFELSCIINRCKLDVRTRGLTVMFEIMKTYGHTYEKHWWQDLFRIVFRIFDNMKLPEQQTEKAEWMTTTCNHALYAICDVFTQYLEVLSDVLLDDIFAQLYWCVQQDNEQLARSGTNCLENVVILNGEKFTLEIWDKTCNCTLDIFKTTIPHALLTWRPNSGETAPPPPSPVSEKPLDTISQKSVDIHDSIQPRSVDNRPQAPLVSASAVNEEVSKIKSTAKFPEQKLFAALLIKCVVQLELIQTIDNIVFFPATSKKEDAENLAAAQRDAVDFDVRVDTQDQGMYRFLTSQQLFKLLDCLLESHRFAKAFNSNNEQRTALWKAGFKGKSKPNLLKQETSSLACGLRILFRMYMDESRVSAWEEVQQRLLNVCSEALSYFLTLTSESHREAWTNLLLLFLTKVLKISDNRTKRTL

SEQ ID NO: 3268 - protein, 118 aa, Homo sapiens
  Payload ID: 724;
  Gene Symbol: ARFGEF1;
  Gene Name: ADP-ribosylation  factor guanine nucleotide-exchange factor 1 (brefeldin A-inhibited);
  ENSP ID: ENSP00000429002
MYEGKKTKNMFLTRALEKILADKEVKKAHHSQLRKACEVALEEIKAETEKQSPPHGEAKAGSSTLPPVKSKTNFIEADKYFLPFELACQSKCPRIVSTSLDCLQKLIAYGHLTGNAPD

SEQ ID NO: 3269 - protein, 192 aa, Homo sapiens
  Payload ID: 724;
  Gene Symbol: ARFGEF1;
  Gene Name: ADP-ribosylation  factor guanine nucleotide-exchange factor 1 (brefeldin A-inhibited);
  ENSP ID: ENSP00000429560
  MOD_RES (1)..(1): Any amino acid
XRLLLMKKSAKLNLQQLELIQTIDNIVFFPATSKKEDAENLAAAQRDAVDFDVRVDTQDQGMYRFLTSQQLFKLLDCLLESHRFAKAFNSNNEQRTALWKAGFKGKSKPNLLKQETSSLACGLRILFRMYMDESRVSAWEEVQQRLLNVCSEALSYFLTLTSESHREAWTNLLLLFLTKVLKISDNRTKRTL

SEQ ID NO: 3270 - protein, 825 aa, Homo sapiens
  Payload ID: 724;
  Gene Symbol: ARFGEF1;
  Gene Name: ADP-ribosylation  factor guanine nucleotide-exchange factor 1 (brefeldin A-inhibited);
  ENSP ID: ENSP00000430891
  MOD_RES (1)..(1): Any amino acid
XGNSWHEILKCISQLELAQLIGTGVKPRYISGTVRGREGSLTGTKDQAPDEFVGLGLVGGNVDWKQIASIQESIGETSSQSVVVAVDRIFTGSTRLDGNAIVDFVRWLCAVSMDELLSTTHPRMFSLQKIVEISYYNMGRIRLQWSRIWEVIGDHFNKVGCNPNEDVAIFAVDSLRQLSMKFLEKGELANFRFQKDFLRPFEHIMKRNRSPTIRDMVVRCIAQMVNSQAANIRSGWKNIFSVFHLAASDQDESIVELAFQTTGHIVTLVFEKHFPATIDSFQDAVKCLSEFACNAAFPDTSMEAIRLIRHCAKYVSDRPQAFKEYTSDDMNVAPEDRVWVRGWFPILFELSCIINRCKLDVRTRGLTVMFEIMKTYGHTYEKHWWQDLFRIVFRIFDNMKLPEQQTEKAEWMTTTCNHALYAICDVFTQYLEVLSDVLLDDIFAQLYWCVQQDNEQLARSGTNCLENVVILNGEKFTLEIWDKTCNCTLDIFKTTIPHALLTWRPNSGETAPPPPSPVSEKPLDTISQKSVDIHDSIQPRSVDNRPQAPLVSASAVNEEVSKIKSTAKFPEQKLFAALLIKCVVQLELIQTIDNIVFFPATSKKEDAENLAAAQRDAVDFDVRVDTQDQGMYRFLTSQQLFKLLDCLLESHRFAKAFNSNNEQRTALWKAGFKGKSKPNLLKQETSSLACGLRILFRMYMDESRVSAWEEVQQRLLNVCSEALSYFLTLTSESHREAWTNLLLLFLTKVLKISDNRVSMRLRIQPHISSPIRIGMRGPRAAVQELSEMNQAVPRLHCCLCKATSGLAVSSSVLAFLPPYPALFTN

SEQ ID NO: 3271 - protein, 1785 aa, Homo sapiens
  Payload ID: 725;
  Gene Symbol: ARFGEF2;
  Gene Name: ADP-ribosylation  factor guanine nucleotide-exchange factor 2 (brefeldin A-inhibited);
  Uniprot ID:  Q9Y6D5;
  ENSP ID: ENSP00000360985
MQESQTKSMFVSRALEKILADKEVKRPQHSQLRRACQVALDEIKAEIEKQRLGTAAPPKANFIEADKYFLPFELACQSKSPRVVSTSLDCLQKLIAYGHITGNAPDSGAPGKRLIDRIVETICSCFQGPQTDEGVQLQIIKALLTAVTSPHIEIHEGTILQTVRTCYNIYLASKNLINQTTAKATLTQMLNVIFTRMENQVLQEARELEKPIQSKPQSPVIQAAAVSPKFVRLKHSQAQSKPTTPEKTDLTNGEHARSDSGKVSTENGDAPRERGSSLSGTDDGAQEVVKDILEDVVTSAIKEAAEKHGLTEPERVLGELECQECAIPPGVDENSQTNGIADDRQSLSSADNLESDAQGHQVAARFSHVLQKDAFLVFRSLCKLSMKPLGEGPPDPKSHELRSKVVSLQLLLSVLQNAGPVFRTHEMFINAIKQYLCVALSKNGVSSVPDVFELSLAIFLTLLSNFKMHLKMQIEVFFKEIFLNILETSTSSFEHRWMVIQTLTRICADAQCVVDIYVNYDCDLNAANIFERLVNDLSKIAQGRSGHELGMTPLQELSLRKKGLECLVSILKCMVEWSKDLYVNPNHQTSLGQERLTDQEIGDGKGLDMARRCSVTSMESTVSSGTQTTVQDDPEQFEVIKQQKEIIEHGIELFNKKPKRGIQFLQEQGMLGTSVEDIAQFLHQEERLDSTQVGDFLGDSARFNKEVMYAYVDQLDFCEKEFVSALRTFLEGFRLPGEAQKIDRLMEKFAARYIECNQGQTLFASADTAYVLAYSIIMLTTDLHSPQVKNKMTKEQYIKMNRGINDSKDLPEEYLSSIYEEIEGKKIAMKETKELTIATKSTKQNVASEKQRRLLYNLEMEQMAKTAKALMEAVSHAKAPFTSATHLDHVRPMFKLVWTPLLAAYSIGLQNCDDTEVASLCLEGIRCAIRIACIFGMQLERDAYVQALARFSLLTASSSITEMKQKNIDTIKTLITVAHTDGNYLGNSWHEILKCISQLELAQLIGTGVKTRYLSGSGREREGSLKGHTLAGEEFMGLGLGNLVSGGVDKRQMASFQESVGETSSQSVVVAVDRIFTGSTRLDGNAIVDFVRWLCAVSMDELASPHHPRMFSLQKIVEISYYNMNRIRLQWSRIWHVIGDHFNKVGCNPNEDVAIFAVDSLRQLSMKFLEKGELANFRFQKDFLRPFEHIMKKNRSPTIRDMAIRCIAQMVNSQAANIRSGWKNIFAVFHQAASDHDGNIVELAFQTTCHIVTTIFQHHFPAAIDSFQDAVKCLSEFACNAAFPDTSMEAIRLIRFCGKYVSERPRVLQEYTSDDMNVAPGDRVWVRGWFPILFELSCIINRCKLDVRTRGLTVMFEIMKSYGHTFEKHWWQDLFRIVFRIFDNMKLPEQLSEKSEWMTTTCNHALYAICDVFTQFYEALNEVLLSDVFAQLQWCVKQDNEQLARSGTNCLENLVISNGEKFSPEVWDETCNCMLDIFKTTIPHVLLTWRPVGMEEDSSEKHLDVDLDRQSLSSIDKNPSERGQSQLSNPTDDSWKGRPYANQKLFASLLIKCVVQLELIQTIDNIVFYPATSKKEDAEHMVAAQQDTLDADIHIETEDQGMYKYMSSQHLFKLLDCLQESHSFSKAFNSNYEQRTVLWRAGFKGKSKPNLLKQETSSLACCLRILFRMYVDENRRDSWEEIQQRLLTVCSEALAYFITVNSESHREAWTSLLLLLLTKTLKINDEKFKAHASMYYPYLCEIMQFDLIPELRAVLRKFFLRIGVVYKIWIPEEPSQVPAALSPVW

SEQ ID NO: 3272 - protein, 373 aa, Homo sapiens
  Payload ID: 726;
  Gene Symbol: ARFIP1;
  Gene Name: ADP-ribosylation factor interacting prt 1;
  Uniprot ID:  P53367;
  ENSP ID: ENSP00000296557
MAQESPKNSAAEIPVTSNGEVDDSREHSFNRDLKHSLPSGLGLSETQITSHGFDNTKEGVIEAGAFQGSPAPPLPSVMSPSRVAASRLAQQGSDLIVPAGGQRTQTKSGPVILADEIKNPAMEKLELVRKWSLNTYKCTRQIISEKLGRGSRTVDLELEAQIDILRDNKKKYENILKLAQTLSTQLFQMVHTQRQLGDAFADLSLKSLELHEEFGYNADTQKLLAKNGETLLGAINFFIASVNTLVNKTIEDTLMTVKQYESARIEYDAYRTDLEELNLGPRDANTLPKIEQSQHLFQAHKEKYDKMRNDVSVKLKFLEENKVKVLHNQLVLFHNAIAAYFAGNQKQLEQTLKQFHIKLKTPGVDAPSWLEEQ

SEQ ID NO: 3273 - protein, 341 aa, Homo sapiens
  Payload ID: 726;
  Gene Symbol: ARFIP1;
  Gene Name: ADP-ribosylation factor interacting prt 1;
  Uniprot ID:  P53367;
  ENSP ID: ENSP00000348360
MAQESPKNSAAEIPVTSNGEVDDSREHSFNRDLKHSLPSGLGLSETQITSHGFDNTKEGVIEAGAFQGGQRTQTKSGPVILADEIKNPAMEKLELVRKWSLNTYKCTRQIISEKLGRGSRTVDLELEAQIDILRDNKKKYENILKLAQTLSTQLFQMVHTQRQLGDAFADLSLKSLELHEEFGYNADTQKLLAKNGETLLGAINFFIASVNTLVNKTIEDTLMTVKQYESARIEYDAYRTDLEELNLGPRDANTLPKIEQSQHLFQAHKEKYDKMRNDVSVKLKFLEENKVKVLHNQLVLFHNAIAAYFAGNQKQLEQTLKQFHIKLKTPGVDAPSWLEEQ

SEQ ID NO: 3274 - protein, 341 aa, Homo sapiens; identical to SEQ ID NO: 3273
  Payload ID: 726;
  Gene Symbol: ARFIP1;
  Gene Name: ADP-ribosylation factor interacting prt 1;
  Uniprot ID:  P53367;
  ENSP ID: ENSP00000384189

SEQ ID NO: 3275 - protein, 373 aa, Homo sapiens; identical to SEQ ID NO: 3272
  Payload ID: 726;
  Gene Symbol: ARFIP1;
  Gene Name: ADP-ribosylation factor interacting prt 1;
  Uniprot ID:  P53367;
  ENSP ID: ENSP00000395083

SEQ ID NO: 3276 - protein, 193 aa, Homo sapiens
  Payload ID: 726;
  Gene Symbol: ARFIP1;
  Gene Name: ADP-ribosylation factor interacting prt 1;
  Uniprot ID:  P53367;
  ENSP ID: ENSP00000396653
MAQESPKNSAAEIPVTSNGEVDDSREHSFNREEFGYNADTQKLLAKNGETLLGAINFFIASVNTLVNKTIEDTLMTVKQYESARIEYDAYRTDLEELNLGPRDANTLPKIEQSQHLFQAHKEKYDKMRNDVSVKLKFLEENKVKVLHNQLVLFHNAIAAYFAGNQKQLEQTLKQFHIKLKTPGVDAPSWLEEQ

SEQ ID NO: 3277 - protein, 341 aa, Homo sapiens; identical to SEQ ID NO: 3273
  Payload ID: 726;
  Gene Symbol: ARFIP1;
  Gene Name: ADP-ribosylation factor interacting prt 1;
  Uniprot ID:  P53367;
  ENSP ID: ENSP00000479111

SEQ ID NO: 3278 - protein, 341 aa, Homo sapiens
  Payload ID: 727;
  Gene Symbol: ARFIP2;
  Gene Name: ADP-ribosylation  factor interacting prt 2;
  Uniprot ID:  P53365;
  ENSP ID: ENSP00000254584
MTDGILGKAATMEIPIHGNGEARQLPEDDGLEQDLQQVMVSGPNLNETSIVSGGYGGSGDGLIPTGSGRHPSHSTTPSGPGDEVARGIAGEKFDIVKKWGINTYKCTKQLLSERFGRGSRTVDLELELQIELLRETKRKYESVLQLGRALTAHLYSLLQTQHALGDAFADLSQKSPELQEEFGYNAETQKLLCKNGETLLGAVNFFVSSINTLVTKTMEDTLMTVKQYEAARLEYDAYRTDLEELSLGPRDAGTRGRLESAQATFQAHRDKYEKLRGDVAIKLKFLEENKIKVMHKQLLLFHNAVSAYFAGNQKQLEQTLQQFNIKLRPPGAEKPSWLEEQ

SEQ ID NO: 3279 - protein, 341 aa, Homo sapiens; identical to SEQ ID NO: 3278
  Payload ID: 727;
  Gene Symbol: ARFIP2;
  Gene Name: ADP-ribosylation  factor interacting prt 2;
  Uniprot ID:  P53365;
  ENSP ID: ENSP00000379998

SEQ ID NO: 3280 - protein, 256 aa, Homo sapiens
  Payload ID: 727;
  Gene Symbol: ARFIP2;
  Gene Name: ADP-ribosylation  factor interacting prt 2;
  Uniprot ID:  P53365;
  ENSP ID: ENSP00000391427
MKPALCLVAMGALVMDSSPQCTKQLLSERFGRGSRTVDLELELQIELLRETKRKYESVLQLGRALTAHLYSLLQTQHALGDAFADLSQKSPELQEEFGYNAETQKLLCKNGETLLGAVNFFVSSINTLVTKTMEDTLMTVKQYEAARLEYDAYRTDLEELSLGPRDAGTRGRLESAQATFQAHRDKYEKLRGDVAIKLKFLEENKIKVMHKQLLLFHNAVSAYFAGNQKQLEQTLQQFNIKLRPPGAEKPSWLEEQ

SEQ ID NO: 3281 - protein, 303 aa, Homo sapiens
  Payload ID: 727;
  Gene Symbol: ARFIP2;
  Gene Name: ADP-ribosylation  factor interacting prt 2;
  Uniprot ID:  P53365;
  ENSP ID: ENSP00000398375
MVSGPNLNETSIVSGGYGGSGDGLIPTGSGRHPSHSTTPSGPGDEVARGIAGEKFDIVKKWGINTYKCTKQLLSERFGRGSRTVDLELELQIELLRETKRKYESVLQLGRALTAHLYSLLQTQHALGDAFADLSQKSPELQEEFGYNAETQKLLCKNGETLLGAVNFFVSSINTLVTKTMEDTLMTVKQYEAARLEYDAYRTDLEELSLGPRDAGTRGRLESAQATFQAHRDKYEKLRGDVAIKLKFLEENKIKVMHKQLLLFHNAVSAYFAGNQKQLEQTLQQFNIKLRPPGAEKPSWLEEQ

SEQ ID NO: 3282 - protein, 202 aa, Homo sapiens
  Payload ID: 727;
  Gene Symbol: ARFIP2;
  Gene Name: ADP-ribosylation  factor interacting prt 2;
  ENSP ID: ENSP00000434124
MTDGILGKAATMEIPIHGNGEARQLPEDDGLEQDLQQVMVSGPNLNETSIVSGGYGGSGDGLIPTGSGRHPSHSTTPSGPGDEVARGIAGEKFDIVKKWGINTYKCTKQLLSERFGRGSRTVDLELELQIELLRETKRKYESVLQLGRALTAHLYSLLQTQHALGDAFADLSQKSPELQPTGRTPSGWAQPYPQQHSPVEAA

SEQ ID NO: 3283 - protein, 159 aa, Homo sapiens
  Payload ID: 727;
  Gene Symbol: ARFIP2;
  Gene Name: ADP-ribosylation  factor interacting prt 2;
  ENSP ID: ENSP00000434564
MTDGILGKAATMEIPIHGNGEARQLPEDDGLEQDLQQVMVSGPNLNETSIVSGGYGGSGDGLIPTGSGRHPSHSTTPSGPGDEVARGIAGEKFDIVKKWGINTYKCTKQLLSERFGRGSRTVDLELELQIELLRETKRKRNLATMQRHRNYYARMGKRC

SEQ ID NO: 3284 - protein, 374 aa, Homo sapiens
  Payload ID: 727;
  Gene Symbol: ARFIP2;
  Gene Name: ADP-ribosylation  factor interacting prt 2;
  ENSP ID: ENSP00000484121
MTDGILGKAATMEIPIHGNGEARQLPEDDGLEQDLQQVMVSGPNLNETSIVSGGYGGSGDGLIPTGKSISCARREVWVGPQRCLVYLREAGVRELDPLGSGRHPSHSTTPSGPGDEVARGIAGEKFDIVKKWGINTYKCTKQLLSERFGRGSRTVDLELELQIELLRETKRKYESVLQLGRALTAHLYSLLQTQHALGDAFADLSQKSPELQEEFGYNAETQKLLCKNGETLLGAVNFFVSSINTLVTKTMEDTLMTVKQYEAARLEYDAYRTDLEELSLGPRDAGTRGRLESAQATFQAHRDKYEKLRGDVAIKLKFLEENKIKVMHKQLLLFHNAVSAYFAGNQKQLEQTLQQFNIKLRPPGAEKPSWLEEQ

SEQ ID NO: 3285 - protein, 154 aa, Homo sapiens
  Payload ID: 728;
  Gene Symbol: ARFRP1;
  Gene Name: ADP-ribosylation  factor related prt 1;
  Uniprot ID:  Q13795;
  ENSP ID: ENSP00000476756
MSLSKITTTVGLNIGTVDVGKARLMFWDLGGQEELQSLWDKYYAECHGVIYVIDSTDEERLAESKQAFEKVVTSEALCGVPVLVLANKQDVETCLSIPDIKTAFSDCTSKIGRRDCLTQACSALTGKGVREGIEWMVKCVVRNVHRPPRQRDIT

SEQ ID NO: 3286 - protein, 173 aa, Homo sapiens
  Payload ID: 728;
  Gene Symbol: ARFRP1;
  Gene Name: ADP-ribosylation  factor related prt 1;
  Uniprot ID:  Q13795;
  ENSP ID: ENSP00000479058
MYTLLSGLYKYMFQKDEYCILILGLDNAGKTTFLEQSKTRFNKNYKGMSLSKITTTVGLNIGTVDVGKARLMFWDLGGQEELQSLWDKYYAECHGVIYVIDSTDEERLAESKQAFEKVVTSEALCGVPVLVLANKQDVETCLSIPDIKTAFSDCTSKIGRRDCLTQACSALTG

SEQ ID NO: 3287 - protein, 201 aa, Homo sapiens
  Payload ID: 728;
  Gene Symbol: ARFRP1;
  Gene Name: ADP-ribosylation  factor related prt 1;
  Uniprot ID:  Q13795;
  ENSP ID: ENSP00000479616
MYTLLSGLYKYMFQKDEYCILILGLDNAGKTTFLEQSKTRFNKNYKGMSLSKITTTVGLNIGTVDVGKARLMFWDLGGQEELQSLWDKYYAECHGVIYVIDSTDEERLAESKQAFEKVVTSEALCGVPVLVLANKQDVETCLSIPDIKTAFSDCTSKIGRRDCLTQACSALTGKGVREGIEWMVKCVVRNVHRPPRQRDIT

SEQ ID NO: 3288 - protein, 201 aa, Homo sapiens; identical to SEQ ID NO: 3287
  Payload ID: 728;
  Gene Symbol: ARFRP1;
  Gene Name: ADP-ribosylation  factor related prt 1;
  Uniprot ID:  Q13795;
  ENSP ID: ENSP00000479940

SEQ ID NO: 3289 - protein, 121 aa, Homo sapiens
  Payload ID: 728;
  Gene Symbol: ARFRP1;
  Gene Name: ADP-ribosylation  factor related prt 1;
  Uniprot ID:  Q13795;
  ENSP ID: ENSP00000481446
MYTLLSGLYKYMFQKDEYCILILGLDNAGKTTFLEQSKTRFNKNYKGMSLSKITTTVGLNIGTVDVGKARLMFWDLGGQEELQSLWDKYYAECHGVIYVIDSTDEERLAESKQAFDVPLNP

SEQ ID NO: 3290 - protein, 121 aa, Homo sapiens; identical to SEQ ID NO: 3289
  Payload ID: 728;
  Gene Symbol: ARFRP1;
  Gene Name: ADP-ribosylation  factor related prt 1;
  Uniprot ID:  Q13795;
  ENSP ID: ENSP00000483130

SEQ ID NO: 3291 - protein, 201 aa, Homo sapiens; identical to SEQ ID NO: 3287
  Payload ID: 728;
  Gene Symbol: ARFRP1;
  Gene Name: ADP-ribosylation  factor related prt 1;
  Uniprot ID:  Q13795;
  ENSP ID: ENSP00000483486

SEQ ID NO: 3292 - protein, 154 aa, Homo sapiens; identical to SEQ ID NO: 3285
  Payload ID: 728;
  Gene Symbol: ARFRP1;
  Gene Name: ADP-ribosylation  factor related prt 1;
  Uniprot ID:  Q13795;
  ENSP ID: ENSP00000484109

SEQ ID NO: 3293 - protein, 181 aa, Homo sapiens
  Payload ID: 729;
  Gene Symbol: ARL1;
  Gene Name: ADP-ribosylation factor-like 1;
  Uniprot ID:  P40616;
  ENSP ID: ENSP00000261636
MGGFFSSIFSSLFGTREMRILILGLDGAGKTTILYRLQVGEVVTTIPTIGFNVETVTYKNLKFQVWDLGGQTSIRPYWRCYYSNTDAVIYVVDSCDRDRIGISKSELVAMLEEEELRKAILVVFANKQDMEQAMTSSEMANSLGLPALKDRKWQIFKTSATKGTGLDEAMEWLVETLKSRQ

SEQ ID NO: 3294 - protein, 135 aa, Homo sapiens
  Payload ID: 729;
  Gene Symbol: ARL1;
  Gene Name: ADP-ribosylation factor-like 1;
  ENSP ID: ENSP00000439590
MAIGFNVETVTYKNLKFQVWDLGGQTSIRPYWRCYYSNTDAVIYVVDSCDRDRIGISKSELVAMLEEEELRKAILVVFANKQDMEQAMTSSEMANSLGLPALKDRKWQIFKTSATKGTGLDEAMEWLVETLKSRQ

SEQ ID NO: 3295 - protein, 164 aa, Homo sapiens
  Payload ID: 729;
  Gene Symbol: ARL1;
  Gene Name: ADP-ribosylation factor-like 1;
  Uniprot ID:  P40616;
  ENSP ID: ENSP00000441808
MRILILGLDGAGKTTILYRLQVGEVVTTIPTIGFNVETVTYKNLKFQVWDLGGQTSIRPYWRCYYSNTDAVIYVVDSCDRDRIGISKSELVAMLEEEELRKAILVVFANKQDMEQAMTSSEMANSLGLPALKDRKWQIFKTSATKGTGLDEAMEWLVETLKSRQ

SEQ ID NO: 3296 - protein, 52 aa, Homo sapiens
  Payload ID: 729;
  Gene Symbol: ARL1;
  Gene Name: ADP-ribosylation factor-like 1;
  ENSP ID: ENSP00000447405
MEQAMTSSEMANSLGLPALKDRKWQIFKTSATKGTGLDEAMEWLVETLKSRQ

SEQ ID NO: 3297 - protein, 164 aa, Homo sapiens; identical to SEQ ID NO: 3295
  Payload ID: 729;
  Gene Symbol: ARL1;
  Gene Name: ADP-ribosylation factor-like 1;
  Uniprot ID:  P40616;
  ENSP ID: ENSP00000448850

SEQ ID NO: 3298 - protein, 194 aa, Homo sapiens
  Payload ID: 729;
  Gene Symbol: ARL1;
  Gene Name: ADP-ribosylation factor-like 1;
  ENSP ID: ENSP00000448912
MGGFFSSIFSSLFGTREMRILILGLDGAGKTTILYRLQVGEVVTTIPTIGFNVETVTYKNLKFQVWDLGGQTSIRPYWRCYYSNTDAVIYVVDSCDRDRIGISKSELVAMLEEEELRKAILVVFANKQDMEQAMTSSEMANSLGLPALKDRKWQIFKTSATKGTGLDEAMEWQVSCFQKPSVHLCVLAAMHVHV

SEQ ID NO: 3299 - protein, 64 aa, Homo sapiens
  Payload ID: 729;
  Gene Symbol: ARL1;
  Gene Name: ADP-ribosylation factor-like 1;
  ENSP ID: ENSP00000450162
MGGFFSSIFSSLFGTREMRILILGLDGAGKTTILYRLQVGEVVTTIPKLLAFKKYPEDGIDLAN

SEQ ID NO: 3300 - protein, 17 aa, Homo sapiens
  Payload ID: 729;
  Gene Symbol: ARL1;
  Gene Name: ADP-ribosylation factor-like 1;
  ENSP ID: ENSP00000450315
MRILILGLDGAGKTTIL

SEQ ID NO: 3301 - protein, 244 aa, Homo sapiens
  Payload ID: 730;
  Gene Symbol: ARL10;
  Gene Name: ADP-ribosylation factor-like 10;
  Uniprot ID:  Q8N8L6;
  ENSP ID: ENSP00000308496
MAPRPLGPLVLALGGAAAVLGSVLFILWKTYFGRGRERRWDRGEAWWGAEAARLPEWDEWDPEDEEDEEPALEELEQREVLVLGLDGAGKSTFLRVLSGKPPLEGHIPTWGFNSVRLPTKDFEVDLLEIGGSQNLRFYWKEFVSEVDVLVFVVDSADRLRLPWARQELHKLLDKDPDLPVVVVANKQDLSEAMSMGELQRELGLQAIDNQREVFLLAASIAPAGPTFEEPGTVHIWKLLLELLS

SEQ ID NO: 3302 - protein, 48 aa, Homo sapiens
  Payload ID: 730;
  Gene Symbol: ARL10;
  Gene Name: ADP-ribosylation factor-like 10;
  ENSP ID: ENSP00000421449
  MOD_RES (1)..(1): Any amino acid
XSEVDVLVFVVDSADRLRLPWARQELHKLLDKDPDLPVVVVANKQMLK

SEQ ID NO: 3303 - protein, 79 aa, Homo sapiens
  Payload ID: 730;
  Gene Symbol: ARL10;
  Gene Name: ADP-ribosylation factor-like 10;
  ENSP ID: ENSP00000424831
PDLPVVVVANKQVLPYRFSVVPGMSDVGATGKERHRGSVISRTVPAEAHGHPEPQPPHHSIRGAAFRRAFRFRRFRLTL

SEQ ID NO: 3304 - protein, 196 aa, Homo sapiens
  Payload ID: 731;
  Gene Symbol: ARL11;
  Gene Name: ADP-ribosylation factor-like 11;
  Uniprot ID:  Q969Q4;
  ENSP ID: ENSP00000282026
MGSVNSRGHKAEAQVVMMGLDSAGKTTLLYKLKGHQLVETLPTVGFNVEPLKAPGHVSLTLWDVGGQAPLRASWKDYLEGTDILVYVLDSTDEARLPESAAELTEVLNDPNMAGVPFLVLANKQEAPDALPLLKIRNRLSLERFQDHCWELRGCSALTGEGLPEALQSLWSLLKSRSCMCLQARAHGAERGDSKRS

SEQ ID NO: 3305 - protein, 163 aa, Homo sapiens
  Payload ID: 732;
  Gene Symbol: ARL13A;
  Gene Name: ADP-ribosylation factor-like 13A;
  ENSP ID: ENSP00000362044
  MOD_RES (1)..(1): Any amino acid
XLANKQDKKKALMPCDIIDYLLLKKLVKENKCPCRVEPCSAIRNLERRNHQPIVEGLRWLLAVIDTCQLPPTSSISISKNNTGSGERCSSHSFSTRTGMSKEKRQHLEQCSIEAKPLKSILQKEAIKSILYSLRGSRRVRWHPLRMKTTLVKKNRDFTSLYRD

SEQ ID NO: 3306 - protein, 256 aa, Homo sapiens
  Payload ID: 732;
  Gene Symbol: ARL13A;
  Gene Name: ADP-ribosylation factor-like 13A;
  Uniprot ID:  Q5H913;
  ENSP ID: ENSP00000398637
MFRLLSSCCSCLRTTEETRRNVTIPIIGLNNSGKTVLVEAFQKLLPSKTDHCMKSELTTLLLDEYELSIYDLNGDLKGREAWPNYYAQAHGLVFVLDSSDIRRMQEVKIILTHLLSDKRVAGKPILILANKQDKKKALMPCDIIDYLLLKKLVKENKCPCRVEPCSAIRNLERRNHQPIVEGLRWLLAVIDTCQLPPTSSISISKNNTGSGERCSSHSFSTRTGMSKEKRQHLEQCSIEAKPLKSILQPSNQSYTH

SEQ ID NO: 3307 - protein, 290 aa, Homo sapiens
  Payload ID: 732;
  Gene Symbol: ARL13A;
  Gene Name: ADP-ribosylation factor-like 13A;
  Uniprot ID:  Q5H913;
  ENSP ID: ENSP00000414757
MFRLLSSCCSCLRTTEETRRNVTIPIIGLNNSGKTVLVEAFQKLLPSKTDHCMKSELTTLLLDEYELSIYDLNGDLKGREAWPNYYAQAHGLVFVLDSSDIRRMQEVKIILTHLLSDKRVAGKPILILANKQDKKKALMPCDIIDYLLLKKLVKENKCPCRVEPCSAIRNLERRNHQPIVEGLRWLLAVIDTCQLPPTSSISISKNNTGSGERCSSHSFSTRTGMSKEKRQHLEQCSIEAKPLKSILQKEGTRLWSKKNMSVTFALDEPMKEGECSRRMRAQNTTKLCYN

SEQ ID NO: 3308 - protein, 124 aa, Homo sapiens
  Payload ID: 732;
  Gene Symbol: ARL13A;
  Gene Name: ADP-ribosylation factor-like 13A;
  ENSP ID: ENSP00000445825
  MOD_RES (1)..(1): Any amino acid
XIRNLERRNHQPIVEGLRWLLAVIDTCQLPPTSSISISKNNTGSGERCSSHSFSTRTGMSKEKRQHLEQCSIEAKPLKSILQKEGTRLWSKKNMSVTFALDEPMKEGECSRRMRAQNTTKLCYN

SEQ ID NO: 3309 - protein, 321 aa, Homo sapiens
  Payload ID: 733;
  Gene Symbol: ARL13B;
  Gene Name: ADP-ribosylation factor-like 13B;
  Uniprot ID:  Q3SXY8;
  ENSP ID: ENSP00000306225
MFSLMASCCGWFKRWREPVRLANKQDKEGALGEADVIECLSLEKLVNEHKCLCQIEPCSAISGYGKKIDKSIKKGLYWLLHVIARDFDALNERIQKETTEQRALEEQEKQERAERVRKLREERKQNEQEQAELDGTSGLAELDPEPTNPFQPIASVIIENEGKLEREKKNQKMEKDSDGCHLKHKMEHEQIETQGQVNHNGQKNNEFGLVENYKEALTQQLKNEDETDRPSLESANGKKKTKKLRMKRNHRVEPLNIDDCAPESPTPPPPPPPVGWGTPKVTRLPKLEPLGETHHNDFYRKPLPPLAVPQRPNSDAHDVIS

SEQ ID NO: 3310 - protein, 89 aa, Homo sapiens
  Payload ID: 733;
  Gene Symbol: ARL13B;
  Gene Name: ADP-ribosylation factor-like 13B;
  ENSP ID: ENSP00000335400
MFSLMASCCGWFKRWREPVRKVTLLMVGLDNAGKTATAKGIQGEMGSPYVAQAGLECLASSYSSALASKSAGITGMSHHAQPGQNTLKM

SEQ ID NO: 3311 - protein, 428 aa, Homo sapiens
  Payload ID: 733;
  Gene Symbol: ARL13B;
  Gene Name: ADP-ribosylation factor-like 13B;
  Uniprot ID:  Q3SXY8;
  ENSP ID: ENSP00000377769
MFSLMASCCGWFKRWREPVRKVTLLMVGLDNAGKTATAKGIQGEYPEDVAPTVGFSKINLRQGKFEVTIFDLGGGIRIRGIWKNYYAESYGVIFVVDSSDEERMEETKEAMSEMLRHPRISGKPILVLANKQDKEGALGEADVIECLSLEKLVNEHKCLCQIEPCSAISGYGKKIDKSIKKGLYWLLHVIARDFDALNERIQKETTEQRALEEQEKQERAERVRKLREERKQNEQEQAELDGTSGLAELDPEPTNPFQPIASVIIENEGKLEREKKNQKMEKDSDGCHLKHKMEHEQIETQGQVNHNGQKNNEFGLVENYKEALTQQLKNEDETDRPSLESANGKKKTKKLRMKRNHRVEPLNIDDCAPESPTPPPPPPPVGWGTPKVTRLPKLEPLGETHHNDFYRKPLPPLAVPQRPNSDAHDVIS

SEQ ID NO: 3312 - protein, 56 aa, Homo sapiens
  Payload ID: 733;
  Gene Symbol: ARL13B;
  Gene Name: ADP-ribosylation factor-like 13B;
  ENSP ID: ENSP00000417263
MFSLMASCCGWFKRWREPVRKVTLLMVGLDNAGKTATAKGIQGGTMFSNLGVWKEN

SEQ ID NO: 3313 - protein, 428 aa, Homo sapiens; identical to SEQ ID NO: 3311
  Payload ID: 733;
  Gene Symbol: ARL13B;
  Gene Name: ADP-ribosylation factor-like 13B;
  Uniprot ID:  Q3SXY8;
  ENSP ID: ENSP00000420780

SEQ ID NO: 3314 - protein, 325 aa, Homo sapiens
  Payload ID: 733;
  Gene Symbol: ARL13B;
  Gene Name: ADP-ribosylation factor-like 13B;
  Uniprot ID:  Q3SXY8;
  ENSP ID: ENSP00000445145
MEETKEAMSEMLRHPRISGKPILVLANKQDKEGALGEADVIECLSLEKLVNEHKCLCQIEPCSAISGYGKKIDKSIKKGLYWLLHVIARDFDALNERIQKETTEQRALEEQEKQERAERVRKLREERKQNEQEQAELDGTSGLAELDPEPTNPFQPIASVIIENEGKLEREKKNQKMEKDSDGCHLKHKMEHEQIETQGQVNHNGQKNNEFGLVENYKEALTQQLKNEDETDRPSLESANGKKKTKKLRMKRNHRVEPLNIDDCAPESPTPPPPPPPVGWGTPKVTRLPKLEPLGETHHNDFYRKPLPPLAVPQRPNSDAHDVIS

SEQ ID NO: 3315 - protein, 192 aa, Homo sapiens
  Payload ID: 734;
  Gene Symbol: ARL14;
  Gene Name: ADP-ribosylation factor-like 14;
  Uniprot ID:  Q8N4G2;
  ENSP ID: ENSP00000323847
MGSLGSKNPQTKQAQVLLLGLDSAGKSTLLYKLKLAKDITTIPTIGFNVEMIELERNLSLTVWDVGGQEKMRTVWGCYCENTDGLVYVVDSTDKQRLEESQRQFEHILKNEHIKNVPVVLLANKQDMPGALTAEDITRMFKVKKLCSDRNWYVQPCCALTGEGLAQGFRKLTGFVKSHMKSRGDTLAFFKQN

SEQ ID NO: 3316 - protein, 260 aa, Homo sapiens
  Payload ID: 735;
  Gene Symbol: ARL14EP;
  Gene Name: ADP-ribosylation factor-like 14 effector prt;
  Uniprot ID:  Q8N8R7;
  ENSP ID: ENSP00000282032
MMDPCSVGVQLRTTNECHKTYYTRHTGFKTLQELSSNDMLLLQLRTGMTLSGNNTICFHHVKIYIDRFEDLQKSCCDPFNIHKKLAKKNLHVIDLDDATFLSAKFGRQLVPGWKLCPKCTQIINGSVDVDTEDRQKRKPESDGRTAKALRSLQFTNPGRQTEFAPETGKREKRRLTKNATAGSDRQVIPAKSKVYDSQGLLIFSGMDLCDCLDEDCLGCFYACPACGSTKCGAECRCDRKWLYEQIEIEGGEIIHNKHAG

SEQ ID NO: 3317 - protein, 168 aa, Homo sapiens
  Payload ID: 735;
  Gene Symbol: ARL14EP;
  Gene Name: ADP-ribosylation factor-like 14 effector prt;
  ENSP ID: ENSP00000432224
MMDPCSVGVQLRTTNECHKTYYTRHTGFKTLQELSSNDMLLLQLRTGMTLSGNNTICFHHVKIYIDRFEDLQKSCCDPFNIHKKLAKKNLHVIDLDDATFLSAKFGRQLVPGWKLCPKCTQIINGSVDVDTEDRQKRKPESDGRTAKALRSLQFTNPGRQTEFAPETG

SEQ ID NO: 3318 - protein, 152 aa, Homo sapiens
  Payload ID: 736;
  Gene Symbol: ARL14EPL;
  Gene Name: ADP-ribosylation factor-like 14 effector prt-like;
  Uniprot ID:  P0DKL9;
  ENSP ID: ENSP00000472409
MNEQSEKNNSIQERHTDHSFPEKNCQIGQKQLQQIERQLKCLAFRNPGPQVADFNPETRQQKKKARMSKMNEYFSTKYKIMRKYDKSGRLICNDADLCDCLEKNCLGCFYPCPKCNSNKCGPECRCNRRWVYDAIVTESGEVISTLPFNVPD

SEQ ID NO: 3319 - protein, 152 aa, Homo sapiens; identical to SEQ ID NO: 3318
  Payload ID: 736;
  Gene Symbol: ARL14EPL;
  Gene Name: ADP-ribosylation factor-like 14 effector prt-like;
  ENSP ID: ENSP00000489287

SEQ ID NO: 3320 - protein, 158 aa, Homo sapiens
  Payload ID: 737;
  Gene Symbol: ARL15;
  Gene Name: ADP-ribosylation factor-like 15;
  ENSP ID: ENSP00000432680
MSDLRITEAFLYMDYLCFRALCCKGPPPARPEYDLVCIGLTGSGKTSLLSKLCSESPDNVVSTTGFSIKAVPFQNAILNVKELGGADNIRKYWSRYYQGSQGVIFVLDSASSEDDLEAARNELHSALQHPQLCTLPFLILANHQDKPAARSVQEKIQD

SEQ ID NO: 3321 - protein, 204 aa, Homo sapiens
  Payload ID: 737;
  Gene Symbol: ARL15;
  Gene Name: ADP-ribosylation factor-like 15;
  Uniprot ID:  Q9NXU5;
  ENSP ID: ENSP00000433427
MSDLRITEAFLYMDYLCFRALCCKGPPPARPEYDLVCIGLTGSGKTSLLSKLCSESPDNVVSTTGFSIKAVPFQNAILNVKELGGADNIRKYWSRYYQGSQGVIFVLDSASSEDDLEAARNELHSALQHPQLCTLPFLILANHQDKPAARSVQEIKKYFELEPLARGKRWILQPCSLDDMDALKDSFSQLINLLEEKDHEAVRM

SEQ ID NO: 3322 - protein, 25 aa, Homo sapiens
  Payload ID: 737;
  Gene Symbol: ARL15;
  Gene Name: ADP-ribosylation factor-like 15;
  ENSP ID: ENSP00000473508
MDALKDSFSQLINLLEEKDHEAVRM

SEQ ID NO: 3323 - protein, 204 aa, Homo sapiens [sequence omitted]

SEQ ID NO: 3324 - protein, 197 aa, Homo sapiens
  Payload ID: 738;
  Gene Symbol: ARL16;
  Gene Name: ADP-ribosylation factor-like 16;
  Uniprot ID:  Q0P5N6;
  ENSP ID: ENSP00000380635
MRVAGGRALSRGAELRVPGGAKHGMCLLLGATGVGKTLLVKRLQEVSSRDGKGDLGEPPPTRPTVGTNLTDIVAQRKITIRELGGCMGPIWSSYYGNCRSLLFVMDASDPTQLSASCVQLLGLLSAEQLAEASVLILFNKIDLPCYMSTEEMKSLIRLPDIIACAKQNITTAEISAREGTGLAGVLAWLQATHRAND

SEQ ID NO: 3325 - protein, 93 aa, Homo sapiens
  Payload ID: 738;
  Gene Symbol: ARL16;
  Gene Name: ADP-ribosylation factor-like 16;
  ENSP ID: ENSP00000458672
MDASDPTQLSASCVQLLGLLSAEQLAEASVLILFNKIDLPCYMSTEEMKSLIRLPDIIACAKQNITTAEISAREGTGLAGVLAWLQATHRAND

SEQ ID NO: 3326 - protein, 93 aa, Homo sapiens; identical to SEQ ID NO: 3325
  Payload ID: 738;
  Gene Symbol: ARL16;
  Gene Name: ADP-ribosylation factor-like 16;
  ENSP ID: ENSP00000458980

SEQ ID NO: 3327 - protein, 111 aa, Homo sapiens
  Payload ID: 738;
  Gene Symbol: ARL16;
  Gene Name: ADP-ribosylation factor-like 16;
  ENSP ID: ENSP00000459201
MGPIWSSYYGNCRSLLFVMDASDPTQLSASCVQLLGLLSAEQLAEASVLILFNKIDLPCYMSTEEMKSLIRLPDIIACAKQNITTAEISAREGTGLAGVLAWLQATHRAND

SEQ ID NO: 3328 - protein, 93 aa, Homo sapiens; identical to SEQ ID NO: 3325
  Payload ID: 738;
  Gene Symbol: ARL16;
  Gene Name: ADP-ribosylation factor-like 16;
  ENSP ID: ENSP00000460198

SEQ ID NO: 3329 - protein, 48 aa, Homo sapiens
  Payload ID: 738;
  Gene Symbol: ARL16;
  Gene Name: ADP-ribosylation factor-like 16;
  ENSP ID: ENSP00000461661
VGTNLTDIVAQRKITIRELGGCMGPIWSSYYGNCRSLLACAADTSMEN

SEQ ID NO: 3330 - protein, 111 aa, Homo sapiens; identical to SEQ ID NO: 3327
  Payload ID: 738;
  Gene Symbol: ARL16;
  Gene Name: ADP-ribosylation factor-like 16;
  ENSP ID: ENSP00000461674

SEQ ID NO: 3331 - protein, 197 aa, Homo sapiens; identical to SEQ ID NO: 3324
  Payload ID: 738;
  Gene Symbol: ARL16;
  Gene Name: ADP-ribosylation factor-like 16;
  Uniprot ID:  Q0P5N6;
  ENSP ID: ENSP00000480579

SEQ ID NO: 3332 - protein, 173 aa, Homo sapiens
  Payload ID: 738;
  Gene Symbol: ARL16;
  Gene Name: ADP-ribosylation factor-like 16;
  ENSP ID: ENSP00000483183
MCLLLGATGVGKTLLVKRLQEVSSRDGKGDLGEPPPTRPTVGTNLTDIVAQRKITIRELGGCMGPIWSSYYGNCRSLLFVMDASDPTQLSASCVQLLGLLSAEQLAEASVLILFNKIDLPCYMSTEEMKSLIRLPDIIACAKQNITTAEISAREGTGLAGVLAWLQATHRAND

SEQ ID NO: 3333 - protein, 141 aa, Homo sapiens
  Payload ID: 739;
  Gene Symbol: ARL17A;
  Gene Name: ADP-ribosylation factor-like 17A;
  ENSP ID: ENSP00000331563
MGNIFEKLFKSLLGKKKMRILILSLDTAGKTTILYKLKLGETVPAVPTVGFCVETVEYKNNTFAVWDVGSHFKIRPLWQHFFQNTKGSCSIDQAGVQWRDLGSLQRPLPKLRFVSHTSPHTKLLHTRPRTASRKCFFRGKI

SEQ ID NO: 3334 - protein, 177 aa, Homo sapiens
  Payload ID: 739;
  Gene Symbol: ARL17A;
  Gene Name: ADP-ribosylation factor-like 17A;
  Uniprot ID:  Q8IVW1;
  ENSP ID: ENSP00000337478
MGNIFEKLFKSLLGKKKMRILILSLDTAGKTTILYKLKLGETVPAVPTVGFCVETVEYKNNTFAVWDVGSHFKIRPLWQHFFQNTKGARSPGSTHQGSLASGVLPIKCSHVEFGMWKGGRSHPFLPHSSRCAGSGGQLDSILPHQSPAWGPWGCKDLSSGFPSFLTSSILWKSAVVK

SEQ ID NO: 3335 - protein, 125 aa, Homo sapiens
  Payload ID: 739;
  Gene Symbol: ARL17A;
  Gene Name: ADP-ribosylation factor-like 17A;
  Uniprot ID:  Q8IVW1;
  ENSP ID: ENSP00000416535
MGNIFEKLFKSLLGKKKMRILILSLDTAGKTTILYKLKLGETVPAVPTVGFCVETVEYKNNTFAVWDVGSHFKIRPLWQHFFQNTKELSASQFAQFIKKLCGVTGTNDEASPGSLTSYPSHLLDR

SEQ ID NO: 3336 - protein, 87 aa, Homo sapiens
  Payload ID: 739;
  Gene Symbol: ARL17A;
  Gene Name: ADP-ribosylation factor-like 17A;
  ENSP ID: ENSP00000459606
MGNIFEKLFKSLLGKKKMRILILSLDTAGKTTILYKLKLGETVPAVPTVGFCVETVEYKNNTFAVWDVGSHFKIRPLWQHFFQNTKA

SEQ ID NO: 3337 - protein, 95 aa, Homo sapiens
  Payload ID: 739;
  Gene Symbol: ARL17A;
  Gene Name: ADP-ribosylation factor-like 17A;
  ENSP ID: ENSP00000459759
MGNIFEKLFKSLLGKKKMRILILSLDTAGKTTILYKLKLGETVPAVPTVGFCVETVEYKNNTFAVWDVGSHFKIRPLWQHFFQNTKAAHSQSLTS

SEQ ID NO: 3338 - protein, 88 aa, Homo sapiens
  Payload ID: 739;
  Gene Symbol: ARL17A;
  Gene Name: ADP-ribosylation factor-like 17A;
  ENSP ID: ENSP00000481578
MGNIFEKLFKSLLGKKKMRILILSLDTAGKTTILYKLKLGETVPAVPTVGFCVETVEYKNNTFAVWDVGSHFKIRPLWQHFFQNTKGS

SEQ ID NO: 3339 - protein, 125 aa, Homo sapiens; identical to SEQ ID NO: 3335
  Payload ID: 740;
  Gene Symbol: ARL17B;
  Gene Name: ADP-ribosylation factor-like 17B;
  Uniprot ID:  Q8IVW1;
  ENSP ID: ENSP00000391751

SEQ ID NO: 3340 - protein, 177 aa, Homo sapiens; identical to SEQ ID NO: 3334
  Payload ID: 740;
  Gene Symbol: ARL17B;
  Gene Name: ADP-ribosylation factor-like 17B;
  Uniprot ID:  Q8IVW1;
  ENSP ID: ENSP00000404247

SEQ ID NO: 3341 - protein, 111 aa, Homo sapiens
  Payload ID: 740;
  Gene Symbol: ARL17B;
  Gene Name: ADP-ribosylation factor-like 17B;
  ENSP ID: ENSP00000458681
  MOD_RES (1)..(1): Any amino acid
XDVGSHFKIRPLWQHFFQNTKGARSPGSTHQGSLASGVLPIKCSHVEFGMWKGGRSHPFLPHSSRCAGSGGQLDSILPHQSPAWGPWGCKDLSSGFPSFLTSSILWKSAVQ

SEQ ID NO: 3342 - protein, 95 aa, Homo sapiens; identical to SEQ ID NO: 3337
  Payload ID: 740;
  Gene Symbol: ARL17B;
  Gene Name: ADP-ribosylation factor-like 17B;
  ENSP ID: ENSP00000459131

SEQ ID NO: 3343 - protein, 125 aa, Homo sapiens; identical to SEQ ID NO: 3335
  Payload ID: 740;
  Gene Symbol: ARL17B;
  Gene Name: ADP-ribosylation factor-like 17B;
  Uniprot ID:  Q8IVW1;
  ENSP ID: ENSP00000459151

SEQ ID NO: 3344 - protein, 87 aa, Homo sapiens; identical to SEQ ID NO: 3336
  Payload ID: 740;
  Gene Symbol: ARL17B;
  Gene Name: ADP-ribosylation factor-like 17B;
  ENSP ID: ENSP00000459773

SEQ ID NO: 3345 - protein, 181 aa, Homo sapiens
  Payload ID: 740;
  Gene Symbol: ARL17B;
  Gene Name: ADP-ribosylation factor-like 17B;
  ENSP ID: ENSP00000460539
MGNIFEKLFKSLLGKKKMRILILSLDTAGKTTILYKLKLGETVPAVPTVGFCVETVEYKNNTFAVWDVGSHFKIRPLWQHFFQNTKGARSPGSTHQGSLASGVLPIKCSHVEFGMWKGGRSHPFLPHSSRCAGSGGQLDSILPHQSPAWGPWGCKDLSSGFPSFLTSSILWKSAVLLTPKA

SEQ ID NO: 3346 - protein, 88 aa, Homo sapiens; identical to SEQ ID NO: 3338
  Payload ID: 740;
  Gene Symbol: ARL17B;
  Gene Name: ADP-ribosylation factor-like 17B;
  ENSP ID: ENSP00000477704

SEQ ID NO: 3347 - protein, 125 aa, Homo sapiens; identical to SEQ ID NO: 3335
  Payload ID: 740;
  Gene Symbol: ARL17B;
  Gene Name: ADP-ribosylation factor-like 17B;
  Uniprot ID:  Q8IVW1;
  ENSP ID: ENSP00000479224

SEQ ID NO: 3348 - protein, 141 aa, Homo sapiens; identical to SEQ ID NO: 3333
  Payload ID: 740;
  Gene Symbol: ARL17B;
  Gene Name: ADP-ribosylation factor-like 17B;
  ENSP ID: ENSP00000479751

SEQ ID NO: 3349 - protein, 141 aa, Homo sapiens; identical to SEQ ID NO: 3333
  Payload ID: 740;
  Gene Symbol: ARL17B;
  Gene Name: ADP-ribosylation factor-like 17B;
  ENSP ID: ENSP00000481458

SEQ ID NO: 3350 - protein, 177 aa, Homo sapiens; identical to SEQ ID NO: 3334
  Payload ID: 740;
  Gene Symbol: ARL17B;
  Gene Name: ADP-ribosylation factor-like 17B;
  Uniprot ID:  Q8IVW1;
  ENSP ID: ENSP00000481838

SEQ ID NO: 3351 - protein, 125 aa, Homo sapiens; identical to SEQ ID NO: 3335
  Payload ID: 740;
  Gene Symbol: ARL17B;
  Gene Name: ADP-ribosylation factor-like 17B;
  Uniprot ID:  Q8IVW1;
  ENSP ID: ENSP00000482789

SEQ ID NO: 3352 - protein, 125 aa, Homo sapiens; identical to SEQ ID NO: 3335
  Payload ID: 740;
  Gene Symbol: ARL17B;
  Gene Name: ADP-ribosylation factor-like 17B;
  Uniprot ID:  Q8IVW1;
  ENSP ID: ENSP00000482856

SEQ ID NO: 3353 - protein, 177 aa, Homo sapiens; identical to SEQ ID NO: 3334
  Payload ID: 740;
  Gene Symbol: ARL17B;
  Gene Name: ADP-ribosylation factor-like 17B;
  Uniprot ID:  Q8IVW1;
  ENSP ID: ENSP00000483271

SEQ ID NO: 3354 - protein, 141 aa, Homo sapiens; identical to SEQ ID NO: 3333
  Payload ID: 740;
  Gene Symbol: ARL17B;
  Gene Name: ADP-ribosylation factor-like 17B;
  ENSP ID: ENSP00000483384

SEQ ID NO: 3355 - protein, 181 aa, Homo sapiens; identical to SEQ ID NO: 3345
  Payload ID: 740;
  Gene Symbol: ARL17B;
  Gene Name: ADP-ribosylation factor-like 17B;
  ENSP ID: ENSP00000485737

SEQ ID NO: 3356 - protein, 95 aa, Homo sapiens; identical to SEQ ID NO: 3337
  Payload ID: 740;
  Gene Symbol: ARL17B;
  Gene Name: ADP-ribosylation factor-like 17B;
  ENSP ID: ENSP00000485999

SEQ ID NO: 3357 - protein, 87 aa, Homo sapiens; identical to SEQ ID NO: 3336
  Payload ID: 740;
  Gene Symbol: ARL17B;
  Gene Name: ADP-ribosylation factor-like 17B;
  ENSP ID: ENSP00000486234

SEQ ID NO: 3358 - protein, 111 aa, Homo sapiens; identical to SEQ ID NO: 3341
  Payload ID: 740;
  Gene Symbol: ARL17B;
  Gene Name: ADP-ribosylation factor-like 17B;
  ENSP ID: ENSP00000486390
  MOD_RES (1)..(1): Any amino acid

SEQ ID NO: 3359 - protein, 125 aa, Homo sapiens; identical to SEQ ID NO: 3335
  Payload ID: 740;
  Gene Symbol: ARL17B;
  Gene Name: ADP-ribosylation factor-like 17B;
  Uniprot ID:  Q8IVW1;
  ENSP ID: ENSP00000487334

SEQ ID NO: 3360 - protein, 125 aa, Homo sapiens; identical to SEQ ID NO: 3335
  Payload ID: 740;
  Gene Symbol: ARL17B;
  Gene Name: ADP-ribosylation factor-like 17B;
  Uniprot ID:  Q8IVW1;
  ENSP ID: ENSP00000487605

SEQ ID NO: 3361 - protein, 181 aa, Homo sapiens; identical to SEQ ID NO: 3345
  Payload ID: 740;
  Gene Symbol: ARL17B;
  Gene Name: ADP-ribosylation factor-like 17B;
  ENSP ID: ENSP00000487735

SEQ ID NO: 3362 - protein, 95 aa, Homo sapiens; identical to SEQ ID NO: 3337
  Payload ID: 740;
  Gene Symbol: ARL17B;
  Gene Name: ADP-ribosylation factor-like 17B;
  ENSP ID: ENSP00000487838

SEQ ID NO: 3363 - protein, 111 aa, Homo sapiens; identical to SEQ ID NO: 3341
  Payload ID: 740;
  Gene Symbol: ARL17B;
  Gene Name: ADP-ribosylation factor-like 17B;
  ENSP ID: ENSP00000488136
  MOD_RES (1)..(1): Any amino acid

SEQ ID NO: 3364 - protein, 87 aa, Homo sapiens; identical to SEQ ID NO: 3336
  Payload ID: 740;
  Gene Symbol: ARL17B;
  Gene Name: ADP-ribosylation factor-like 17B;
  ENSP ID: ENSP00000488599

SEQ ID NO: 3365 - protein, 184 aa, Homo sapiens
  Payload ID: 741;
  Gene Symbol: ARL2;
  Gene Name: ADP-ribosylation factor-like 2;
  Uniprot ID:  P36404;
  ENSP ID: ENSP00000246747
MGLLTILKKMKQKERELRLLMLGLDNAGKTTILKKFNGEDIDTISPTLGFNIKTLEHRGFKLNIWDVGGQKSLRSYWRNYFESTDGLIWVVDSADRQRMQDCQRELQSLLVEERLAGATLLIFANKQDLPGALSSNAIREVLELDSIRSHHWCIQGCSAVTGENLLPGIDWLLDDISSRIFTAD

SEQ ID NO: 3366 - protein, 157 aa, Homo sapiens
  Payload ID: 741;
  Gene Symbol: ARL2;
  Gene Name: ADP-ribosylation factor-like 2;
  Uniprot ID:  P36404;
  ENSP ID: ENSP00000432971
MGLLTILKKMKQKERELRLLMLGLDNAGKTTILKKFNGEDIDTISPTLGFNIKTLEHRGFKLNIWDVGGQKSLRSYWRNYFESTDGLIWVVDSADRQRMQDCQRELQSLLVEEVLELDSIRSHHWCIQGCSAVTGENLLPGIDWLLDDISSRIFTAD

SEQ ID NO: 3367 - protein, 184 aa, Homo sapiens; identical to SEQ ID NO: 3365
  Payload ID: 741;
  Gene Symbol: ARL2;
  Gene Name: ADP-ribosylation factor-like 2;
  Uniprot ID:  P36404;
  ENSP ID: ENSP00000436021

SEQ ID NO: 3368 - protein, 163 aa, Homo sapiens
  Payload ID: 742;
  Gene Symbol: ARL2BP;
  Gene Name: ADP-ribosylation factor-like 2 binding prt;
  Uniprot ID:  Q9Y2Y0;
  ENSP ID: ENSP00000219204
MDALEGESFALSFSSASDAEFDAVVGYLEDIIMDDEFQLLQRNFMDKYYLEFEDTEENKLIYTPIFNEYISLVEKYIEEQLLQRIPEFNMAAFTTTLQHHKDEVAGDIFDMLLTFTDFLAFKEMFLDYRAEKEGRGLDLSSGLVVTSLCKSSSLPASQNNLRH

SEQ ID NO: 3369 - protein, 171 aa, Homo sapiens
  Payload ID: 742;
  Gene Symbol: ARL2BP;
  Gene Name: ADP-ribosylation factor-like 2 binding prt;
  ENSP ID: ENSP00000454237
  MOD_RES (1)..(1): Any amino acid
XLEGESFALSFSSASDAEFDAVVGYLEDIIMDDEFQLLQRNFMDKYYLEFEDTEENKLIYTPIFNEYISLVEKYIEEQLLQRIPEFNMAAFTTTLQHHKDEVAGDIFDMLLTFTDFLAFKEMFLDYRALPRTICGTRSYLQPMNGIILDVTSPIGSAHDDRTHLGKTDSVM

SEQ ID NO: 3370 - protein, 123 aa, Homo sapiens
  Payload ID: 742;
  Gene Symbol: ARL2BP;
  Gene Name: ADP-ribosylation factor-like 2 binding prt;
  ENSP ID: ENSP00000457465
MDALEGESFALSFSSASDAEFDAVVGYLEDIIMEKYIEEQLLQRIPEFNMAAFTTTLQHHKDEVAGDIFDMLLTFTDFLAFKEMFLDYRAEKEGRGLDLSSGLVVTSLCKSSSLPASQNNLRH

SEQ ID NO: 3371 - protein, 182 aa, Homo sapiens
  Payload ID: 743;
  Gene Symbol: ARL3;
  Gene Name: ADP-ribosylation factor-like 3;
  Uniprot ID:  P36405;
  ENSP ID: ENSP00000260746
MGLLSILRKLKSAPDQEVRILLLGLDNAGKTTLLKQLASEDISHITPTQGFNIKSVQSQGFKLNVWDIGGQRKIRPYWKNYFENTDILIYVIDSADRKRFEETGQELAELLEEEKLSCVPVLIFANKQDLLTAAPASEIAEGLNLHTIRDRVWQIQSCSALTGEGVQDGMNWVCKNVNAKKK

SEQ ID NO: 3372 - protein, 200 aa, Homo sapiens
  Payload ID: 744;
  Gene Symbol: ARL4A;
  Gene Name: ADP-ribosylation factor-like 4A;
  Uniprot ID:  P40617;
  ENSP ID: ENSP00000349250
MGNGLSDQTSILSNLPSFQSFHIVILGLDCAGKTTVLYRLQFNEFVNTVPTKGFNTEKIKVTLGNSKTVTFHFWDVGGQEKLRPLWKSYTRCTDGIVFVVDSVDVERMEEAKTELHKITRISENQGVPVLIVANKQDLRNSLSLSEIEKLLAMGELSSSTPWHLQPTCAIIGDGLKEGLEKLHDMIIKRRKMLRQQKKKR

SEQ ID NO: 3373 - protein, 200 aa, Homo sapiens; identical to SEQ ID NO: 3372
  Payload ID: 744;
  Gene Symbol: ARL4A;
  Gene Name: ADP-ribosylation factor-like 4A;
  Uniprot ID:  P40617;
  ENSP ID: ENSP00000379897

SEQ ID NO: 3374 - protein, 200 aa, Homo sapiens; identical to SEQ ID NO: 3372
  Payload ID: 744;
  Gene Symbol: ARL4A;
  Gene Name: ADP-ribosylation factor-like 4A;
  Uniprot ID:  P40617;
  ENSP ID: ENSP00000379898

SEQ ID NO: 3375 - protein, 200 aa, Homo sapiens; identical to SEQ ID NO: 3372
  Payload ID: 744;
  Gene Symbol: ARL4A;
  Gene Name: ADP-ribosylation factor-like 4A;
  Uniprot ID:  P40617;
  ENSP ID: ENSP00000379899

SEQ ID NO: 3376 - protein, 200 aa, Homo sapiens; identical to SEQ ID NO: 3372
  Payload ID: 744;
  Gene Symbol: ARL4A;
  Gene Name: ADP-ribosylation factor-like 4A;
  Uniprot ID:  P40617;
  ENSP ID: ENSP00000385236

SEQ ID NO: 3377 - protein, 50 aa, Homo sapiens
  Payload ID: 744;
  Gene Symbol: ARL4A;
  Gene Name: ADP-ribosylation factor-like 4A;
  ENSP ID: ENSP00000397651
MGNGLSDQTSILSNLPSFQSFHIVILGLDCAGKTTVLYRLQFNEFVNTVP

SEQ ID NO: 3378 - protein, 201 aa, Homo sapiens
  Payload ID: 745;
  Gene Symbol: ARL4C;
  Gene Name: ADP-ribosylation factor-like 4C;
  Uniprot ID:  P56559;
  ENSP ID: ENSP00000339754
MGNISSNISAFQSLHIVMLGLDSAGKTTVLYRLKFNEFVNTVPTIGFNTEKIKLSNGTAKGISCHFWDVGGQEKLRPLWKSYSRCTDGIIYVVDSVDVDRLEEAKTELHKVTKFAENQGTPLLVIANKQDLPKSLPVAEIEKQLALHELIPATTYHVQPACAIIGEGLTEGMDKLYEMILKRRKSLKQKKKRTGDLRSCEV

SEQ ID NO: 3379 - protein, 192 aa, Homo sapiens
  Payload ID: 745;
  Gene Symbol: ARL4C;
  Gene Name: ADP-ribosylation factor-like 4C;
  Uniprot ID:  P56559;
  ENSP ID: ENSP00000375057
MGNISSNISAFQSLHIVMLGLDSAGKTTVLYRLKFNEFVNTVPTIGFNTEKIKLSNGTAKGISCHFWDVGGQEKLRPLWKSYSRCTDGIIYVVDSVDVDRLEEAKTELHKVTKFAENQGTPLLVIANKQDLPKSLPVAEIEKQLALHELIPATTYHVQPACAIIGEGLTEGMDKLYEMILKRRKSLKQKKKR

SEQ ID NO: 3380 - protein, 201 aa, Homo sapiens
  Payload ID: 746;
  Gene Symbol: ARL4D;
  Gene Name: ADP-ribosylation factor-like 4D;
  Uniprot ID:  P49703;
  ENSP ID: ENSP00000322628
MGNHLTEMAPTASSFLPHFQALHVVVIGLDSAGKTSLLYRLKFKEFVQSVPTKGFNTEKIRVPLGGSRGITFQVWDVGGQEKLRPLWRSYTRRTDGLVFVVDAAEAERLEEAKVELHRISRASDNQGVPVLVLANKQDQPGALSAAEVEKRLAVRELAAATLTHVQGCSAVDGLGLQQGLERLYEMILKRKKAARGGKKRR

SEQ ID NO: 3381 - protein, 179 aa, Homo sapiens
  Payload ID: 747;
  Gene Symbol: ARL5A;
  Gene Name: ADP-ribosylation factor-like 5A;
  Uniprot ID:  Q9Y689;
  ENSP ID: ENSP00000295087
MGILFTRIWRLFNHQEHKVIIVGLDNAGKTTILYQFSMNEVVHTSPTIGSNVEEIVINNTRFLMWDIGGQESLRSSWNTYYTNTEFVIVVVDSTDRERISVTREELYKMLAHEDLRKAGLLIFANKQDVKECMTVAEISQFLKLTSIKDHQWHIQACCALTGEGLCQGLEWMMSRLKIR

SEQ ID NO: 3382 - protein, 77 aa, Homo sapiens
  Payload ID: 747;
  Gene Symbol: ARL5A;
  Gene Name: ADP-ribosylation factor-like 5A;
  ENSP ID: ENSP00000393716
MNEVVHTSPTIGSNVEEIVINNTRFLMWDIGGQESLRSSWNTYYTNTEFVIVVVDSTDRERISVTREELYKMLAHEK

SEQ ID NO: 3383 - protein, 142 aa, Homo sapiens
  Payload ID: 747;
  Gene Symbol: ARL5A;
  Gene Name: ADP-ribosylation factor-like 5A;
  Uniprot ID:  Q9Y689;
  ENSP ID: ENSP00000394626
MNEVVHTSPTIGSNVEEIVINNTRFLMWDIGGQESLRSSWNTYYTNTEFVIVVVDSTDRERISVTREELYKMLAHEDLRKAGLLIFANKQDVKECMTVAEISQFLKLTSIKDHQWHIQACCALTGEGLCQGLEWMMSRLKIR

SEQ ID NO: 3384 - protein, 142 aa, Homo sapiens; identical to SEQ ID NO: 3383
  Payload ID: 747;
  Gene Symbol: ARL5A;
  Gene Name: ADP-ribosylation factor-like 5A;
  Uniprot ID:  Q9Y689;
  ENSP ID: ENSP00000415950

SEQ ID NO: 3385 - protein, 179 aa, Homo sapiens
  Payload ID: 748;
  Gene Symbol: ARL5B;
  Gene Name: ADP-ribosylation factor-like 5B;
  Uniprot ID:  Q96KC2;
  ENSP ID: ENSP00000366487
MGLIFAKLWSLFCNQEHKVIIVGLDNAGKTTILYQFLMNEVVHTSPTIGSNVEEIVVKNTHFLMWDIGGQESLRSSWNTYYSNTEFIILVVDSIDRERLAITKEELYRMLAHEDLRKAAVLIFANKQDMKGCMTAAEISKYLTLSSIKDHPWHIQSCCALTGEGLCQGLEWMTSRIGVR

SEQ ID NO: 3386 - protein, 179 aa, Homo sapiens
  Payload ID: 749;
  Gene Symbol: ARL5C;
  Gene Name: ADP-ribosylation factor-like 5C;
  Uniprot ID:  A6NH57;
  ENSP ID: ENSP00000269586
MGQLIAKLMSIFGNQEHTVIIVGLDNEGKTTILYRFLTNEVVHMCPTIGSNVEEIILPKTHFFMWDIVRPEALSFIWNTYYSNTEFIILVIDSTDRDRLLTTREELYKMLAHEALQDASVLIFANKQDVKDSMRMVEISHFLTLSTIKDHSWHIQGCCALTREGLPARLQWMESQAAAN

SEQ ID NO: 3387 - protein, 99 aa, Homo sapiens
  Payload ID: 749;
  Gene Symbol: ARL5C;
  Gene Name: ADP-ribosylation factor-like 5C;
  ENSP ID: ENSP00000466347
NTYYSNTEFIILVIDSTDRDRLLTTREELYKMLAHEALQDASVLIFANKQDVKDSMRMVEISHFLTLSTIKDHSWHIQGCCALTREGLVAALPGSLGPG

SEQ ID NO: 3388 - protein, 186 aa, Homo sapiens
  Payload ID: 750;
  Gene Symbol: ARL6;
  Gene Name: ADP-ribosylation factor-like 6;
  Uniprot ID:  Q9H0F7;
  ENSP ID: ENSP00000337722
MGLLDRLSVLLGLKKKEVHVLCLGLDNSGKTTIINKLKPSNAQSQNILPTIGFSIEKFKSSSLSFTVFDMSGQGRYRNLWEHYYKEGQAIIFVIDSSDRLRMVVAKEELDTLLNHPDIKHRRIPILFFANKMDLRDAVTSVKVSQLLCLENIKDKPWHICASDAIKGEGLQEGVDWLQDQIQTVKT

SEQ ID NO: 3389 - protein, 186 aa, Homo sapiens; identical to SEQ ID NO: 3388
  Payload ID: 750;
  Gene Symbol: ARL6;
  Gene Name: ADP-ribosylation factor-like 6;
  Uniprot ID:  Q9H0F7;
  ENSP ID: ENSP00000377756

SEQ ID NO: 3390 - protein, 186 aa, Homo sapiens; identical to SEQ ID NO: 3388
  Payload ID: 750;
  Gene Symbol: ARL6;
  Gene Name: ADP-ribosylation factor-like 6;
  Uniprot ID:  Q9H0F7;
  ENSP ID: ENSP00000418057

SEQ ID NO: 3391 - protein, 121 aa, Homo sapiens
  Payload ID: 750;
  Gene Symbol: ARL6;
  Gene Name: ADP-ribosylation factor-like 6;
  ENSP ID: ENSP00000418740
MGLLDRLSVLLGLKKKEVHVLCLGLDNSGKTTIINKLKPSNAQSQNILPTIGFSIEKFKSSSLSFTVFDMSGQGRYRNLWEHYYKEGQAIIFVIDSSDRLRMVVAKEELDTLLNHPDIKHR

SEQ ID NO: 3392 - protein, 186 aa, Homo sapiens; identical to SEQ ID NO: 3388
  Payload ID: 750;
  Gene Symbol: ARL6;
  Gene Name: ADP-ribosylation factor-like 6;
  Uniprot ID:  Q9H0F7;
  ENSP ID: ENSP00000419619

SEQ ID NO: 3393 - protein, 54 aa, Homo sapiens
  Payload ID: 750;
  Gene Symbol: ARL6;
  Gene Name: ADP-ribosylation factor-like 6;
  ENSP ID: ENSP00000419934
  MOD_RES (1)..(1): Any amino acid
XEELDTLLNHPDIKHRRIPILFFANKMDLRDAVTSVKVSQLLCLENIKDKPWHI

SEQ ID NO: 3394 - protein, 147 aa, Homo sapiens
  Payload ID: 750;
  Gene Symbol: ARL6;
  Gene Name: ADP-ribosylation factor-like 6;
  ENSP ID: ENSP00000488530
ILPTIGFSIEKFKSSSLSFTVFDMSGQGRYRNLWEHYYKEGQAIIFVIDSSDRLRMVVAKEELDTLLNHPDIKHRRIPILFFANKMDLRDAVTSVKVSQLLCLENIKDKPWHICASDAIKGEGLQEGVDWLQEKTIQSDPDCEDMKR

SEQ ID NO: 3395 - protein, 203 aa, Homo sapiens
  Payload ID: 751;
  Gene Symbol: ARL6IP1;
  Gene Name: ADP-ribosylation factor-like 6 interacting prt 1;
  Uniprot ID:  Q15041;
  ENSP ID: ENSP00000306788
MAEGDNRSTNLLAAETASLEEQLQGWGEVMLMADKVLRWERAWFPPAIMGVVSLVFLIIYYLDPSVLSGVSCFVMFLCLADYLVPILAPRIFGSNKWTTEQQQRFHEICSNLVKTRRRAVGWWKRLFTLKEEKPKMYFMTMIVSLAAVAWVGQQVHNLLLTYLIVTSLLLLPGLNQHGIILKYIGMAKREINKLLKQKEKKNE

SEQ ID NO: 3396 - protein, 174 aa, Homo sapiens
  Payload ID: 751;
  Gene Symbol: ARL6IP1;
  Gene Name: ADP-ribosylation factor-like 6 interacting prt 1;
  Uniprot ID:  Q15041;
  ENSP ID: ENSP00000440048
MLMADKVLRWERAWFPPAIMGVVSLVFLIIYYLDPSVLSGVSCFVMFLCLADYLVPILAPRIFGSNKWTTEQQQRFHEICSNLVKTRRRAVGWWKRLFTLKEEKPKMYFMTMIVSLAAVAWVGQQVHNLLLTYLIVTSLLLLPGLNQHGIILKYIGMAKREINKLLKQKEKKNE

SEQ ID NO: 3397 - protein, 101 aa, Homo sapiens
  Payload ID: 751;
  Gene Symbol: ARL6IP1;
  Gene Name: ADP-ribosylation factor-like 6 interacting prt 1;
  ENSP ID: ENSP00000455341
MAEGDNRSTNLLAAETASLEEQLQGWGEVMLMADKVLRWERAWFPPAIMAPRIFGSNKWTTEQQQRFHEICSNLVKTRRRAVGWWKRLFTLKEEKPKMYFM

SEQ ID NO: 3398 - protein, 99 aa, Homo sapiens
  Payload ID: 751;
  Gene Symbol: ARL6IP1;
  Gene Name: ADP-ribosylation factor-like 6 interacting prt 1;
  ENSP ID: ENSP00000456596
MAEGDNRSTNLLAAETASLEEQLQGWGEVMLMADKVLRWERAWFPPAIMGVVSLVFLIIYYLDPSVLSGVSCFVMFLCLADYLVPILAPRIFGSNKCTS

SEQ ID NO: 3399 - protein, 88 aa, Homo sapiens
  Payload ID: 751;
  Gene Symbol: ARL6IP1;
  Gene Name: ADP-ribosylation factor-like 6 interacting prt 1;
  ENSP ID: ENSP00000457372
MAEGDNRSTNLLAAETASLEEQLQGWGEVMLMADKVLRWERAWFPPAIMVTSLLLLPGLNQHGIILKYIGMAKREINKLLKQKEKKNE

SEQ ID NO: 3400 - protein, 421 aa, Homo sapiens
  Payload ID: 752;
  Gene Symbol: ARL6IP4;
  Gene Name: ADP-ribosylation factor-like 6 interacting prt 4;
  Uniprot ID:  Q66PJ3;
  ENSP ID: ENSP00000313422
MPRCTYQLEQNPGFLPDGPGVHARAHCQDLSGPYGHEFATSESLGGRVGKTRAPQSGARSRMERAGPAGEEGGAREGRLLPRAPGAWVLRACAERAALEVGAASADTGVRGCGARGPAPLLASAGGGRARDGTWGVRTKGSGAALPSRPASRAAPRPEASSPPLPLEKARGGLSGPQGGRARGAMAHVGSRKRSRSRSRSRGRGSEKRKKKSRKDTSRNCSASTSQGRKASTAPGAEASPSPCITERSKQKARRRTRSSSSSSSSSSSSSSSSSSSSSSSSSDGRKKRGKYKDKRRKKKKKRKKLKKKGKEKAEAQQVEALPGPSLDQWHRSAGEEEDGPVLTDEQKSRIQAMKPMTKEEWDARQSIIRKVVDPETGRTRLIKGDGEVLEEIVTKERHREINKQATRGDCLAFQMRAGLLP

SEQ ID NO: 3401 - protein, 181 aa, Homo sapiens
  Payload ID: 752;
  Gene Symbol: ARL6IP4;
  Gene Name: ADP-ribosylation factor-like 6 interacting prt 4;
  ENSP ID: ENSP00000350532
MAHVGSRKRSRSRSRSRGRGSEKRKKKSRKDTSRNCSASTSQGRKASTAPGAEERSKQKARRRTRSSSSSSSSSSSSSSSSSSSSSSSSSDGRKKRGKYKDKRRKKKKKRKKLKKKGKEKAEAQQSIIRKVVDPETGRTRLIKGDGEVLEEIVTKERHREINKQATRGDCLAFQMRAGLLP

SEQ ID NO: 3402 - protein, 399 aa, Homo sapiens
  Payload ID: 752;
  Gene Symbol: ARL6IP4;
  Gene Name: ADP-ribosylation factor-like 6 interacting prt 4;
  Uniprot ID:  Q66PJ3;
  ENSP ID: ENSP00000376230
MPRCTYQLEQNPGFLPDGPGVHARAHCQDLSGPYGHEFATSESLGGRVGKTRAPQSGARSRMERAGPAGEEGGAREGRLLPRAPGAWVLRACAERAALEVGAASADTGVRGCGARGPAPLLASAGGGRARDGTWGVRTKGSGAALPSRPASRAAPRPEASSPPLPLEKARGGLSGPQGGRARGAMAHVGSRKRSRSRSRSRGRGSEKRKKKSRKDTSRNCSASTSQERSKQKARRRTRSSSSSSSSSSSSSSSSSSSSSSSSSDGRKKRGKYKDKRRKKKKKRKKLKKKGKEKAEAQQVEALPGPSLDQWHRSAGEEEDGPVLTDEQKSRIQAMKPMTKEEWDARQSIIRKVVDPETGRTRLIKGDGEVLEEIVTKERHREINKVGVAPLPAIRPQLCL

SEQ ID NO: 3403 - protein, 216 aa, Homo sapiens [sequence omitted]

SEQ ID NO: 3404 - protein, 229 aa, Homo sapiens
  Payload ID: 752;
  Gene Symbol: ARL6IP4;
  Gene Name: ADP-ribosylation factor-like 6 interacting prt 4;
  ENSP ID: ENSP00000396365
MAHVGSRKRSRSRSRSRGRGSEKRKKKSRKDTSRNCSASTSQGRKASTAPGAEERSKQKARRRTRSSSSSSSSSSSSSSSSSSSSSSSSSDGRKKRGKYKDKRRKKKKKRKKLKKKGKEKAEAQQVEALPGPSLDQWHRSAGEEEDGPVLTDEQKSRIQAMKPMTKEEWDARQSIIRKVVDPETGRTRLIKGDGEVLEEIVTKERHREINKQATRGDCLAFQMRAGLLP

SEQ ID NO: 3405 - protein, 226 aa, Homo sapiens
  Payload ID: 752;
  Gene Symbol: ARL6IP4;
  Gene Name: ADP-ribosylation factor-like 6 interacting prt 4;
  Uniprot ID:  Q66PJ3;
  ENSP ID: ENSP00000396723
MAHVGSRKRSRSRSRSRGRGSEKRKKKSRKDTSRNCSASTSQASPSPCITERSKQKARRRTRSSSSSSSSSSSSSSSSSSSSSSSSSDGRKKRGKYKDKRRKKKKKRKKLKKKGKEKAEAQQVEALPGPSLDQWHRSAGEEEDGPVLTDEQKSRIQAMKPMTKEEWDARQSIIRKVVDPETGRTRLIKGDGEVLEEIVTKERHREINKQATRGDCLAFQMRAGLLP

SEQ ID NO: 3406 - protein, 218 aa, Homo sapiens
  Payload ID: 752;
  Gene Symbol: ARL6IP4;
  Gene Name: ADP-ribosylation factor-like 6 interacting prt 4;
  ENSP ID: ENSP00000406036
MAHVGSRKRSRSRSRSRGRGSEKRKKKSRKDTSRNCSASTSQERSKQKARRRTRSSSSSSSSSSSSSSSSSSSSSSSSSDGRKKRGKYKDKRRKKKKKRKKLKKKGKEKAEAQQVEALPGPSLDQWHRSAGEEEDGPVLTDEQKSRIQAMKPMTKEEWDARQSIIRKVVDPETGRTRLIKGDGEVLEEIVTKERHREINKQATRGDCLAFQMRAGLLP

SEQ ID NO: 3407 - protein, 170 aa, Homo sapiens
  Payload ID: 752;
  Gene Symbol: ARL6IP4;
  Gene Name: ADP-ribosylation factor-like 6 interacting prt 4;
  ENSP ID: ENSP00000413132
MAHVGSRKRSRSRSRSRGRGSEKRKKKSRKDTSRNCSASTSQERSKQKARRRTRSSSSSSSSSSSSSSSSSSSSSSSSSDGRKKRGKYKDKRRKKKKKRKKLKKKGKEKAEAQQSIIRKVVDPETGRTRLIKGDGEVLEEIVTKERHREINKQATRGDCLAFQMRAGLLP

SEQ ID NO: 3408 - protein, 413 aa, Homo sapiens
  Payload ID: 752;
  Gene Symbol: ARL6IP4;
  Gene Name: ADP-ribosylation factor-like 6 interacting prt 4;
  Uniprot ID:  Q66PJ3;
  ENSP ID: ENSP00000414847
MPRCTYQLEQNPGFLPDGPGVHARAHCQDLSGPYGHEFATSESLGGRVGKTRAPQSGARSRMERAGPAGEEGGAREGRLLPRAPGAWVLRACAERAALEVGAASADTGVRGCGARGPAPLLASAGGGRARDGTWGVRTKGSGAALPSRPASRAAPRPEASSPPLPLEKARGGLSGPQGGRARGAMAHVGSRKRSRSRSRSRGRGSEKRKKKSRKDTSRNCSASTSQGRKASTAPGAEERSKQKARRRTRSSSSSSSSSSSSSSSSSSSSSSSSSDGRKKRGKYKDKRRKKKKKRKKLKKKGKEKAEAQQVEALPGPSLDQWHRSAGEEEDGPVLTDEQKSRIQAMKPMTKEEWDARQSIIRKVVDPETGRTRLIKGDGEVLEEIVTKERHREINKQATRGDCLAFQMRAGLLP

SEQ ID NO: 3409 - protein, 215 aa, Homo sapiens [sequence omitted]

SEQ ID NO: 3410 - protein, 211 aa, Homo sapiens
  Payload ID: 752;
  Gene Symbol: ARL6IP4;
  Gene Name: ADP-ribosylation factor-like 6 interacting prt 4;
  ENSP ID: ENSP00000441406
MAHVGSRKRSRSRSRSRGRGSEKRKKKSRKDTSRNCSASTSQGRKASTAPGAEERSKQKARRRTRSSSSSSSSSSSSSSSSSSSSSSSSSDGRKKRGKYKDKRRKKKKKRKKLKKKGKEKAEAQQVEALPGPSLDQWHRSAGEEEDGPVLTDEQKSRIQAMKPMTKEEWDARQSIIRKVVDPETGRTRLIKGDGEVLEEIVTKERHREINK

SEQ ID NO: 3411 - protein, 307 aa, Homo sapiens [sequence omitted]

SEQ ID NO: 3412 - protein, 402 aa, Homo sapiens
  Payload ID: 752;
  Gene Symbol: ARL6IP4;
  Gene Name: ADP-ribosylation factor-like 6 interacting prt 4;
  Uniprot ID:  Q66PJ3;
  ENSP ID: ENSP00000442718
MPRCTYQLEQNPGFLPDGPGVHARAHCQDLSGPYGHEFATSESLGGRVGKTRAPQSGARSRMERAGPAGEEGGAREGRLLPRAPGAWVLRACAERAALEVGAASADTGVRGCGARGPAPLLASAGGGRARDGTWGVRTKGSGAALPSRPASRAAPRPEASSPPLPLEKARGGLSGPQGGRARGAMAHVGSRKRSRSRSRSRGRGSEKRKKKSRKDTSRNCSASTSQERSKQKARRRTRSSSSSSSSSSSSSSSSSSSSSSSSSDGRKKRGKYKDKRRKKKKKRKKLKKKGKEKAEAQQVEALPGPSLDQWHRSAGEEEDGPVLTDEQKSRIQAMKPMTKEEWDARQSIIRKVVDPETGRTRLIKGDGEVLEEIVTKERHREINKQATRGDCLAFQMRAGLLP

SEQ ID NO: 3413 - protein, 188 aa, Homo sapiens
  Payload ID: 753;
  Gene Symbol: ARL6IP5;
  Gene Name: ADP-ribosylation factor-like 6 interacting prt 5;
  Uniprot ID:  O75915;
  ENSP ID: ENSP00000273258
MDVNIAPLRAWDDFFPGSDRFARPDFRDISKWNNRVVSNLLYYQTNYLVVAAMMISIVGFLSPFNMILGGIVVVLVFTGFVWAAHNKDVLRRMKKRYPTTFVMVVMLASYFLISMFGGVMVFVFGITFPLLLMFIHASLRLRNLKNKLENKMEGIGLKRTPMGIVLDALEQQEEGINRLTDYISKVKE

SEQ ID NO: 3414 - protein, 59 aa, Homo sapiens
  Payload ID: 753;
  Gene Symbol: ARL6IP5;
  Gene Name: ADP-ribosylation factor-like 6 interacting prt 5;
  ENSP ID: ENSP00000419021
MDVNIAPLRAWDDFFPGSDRFARPDFRDISKWNNRVVSNLLYYQTNYLVVAAMMISIVG

SEQ ID NO: 3415 - protein, 93 aa, Homo sapiens
  Payload ID: 753;
  Gene Symbol: ARL6IP5;
  Gene Name: ADP-ribosylation factor-like 6 interacting prt 5;
  ENSP ID: ENSP00000419374
MDVNIAPLRAWDDFFPGSDRFARPDFRDISKWNNRVVSNLLYYQTNYLVVAAMMISIVGLECNGVISAHCNLHLLSSSDSPASASQVAGITGF

SEQ ID NO: 3416 - protein, 88 aa, Homo sapiens
  Payload ID: 753;
  Gene Symbol: ARL6IP5;
  Gene Name: ADP-ribosylation factor-like 6 interacting prt 5;
  ENSP ID: ENSP00000420138
MDVNIAPLRAWDDFFPGSDRFARPDFRDISKWNNRVVSNLLYYQTNYLVVAAMMISIVGFLSPFNPPIVSEVSRVFMKSNGKWITRFL

SEQ ID NO: 3417 - protein, 226 aa, Homo sapiens
  Payload ID: 754;
  Gene Symbol: ARL6IP6;
  Gene Name: ADP-ribosylation factor-like 6 interacting prt 6;
  Uniprot ID:  Q8N6S5;
  ENSP ID: ENSP00000315357
MSFAESGWRSALRRRGPGTPGPVARPSYSSFTQGDSWGEGEVDEEEGCDQVARDLRAEFSAGAWSEPRKRSVLPPDGNGSPVLPDKRNGIFPAAAGSRAQPRRWPVQVLSILCSLLFAILLAFLLAIAYLIVKELHAENLKNEDDVDTGLLGFWTLLIISLTAGFSCCSFSWTVTYFDSFEPGMFPPTPLSPARFKKLTGHSFHMGYSMAILNGIVAALTVAWCLM

SEQ ID NO: 3418 - protein, 38 aa, Homo sapiens
  Payload ID: 754;
  Gene Symbol: ARL6IP6;
  Gene Name: ADP-ribosylation factor-like 6 interacting prt 6;
  ENSP ID: ENSP00000395052
  MOD_RES (1)..(1): Any amino acid
XCSLLFAILLAFLLAIAYLIVKAFSGLQMAWHLKPYNA

SEQ ID NO: 3419 - protein, 66 aa, Homo sapiens
  Payload ID: 754;
  Gene Symbol: ARL6IP6;
  Gene Name: ADP-ribosylation factor-like 6 interacting prt 6;
  ENSP ID: ENSP00000399141
AQPRRWPVQVLSILCSLLFAILLAFLLAIAYLIVKELHAENLKNEDDVDTGLLGIICISRKFSLML

SEQ ID NO: 3420 - protein, 186 aa, Homo sapiens
  Payload ID: 755;
  Gene Symbol: ARL8A;
  Gene Name: ADP-ribosylation factor-like 8A;
  Uniprot ID:  Q96BM9;
  ENSP ID: ENSP00000272217
MIALFNKLLDWFKALFWKEEMELTLVGLQYSGKTTFVNVIASGQFNEDMIPTVGFNMRKITKGNVTIKLWDIGGQPRFRSMWERYCRGVSAIVYMVDAADQEKIEASKNELHNLLDKPQLQGIPVLVLGNKRDLPGALDEKELIEKMNLSAIQDREICCYSISCKEKDNIDITLQWLIQHSKSRRS

SEQ ID NO: 3421 - protein, 147 aa, Homo sapiens
  Payload ID: 755;
  Gene Symbol: ARL8A;
  Gene Name: ADP-ribosylation factor-like 8A;
  ENSP ID: ENSP00000485023
MIALFNKLLDWFKALFWKEEMELTLVGLQYSGKTTFVNVIASGQFNEDMIPTVGFNMRKITKGNVTIKLWDIGGQPRFRSMWERYCRGVSAIVYMVDAADQEKIEASKNELHNLLDKPQLQGIPESVCHPGPRDLLLLHLLQRKGQH

SEQ ID NO: 3422 - protein, 186 aa, Homo sapiens
  Payload ID: 756;
  Gene Symbol: ARL8B;
  Gene Name: ADP-ribosylation factor-like 8B;
  Uniprot ID:  Q9NVJ2;
  ENSP ID: ENSP00000256496
MLALISRLLDWFRSLFWKEEMELTLVGLQYSGKTTFVNVIASGQFSEDMIPTVGFNMRKVTKGNVTIKIWDIGGQPRFRSMWERYCRGVNAIVYMIDAADREKIEASRNELHNLLDKPQLQGIPVLVLGNKRDLPNALDEKQLIEKMNLSAIQDREICCYSISCKEKDNIDITLQWLIQHSKSRRS

SEQ ID NO: 3423 - protein, 103 aa, Homo sapiens
  Payload ID: 756;
  Gene Symbol: ARL8B;
  Gene Name: ADP-ribosylation factor-like 8B;
  ENSP ID: ENSP00000400831
MIRSASWVWLLPPAGVRPCRAGAPRSRWRVRAEARSCGSRRRRRSSVLPSVLAPGRHHAGAHLPPAGLVPFALLEGRDGADARGAAVLGQDHLRQCHRVRSIQ

SEQ ID NO: 3424 - protein, 163 aa, Homo sapiens
  Payload ID: 756;
  Gene Symbol: ARL8B;
  Gene Name: ADP-ribosylation factor-like 8B;
  Uniprot ID:  Q9NVJ2;
  ENSP ID: ENSP00000402996
MLALISRLLDWFRSLFWKEEMELTLVGLQYSGKTTFVNVIASGQFSEDMIPTVGFNMRKVTKGNVTIKIWDIGGQPRFRSMWERYCRGVNAIVYMIDAADREKIEASRNELHNLLDKPQLQGIPISHFSGLFSIQNLEEAEASPEVFQSFLAIILELLSVPLK

SEQ ID NO: 3425 - protein, 102 aa, Homo sapiens
  Payload ID: 756;
  Gene Symbol: ARL8B;
  Gene Name: ADP-ribosylation factor-like 8B;
  ENSP ID: ENSP00000405196
MIRSASWVWLLPPAGVRPCRAGAPRSRWRVRAEARSCGSRRRRRSSVLPSVLAPGRHHAGAHLPPAGLVPFALLEGRDGADARGAAVLGQDHLRQCHRDQES

SEQ ID NO: 3426 - protein, 186 aa, Homo sapiens; identical to SEQ ID NO: 3422
  Payload ID: 756;
  Gene Symbol: ARL8B;
  Gene Name: ADP-ribosylation factor-like 8B;
  Uniprot ID:  Q9NVJ2;
  ENSP ID: ENSP00000479202

SEQ ID NO: 3427 - protein, 123 aa, Homo sapiens
  Payload ID: 757;
  Gene Symbol: ARL9;
  Gene Name: ADP-ribosylation factor-like 9;
  Uniprot ID:  Q6T311;
  ENSP ID: ENSP00000353210
MEFLEIGGSKPFRSYWEMYLSKGLLLIFVVDSADHSRLPEAKKYLHQLIAANPVLPLVVFANKQDLEAAYHITDIHEALALSEVGNDRKMFLFGTYLTKNGSEIPSTMQDAKDLIAQLAADVQ

SEQ ID NO: 3428 - protein, 272 aa, Homo sapiens
  Payload ID: 758;
  Gene Symbol: ADPRHL1;
  Gene Name: ADP-ribosylhydrolase like 1;
  Uniprot ID:  Q8NDY3;
  ENSP ID: ENSP00000348894
MVRCYVEIVEKLPERRPDPATIEGCAQLKPNNYLLAWHTPFNEKGSGFGAATKAMCIGLRYWKPERLETLIEVSVECGRMTHNHPTGFLGSLCTALFVSFAAQGKPLVQWGRDMLRAVPLAEEYCRKTIRHTAEYQEHWFYFEAKWQFYLEERKISKDSENKAIFPDNYDAEEREKTYRKWSSEGRGGRRGHDAPMIAYDALLAAGNSWTELCHRAMFHGGESAATGTIAGCLFGLLYGLDLVPKGLYQDLEDKEKLEDLGAALYRLSTEEK

SEQ ID NO: 3429 - protein, 354 aa, Homo sapiens
  Payload ID: 758;
  Gene Symbol: ADPRHL1;
  Gene Name: ADP-ribosylhydrolase like 1;
  Uniprot ID:  Q8NDY3;
  ENSP ID: ENSP00000364567
MEKFKAAMLLGSVGDALGYRNVCKENSTVGMKIQEELQRSGGLDHLVLSPGEWPVSDNTIMHIATAEALTTDYWCLDDLYREMVRCYVEIVEKLPERRPDPATIEGCAQLKPNNYLLAWHTPFNEKGSGFGAATKAMCIGLRYWKPERLETLIEVSVECGRMTHNHPTGFLGSLCTALFVSFAAQGKPLVQWGRDMLRAVPLAEEYCRKTIRHTAEYQEHWFYFEAKWQFYLEERKISKDSENKAIFPDNYDAEEREKTYRKWSSEGRGGRRGHDAPMIAYDALLAAGNSWTELCHRAMFHGGESAATGTIAGCLFGLLYGLDLVPKGLYQDLEDKEKLEDLGAALYRLSTEEK

SEQ ID NO: 3430 - protein, 176 aa, Homo sapiens
  Payload ID: 758;
  Gene Symbol: ADPRHL1;
  Gene Name: ADP-ribosylhydrolase like 1;
  ENSP ID: ENSP00000416213
MVRCYVEIVEKLPERRPDPATIEGCAQLKPNNYLLAWHTPFNEKGSGFGAATKAMCIGLRYWKPERLETLIEVSVECGRMTHNHPTGFLGSLCTALFVSFAAQGKPLVQWGRDMLRAVPLAEEYCRKTIRHTAEYQEHWFYFEAKWQFYLEERKISKDSENKAIFPDNYDAEEREK

SEQ ID NO: 3431 - protein, 1967 aa, Homo sapiens
  Payload ID: 758;
  Gene Symbol: ADPRHL1;
  Gene Name: ADP-ribosylhydrolase like 1;
  ENSP ID: ENSP00000489048
MEKFKAAMLLGSVGDALGYRNVCKENSTVGMKIQEELQRSGGLDHLVLSPGEWPVSDNTIMHIATAEALTTDYWCLDDLYREMVRCYVEIVEKLPERRPDPATIEGCAQLKPNNYLLAWHTPFNEKGSGFGAATKAMCIGLRYWKPERLETLIEVSVECGRMTHNHPTGFLGSLCTALFVSFAAQGKPLVQWGRDMLRAVPLAEEYCRKTIRHTAEYQEHWFYFEAKWQFYLEERKISKDSENKAIFPDNYDAEEREKTYRKWSSEGRGGRRGHDAPMIAYDALLAAGNSWTELCHRAMFHGGESAATGTIAGCLFGLLYGLDLVPKGLYQDLEDKEKLEDLGAALYRLSTEENRKSSKTCSDVMSVDAQTLKKKMGKLACDPAAHSILSSLLLYVTGRADRPPGTEAGGSRPSHQPQTQEATQRPTRFQLLQAKFLGTGRERYLKRTREVGRLISKDKQGPGGGLVGATINKLLEKTKEPAPKPCLSEKPRWGHPAGKSTVKNILKIFLAAEEKEAKEKEAREKPPVERPKAARGLLPKIMGKSSVLSKLREKFEQNSCLCSEASALRLHTQERKKRNLQRKRMHRPEVRVLHTATMASTCVKMPPARFLACTAEPLPALSIATVVCGPRSWLSHCTKISHSEARRPPRGEASVPPSARETGPSGNKAVGKGPLEEEPQRQPRPSKPVTPQVMAQRDGHAVPSLAFSCAPCTGGVLPGLVPASSPLGPASPWGTGSAGGDGTADPTAESTAGGVQEVRGARLTWPPGPPGECAGEGPEITMTVCSSEDEREGAGFPDPGRDPLFATQKYFPEQKVPEHIPPLNAPSVQAARRTQPATEPPRITVQIPVVHEMPAPPTRLQNMSSGENKPCICGGENVVENAHTEFPTVTENRRGHRAPVELSKLSGMQAGLSASSPQGPRAAPRLAAARGAVGADHSVPETLLTQRLQTDPAGGKENKGSFENSHGPRNPDDISGERTSELRDVKHPLPESNEISMQKKGSATNDPAASQNLLRGNTSHASSSQQVPSPTGRNPTGAPTSLAASSKGRTGPEGVTPMGMTVPGALEECRRPLLIESSQPLKAAEEITSHDVRENPLSSLNEPPKPGMKACGAMAAAGSVASRATPAPAPGSTQSPGDRTAGEPETLGQWGSRALSESHPRGEALPRDPHSHGLLAPGGSLEPKSGAAGRSLLRGVALVQHPEDIATLARHPEDAAALARHPEAARLYISNTSAASRHTAAVGGRKDVAVEGNLLGFSTESGIPASDHPRPQARSVAESPSYGPGLPPSPPENPQAKGREGVRFPRGAEPDHLLPAVPPAEVDMGWVGGTHQRGPPHLQAHLPPTAGDTQAKLRASVPEPRTQAGESQERPLTQADLGRQQSHQAQEETPQPGDAGKRVAPSGSKVVLNPAKEPQTWWAQDLAGDKGMAIGVGGACQRSDQGQQHLQGPWEERGRSTAWGEGTRAARNPAVPPGEPEGPGSPAAQGQAQKQVQEWDRGQVQGHAQEQAQWQTQIEAQGQAQEQAQGGTQGHSQGQAQKQFQNWAQGQAQGHAQEQAQWQTQIEAQGQAQEPAQGGAQGQVQGQAQKWAQGQIQGQAQKQVQGEVQKWAQEEAQGQAQWQTQIKAQKWAQEQTQKGAQERVQGQAQKGAQERAQEQAQEQTQIEAQGQAQKGAQERAREQAQKGAQERAREQAQKGAQERAREQAQKGAQERAREQAQKGAQERAREQAQKGAQERAREQAQKGAQERAQEQGREQTHIEAQGQAQKGAQEWARDRARDQGWEQTQIETQRQTQKGAQERAWEQGREQALTSGMAPRAWEQPISGIAEGVDAAGRSGGSRSPAPRDGGQSGGSGLGEPSAGYPPPGSRPLRGKSIATSPLGLGKSPTEPKPEAGGCGTPQAPAQEGSPDHPGAERALQDRMEASEPERRGRSRHLAKYKAQSFRDQRAFDLSFRPMSVRASDTSELPK

SEQ ID NO: 3432 - protein, 363 aa, Homo sapiens
  Payload ID: 759;
  Gene Symbol: ADPRHL2;
  Gene Name: ADP-ribosylhydrolase like 2;
  Uniprot ID:  Q9NX46;
  ENSP ID: ENSP00000362273
MAAAAMAAAAGGGAGAARSLSRFRGCLAGALLGDCVGSFYEAHDTVDLTSVLRHVQSLEPDPGTPGSERTEALYYTDDTAMARALVQSLLAKEAFDEVDMAHRFAQEYKKDPDRGYGAGVVTVFKKLLNPKCRDVFEPARAQFNGKGSYGNGGAMRVAGISLAYSSVQDVQKFARLSAQLTHASSLGYNGAILQALAVHLALQGESSSEHFLKQLLGHMEDLEGDAQSVLDARELGMEERPYSSRLKKIGELLDQASVTREEVVSELGNGIAAFESVPTAIYCFLRCMEPDPEIPSAFNSLQRTLIYSISLGGDTDTIATMAGAIAGAYYGMDQVPESWQQSCEGYEETDILAQSLHRVFQKS

SEQ ID NO: 3433 - protein, 327 aa, Homo sapiens
  Payload ID: 760;
  Gene Symbol: ART1;
  Gene Name: ADP-ribosyltransferase 1;
  Uniprot ID:  P52961;
  ENSP ID: ENSP00000250693
MQMPAMMSLLLVSVGLMEALQAQSHPITRRDLFSQEIQLDMALASFDDQYAGCAAAMTAALPDLNHTEFQANQVYADSWTLASSQWQERQARWPEWSLSPTRPSPPPLGFRDEHGVALLAYTANSPLHKEFNAAVREAGRSRAHYLHHFSFKTLHFLLTEALQLLGSGQRPPRCHQVFRGVHGLRFRPAGPRATVRLGGFASASLKHVAAQQFGEDTFFGIWTCLGAPIKGYSFFPGEEEVLIPPFETFQVINASRLAQGPARIYLRALGKHSTYNCEYIKDKKCKSGPCHLDNSAMGQSPLSAVWSLLLLLWFLVVRAFPDGPGLL

SEQ ID NO: 3434 - protein, 378 aa, Homo sapiens
  Payload ID: 761;
  Gene Symbol: ART3;
  Gene Name: ADP-ribosyltransferase 3;
  Uniprot ID:  Q13508;
  ENSP ID: ENSP00000304313
MKTGHFEIVTMLLATMILVDIFQVKAEVLDMADNAFDDEYLKCTDRMEIKYVPQLLKEEKASHQQLDTVWENAKAKWAARKTQIFLPMNFKDNHGIALMAYISEAQEQTPFYHLFSEAVKMAGQSREDYIYGFQFKAFHFYLTRALQLLRKPCEASSKTVVYRTSQGTSFTFGGLNQARFGHFTLAYSAKPQAANDQLTVLSIYTCLGVDIENFLDKESERITLIPLNEVFQVSQEGAGNNLILQSINKTCSHYECAFLGGLKTENCIENLEYFQPIYVYNPGEKNQKLEDHSEKNWKLEDHGEKNQKLEDHGVKILEPTQIPEDKSQGNINNPTPGPVPVPGPKSHPSASSGKLLLPQFGMVIILISVSAINLFVAL

SEQ ID NO: 3435 - protein, 367 aa, Homo sapiens
  Payload ID: 761;
  Gene Symbol: ART3;
  Gene Name: ADP-ribosyltransferase 3;
  Uniprot ID:  Q13508;
  ENSP ID: ENSP00000343843
MKTGHFEIVTMLLATMILVDIFQVKAEVLDMADNAFDDEYLKCTDRMEIKYVPQLLKEEKASHQQLDTVWENAKAKWAARKTQIFLPMNFKDNHGIALMAYISEAQEQTPFYHLFSEAVKMAGQSREDYIYGFQFKAFHFYLTRALQLLRKPCEASSKTVVYRTSQGTSFTFGGLNQARFGHFTLAYSAKPQAANDQLTVLSIYTCLGVDIENFLDKESERITLIPLNEVFQVSQEGAGNNLILQSINKTCSHYECAFLGGLKTENCIENLEYFQPIYVYNPGEKNQKLEDHSEKNWKLEDHGEKNQKLEDHGVKILEPTQIPAPGPVPVPGPKSHPSASSGKLLLPQFGMVIILISVSAINLFVAL

SEQ ID NO: 3436 - protein, 389 aa, Homo sapiens
  Payload ID: 761;
  Gene Symbol: ART3;
  Gene Name: ADP-ribosyltransferase 3;
  Uniprot ID:  Q13508;
  ENSP ID: ENSP00000348064
MKTGHFEIVTMLLATMILVDIFQVKAEVLDMADNAFDDEYLKCTDRMEIKYVPQLLKEEKASHQQLDTVWENAKAKWAARKTQIFLPMNFKDNHGIALMAYISEAQEQTPFYHLFSEAVKMAGQSREDYIYGFQFKAFHFYLTRALQLLRKPCEASSKTVVYRTSQGTSFTFGGLNQARFGHFTLAYSAKPQAANDQLTVLSIYTCLGVDIENFLDKESERITLIPLNEVFQVSQEGAGNNLILQSINKTCSHYECAFLGGLKTENCIENLEYFQPIYVYNPGEKNQKLEDHSEKNWKLEDHGEKNQKLEDHGVKILEPTQIPGMKIPEPFPLPEDKSQGNINNPTPGPVPVPGPKSHPSASSGKLLLPQFGMVIILISVSAINLFVAL

SEQ ID NO: 3437 - protein, 107 aa, Homo sapiens
  Payload ID: 761;
  Gene Symbol: ART3;
  Gene Name: ADP-ribosyltransferase 3;
  ENSP ID: ENSP00000421345
MKTGHFEIVTMLLATMILVDIFQVKAEVLDMADNAFDDEYLKCTDRMEIKYVPQLLKEEKASHQQLDTVWENAKAKWAARKTQIFLPMNFKDNHGIALMAYISEAQE

SEQ ID NO: 3438 - protein, 129 aa, Homo sapiens
  Payload ID: 761;
  Gene Symbol: ART3;
  Gene Name: ADP-ribosyltransferase 3;
  ENSP ID: ENSP00000421431
MKTGHFEIVTMLLATMILVDIFQVKAEVLDMADNAFDDEYLKCTDRMEIKYVPQLLKEEKASHQQLDTVWENAKAKWAARKTQIFLPMNFKDNHGIALMAYISEAQEQTPFYHLFSEAVKMAGQSREDY

SEQ ID NO: 3439 - protein, 117 aa, Homo sapiens
  Payload ID: 761;
  Gene Symbol: ART3;
  Gene Name: ADP-ribosyltransferase 3;
  ENSP ID: ENSP00000422249
KTCSHYECAFLGGLKTENCIENLEYFQPIYVYNPGEKNQKLEDHSEKNWKLEDHGEKNQKLEDHGVKILEPTQIPGMKIPEPFPLPGIKMIQLNEKPEDKSQGNINNPTPGPVPVPG

SEQ ID NO: 3440 - protein, 201 aa, Homo sapiens
  Payload ID: 761;
  Gene Symbol: ART3;
  Gene Name: ADP-ribosyltransferase 3;
  ENSP ID: ENSP00000422287
MKTGHFEIVTMLLATMILVDIFQVKAEVLDMADNAFDDEYLKCTDRMEIKYVPQLLKEEKASHQQLDTVWENAKAKWAARKTQIFLPMNFKDNHGIALMAYISEAQEQTPFYHLFSEAVKMAGQSREDYIYGFQFKAFHFYLTRALQLLRKPCEASSKTVVYRTSQGTSFTFGGLNQARFGHFTLAYSAKPQAANDQLTVL

SEQ ID NO: 3441 - protein, 174 aa, Homo sapiens
  Payload ID: 761;
  Gene Symbol: ART3;
  Gene Name: ADP-ribosyltransferase 3;
  ENSP ID: ENSP00000425327
MKTGHFEIVTMLLATMILVDIFQVKAEVLDMADNAFDDEYLKCTDRMEIKYVPQLLKEEKASHQQLDTVWENAKAKWAARKTQIFLPMNFKDNHGIALMAYISEAQEQTPFYHLFSEAVKMAGQSREDYIYGFQFKAFHFYLTRALQLLRKPCEASSKTVVYRTSQGTSFTFGG

SEQ ID NO: 3442 - protein, 314 aa, Homo sapiens
  Payload ID: 762;
  Gene Symbol: ART4;
  Gene Name: ADP-ribosyltransferase 4 (Dombrock blood group);
  Uniprot ID:  Q93070;
  ENSP ID: ENSP00000228936
MGPLINRCKKILLPTTVPPATMRIWLLGGLLPFLLLLSGLQRPTEGSEVAIKIDFDFAPGSFDDQYQGCSKQVMEKLTQGDYFTKDIEAQKNYFRMWQKAHLAWLNQGKVLPQNMTTTHAVAILFYTLNSNVHSDFTRAMASVARTPQQYERSFHFKYLHYYLTSAIQLLRKDSIMENGTLCYEVHYRTKDVHFNAYTGATIRFGQFLSTSLLKEEAQEFGNQTLFTIFTCLGAPVQYFSLKKEVLIPPYELFKVINMSYHPRGDWLQLRSTGNLSTYNCQLLKASSKKCIPDPIAIASLSFLTSVIIFSKSRV

SEQ ID NO: 3443 - protein, 273 aa, Homo sapiens
  Payload ID: 762;
  Gene Symbol: ART4;
  Gene Name: ADP-ribosyltransferase 4 (Dombrock blood group);
  ENSP ID: ENSP00000405689
PPATMRIWLLGGLLPFLLLLSGLQRPTEGSEVAIKIDFDFAPGSFDDQYQGCSKQVMEKLTQGDYFTKDIEAQKNYFRMWQKAHLAWLNQGKVLPQNMTTTHAVAILFYTLNSNVHSDFTRAMASVARTPQQYERSFHFKYLHYYLTSAIQLLRKDSIMENGTLCYEVHYRTKDVHFNAYTGATIRFGQFLSTSLLKEEAQEFGNQTLFTIFTCLGAPVQYFSLKKEVLIPPYELFKVINMSYHPRGDWLQLRSTGNLSTYNCQLLKGILYLN

SEQ ID NO: 3444 - protein, 65 aa, Homo sapiens
  Payload ID: 762;
  Gene Symbol: ART4;
  Gene Name: ADP-ribosyltransferase 4 (Dombrock blood group);
  ENSP ID: ENSP00000412735
PPATMRIWLLGGLLPFLLLLSGLQRPTEGSEVAIKIDFDFAPGSFDDQYQGCSKQLPARNASLIL

SEQ ID NO: 3445 - protein, 41 aa, Homo sapiens
  Payload ID: 762;
  Gene Symbol: ART4;
  Gene Name: ADP-ribosyltransferase 4 (Dombrock blood group);
  ENSP ID: ENSP00000442877
PPATMRIWLLGGLLPFLLLLSGLQRPTEGSELPARNASLIL

SEQ ID NO: 3446 - protein, 291 aa, Homo sapiens
  Payload ID: 763;
  Gene Symbol: ART5;
  Gene Name: ADP-ribosyltransferase 5;
  Uniprot ID:  Q96L15;
  ENSP ID: ENSP00000352992
MALAALMIALGSLGLHTWQAQAVPILPLGLAPDTFDDTYVGCAEEMEEKAAPLLKEEMAHHALLRESWEAAQETWEDKRRGLTLPPGFKAQNGIAIMVYTNSSNTLYWELNQAVRTGGGSRELYMRHFPFKALHFYLIRALQLLRGSGGCSRGPGEVVFRGVGSLRFEPKRLGDSVRLGQFASSSLDKAVAHRFGNATLFSLTTCFGAPIQAFSVFPKEREVLIPPHEVFLVTRFSQDGAQSLVTLWSYNQTCSHFNCAYLGGEKRRGCVSAPGALGTGDLHMTKRHLQQP

SEQ ID NO: 3447 - protein, 239 aa, Homo sapiens
  Payload ID: 763;
  Gene Symbol: ART5;
  Gene Name: ADP-ribosyltransferase 5;
  Uniprot ID:  Q96L15;
  ENSP ID: ENSP00000380257
MALAALMIALGSLGLHTWQAQAVPILPLGLAPDTFDDTYVGCAEEMEEKAAPLLKEEMAHHALLRESWEAAQETWEDKRRGLTLPPGFKAQNGIAIMVYTNSSNTLYWELNQAVRTGGGSRELYMRHFPFKALHFYLIRALQLLRGSGGCSRGPGEVVFRGVGSLRFEPKRLGDSVRLGQFASSSLDKAVAHRFGEKRRGCVSAPGVQLGSQSEGASSLPPWKTLLLAPGEFQLSGVGP

SEQ ID NO: 3448 - protein, 291 aa, Homo sapiens; identical to SEQ ID NO: 3446
  Payload ID: 763;
  Gene Symbol: ART5;
  Gene Name: ADP-ribosyltransferase 5;
  Uniprot ID:  Q96L15;
  ENSP ID: ENSP00000380258

SEQ ID NO: 3449 - protein, 264 aa, Homo sapiens
  Payload ID: 763;
  Gene Symbol: ART5;
  Gene Name: ADP-ribosyltransferase 5;
  ENSP ID: ENSP00000402737
  MOD_RES (1)..(1): Any amino acid
XEMEEKAAPLLKEEMAHHALLRESWEAAQETWEDKRRGLTLPPGFKAQNGIAIMVYTNSSNTLYWELNQAVRTGGGSRELYMRHFPFKALHFYLIRALQLLRGSGGCSRGPGEVVFRGVGSLRFEPKRLGDSVRLGQFASSSLDKAVAHRFGNATLFSLTTCFGAPIQAFSVFPKEREVLIPPHEVFLVTRFSQDGAQSLVTLWSYNQTCSHFNCAYLGGEKRRGCVSAPGVQLGSQSEGASSLPPWKTLLLAPGEFQLSGVGP

SEQ ID NO: 3450 - protein, 151 aa, Homo sapiens
  Payload ID: 763;
  Gene Symbol: ART5;
  Gene Name: ADP-ribosyltransferase 5;
  ENSP ID: ENSP00000413852
AVPILPLGLAPDTFDDTYVGCAEEMEEKAAPLLKEEMAHHALLRESWEAAQETWEDKRRGLTLPPGFKAQNGIAIMVYTNSSNTLYWELNQAAFSVFPKEREVLIPPHEVFLVTRFSQDGAQSLVTLWSYNQTCSHFNCAYLGGEKRRGCV

SEQ ID NO: 3451 - protein, 689 aa, Homo sapiens
  Payload ID: 764;
  Gene Symbol: ADRBK1;
  Gene Name: adrenergic, beta, receptor kinase 1;
  Uniprot ID:  P25098;
  ENSP ID: ENSP00000312262
MADLEAVLADVSYLMAMEKSKATPAARASKKILLPEPSIRSVMQKYLEDRGEVTFEKIFSQKLGYLLFRDFCLNHLEEARPLVEFYEEIKKYEKLETEEERVARSREIFDSYIMKELLACSHPFSKSATEHVQGHLGKKQVPPDLFQPYIEEICQNLRGDVFQKFIESDKFTRFCQWKNVELNIHLTMNDFSVHRIIGRGGFGEVYGCRKADTGKMYAMKCLDKKRIKMKQGETLALNERIMLSLVSTGDCPFIVCMSYAFHTPDKLSFILDLMNGGDLHYHLSQHGVFSEADMRFYAAEIILGLEHMHNRFVVYRDLKPANILLDEHGHVRISDLGLACDFSKKKPHASVGTHGYMAPEVLQKGVAYDSSADWFSLGCMLFKLLRGHSPFRQHKTKDKHEIDRMTLTMAVELPDSFSPELRSLLEGLLQRDVNRRLGCLGRGAQEVKESPFFRSLDWQMVFLQKYPPPLIPPRGEVNAADAFDIGSFDEEDTKGIKLLDSDQELYRNFPLTISERWQQEVAETVFDTINAETDRLEARKKAKNKQLGHEEDYALGKDCIMHGYMSKMGNPFLTQWQRRYFYLFPNRLEWRGEGEAPQSLLTMEEIQSVEETQIKERKCLLLKIRGGKQFILQCDSDPELVQWKKELRDAYREAQQLVQRVPKMKNKPRSPVVELSKVPLVQRGSANGL

SEQ ID NO: 3452 - protein, 408 aa, Homo sapiens
  Payload ID: 764;
  Gene Symbol: ADRBK1;
  Gene Name: adrenergic, beta, receptor kinase 1;
  ENSP ID: ENSP00000434126
MADLEAVLADVSYLMAMEKSKATPAARASKKILLPEPSIRSVMQKYLEDRGEVTFEKIFSQKLGYLLFRDFCLNHLEEARPLVEFYEEIKKYEKLETEEERVARSREIFDSYIMKELLACSHPFSKSATEHVQGHLGKKQVPPDLFQPYIEEICQNLRGDVFQKFIESDKFTRFCQWKNVELNIHLTMNDFSVHRIIGRGGFGEVYGCRKADTGKMYAMKCLDKKRIKMKQGETLALNERIMLSLVSTGDCPFIVCMSYAFHTPDKLSFILDLMNGGDLHYHLSQHGVFSEADMRFYAAEIILGLEHMHNRFVVYRDLKPANILLDEHGHVRISDLGLACDFSKKKPHASVGTHGYMAPEVLQKGSRCLCGVAPSPPRGWVGAPSPPVYSFPGAFLCRFLNVILKSEK

SEQ ID NO: 3453 - protein, 688 aa, Homo sapiens
  Payload ID: 765;
  Gene Symbol: ADRBK2;
  Gene Name: adrenergic, beta, receptor kinase 2;
  Uniprot ID:  P35626;
  ENSP ID: ENSP00000317578
MADLEAVLADVSYLMAMEKSKATPAARASKRIVLPEPSIRSVMQKYLAERNEITFDKIFNQKIGFLLFKDFCLNEINEAVPQVKFYEEIKEYEKLDNEEDRLCRSRQIYDAYIMKELLSCSHPFSKQAVEHVQSHLSKKQVTSTLFQPYIEEICESLRGDIFQKFMESDKFTRFCQWKNVELNIHLTMNEFSVHRIIGRGGFGEVYGCRKADTGKMYAMKCLDKKRIKMKQGETLALNERIMLSLVSTGDCPFIVCMTYAFHTPDKLCFILDLMNGGDLHYHLSQHGVFSEKEMRFYATEIILGLEHMHNRFVVYRDLKPANILLDEHGHARISDLGLACDFSKKKPHASVGTHGYMAPEVLQKGTAYDSSADWFSLGCMLFKLLRGHSPFRQHKTKDKHEIDRMTLTVNVELPDTFSPELKSLLEGLLQRDVSKRLGCHGGGSQEVKEHSFFKGVDWQHVYLQKYPPPLIPPRGEVNAADAFDIGSFDEEDTKGIKLLDCDQELYKNFPLVISERWQQEVTETVYEAVNADTDKIEARKRAKNKQLGHEEDYALGKDCIMHGYMLKLGNPFLTQWQRRYFYLFPNRLEWRGEGESRQNLLTMEQILSVEETQIKDKKCILFRIKGGKQFVLQCESDPEFVQWKKELNETFKEAQRLLRRAPKFLNKPRSGTVELPKPSLCHRNSNGL

SEQ ID NO: 3454 - protein, 45 aa, Homo sapiens
  Payload ID: 765;
  Gene Symbol: ADRBK2;
  Gene Name: adrenergic, beta, receptor kinase 2;
  ENSP ID: ENSP00000393688
TPAARASKRIVLPEPSIRSVMQKYLAERNEITFDKIFNQKIDKGI

SEQ ID NO: 3455 - protein, 387 aa, Homo sapiens
  Payload ID: 765;
  Gene Symbol: ADRBK2;
  Gene Name: adrenergic, beta, receptor kinase 2;
  ENSP ID: ENSP00000478925
MADLEAVLADVSYLMAMEKSKATPAARASKRIVLPEPSIRSVMQKYLAERNEITFDKIFNQKIGFLLFKDFCLNEINEAVPQVKFYEEIKEYEKLDNEEDRLCRSRQIYDAYIMKELLSCSHPFSKQAVEHVQSHLSKKQVTSTLFQPYIEEICESLRGDIFQKFMESDKFTRFCQWKNVELNIHLTMNEFSVHRIIGRGGFGEVYGCRKADTGKMYAMKCLDKKRIKMKQGETLALNERIMLSLVSTGDCPFIVCMTYAFHTPDKLCFILDLMNGGDLHYHLSQHGVFSEKEMRFYATEIILGLEHMHNRFVVYRDLKPANILLDEHGHARISDLGLACDFSKKKPHASVGTHGYMAPEVLQKGTAYDSSADWFSLGCMLFKLLRG

SEQ ID NO: 3456 - protein, 466 aa, Homo sapiens
  Payload ID: 766;
  Gene Symbol: ADRA1A;
  Gene Name: adrenoceptor alpha 1A;
  Uniprot ID:  P35348;
  ENSP ID: ENSP00000276393
MVFLSGNASDSSNCTQPPAPVNISKAILLGVILGGLILFGVLGNILVILSVACHRHLHSVTHYYIVNLAVADLLLTSTVLPFSAIFEVLGYWAFGRVFCNIWAAVDVLCCTASIMGLCIISIDRYIGVSYPLRYPTIVTQRRGLMALLCVWALSLVISIGPLFGWRQPAPEDETICQINEEPGYVLFSALGSFYLPLAIILVMYCRVYVVAKRESRGLKSGLKTDKSDSEQVTLRIHRKNAPAGGSGMASAKTKTHFSVRLLKFSREKKAAKTLGIVVGCFVLCWLPFFLVMPIGSFFPDFKPSETVFKIVFWLGYLNSCINPIIYPCSSQEFKKAFQNVLRIQCLCRKQSSKHALGYTLHPPSQAVEGQHKDMVRIPVGSRETFYRISKTDGVCEWKFFSSMPRGSARITVSKDQSSCTTARVRSKSFLQVCCCVGPSTPSLDKNHQVPTIKVHTISLSENGEEV

SEQ ID NO: 3457 - protein, 455 aa, Homo sapiens
  Payload ID: 766;
  Gene Symbol: ADRA1A;
  Gene Name: adrenoceptor alpha 1A;
  Uniprot ID:  P35348;
  ENSP ID: ENSP00000346557
MVFLSGNASDSSNCTQPPAPVNISKAILLGVILGGLILFGVLGNILVILSVACHRHLHSVTHYYIVNLAVADLLLTSTVLPFSAIFEVLGYWAFGRVFCNIWAAVDVLCCTASIMGLCIISIDRYIGVSYPLRYPTIVTQRRGLMALLCVWALSLVISIGPLFGWRQPAPEDETICQINEEPGYVLFSALGSFYLPLAIILVMYCRVYVVAKRESRGLKSGLKTDKSDSEQVTLRIHRKNAPAGGSGMASAKTKTHFSVRLLKFSREKKAAKTLGIVVGCFVLCWLPFFLVMPIGSFFPDFKPSETVFKIVFWLGYLNSCINPIIYPCSSQEFKKAFQNVLRIQCLCRKQSSKHALGYTLHPPSQAVEGQHKDMVRIPVGSRETFYRISKTDGVCEWKFFSSMPRGSARITVSKDQSSCTTARRGMDCRYFTKNCREHIKHVNFMMPPWRKGSEC

SEQ ID NO: 3458 - protein, 342 aa, Homo sapiens
  Payload ID: 766;
  Gene Symbol: ADRA1A;
  Gene Name: adrenoceptor alpha 1A;
  Uniprot ID:  P35348;
  ENSP ID: ENSP00000369946
MVFLSGNASDSSNCTQPPAPVNISKAILLGVILGGLILFGVLGNILVILSVACHRHLHSVTHYYIVNLAVADLLLTSTVLPFSAIFEVLGYWAFGRVFCNIWAAVDVLCCTASIMGLCIISIDRYIGVSYPLRYPTIVTQRRGLMALLCVWALSLVISIGPLFGWRQPAPEDETICQINEEPGYVLFSALGSFYLPLAIILVMYCRVYVVAKRESRGLKSGLKTDKSDSEQVTLRIHRKNAPAGGSGMASAKTKTHFSVRLLKFSREKKAAKTLGIVVGCFVLCWLPFFLVMPIDEETEAQEGKNDSPSFKQPVHHAAVLGLEVMEKENLEGVSRKDTCGVW

SEQ ID NO: 3459 - protein, 466 aa, Homo sapiens; identical to SEQ ID NO: 3456
  Payload ID: 766;
  Gene Symbol: ADRA1A;
  Gene Name: adrenoceptor alpha 1A;
  Uniprot ID:  P35348;
  ENSP ID: ENSP00000369947

SEQ ID NO: 3460 - protein, 429 aa, Homo sapiens
  Payload ID: 766;
  Gene Symbol: ADRA1A;
  Gene Name: adrenoceptor alpha 1A;
  Uniprot ID:  P35348;
  ENSP ID: ENSP00000369956
MVFLSGNASDSSNCTQPPAPVNISKAILLGVILGGLILFGVLGNILVILSVACHRHLHSVTHYYIVNLAVADLLLTSTVLPFSAIFEVLGYWAFGRVFCNIWAAVDVLCCTASIMGLCIISIDRYIGVSYPLRYPTIVTQRRGLMALLCVWALSLVISIGPLFGWRQPAPEDETICQINEEPGYVLFSALGSFYLPLAIILVMYCRVYVVAKRESRGLKSGLKTDKSDSEQVTLRIHRKNAPAGGSGMASAKTKTHFSVRLLKFSREKKAAKTLGIVVGCFVLCWLPFFLVMPIGSFFPDFKPSETVFKIVFWLGYLNSCINPIIYPCSSQEFKKAFQNVLRIQCLCRKQSSKHALGYTLHPPSQAVEGQHKDMVRIPVGSRETFYRISKTDGVCEWKFFSSMPRGSARITVSKDQSSCTTARGHTPMT

SEQ ID NO: 3461 - protein, 475 aa, Homo sapiens
  Payload ID: 766;
  Gene Symbol: ADRA1A;
  Gene Name: adrenoceptor alpha 1A;
  Uniprot ID:  P35348;
  ENSP ID: ENSP00000369960
MVFLSGNASDSSNCTQPPAPVNISKAILLGVILGGLILFGVLGNILVILSVACHRHLHSVTHYYIVNLAVADLLLTSTVLPFSAIFEVLGYWAFGRVFCNIWAAVDVLCCTASIMGLCIISIDRYIGVSYPLRYPTIVTQRRGLMALLCVWALSLVISIGPLFGWRQPAPEDETICQINEEPGYVLFSALGSFYLPLAIILVMYCRVYVVAKRESRGLKSGLKTDKSDSEQVTLRIHRKNAPAGGSGMASAKTKTHFSVRLLKFSREKKAAKTLGIVVGCFVLCWLPFFLVMPIGSFFPDFKPSETVFKIVFWLGYLNSCINPIIYPCSSQEFKKAFQNVLRIQCLCRKQSSKHALGYTLHPPSQAVEGQHKDMVRIPVGSRETFYRISKTDGVCEWKFFSSMPRGSARITVSKDQSSCTTARTKSRSVTRLECSGMILAHCNLRLPGSRDSPASASQAAGTTGMCHQADATRPS

SEQ ID NO: 3462 - protein, 324 aa, Homo sapiens
  Payload ID: 766;
  Gene Symbol: ADRA1A;
  Gene Name: adrenoceptor alpha 1A;
  Uniprot ID:  P35348;
  ENSP ID: ENSP00000430414
MVFLSGNASDSSNCTQPPAPVNISKAILLGVILGGLILFGVLGNILVILSVACHRHLHSVTHYYIVNLAVADLLLTSTVLPFSAIFEVLGYWAFGRVFCNIWAAVDVLCCTASIMGLCIISIDRYIGVSYPLRYPTIVTQRRGLMALLCVWALSLVISIGPLFGWRQPAPEDETICQINEEPGYVLFSALGSFYLPLAIILVMYCRVYVVAKRESRGLKSGLKTDKSDSEQVTLRIHRKNAPAGGSGMASAKTKTHFSVRLLKFSREKKAAKTLGIVVGCFVLCWLPFFLVMPIGTYILKYDVLFWRKGLSVCTRLRERKEIKN

SEQ ID NO: 3463 - protein, 427 aa, Homo sapiens
  Payload ID: 766;
  Gene Symbol: ADRA1A;
  Gene Name: adrenoceptor alpha 1A;
  ENSP ID: ENSP00000430793
MVFLSGNASDSSNCTQPPAPVNISKAILLGVILGGLILFGVLGNILVILSVACHRHLHSVTHYYIVNLAVADLLLTSTVLPFSAIFEVLGYWAFGRVFCNIWAAVDVLCCTASIMGLCIISIDRYIGVSYPLRYPTIVTQRRGLMALLCVWALSLVISIGPLFGWRQPAPEDETICQINEEPGYVLFSALGSFYLPLAIILVMYCRVYVVAKRESRGLKSGLKTDKSDSEQVTLRIHRKNAPAGGSGMASAKTKTHFSVRLLKFSREKKAAKTLGIVVGCFVLCWLPFFLVMPIGSFFPDFKPSETVFKIVFWLGYLNSCINPIIYPCSSQEFKKAFQNVLRIQCLCRKQSSKHALGYTLHPPSQAVEGQHKDMVRIPVGSRETFYRISKTDGVCEWKFFSSMPRGSARITVSKDQSSCTTARSSGF

SEQ ID NO: 3464 - protein, 324 aa, Homo sapiens; identical to SEQ ID NO: 3462
  Payload ID: 766;
  Gene Symbol: ADRA1A;
  Gene Name: adrenoceptor alpha 1A;
  Uniprot ID:  P35348;
  ENSP ID: ENSP00000431073

SEQ ID NO: 3465 - protein, 520 aa, Homo sapiens
  Payload ID: 767;
  Gene Symbol: ADRA1B;
  Gene Name: adrenoceptor alpha 1B;
  Uniprot ID:  P35368;
  ENSP ID: ENSP00000306662
MNPDLDTGHNTSAPAHWGELKNANFTGPNQTSSNSTLPQLDITRAISVGLVLGAFILFAIVGNILVILSVACNRHLRTPTNYFIVNLAMADLLLSFTVLPFSAALEVLGYWVLGRIFCDIWAAVDVLCCTASILSLCAISIDRYIGVRYSLQYPTLVTRRKAILALLSVWVLSTVISIGPLLGWKEPAPNDDKECGVTEEPFYALFSSLGSFYIPLAVILVMYCRVYIVAKRTTKNLEAGVMKEMSNSKELTLRIHSKNFHEDTLSSTKAKGHNPRSSIAVKLFKFSREKKAAKTLGIVVGMFILCWLPFFIALPLGSLFSTLKPPDAVFKVVFWLGYFNSCLNPIIYPCSSKEFKRAFVRILGCQCRGRGRRRRRRRRRLGGCAYTYRPWTRGGSLERSQSRKDSLDDSGSCLSGSQRTLPSASPSPGYLGRGAPPPVELCAFPEWKAPGALLSLPAPEPPGRRGRHDSGPLFTFKLLTEPESPGTDGGASNGGCEAAADVANGQPGFKSNMPLAPGQF

SEQ ID NO: 3466 - protein, 572 aa, Homo sapiens
  Payload ID: 768;
  Gene Symbol: ADRA1D;
  Gene Name: adrenoceptor alpha 1D;
  Uniprot ID:  P25100;
  ENSP ID: ENSP00000368766
MTFRDLLSVSFEGPRPDSSAGGSSAGGGGGSAGGAAPSEGPAVGGVPGGAGGGGGVVGAGSGEDNRSSAGEPGSAGAGGDVNGTAAVGGLVVSAQGVGVGVFLAAFILMAVAGNLLVILSVACNRHLQTVTNYFIVNLAVADLLLSATVLPFSATMEVLGFWAFGRAFCDVWAAVDVLCCTASILSLCTISVDRYVGVRHSLKYPAIMTERKAAAILALLWVVALVVSVGPLLGWKEPVPPDERFCGITEEAGYAVFSSVCSFYLPMAVIVVMYCRVYVVARSTTRSLEAGVKRERGKASEVVLRIHCRGAATGADGAHGMRSAKGHTFRSSLSVRLLKFSREKKAAKTLAIVVGVFVLCWFPFFFVLPLGSLFPQLKPSEGVFKVIFWLGYFNSCVNPLIYPCSSREFKRAFLRLLRCQCRRRRRRRPLWRVYGHHWRASTSGLRQDCAPSSGDAPPGAPLALTALPDPDPEPPGTPEMQAPVASRRKPPSAFREWRLLGPFRRPTTQLRAKVSSLSHKIRAGGAQRAEAACAQRSEVEAVSLGVPHEVAEGATCQAYELADYSNLRETDI

SEQ ID NO: 3467 - protein, 465 aa, Homo sapiens
  Payload ID: 769;
  Gene Symbol: ADRA2A;
  Gene Name: adrenoceptor alpha 2A;
  Uniprot ID:  P08913;
  ENSP ID: ENSP00000280155
MFRQEQPLAEGSFAPMGSLQPDAGNASWNGTEAPGGGARATPYSLQVTLTLVCLAGLLMLLTVFGNVLVIIAVFTSRALKAPQNLFLVSLASADILVATLVIPFSLANEVMGYWYFGKAWCEIYLALDVLFCTSSIVHLCAISLDRYWSITQAIEYNLKRTPRRIKAIIITVWVISAVISFPPLISIEKKGGGGGPQPAEPRCEINDQKWYVISSCIGSFFAPCLIMILVYVRIYQIAKRRTRVPPSRRGPDAVAAPPGGTERRPNGLGPERSAGPGGAEAEPLPTQLNGAPGEPAPAGPRDTDALDLEESSSSDHAERPPGPRRPERGPRGKGKARASQVKPGDSLPRRGPGATGIGTPAAGPGEERVGAAKASRWRGRQNREKRFTFVLAVVIGVFVVCWFPFFFTYTLTAVGCSVPRTLFKFFFWFGYCNSSLNPVIYTIFNHDFRRAFKKILCRGDRKRIV

SEQ ID NO: 3468 - protein, 450 aa, Homo sapiens
  Payload ID: 770;
  Gene Symbol: ADRA2B;
  Gene Name: adrenoceptor alpha 2B;
  ENSP ID: ENSP00000480573
MDHQDPYSVQATAAIAAAITFLILFTIFGNALVILAVLTSRSLRAPQNLFLVSLAAADILVATLIIPFSLANELLGYWYFRRTWCEVYLALDVLFCTSSIVHLCAISLDRYWAVSRALEYNSKRTPRRIKCIILTVWLIAAVISLPPLIYKGDQGPQPRGRPQCKLNQEAWYILASSIGSFFAPCLIMILVYLRIYLIAKRSNRRGPRAKGGPGQGESKQPRPDHGGALASAKLPALASVASAREVNGHSKSTGEKEEGETPEDTGTRALPPSWAALPNSGQGQKEGVCGASPEDEAEEEEEEEEEEEECEPQAVPVSPASACSPPLQQPQGSRVLATLRGQVLLGRGVGAIGGQWWRRRAQLTREKRFTFVLAVVIGVFVLCWFPFFFSYSLGAICPKHCKVPHGLFQFFFWIGYCNSSLNPVIYTIFNQDFRRAFRRILCRPWTQTAW

SEQ ID NO: 3469 - protein, 462 aa, Homo sapiens
  Payload ID: 771;
  Gene Symbol: ADRA2C;
  Gene Name: adrenoceptor alpha 2C;
  Uniprot ID:  P18825;
  ENSP ID: ENSP00000386069
MASPALAAALAVAAAAGPNASGAGERGSGGVANASGASWGPPRGQYSAGAVAGLAAVVGFLIVFTVVGNVLVVIAVLTSRALRAPQNLFLVSLASADILVATLVMPFSLANELMAYWYFGQVWCGVYLALDVLFCTSSIVHLCAISLDRYWSVTQAVEYNLKRTPRRVKATIVAVWLISAVISFPPLVSLYRQPDGAAYPQCGLNDETWYILSSCIGSFFAPCLIMGLVYARIYRVAKLRTRTLSEKRAPVGPDGASPTTENGLGAAAGAGENGHCAPPPADVEPDESSAAAERRRRRGALRRGGRRRAGAEGGAGGADGQGAGPGAAESGALTASRSPGPGGRLSRASSRSVEFFLSRRRRARSSVCRRKVAQAREKRFTFVLAVVMGVFVLCWFPFFFSYSLYGICREACQVPGPLFKFFFWIGYCNSSLNPVIYTVFNQDFRRSFKHILFRRRRRGFRQ

SEQ ID NO: 3470 - protein, 374 aa, Homo sapiens
  Payload ID: 771;
  Gene Symbol: ADRA2C;
  Gene Name: adrenoceptor alpha 2C;
  ENSP ID: ENSP00000426268
MASPALAAALAVAAAAGPNASGAGERGSGGVANASGASWGPPRGQYSAGAVAGLAAVVGFLIVFTVVGNVLVVIAVLTSRALRAPQNLFLVSLASADILVATLVMPFSLANELMAYWYFGQVWCGVYLALDVLFCTSSIVHLCAISLDRYWSVTQAVEYNLKRTPRRVKATIVAVWLISAVISFPPLVSLYRQPDGAAYPQCGLNDETWYILSSCIGSFFAPCLIMGLVYARIYRVAKLRTRTLSEKRAPVGPDGASPTTENGLGAAAGAGENGHCAPPPADVEPDESSAAAERRRRRGALRRGGRRRAGAEGGAGGADGQGAGPGAAESGALTASREWGGERGRPLCLPPSARGCFWGSLPGSSSGSPAEVWL

SEQ ID NO: 3471 - protein, 477 aa, Homo sapiens
  Payload ID: 772;
  Gene Symbol: ADRB1;
  Gene Name: adrenoceptor beta 1;
  Uniprot ID:  P08588;
  ENSP ID: ENSP00000358301
MGAGVLVLGASEPGNLSSAAPLPDGAATAARLLVPASPPASLLPPASESPEPLSQQWTAGMGLLMALIVLLIVAGNVLVIVAIAKTPRLQTLTNLFIMSLASADLVMGLLVVPFGATIVVWGRWEYGSFFCELWTSVDVLCVTASIETLCVIALDRYLAITSPFRYQSLLTRARARGLVCTVWAISALVSFLPILMHWWRAESDEARRCYNDPKCCDFVTNRAYAIASSVVSFYVPLCIMAFVYLRVFREAQKQVKKIDSCERRFLGGPARPPSPSPSPVPAPAPPPGPPRPAAAAATAPLANGRAGKRRPSRLVALREQKALKTLGIIMGVFTLCWLPFFLANVVKAFHRELVPDRLFVFFNWLGYANSAFNPIIYCRSPDFRKAFQGLLCCARRAARRRHATHGDRPRASGCLARPGPPPSPGAASDDDDDDVVGATPPARLLEPWAGCNGGAAADSDSSLDEPCRPGFASESKV

SEQ ID NO: 3472 - protein, 413 aa, Homo sapiens [sequence omitted]

SEQ ID NO: 3473 - protein, 408 aa, Homo sapiens
  Payload ID: 774;
  Gene Symbol: ADRB3;
  Gene Name: adrenoceptor beta 3;
  Uniprot ID:  P13945;
  ENSP ID: ENSP00000343782
MAPWPHENSSLAPWPDLPTLAPNTANTSGLPGVPWEAALAGALLALAVLATVGGNLLVIVAIAWTPRLQTMTNVFVTSLAAADLVMGLLVVPPAATLALTGHWPLGATGCELWTSVDVLCVTASIETLCALAVDRYLAVTNPLRYGALVTKRCARTAVVLVWVVSAAVSFAPIMSQWWRVGADAEAQRCHSNPRCCAFASNMPYVLLSSSVSFYLPLLVMLFVYARVFVVATRQLRLLRGELGRFPPEESPPAPSRSLAPAPVGTCAPPEGVPACGRRPARLLPLREHRALCTLGLIMGTFTLCWLPFFLANVLRALGGPSLVPGPAFLALNWLGYANSAFNPLIYCRSPDFRSAFRRLLCRCGRRLPPEPCAAARPALFPSGVPAARSSPAQPRLCQRLDGASWGVS

SEQ ID NO: 3474 - protein, 408 aa, Homo sapiens; identical to SEQ ID NO: 3473
  Payload ID: 774;
  Gene Symbol: ADRB3;
  Gene Name: adrenoceptor beta 3;
  Uniprot ID:  P13945;
  ENSP ID: ENSP00000480325

SEQ ID NO: 3475 - protein, 541 aa, Homo sapiens
  Payload ID: 775;
  Gene Symbol: ACD;
  Gene Name: adrenocortical dysplasia homolog (mouse);
  Uniprot ID:  Q96AP0;
  ENSP ID: ENSP00000219251
MPGRCQSDAAMRVNGPASRAPAGWTSGSLHTGPRAGRPRAQARGVRGRGLLLRPRPAKELPLPRKGGAWAPAGNPGPLHPLGVAVGMAGSGRLVLRPWIRELILGSETPSSPRAGQLLEDAEAAVAGPSHAPDTSDVGATLLVSDGTHSVRCLVTREALDTSDWEEKEFGFRGTEGRLLLLQDCGVHVQVAEGGAPAEFYLQVDRFSLLPTEQPRLRVPGCNQDLDVQKKLYDCLEEHLSESTSSNAGLSLSQLLDEMREDQEHQGALVCLAESCLTLEGPCTAPPVTHWAASRCKATGEAVYTVPSSMLCISENDQLILSSLGPCQRTQGPELPPPDPALQDLSLTLIASPPSSPSSSGTPALPGHMSSEESGTSISLLPALSLAAPDPGQRSSSQPSPAICSAPATLTPRSPHASRTPSSPLQSCTPSLSPRSHVPSPHQALVTRPQKPSLEFKEFVGLPCKNRPPFPRTGATRGAQEPCSVWEPPKRHRDGSAFQYEYEPPCTSLCARVQAVRLPPQLMAWALHFLMDAQPGSEPTPM

SEQ ID NO: 3476 - protein, 544 aa, Homo sapiens
  Payload ID: 775;
  Gene Symbol: ACD;
  Gene Name: adrenocortical dysplasia homolog (mouse);
  Uniprot ID:  Q96AP0;
  ENSP ID: ENSP00000377496
MPGRCQSDAAMRVNGPASRAPAGWTSGSLHTGPRAGRPRAQARGVRGRGLLLRPRPAKELPLPRKGGAWAPAGNPGPLHPLGVAVGMAGSGRLVLRPWIRELILGSETPSSPRAGQLLEVLQDAEAAVAGPSHAPDTSDVGATLLVSDGTHSVRCLVTREALDTSDWEEKEFGFRGTEGRLLLLQDCGVHVQVAEGGAPAEFYLQVDRFSLLPTEQPRLRVPGCNQDLDVQKKLYDCLEEHLSESTSSNAGLSLSQLLDEMREDQEHQGALVCLAESCLTLEGPCTAPPVTHWAASRCKATGEAVYTVPSSMLCISENDQLILSSLGPCQRTQGPELPPPDPALQDLSLTLIASPPSSPSSSGTPALPGHMSSEESGTSISLLPALSLAAPDPGQRSSSQPSPAICSAPATLTPRSPHASRTPSSPLQSCTPSLSPRSHVPSPHQALVTRPQKPSLEFKEFVGLPCKNRPPFPRTGATRGAQEPCSVWEPPKRHRDGSAFQYEYEPPCTSLCARVQAVRLPPQLMAWALHFLMDAQPGSEPTPM

SEQ ID NO: 3477 - protein, 182 aa, Homo sapiens
  Payload ID: 775;
  Gene Symbol: ACD;
  Gene Name: adrenocortical dysplasia homolog (mouse);
  ENSP ID: ENSP00000473313
  MOD_RES (1)..(1): Any amino acid
XEHLSESTSSNAGLSLSQLLDEMREDQEHQGALVCLAESCLTLEGPCTAPPVTHWAASRCKATGEAVYTVPSSMLCISENDQLILSSLGPCQRTQGPELPPPDPALQDLSLTLIASPPSSPSSSGPELPGEPRSPALSGNPQRGIVMVLPSSMSMSHPARPSVLGSKLSGFLPSSWPGPCTF

SEQ ID NO: 3478 - protein, 16 aa, Homo sapiens
  Payload ID: 775;
  Gene Symbol: ACD;
  Gene Name: adrenocortical dysplasia homolog (mouse);
  ENSP ID: ENSP00000473595
SVRCLVTREALDTSDW

SEQ ID NO: 3479 - protein, 442 aa, Homo sapiens
  Payload ID: 775;
  Gene Symbol: ACD;
  Gene Name: adrenocortical dysplasia homolog (mouse);
  ENSP ID: ENSP00000473679
MAGSGRLVLRPWIRELILGSETPSSPRAGQLLEDAEAAVAGPSHAPDTSDVGATLLVSDGTHSVRCLVTREALDTSDWEEKEFGFRGTEGRLLLLQDCGVHVQVAEGGAPAEFYLQVDRFSLLPTEQPRLRVPGCNQDLDVQKKLYDCLEEHLSESTSSNAGLSLSQLLDEMREDQEHQGALVCLAESCLTLEGPCTAPPVTHWAASRCKATGEAVYTVPSSMLCISENDQLILSSLGPCQRTQGPELPPPDPALQDLSLTLIASPPSSPSSSGTPALPGHMSSEESGTSISLLPALSLAAPDPGQRSSSQPSPAICSAPATLTPRSPHASRTPSSPLQSCTPSLSPRSHVPSPHQALVTRPQKPSLEFKEFVGLPCKNRPPFPRTGATRGAQEPCSVWYEYEPPCTSLCARVQAVRLPPQLMAWALHFLMDAQPGSEPTPM

SEQ ID NO: 3480 - protein, 458 aa, Homo sapiens
  Payload ID: 775;
  Gene Symbol: ACD;
  Gene Name: adrenocortical dysplasia homolog (mouse);
  ENSP ID: ENSP00000478084
MAGSGRLVLRPWIRELILGSETPSSPRAGQLLEVLQDAEAAVAGPSHAPDTSDVGATLLVSDGTHSVRCLVTREALDTSDWEEKEFGFRGTEGRLLLLQDCGVHVQVAEGGAPAEFYLQVDRFSLLPTEQPRLRVPGCNQDLDVQKKLYDCLEEHLSESTSSNAGLSLSQLLDEMREDQEHQGALVCLAESCLTLEGPCTAPPVTHWAASRCKATGEAVYTVPSSMLCISENDQLILSSLGPCQRTQGPELPPPDPALQDLSLTLIASPPSSPSSSGTPALPGHMSSEESGTSISLLPALSLAAPDPGQRSSSQPSPAICSAPATLTPRSPHASRTPSSPLQSCTPSLSPRSHVPSPHQALVTRPQKPSLEFKEFVGLPCKNRPPFPRTGATRGAQEPCSVWEPPKRHRDGSAFQYEYEPPCTSLCARVQAVRLPPQLMAWALHFLMDAQPGSEPTPM

SEQ ID NO: 3481 - protein, 544 aa, Homo sapiens; identical to SEQ ID NO: 3476
  Payload ID: 775;
  Gene Symbol: ACD;
  Gene Name: adrenocortical dysplasia homolog (mouse);
  Uniprot ID:  Q96AP0;
  ENSP ID: ENSP00000483117

SEQ ID NO: 3482 - protein, 185 aa, Homo sapiens
  Payload ID: 776;
  Gene Symbol: ADM;
  Gene Name: adrenomedullin;
  Uniprot ID:  P35318;
  ENSP ID: ENSP00000278175
MKLVSVALMYLGSLAFLGADTARLDVASEFRKKWNKWALSRGKRELRMSSSYPTGLADVKAGPAQTLIRPQDMKGASRSPEDSSPDAARIRVKRYRQSMNNFQGLRSFGCRFGTCTVQKLAHQIYQFTDKDKDNVAPRSKISPQGYGRRRRRSLPEAGPGRTLVSSKPQAHGAPAPPSGSAPHFL

SEQ ID NO: 3483 - protein, 138 aa, Homo sapiens
  Payload ID: 776;
  Gene Symbol: ADM;
  Gene Name: adrenomedullin;
  ENSP ID: ENSP00000431438
MSSSYPTGLADVKAGPAQTLIRPQDMKGASRSPEDSSPDAARIRVKRYRQSMNNFQGLRSFGCRFGTCTVQKLAHQIYQFTDKDKDNVAPRSKISPQGYGRRRRRSLPEAGPGRTLVSSKPQAHGAPAPPSGSAPHFL

SEQ ID NO: 3484 - protein, 83 aa, Homo sapiens
  Payload ID: 776;
  Gene Symbol: ADM;
  Gene Name: adrenomedullin;
  ENSP ID: ENSP00000433062
MKLVSVALMYLGSLAFLGADTARLDVASEFRKKWNKWALSRGKRELRMSSSYPTGLADVKAGPAQTLIRPQDMKGASRSPEDR

SEQ ID NO: 3485 - protein, 139 aa, Homo sapiens
  Payload ID: 776;
  Gene Symbol: ADM;
  Gene Name: adrenomedullin;
  ENSP ID: ENSP00000434354
MKLVSVALMYLGSLAFLGADTARLDVASEFRKKWNKWALSRGKRELRMSSSYPTGLADVKAGPAQTLIRPQDMKGASRSPEDSCLSSPSPRPQQSGCRPHPSQALPPEHEQLPGPPELWLPLRDVHGAEAGTPDLPVHR

SEQ ID NO: 3486 - protein, 83 aa, Homo sapiens; identical to SEQ ID NO: 3484
  Payload ID: 776;
  Gene Symbol: ADM;
  Gene Name: adrenomedullin;
  ENSP ID: ENSP00000434749

SEQ ID NO: 3487 - protein, 185 aa, Homo sapiens; identical to SEQ ID NO: 3482
  Payload ID: 776;
  Gene Symbol: ADM;
  Gene Name: adrenomedullin;
  Uniprot ID:  P35318;
  ENSP ID: ENSP00000435124

SEQ ID NO: 3488 - protein, 185 aa, Homo sapiens; identical to SEQ ID NO: 3482
  Payload ID: 776;
  Gene Symbol: ADM;
  Gene Name: adrenomedullin;
  Uniprot ID:  P35318;
  ENSP ID: ENSP00000436607

SEQ ID NO: 3489 - protein, 117 aa, Homo sapiens
  Payload ID: 776;
  Gene Symbol: ADM;
  Gene Name: adrenomedullin;
  ENSP ID: ENSP00000436837
MGSQVAFLPPPPARSSPDAARIRVKRYRQSMNNFQGLRSFGCRFGTCTVQKLAHQIYQFTDKDKDNVAPRSKISPQGYGRRRRRSLPEAGPGRTLVSSKPQAHGAPAPPSGSAPHFL

SEQ ID NO: 3490 - protein, 148 aa, Homo sapiens
  Payload ID: 777;
  Gene Symbol: ADM2;
  Gene Name: adrenomedullin 2;
  Uniprot ID:  Q7Z4H4;
  ENSP ID: ENSP00000379086
MARIPTAALGCISLLCLQLPGSLSRSLGGDPRPVKPREPPARSPSSSLQPRHPAPRPVVWKLHRALQAQRGAGLAPVMGQPLRDGGRQHSGPRRHSGPRRTQAQLLRVGCVLGTCQVQNLSHRLWQLMGPAGRQDSAPVDPSSPHSYG

SEQ ID NO: 3491 - protein, 148 aa, Homo sapiens; identical to SEQ ID NO: 3490
  Payload ID: 777;
  Gene Symbol: ADM2;
  Gene Name: adrenomedullin 2;
  Uniprot ID:  Q7Z4H4;
  ENSP ID: ENSP00000379087

SEQ ID NO: 3492 - protein, 153 aa, Homo sapiens
  Payload ID: 778;
  Gene Symbol: ADM5;
  Gene Name: adrenomedullin 5 (putative);
  Uniprot ID:  C9JUS6;
  ENSP ID: ENSP00000393631
MTIHILILLLLLAFSAQGDLDTAARRGQHQVPQHRGHVCYLGVCRTHRLAEIIYWIRCLHQGALGEGQPRAPGPLQLWAPPVARGGSPARFPGFRPAARGLAQCPARWVTSGTARPLLGFSLPICMLELLLHISSPLTPAPETVFPSPSPGCD

SEQ ID NO: 3493 - protein, 347 aa, Homo sapiens
  Payload ID: 779;
  Gene Symbol: AGER;
  Gene Name: advanced glycosylation end product-specific receptor;
  Uniprot ID:  Q15109;
  ENSP ID: ENSP00000364195
MAAGTAVGAWVLVLSLWGAVVGAQNITARIGEPLVLKCKGAPKKPPQRLEWKLNTGRTEAWKVLSPQGGGPWDSVARVLPNGSLFLPAVGIQDEGIFRCQAMNRNGKETKSNYRVRVYQIPGKPEIVDSASELTAGVPNKVGTCVSEGSYPAGTLSWHLDGKPLVPNEKGVSVKEQTRRHPETGLFTLQSELMVTPARGGDPRPTFSCSFSPGLPRHRALRTAPIQPRVWEPVPLEEVQLVVEPEGGAVAPGGTVTLTCEVPAQPSPQIHWMKDGVPLPLPPSPVLILPEIGPQDQGTYSCVATHSSHGPQESRAVSISIIEPGEEGPTAGEGFDKVREAEDSPQHM

SEQ ID NO: 3494 - protein, 233 aa, Homo sapiens
  Payload ID: 779;
  Gene Symbol: AGER;
  Gene Name: advanced glycosylation end product-specific receptor;
  ENSP ID: ENSP00000364196
MAAGTAVGAWVLVLSLWGAVVGAQNITARIGEPLVLKCKGAPKKPPQRLEWKLNTGRTEAWKVLSPQGGGPWDSVARVLPNGSLFLPAVGIQDEGIFRCQAMNRNGKETKSNYRVRVYQIPGKPEIVDSASELTAGVPNKVVEESRRSRKRPCEQEVGTCVSEGSYPAGTLSWHLDGKPLVPNEKGVSVKEQTRRHPETGLFTLQSELMVTPARGGDPRPTFSCSFSPGLPRH

SEQ ID NO: 3495 - protein, 133 aa, Homo sapiens
  Payload ID: 779;
  Gene Symbol: AGER;
  Gene Name: advanced glycosylation end product-specific receptor;
  ENSP ID: ENSP00000364206
MKDGVPLPLPPSPVLILPEIGPQDQGTYSCVATHSSHGPQESRAVSISIIEPGEEGPTAGSVGGSGLGTLALALGILGGLGTAALLIGVILWQRRQRRGEERKAPENQEEEEERAELNQSEEPEAGESSTGGP

SEQ ID NO: 3496 - protein, 342 aa, Homo sapiens
  Payload ID: 779;
  Gene Symbol: AGER;
  Gene Name: advanced glycosylation end product-specific receptor;
  Uniprot ID:  Q15109;
  ENSP ID: ENSP00000364208
MAAGTAVGAWVLVLSLWGAVVGAQNITARIGEPLVLKCKGAPKKPPQRLEWKLGGGPWDSVARVLPNGSLFLPAVGIQDEGIFRCQAMNRNGKETKSNYRVRVYQIPGKPEIVDSASELTAGVPNKVGTCVSEGSYPAGTLSWHLDGKPLVPNEKGVSVKEQTRRHPETGLFTLQSELMVTPARGGDPRPTFSCSFSPGLPRHRALRTAPIQPRVWEPVPLEEVQLVVEPEGGAVAPGGTVTLTCEVPAQPSPQIHWMKDVSDLERGAGRTRRGGANCRLCGRIRAGNSSPGPGDPGRPGDSRPAHWGHLVAKAATPRRGEEGPRKPGGRGGACRTESVGGT

SEQ ID NO: 3497 - protein, 420 aa, Homo sapiens
  Payload ID: 779;
  Gene Symbol: AGER;
  Gene Name: advanced glycosylation end product-specific receptor;
  Uniprot ID:  Q15109;
  ENSP ID: ENSP00000364210
MAAGTAVGAWVLVLSLWGAVVGAQNITARIGEPLVLKCKGAPKKPPQRLEWKLNTGRTEAWKVLSPQGGGPWDSVARVLPNGSLFLPAVGIQDEGIFRCQAMNRNGKETKSNYRVRVYQIPGKPEIVDSASELTAGVPNKVVEESRRSRKRPCEQEVGTCVSEGSYPAGTLSWHLDGKPLVPNEKGVSVKEQTRRHPETGLFTLQSELMVTPARGGDPRPTFSCSFSPGLPRHRALRTAPIQPRVWEPVPLEEVQLVVEPEGGAVAPGGTVTLTCEVPAQPSPQIHWMKDGVPLPLPPSPVLILPEIGPQDQGTYSCVATHSSHGPQESRAVSISIIEPGEEGPTAGSVGGSGLGTLALALGILGGLGTAALLIGVILWQRRQRRGEERKAPENQEEEEERAELNQSEEPEAGESSTGGP

SEQ ID NO: 3498 - protein, 294 aa, Homo sapiens
  Payload ID: 779;
  Gene Symbol: AGER;
  Gene Name: advanced glycosylation end product-specific receptor;
  ENSP ID: ENSP00000364211
MNRNGKETKSNYRVRVYQIPGKPEIVDSASELTAGVPNKVGTCVSEGSYPAGTLSWHLDGKPLVPNEKGVSVKEQTRRHPETGLFTLQSELMVTPARGGDPRPTFSCSFSPGLPRHRALRTAPIQPRVWEPVPLEEVQLVVEPEGGAVAPGGTVTLTCEVPAQPSPQIHWMKDGVPLPLPPSPVLILPEIGPQDQGTYSCVATHSSHGPQESRAVSISIIGSVGGSGLGTLALALGILGGLGTAALLIGVILWQRRQRRGEERKAPENQEEEEERAELNQSEEPEAGESSTGGP

SEQ ID NO: 3499 - protein, 404 aa, Homo sapiens
  Payload ID: 779;
  Gene Symbol: AGER;
  Gene Name: advanced glycosylation end product-specific receptor;
  Uniprot ID:  Q15109;
  ENSP ID: ENSP00000364217
MAAGTAVGAWVLVLSLWGAVVGAQNITARIGEPLVLKCKGAPKKPPQRLEWKLNTGRTEAWKVLSPQGGGPWDSVARVLPNGSLFLPAVGIQDEGIFRCQAMNRNGKETKSNYRVRVYQIPGKPEIVDSASELTAGVPNKVGTCVSEGSYPAGTLSWHLDGKPLVPNEKGVSVKEQTRRHPETGLFTLQSELMVTPARGGDPRPTFSCSFSPGLPRHRALRTAPIQPRVWEPVPLEEVQLVVEPEGGAVAPGGTVTLTCEVPAQPSPQIHWMKDGVPLPLPPSPVLILPEIGPQDQGTYSCVATHSSHGPQESRAVSISIIEPGEEGPTAGSVGGSGLGTLALALGILGGLGTAALLIGVILWQRRQRRGEERKAPENQEEEEERAELNQSEEPEAGESSTGGP

SEQ ID NO: 3500 - protein, 347 aa, Homo sapiens; identical to SEQ ID NO: 3493
  Payload ID: 779;
  Gene Symbol: AGER;
  Gene Name: advanced glycosylation end product-specific receptor;
  Uniprot ID:  Q15109;
  ENSP ID: ENSP00000372762

SEQ ID NO: 3501 - protein, 342 aa, Homo sapiens; identical to SEQ ID NO: 3496
  Payload ID: 779;
  Gene Symbol: AGER;
  Gene Name: advanced glycosylation end product-specific receptor;
  Uniprot ID:  Q15109;
  ENSP ID: ENSP00000372766

SEQ ID NO: 3502 - protein, 342 aa, Homo sapiens; identical to SEQ ID NO: 3496
  Payload ID: 779;
  Gene Symbol: AGER;
  Gene Name: advanced glycosylation end product-specific receptor;
  Uniprot ID:  Q15109;
  ENSP ID: ENSP00000387853

SEQ ID NO: 3503 - protein, 363 aa, Homo sapiens
  Payload ID: 779;
  Gene Symbol: AGER;
  Gene Name: advanced glycosylation end product-specific receptor;
  Uniprot ID:  Q15109;
  ENSP ID: ENSP00000387887
MAAGTAVGAWVLVLSLWGAVVGAQNITARIGEPLVLKCKGAPKKPPQRLEWKLNTGRTEAWKVLSPQGGGPWDSVARVLPNGSLFLPAVGIQDEGIFRCQAMNRNGKETKSNYRVRVYQIPGKPEIVDSASELTAGVPNKVVEESRRSRKRPCEQEVGTCVSEGSYPAGTLSWHLDGKPLVPNEKGVSVKEQTRRHPETGLFTLQSELMVTPARGGDPRPTFSCSFSPGLPRHRALRTAPIQPRVWEPVPLEEVQLVVEPEGGAVAPGGTVTLTCEVPAQPSPQIHWMKDGVPLPLPPSPVLILPEIGPQDQGTYSCVATHSSHGPQESRAVSISIIEPGEEGPTAGEGFDKVREAEDSPQHM

SEQ ID NO: 3504 - protein, 234 aa, Homo sapiens
  Payload ID: 779;
  Gene Symbol: AGER;
  Gene Name: advanced glycosylation end product-specific receptor;
  ENSP ID: ENSP00000388041
MAAGTAVGAWVLVLSLWGAVVGAQNITARIGEPLVLKCKGAPKKPPQRLEWKLNTGRTEAWKVLSPQGGGPWDSVARVLPNSSLFLPAVGIQDEGIFRCQAMNRNGKETKSNYRSLRTFTITASDWIFPPSEIPGKPEIVDSASELTAGVPNKVGTCVSEGSYPAGTLSWHLDGKPLVPNEKGVSVKEQTRRHPETGLFTLQSELMVTPARGGDPRPTFSCSFSPGLPRHRALR

SEQ ID NO: 3505 - protein, 342 aa, Homo sapiens; identical to SEQ ID NO: 3496
  Payload ID: 779;
  Gene Symbol: AGER;
  Gene Name: advanced glycosylation end product-specific receptor;
  Uniprot ID:  Q15109;
  ENSP ID: ENSP00000388462

SEQ ID NO: 3506 - protein, 234 aa, Homo sapiens
  Payload ID: 779;
  Gene Symbol: AGER;
  Gene Name: advanced glycosylation end product-specific receptor;
  ENSP ID: ENSP00000391024
MAAGTAVGAWVLVLSLWGAVVGAQNITARIGEPLVLKCKGAPKKPPQRLEWKLNTGRTEAWKVLSPQGGGPWDSVARVLPNGSLFLPAVGIQDEGIFRCQAMNRNGKETKSNYRSLRTFTITASDWIFPPSEIPGKPEIVDSASELTAGVPNKVGTCVSEGSYPAGTLSWHLDGKPLVPNEKGVSVKEQTRRHPETGLFTLQSELMVTPARGGDPRPTFSCSFSPGLPRHRALR

SEQ ID NO: 3507 - protein, 342 aa, Homo sapiens; identical to SEQ ID NO: 3496
  Payload ID: 779;
  Gene Symbol: AGER;
  Gene Name: advanced glycosylation end product-specific receptor;
  Uniprot ID:  Q15109;
  ENSP ID: ENSP00000391743

SEQ ID NO: 3508 - protein, 342 aa, Homo sapiens
  Payload ID: 779;
  Gene Symbol: AGER;
  Gene Name: advanced glycosylation end product-specific receptor;
  ENSP ID: ENSP00000391970
MAAGTAVGAWVLVLSLWGAVVGAQNITARIGEPLVLKCKGAPKKPPQRLEWKLGGGPWDSVARVLPNSSLFLPAVGIQDEGIFRCQAMNRNGKETKSNYRVRVYQIPGKPEIVDSASELTAGVPNKVGTCVSEGSYPAGTLSWHLDGKPLVPNEKGVSVKEQTRRHPETGLFTLQSELMVTPARGGDPRPTFSCSFSPGLPRHRALRTAPIQPRVWEPVPLEEVQLVVEPEGGAVAPGGTVTLTCEVPAQPSPQIHWMKDVSDLERGAGRTRRGGANCRLCGRIRAGNSSPGPGDPGRPGDSRPAHWGHLVAKAATPRRGEEGPRKPGGRGGACRTESVGGT

SEQ ID NO: 3509 - protein, 233 aa, Homo sapiens; identical to SEQ ID NO: 3494
  Payload ID: 779;
  Gene Symbol: AGER;
  Gene Name: advanced glycosylation end product-specific receptor;
  ENSP ID: ENSP00000394516

SEQ ID NO: 3510 - protein, 234 aa, Homo sapiens; identical to SEQ ID NO: 3506
  Payload ID: 779;
  Gene Symbol: AGER;
  Gene Name: advanced glycosylation end product-specific receptor;
  ENSP ID: ENSP00000395578

SEQ ID NO: 3511 - protein, 404 aa, Homo sapiens; identical to SEQ ID NO: 3499
  Payload ID: 779;
  Gene Symbol: AGER;
  Gene Name: advanced glycosylation end product-specific receptor;
  Uniprot ID:  Q15109;
  ENSP ID: ENSP00000395812

SEQ ID NO: 3512 - protein, 404 aa, Homo sapiens; identical to SEQ ID NO: 3499
  Payload ID: 779;
  Gene Symbol: AGER;
  Gene Name: advanced glycosylation end product-specific receptor;
  Uniprot ID:  Q15109;
  ENSP ID: ENSP00000397227

SEQ ID NO: 3513 - protein, 233 aa, Homo sapiens
  Payload ID: 779;
  Gene Symbol: AGER;
  Gene Name: advanced glycosylation end product-specific receptor;
  ENSP ID: ENSP00000397350
MAAGTAVGAWVLVLSLWGAVVGAQNITARIGEPLVLKCKGAPKKPPQRLEWKLNTGRTEAWKVLSPQGGGPWDSVARVLPNSSLFLPAVGIQDEGIFRCQAMNRNGKETKSNYRVRVYQIPGKPEIVDSASELTAGVPNKVVEESRRSRKRPCEQEVGTCVSEGSYPAGTLSWHLDGKPLVPNEKGVSVKEQTRRHPETGLFTLQSELMVTPARGGDPRPTFSCSFSPGLPRH

SEQ ID NO: 3514 - protein, 342 aa, Homo sapiens; identical to SEQ ID NO: 3508
  Payload ID: 779;
  Gene Symbol: AGER;
  Gene Name: advanced glycosylation end product-specific receptor;
  ENSP ID: ENSP00000397777

SEQ ID NO: 3515 - protein, 234 aa, Homo sapiens; identical to SEQ ID NO: 3506
  Payload ID: 779;
  Gene Symbol: AGER;
  Gene Name: advanced glycosylation end product-specific receptor;
  ENSP ID: ENSP00000398466

SEQ ID NO: 3516 - protein, 233 aa, Homo sapiens; identical to SEQ ID NO: 3494
  Payload ID: 779;
  Gene Symbol: AGER;
  Gene Name: advanced glycosylation end product-specific receptor;
  ENSP ID: ENSP00000399134

SEQ ID NO: 3517 - protein, 347 aa, Homo sapiens; identical to SEQ ID NO: 3493
  Payload ID: 779;
  Gene Symbol: AGER;
  Gene Name: advanced glycosylation end product-specific receptor;
  Uniprot ID:  Q15109;
  ENSP ID: ENSP00000399686

SEQ ID NO: 3518 - protein, 347 aa, Homo sapiens; identical to SEQ ID NO: 3493
  Payload ID: 779;
  Gene Symbol: AGER;
  Gene Name: advanced glycosylation end product-specific receptor;
  Uniprot ID:  Q15109;
  ENSP ID: ENSP00000400667

SEQ ID NO: 3519 - protein, 404 aa, Homo sapiens; identical to SEQ ID NO: 3499
  Payload ID: 779;
  Gene Symbol: AGER;
  Gene Name: advanced glycosylation end product-specific receptor;
  Uniprot ID:  Q15109;
  ENSP ID: ENSP00000401068

SEQ ID NO: 3520 - protein, 234 aa, Homo sapiens; identical to SEQ ID NO: 3506
  Payload ID: 779;
  Gene Symbol: AGER;
  Gene Name: advanced glycosylation end product-specific receptor;
  ENSP ID: ENSP00000401896

SEQ ID NO: 3521 - protein, 347 aa, Homo sapiens
  Payload ID: 779;
  Gene Symbol: AGER;
  Gene Name: advanced glycosylation end product-specific receptor;
  ENSP ID: ENSP00000403322
MAAGTAVGAWVLVLSLWGAVVGAQNITARIGEPLVLKCKGAPKKPPQRLEWKLNTGRTEAWKVLSPQGGGPWDSVARVLPNSSLFLPAVGIQDEGIFRCQAMNRNGKETKSNYRVRVYQIPGKPEIVDSASELTAGVPNKVGTCVSEGSYPAGTLSWHLDGKPLVPNEKGVSVKEQTRRHPETGLFTLQSELMVTPARGGDPRPTFSCSFSPGLPRHRALRTAPIQPRVWEPVPLEEVQLVVEPEGGAVAPGGTVTLTCEVPAQPSPQIHWMKDGVPLPLPPSPVLILPEIGPQDQGTYSCVATHSSHGPQESRAVSISIIEPGEEGPTAGEGFDKVREAEDSPQHM

SEQ ID NO: 3522 - protein, 347 aa, Homo sapiens; identical to SEQ ID NO: 3521
  Payload ID: 779;
  Gene Symbol: AGER;
  Gene Name: advanced glycosylation end product-specific receptor;
  ENSP ID: ENSP00000407467

SEQ ID NO: 3523 - protein, 404 aa, Homo sapiens; identical to SEQ ID NO: 3499
  Payload ID: 779;
  Gene Symbol: AGER;
  Gene Name: advanced glycosylation end product-specific receptor;
  Uniprot ID:  Q15109;
  ENSP ID: ENSP00000409457

SEQ ID NO: 3524 - protein, 233 aa, Homo sapiens; identical to SEQ ID NO: 3494
  Payload ID: 779;
  Gene Symbol: AGER;
  Gene Name: advanced glycosylation end product-specific receptor;
  ENSP ID: ENSP00000410918

SEQ ID NO: 3525 - protein, 233 aa, Homo sapiens; identical to SEQ ID NO: 3494
  Payload ID: 779;
  Gene Symbol: AGER;
  Gene Name: advanced glycosylation end product-specific receptor;
  ENSP ID: ENSP00000411203

SEQ ID NO: 3526 - protein, 233 aa, Homo sapiens; identical to SEQ ID NO: 3513
  Payload ID: 779;
  Gene Symbol: AGER;
  Gene Name: advanced glycosylation end product-specific receptor;
  ENSP ID: ENSP00000411652

SEQ ID NO: 3527 - protein, 234 aa, Homo sapiens; identical to SEQ ID NO: 3506
  Payload ID: 779;
  Gene Symbol: AGER;
  Gene Name: advanced glycosylation end product-specific receptor;
  ENSP ID: ENSP00000412576

SEQ ID NO: 3528 - protein, 347 aa, Homo sapiens; identical to SEQ ID NO: 3493
  Payload ID: 779;
  Gene Symbol: AGER;
  Gene Name: advanced glycosylation end product-specific receptor;
  Uniprot ID:  Q15109;
  ENSP ID: ENSP00000413391

SEQ ID NO: 3529 - protein, 404 aa, Homo sapiens [sequence omitted]

SEQ ID NO: 3530 - protein, 234 aa, Homo sapiens; identical to SEQ ID NO: 3504
  Payload ID: 779;
  Gene Symbol: AGER;
  Gene Name: advanced glycosylation end product-specific receptor;
  ENSP ID: ENSP00000415780

SEQ ID NO: 3531 - protein, 404 aa, Homo sapiens [sequence omitted]

SEQ ID NO: 3532 - protein, 128 aa, Homo sapiens
  Payload ID: 779;
  Gene Symbol: AGER;
  Gene Name: advanced glycosylation end product-specific receptor;
  ENSP ID: ENSP00000445389
MAAGTAVGAWVLVLSLWGAVVGAQNITARIGEPLVLKCKGAPKKPPQRLEWKLNTGRTEAWKVLSPQGGGPWDSVARVLPNGSLFLPAVGIQDEGIFRCQAMNRNGKETKSNYRVRVYQFENLHNYSL

SEQ ID NO: 3533 - protein, 133 aa, Homo sapiens; identical to SEQ ID NO: 3495
  Payload ID: 779;
  Gene Symbol: AGER;
  Gene Name: advanced glycosylation end product-specific receptor;
  ENSP ID: ENSP00000446495

SEQ ID NO: 3534 - protein, 133 aa, Homo sapiens; identical to SEQ ID NO: 3495
  Payload ID: 779;
  Gene Symbol: AGER;
  Gene Name: advanced glycosylation end product-specific receptor;
  ENSP ID: ENSP00000446533

SEQ ID NO: 3535 - protein, 128 aa, Homo sapiens; identical to SEQ ID NO: 3532
  Payload ID: 779;
  Gene Symbol: AGER;
  Gene Name: advanced glycosylation end product-specific receptor;
  ENSP ID: ENSP00000446582

SEQ ID NO: 3536 - protein, 363 aa, Homo sapiens
  Payload ID: 779;
  Gene Symbol: AGER;
  Gene Name: advanced glycosylation end product-specific receptor;
  ENSP ID: ENSP00000446660
MAAGTAVGAWVLVLSLWGAVVGAQNITARIGEPLVLKCKGAPKKPPQRLEWKLNTGRTEAWKVLSPQGGGPWDSVARVLPNSSLFLPAVGIQDEGIFRCQAMNRNGKETKSNYRVRVYQIPGKPEIVDSASELTAGVPNKVVEESRRSRKRPCEQEVGTCVSEGSYPAGTLSWHLDGKPLVPNEKGVSVKEQTRRHPETGLFTLQSELMVTPARGGDPRPTFSCSFSPGLPRHRALRTAPIQPRVWEPVPLEEVQLVVEPEGGAVAPGGTVTLTCEVPAQPSPQIHWMKDGVPLPLPPSPVLILPEIGPQDQGTYSCVATHSSHGPQESRAVSISIIEPGEEGPTAGEGFDKVREAEDSPQHM

SEQ ID NO: 3537 - protein, 420 aa, Homo sapiens
  Payload ID: 779;
  Gene Symbol: AGER;
  Gene Name: advanced glycosylation end product-specific receptor;
  ENSP ID: ENSP00000446682
MAAGTAVGAWVLVLSLWGAVVGAQNITARIGEPLVLKCKGAPKKPPQRLEWKLNTGRTEAWKVLSPQGGGPWDSVARVLPNSSLFLPAVGIQDEGIFRCQAMNRNGKETKSNYRVRVYQIPGKPEIVDSASELTAGVPNKVVEESRRSRKRPCEQEVGTCVSEGSYPAGTLSWHLDGKPLVPNEKGVSVKEQTRRHPETGLFTLQSELMVTPARGGDPRPTFSCSFSPGLPRHRALRTAPIQPRVWEPVPLEEVQLVVEPEGGAVAPGGTVTLTCEVPAQPSPQIHWMKDGVPLPLPPSPVLILPEIGPQDQGTYSCVATHSSHGPQESRAVSISIIEPGEEGPTAGSVGGSGLGTLALALGILGGLGTAALLIGVILWQRRQRRGEERKAPENQEEEEERAELNQSEEPEAGESSTGGP

SEQ ID NO: 3538 - protein, 133 aa, Homo sapiens; identical to SEQ ID NO: 3495
  Payload ID: 779;
  Gene Symbol: AGER;
  Gene Name: advanced glycosylation end product-specific receptor;
  ENSP ID: ENSP00000446692

SEQ ID NO: 3539 - protein, 363 aa, Homo sapiens; identical to SEQ ID NO: 3503
  Payload ID: 779;
  Gene Symbol: AGER;
  Gene Name: advanced glycosylation end product-specific receptor;
  Uniprot ID:  Q15109;
  ENSP ID: ENSP00000446835

SEQ ID NO: 3540 - protein, 128 aa, Homo sapiens; identical to SEQ ID NO: 3532
  Payload ID: 779;
  Gene Symbol: AGER;
  Gene Name: advanced glycosylation end product-specific receptor;
  ENSP ID: ENSP00000447095

SEQ ID NO: 3541 - protein, 420 aa, Homo sapiens; identical to SEQ ID NO: 3497
  Payload ID: 779;
  Gene Symbol: AGER;
  Gene Name: advanced glycosylation end product-specific receptor;
  Uniprot ID:  Q15109;
  ENSP ID: ENSP00000447301

SEQ ID NO: 3542 - protein, 294 aa, Homo sapiens; identical to SEQ ID NO: 3498
  Payload ID: 779;
  Gene Symbol: AGER;
  Gene Name: advanced glycosylation end product-specific receptor;
  ENSP ID: ENSP00000447531

SEQ ID NO: 3543 - protein, 128 aa, Homo sapiens; identical to SEQ ID NO: 3532
  Payload ID: 779;
  Gene Symbol: AGER;
  Gene Name: advanced glycosylation end product-specific receptor;
  ENSP ID: ENSP00000448028

SEQ ID NO: 3544 - protein, 153 aa, Homo sapiens
  Payload ID: 779;
  Gene Symbol: AGER;
  Gene Name: advanced glycosylation end product-specific receptor;
  ENSP ID: ENSP00000448142
MAAGTAVGAWVLVLSLWGAVVGAQNITARIGEPLVLKCKGAPKKPPQRLEWKLNTGRTEAWKVLSPQGGGPWDSVARVLPNSSLFLPAVGIQDEGILGGLGTAALLIGVILWQRRQRRGEERKAPENQEEEEERAELNQSEEPEAGESSTGGP

SEQ ID NO: 3545 - protein, 133 aa, Homo sapiens; identical to SEQ ID NO: 3495
  Payload ID: 779;
  Gene Symbol: AGER;
  Gene Name: advanced glycosylation end product-specific receptor;
  ENSP ID: ENSP00000448234

SEQ ID NO: 3546 - protein, 294 aa, Homo sapiens; identical to SEQ ID NO: 3498
  Payload ID: 779;
  Gene Symbol: AGER;
  Gene Name: advanced glycosylation end product-specific receptor;
  ENSP ID: ENSP00000448287

SEQ ID NO: 3547 - protein, 153 aa, Homo sapiens; identical to SEQ ID NO: 3544
  Payload ID: 779;
  Gene Symbol: AGER;
  Gene Name: advanced glycosylation end product-specific receptor;
  ENSP ID: ENSP00000448486

SEQ ID NO: 3548 - protein, 128 aa, Homo sapiens
  Payload ID: 779;
  Gene Symbol: AGER;
  Gene Name: advanced glycosylation end product-specific receptor;
  ENSP ID: ENSP00000448525
MAAGTAVGAWVLVLSLWGAVVGAQNITARIGEPLVLKCKGAPKKPPQRLEWKLNTGRTEAWKVLSPQGGGPWDSVARVLPNSSLFLPAVGIQDEGIFRCQAMNRNGKETKSNYRVRVYQFENLHNYSL

SEQ ID NO: 3549 - protein, 420 aa, Homo sapiens; identical to SEQ ID NO: 3497
  Payload ID: 779;
  Gene Symbol: AGER;
  Gene Name: advanced glycosylation end product-specific receptor;
  Uniprot ID:  Q15109;
  ENSP ID: ENSP00000448579

SEQ ID NO: 3550 - protein, 420 aa, Homo sapiens; identical to SEQ ID NO: 3497
  Payload ID: 779;
  Gene Symbol: AGER;
  Gene Name: advanced glycosylation end product-specific receptor;
  Uniprot ID:  Q15109;
  ENSP ID: ENSP00000448979

SEQ ID NO: 3551 - protein, 153 aa, Homo sapiens
  Payload ID: 779;
  Gene Symbol: AGER;
  Gene Name: advanced glycosylation end product-specific receptor;
  ENSP ID: ENSP00000449037
MAAGTAVGAWVLVLSLWGAVVGAQNITARIGEPLVLKCKGAPKKPPQRLEWKLNTGRTEAWKVLSPQGGGPWDSVARVLPNGSLFLPAVGIQDEGILGGLGTAALLIGVILWQRRQRRGEERKAPENQEEEEERAELNQSEEPEAGESSTGGP

SEQ ID NO: 3552 - protein, 363 aa, Homo sapiens; identical to SEQ ID NO: 3536
  Payload ID: 779;
  Gene Symbol: AGER;
  Gene Name: advanced glycosylation end product-specific receptor;
  ENSP ID: ENSP00000449040

SEQ ID NO: 3553 - protein, 363 aa, Homo sapiens; identical to SEQ ID NO: 3503
  Payload ID: 779;
  Gene Symbol: AGER;
  Gene Name: advanced glycosylation end product-specific receptor;
  Uniprot ID:  Q15109;
  ENSP ID: ENSP00000449042

SEQ ID NO: 3554 - protein, 294 aa, Homo sapiens; identical to SEQ ID NO: 3498
  Payload ID: 779;
  Gene Symbol: AGER;
  Gene Name: advanced glycosylation end product-specific receptor;
  ENSP ID: ENSP00000449091

SEQ ID NO: 3555 - protein, 294 aa, Homo sapiens; identical to SEQ ID NO: 3498
  Payload ID: 779;
  Gene Symbol: AGER;
  Gene Name: advanced glycosylation end product-specific receptor;
  ENSP ID: ENSP00000449100

SEQ ID NO: 3556 - protein, 153 aa, Homo sapiens; identical to SEQ ID NO: 3551
  Payload ID: 779;
  Gene Symbol: AGER;
  Gene Name: advanced glycosylation end product-specific receptor;
  ENSP ID: ENSP00000449143

SEQ ID NO: 3557 - protein, 363 aa, Homo sapiens; identical to SEQ ID NO: 3503
  Payload ID: 779;
  Gene Symbol: AGER;
  Gene Name: advanced glycosylation end product-specific receptor;
  Uniprot ID:  Q15109;
  ENSP ID: ENSP00000449226

SEQ ID NO: 3558 - protein, 294 aa, Homo sapiens; identical to SEQ ID NO: 3498
  Payload ID: 779;
  Gene Symbol: AGER;
  Gene Name: advanced glycosylation end product-specific receptor;
  ENSP ID: ENSP00000449368

SEQ ID NO: 3559 - protein, 133 aa, Homo sapiens; identical to SEQ ID NO: 3495
  Payload ID: 779;
  Gene Symbol: AGER;
  Gene Name: advanced glycosylation end product-specific receptor;
  ENSP ID: ENSP00000449506

SEQ ID NO: 3560 - protein, 133 aa, Homo sapiens; identical to SEQ ID NO: 3495
  Payload ID: 779;
  Gene Symbol: AGER;
  Gene Name: advanced glycosylation end product-specific receptor;
  ENSP ID: ENSP00000449676

SEQ ID NO: 3561 - protein, 363 aa, Homo sapiens; identical to SEQ ID NO: 3503
  Payload ID: 779;
  Gene Symbol: AGER;
  Gene Name: advanced glycosylation end product-specific receptor;
  Uniprot ID:  Q15109;
  ENSP ID: ENSP00000449708

SEQ ID NO: 3562 - protein, 420 aa, Homo sapiens; identical to SEQ ID NO: 3537
  Payload ID: 779;
  Gene Symbol: AGER;
  Gene Name: advanced glycosylation end product-specific receptor;
  ENSP ID: ENSP00000449731

SEQ ID NO: 3563 - protein, 294 aa, Homo sapiens; identical to SEQ ID NO: 3498
  Payload ID: 779;
  Gene Symbol: AGER;
  Gene Name: advanced glycosylation end product-specific receptor;
  ENSP ID: ENSP00000449754

SEQ ID NO: 3564 - protein, 153 aa, Homo sapiens; identical to SEQ ID NO: 3551
  Payload ID: 779;
  Gene Symbol: AGER;
  Gene Name: advanced glycosylation end product-specific receptor;
  ENSP ID: ENSP00000449769

SEQ ID NO: 3565 - protein, 153 aa, Homo sapiens; identical to SEQ ID NO: 3551
  Payload ID: 779;
  Gene Symbol: AGER;
  Gene Name: advanced glycosylation end product-specific receptor;
  ENSP ID: ENSP00000449931

SEQ ID NO: 3566 - protein, 128 aa, Homo sapiens; identical to SEQ ID NO: 3548
  Payload ID: 779;
  Gene Symbol: AGER;
  Gene Name: advanced glycosylation end product-specific receptor;
  ENSP ID: ENSP00000449997

SEQ ID NO: 3567 - protein, 420 aa, Homo sapiens; identical to SEQ ID NO: 3497
  Payload ID: 779;
  Gene Symbol: AGER;
  Gene Name: advanced glycosylation end product-specific receptor;
  Uniprot ID:  Q15109;
  ENSP ID: ENSP00000450134

SEQ ID NO: 3568 - protein, 128 aa, Homo sapiens; identical to SEQ ID NO: 3532
  Payload ID: 779;
  Gene Symbol: AGER;
  Gene Name: advanced glycosylation end product-specific receptor;
  ENSP ID: ENSP00000450205

SEQ ID NO: 3569 - protein, 153 aa, Homo sapiens; identical to SEQ ID NO: 3551
  Payload ID: 779;
  Gene Symbol: AGER;
  Gene Name: advanced glycosylation end product-specific receptor;
  ENSP ID: ENSP00000484081

SEQ ID NO: 3570 - protein, 819 aa, Homo sapiens
  Payload ID: 780;
  Gene Symbol: AVIL;
  Gene Name: advillin;
  Uniprot ID:  O75366;
  ENSP ID: ENSP00000257861
MPLTSAFRAVDNDPGIIVWRIEKMELALVPVSAHGNFYEGDCYVILSTRRVASLLSQDIHFWIGKDSSQDEQSCAAIYTTQLDDYLGGSPVQHREVQYHESDTFRGYFKQGIIYKQGGVASGMKHVETNTYDVKRLLHVKGKRNIRATEVEMSWDSFNRGDVFLLDLGKVIIQWNGPESNSGERLKAMLLAKDIRDRERGGRAKIGVIEGDKEAASPELMKVLQDTLGRRSIIKPTVPDEIIDQKQKSTIMLYHISDSAGQLAVTEVATRPLVQDLLNHDDCYILDQSGTKIYVWKGKGATKAEKQAAMSKALGFIKMKSYPSSTNVETVNDGAESAMFKQLFQKWSVKDQTMGLGKTFSIGKIAKVFQDKFDVTLLHTKPEVAAQERMVDDGNGKVEVWRIENLELVPVEYQWYGFFYGGDCYLVLYTYEVNGKPHHILYIWQGRHASQDELAASAYQAVEVDRQFDGAAVQVRVRMGTEPRHFMAIFKGKLVIFEGGTSRKGNAEPDPPVRLFQIHGNDKSNTKAVEVPAFASSLNSNDVFLLRTQAEHYLWYGKGSSGDERAMAKELASLLCDGSENTVAEGQEPAEFWDLLGGKTPYANDKRLQQEILDVQSRLFECSNKTGQFVVTEITDFTQDDLNPTDVMLLDTWDQVFLWIGAEANATEKESALATAQQYLHTHPSGRDPDTPILIIKQGFEPPIFTGWFLAWDPNIWSAGKTYEQLKEELGDAAAIMRITADMKNATLSLNSNDSEPKYYPIAVLLKNQNQELPEDVNPAKKENYLSEQDFVSVFGITRGQFAALPGWKQLQMKKEKGLF

SEQ ID NO: 3571 - protein, 157 aa, Homo sapiens
  Payload ID: 780;
  Gene Symbol: AVIL;
  Gene Name: advillin;
  ENSP ID: ENSP00000449239
MPLTSAFRAVDNDPGIIVWRIEKMELALVPVSAHGNFYEGDCYVILSTRRVASLLSQDIHFWIGKDSSQDEQSCAAIYTTQLDDYLGGSPVQHREVQYHESDTFRGYFKQGIIYKQGGVASGMKHVETNTYDVKRLLHVKGKRNIRATEVEMSWDSF

SEQ ID NO: 3572 - protein, 76 aa, Homo sapiens
  Payload ID: 780;
  Gene Symbol: AVIL;
  Gene Name: advillin;
  ENSP ID: ENSP00000450188
MPLTSAFRAVDNDPGIIVWRIEETPWKDRWDLLSRLLAASIREMEHVFHGAPWLLQNMGRENGAGAGACERPRQLL

SEQ ID NO: 3573 - protein, 1158 aa, Homo sapiens
  Payload ID: 781;
  Gene Symbol: AEBP1;
  Gene Name: AE binding prt 1;
  Uniprot ID:  Q8IUX7;
  ENSP ID: ENSP00000223357
MAAVRGAPLLSCLLALLALCPGGRPQTVLTDDEIEEFLEGFLSELEPEPREDDVEAPPPPEPTPRVRKAQAGGKPGKRPGTAAEVPPEKTKDKGKKGKKDKGPKVPKESLEGSPRPPKKGKEKPPKATKKPKEKPPKATKKPKEKPPKATKKPKEKPPKATKKPPSGKRPPILAPSETLEWPLPPPPSPGPEELPQEGGAPLSNNWQNPGEETHVEAREHQPEPEEETEQPTLDYNDQIEREDYEDFEYIRRQKQPRPPPSRRRRPERVWPEPPEEKAPAPAPEERIEPPVKPLLPPLPPDYGDGYVIPNYDDMDYYFGPPPPQKPDAERQTDEEKEELKKPKKEDSSPKEETDKWAVEKGKDHKEPRKGEELEEEWTPTEKVKCPPIGMESHRIEDNQIRASSMLRHGLGAQRGRLNMQTGATEDDYYDGAWCAEDDARTQWIEVDTRRTTRFTGVITQGRDSSIHDDFVTTFFVGFSNDSQTWVMYTNGYEEMTFHGNVDKDTPVLSELPEPVVARFIRIYPLTWNGSLCMRLEVLGCSVAPVYSYYAQNEVVATDDLDFRHHSYKDMRQLMKVVNEECPTITRTYSLGKSSRGLKIYAMEISDNPGEHELGEPEFRYTAGIHGNEVLGRELLLLLMQYLCREYRDGNPRVRSLVQDTRIHLVPSLNPDGYEVAAQMGSEFGNWALGLWTEEGFDIFEDFPDLNSVLWGAEERKWVPYRVPNNNLPIPERYLSPDATVSTEVRAIIAWMEKNPFVLGANLNGGERLVSYPYDMARTPTQEQLLAAAMAAARGEDEDEVSEAQETPDHAIFRWLAISFASAHLTLTEPYRGGCQAQDYTGGMGIVNGAKWNPRTGTINDFSYLHTNCLELSFYLGCDKFPHESELPREWENNKEALLTFMEQVHRGIKGVVTDEQGIPIANATISVSGINHGVKTASGGDYWRILNPGEYRVTAHAEGYTPSAKTCNVDYDIGATQCNFILARSNWKRIREIMAMNGNRPIPHIDPSRPMTPQQRRLQQRRLQHRLRLRAQMRLRRLNATTTLGPHTVPPTLPPAPATTLSTTIEPWGLIPPTTAGWEESETETYTEVVTEFGTEVEPEFGTKVEPEFETQLEPEFETQLEPEFEEEEEEEKEEEIATGQAFPFTTVETYTVNFGDF

SEQ ID NO: 3574 - protein, 104 aa, Homo sapiens
  Payload ID: 781;
  Gene Symbol: AEBP1;
  Gene Name: AE binding prt 1;
  ENSP ID: ENSP00000397241
RTQWIEVDTRRTTRFTGVITQGRDSSIHDDFVTTFFVGFSNDSQTWVMYTNGYEEMVGTMPRLLALLPLSGRGVGSQRGWQYCSEACLSPDLSWERGQGHTRAE

SEQ ID NO: 3575 - protein, 733 aa, Homo sapiens
  Payload ID: 781;
  Gene Symbol: AEBP1;
  Gene Name: AE binding prt 1;
  Uniprot ID:  Q8IUX7;
  ENSP ID: ENSP00000398878
MRKWWAPCPGSWLCSHCLGEGWALRGAGSTALRPASPQTFHGNVDKDTPVLSELPEPVVARFIRIYPLTWNGSLCMRLEVLGCSVARECGGLAGALSGGGVLGWASRHPAKDNPASLAAVYSYYAQNEVVATDDLDFRHHSYKDMRQLMKVVNEECPTITRTYSLGKSSRGLKIYAMEISDNPGEHELGEPEFRYTAGIHGNEVLGRELLLLLMQYLCREYRDGNPRVRSLVQDTRIHLVPSLNPDGYEVAAQMGSEFGNWALGLWTEEGFDIFEDFPDLNSVLWGAEERKWVPYRVPNNNLPIPERYLSPDATVSTEVRAIIAWMEKNPFVLGANLNGGERLVSYPYDMARTPTQEQLLAAAMAAARGEDEDEVSEAQETPDHAIFRWLAISFASAHLTLTEPYRGGCQAQDYTGGMGIVNGAKWNPRTGTINDFSYLHTNCLELSFYLGCDKFPHESELPREWENNKEALLTFMEQVHRGIKGVVTDEQGIPIANATISVSGINHGVKTASGGDYWRILNPGEYRVTAHAEGYTPSAKTCNVDYDIGATQCNFILARSNWKRIREIMAMNGNRPIPHIDPSRPMTPQQRRLQQRRLQHRLRLRAQMRLRRLNATTTLGPHTVPPTLPPAPATTLSTTIEPWGLIPPTTAGWEESETETYTEVVTEFGTEVEPEFGTKVEPEFETQLEPEFETQLEPEFEEEEEEEKEEEIATGQAFPFTTVETYTVNFGDF

SEQ ID NO: 3576 - protein, 69 aa, Homo sapiens
  Payload ID: 781;
  Gene Symbol: AEBP1;
  Gene Name: AE binding prt 1;
  ENSP ID: ENSP00000400660
KPDAERQTDEEKEELKKPKKEDSSPKEETDKWAVEKGKDHKEPRKGEELEEEWTPTEKVRPLCRRSPSG

SEQ ID NO: 3577 - protein, 162 aa, Homo sapiens
  Payload ID: 781;
  Gene Symbol: AEBP1;
  Gene Name: AE binding prt 1;
  ENSP ID: ENSP00000401758
MPPEKTKDKGKKGKKDKGPKVPKESLEGSPRPPKKGKEKPPKATKKPKEKPPKATKKPKEKPPKATKKPKEKPPKATKKPPSGKRPPILAPSETLEWPLPPPPSPGPEELPQEGGAPLSNNWQNPGEETHVEAREHQPEPEEETEQPTLDYNDQIEREDYED

SEQ ID NO: 3578 - protein, 66 aa, Homo sapiens
  Payload ID: 781;
  Gene Symbol: AEBP1;
  Gene Name: AE binding prt 1;
  ENSP ID: ENSP00000410349
  MOD_RES (1)..(1): Any amino acid
XFRHHSYKDMRQLMKVVNEECPTITRTYSLGKSSRGLKIYAMEISDNPGEHELGEGLWGPAAGLCC

SEQ ID NO: 3579 - protein, 251 aa, Homo sapiens
  Payload ID: 781;
  Gene Symbol: AEBP1;
  Gene Name: AE binding prt 1;
  ENSP ID: ENSP00000411277
  MOD_RES (1)..(1): Any amino acid
XELEPEPREDDVEAPPPPEPTPRVRKAQAGGKPGKRPGTAAEVPPEKTKDKGKKGKKDKGPKVPKESLEGSPRPPKKGKEKPPKATKKPKEKPPKATKKPKEKPPKATKKPKEKPPKATKKPPSGKRPPILAPSETLEWPLPPPPSPGPEELPQEGGAPLSNNWQNPGEETHVEAREHQPEPPVKPLLPPLPPDYGDGYVIPNYDDMDYYFGPPPPQKPDAERQTDEEKEELKKPKKEDSSPKEETDKWAV

SEQ ID NO: 3580 - protein, 54 aa, Homo sapiens
  Payload ID: 781;
  Gene Symbol: AEBP1;
  Gene Name: AE binding prt 1;
  ENSP ID: ENSP00000416568
LMKVVNEECPTITRTYSLGKSSRGLKIYAMEISDNPGEHELGEGLWGPAAGLCC

SEQ ID NO: 3581 - protein, 503 aa, Homo sapiens
  Payload ID: 782;
  Gene Symbol: AEBP2;
  Gene Name: AE binding prt 2;
  Uniprot ID:  Q6ZN18;
  ENSP ID: ENSP00000266508
MAAAITDMADLEELSRLSPLPPGSPGSAARGRAEPPEEEEEEEEEEEEAEAEAVAALLLNGGSGGGGGGGGGGVGGGEAETMSEPSPESASQAGEDEDEEEDDEEEEDESSSSGGGEEESSAESLVGSSGGSSSDETRSLSPGAASSSSGDGDGKEGLEEPKGPRGSQGGGGGGSSSSSVVSSGGDEGYGTGGGGSSATSGGRRGSLEMSSDGEPLSRMDSEDSISSTIMDVDSTISSGRSTPAMMNGQGSTTSSSKNIAYNCCWDQCQACFNSSPDLADHIRSIHVDGQRGGVFVCLWKGCKVYNTPSTSQSWLQRHMLTHSGDKPFKCVVGGCNASFASQGGLARHVPTHFSQQNSSKVSSQPKAKEESPSKAGMNKRRKLKNKRRRSLPRPHDFFDAQTLDAIRHRAICFNLSAHIESLGKGHSVVFHSTVIAKRKEDSGKIKLLLHWMPEDILPDVWVNESERHQLKTKVVHLSKLPKDTALLLDPNIYRTMPQKRLKR

SEQ ID NO: 3582 - protein, 301 aa, Homo sapiens
  Payload ID: 782;
  Gene Symbol: AEBP2;
  Gene Name: AE binding prt 2;
  Uniprot ID:  Q6ZN18;
  ENSP ID: ENSP00000354267
MYTRRYSSISSTIMDVDSTISSGRSTPAMMNGQGSTTSSSKNIAYNCCWDQCQACFNSSPDLADHIRSIHVDGQRGGVFVCLWKGCKVYNTPSTSQSWLQRHMLTHSGDKPFKCVVGGCNASFASQGGLARHVPTHFSQQNSSKVSSQPKAKEESPSKAGMNKRRKLKNKRRRSLPRPHDFFDAQTLDAIRHRAICFNLSAHIESLGKGHSVVFHSTVIAKRKEDSGKIKLLLHWMPEDILPDVWVNESERHQLKTKVVHLSKLPKDTALLLDPNIYRTMPQKRLKRTLIRKVFNLYLSKQ

SEQ ID NO: 3583 - protein, 140 aa, Homo sapiens
  Payload ID: 782;
  Gene Symbol: AEBP2;
  Gene Name: AE binding prt 2;
  ENSP ID: ENSP00000381715
LDAIRHRAICFNLSAHIESLGKGHSVVFHSTVIAKRKEDSGKIKLLLHWMPEDILPDVWVNESERHQLKTKVVHLSKLPKDTALLLDPNIYRTMPQKRLKRWSFTLVAQAGVQWRDLGSPQPPLPGFKRFFCLSFLSSWD

SEQ ID NO: 3584 - protein, 517 aa, Homo sapiens
  Payload ID: 782;
  Gene Symbol: AEBP2;
  Gene Name: AE binding prt 2;
  Uniprot ID:  Q6ZN18;
  ENSP ID: ENSP00000381840
MAAAITDMADLEELSRLSPLPPGSPGSAARGRAEPPEEEEEEEEEEEEAEAEAVAALLLNGGSGGGGGGGGGGVGGGEAETMSEPSPESASQAGEDEDEEEDDEEEEDESSSSGGGEEESSAESLVGSSGGSSSDETRSLSPGAASSSSGDGDGKEGLEEPKGPRGSQGGGGGGSSSSSVVSSGGDEGYGTGGGGSSATSGGRRGSLEMSSDGEPLSRMDSEDSISSTIMDVDSTISSGRSTPAMMNGQGSTTSSSKNIAYNCCWDQCQACFNSSPDLADHIRSIHVDGQRGGVFVCLWKGCKVYNTPSTSQSWLQRHMLTHSGDKPFKCVVGGCNASFASQGGLARHVPTHFSQQNSSKVSSQPKAKEESPSKAGMNKRRKLKNKRRRSLPRPHDFFDAQTLDAIRHRAICFNLSAHIESLGKGHSVVFHSTVIAKRKEDSGKIKLLLHWMPEDILPDVWVNESERHQLKTKVVHLSKLPKDTALLLDPNIYRTMPQKRLKRTLIRKVFNLYLSKQ

SEQ ID NO: 3585 - protein, 274 aa, Homo sapiens
  Payload ID: 782;
  Gene Symbol: AEBP2;
  Gene Name: AE binding prt 2;
  ENSP ID: ENSP00000437983
MDVDSTISSGRSTPAMMNGQGSTTSSSKNIAYNCCWDQCQACFNSSPDLADHIRSIHVDGQRGGVFVCLWKGCKVYNTPSTSQSWLQRHMLTHSGDKPFKCVVGGCNASFASQGGLARHVPTHFSQQNSSKVSSQPKAKEESPSKAGMNKRRKLKNKRRRSLPRPHDFFDAQTLDAIRHRAICFNLSAHIESLGKGHSVVFHSTVIAKRKEDSGKIKLLLHWMPEDILPDVWVNESERHQLKTKVVHLSKLPKDTALLLDPNIYRTMPQKRLKR

SEQ ID NO: 3586 - protein, 110 aa, Homo sapiens
  Payload ID: 782;
  Gene Symbol: AEBP2;
  Gene Name: AE binding prt 2;
  ENSP ID: ENSP00000444255
MDVDSTISSGRSTPAMMNGQGSTTSSSKNIAYNCCWDQCQACFNSSPDLADHIRSIHVDGQRGGVFVCLWKGCKVYNTPSTSQSWLQRHMLTHSGDKPFKCVVGGCNASF

SEQ ID NO: 3587 - protein, 130 aa, Homo sapiens
  Payload ID: 782;
  Gene Symbol: AEBP2;
  Gene Name: AE binding prt 2;
  ENSP ID: ENSP00000445587
LARPHDFFDAQTLDAIRHRAICFNLSAHIESLGKGHSVVFHSTVIAKRKEDSGKIKLLLHWMPEDILPDVWVNESERHQLKTKVVHLSKLPKDTALLLDPNIYRTMPQKRLKRSDKPFTFCHDCEASSAM

SEQ ID NO: 3588 - protein, 339 aa, Homo sapiens
  Payload ID: 783;
  Gene Symbol:;
  Gene Name: AF011889.5;
  ENSP ID: ENSP00000477056
MKTSASPFFLAVGYHKPHIPFRYPKEFQKLYPLENITLAPDPEVPDGLPPVAYNPWMDIRQREDVQALNISVPYGPIPVDFQRKIRQSYFASVSYLDTQVGRLLSALDDLQLANSTIIAFTSDHGWALGEHGEWAKYSNFDVATHVPLIFYVPGRTASLPEAGEKLFPYLDPFDSASQLMEPGRQSMDLVELVSLFPTLAGLAGLQVPPRCPVPSFHVELCREGKNLLKHFRFRDLEEDPYLPGNPRELIAYSQYPRPSDIPQWNSDKPSLKDIKIMGYSIRTIDYRYTVWVGFNPDEFLANFSDIHAGELYFVDSDPLQDHNMYNDSQGGDLFQLLMP

SEQ ID NO: 3589 - protein, 124 aa, Homo sapiens [sequence omitted]

SEQ ID NO: 3590 - protein, 120 aa, Homo sapiens
  Payload ID: 785;
  Gene Symbol:;
  Gene Name: AF131216.1;
  ENSP ID: ENSP00000485671
MPPETQPDQKMCVPTRKKACLCLHALPLPFLTTYKYSLSEEVREEGGGPCLAFLRLSSIPSRSSSERGAAVNCDNCYALALKTWQVGDGGGDCDLTESSRGQGGTQGHSTGSPRAPRHEV

SEQ ID NO: 3591 - protein, 165 aa, Homo sapiens
  Payload ID: 786;
  Gene Symbol:;
  Gene Name: AF165138.7;
  ENSP ID: ENSP00000383407
MNLFCISLEGSMDSLYEPIPEQQANQENMSSRTDSPIPPFGESEQTPNNLFVGVSNLENAKPKKRKLFRRFMSENKIFEGKTVNDKIWQEHSKHKNDSHIRRPCQLKDLNEDDFLSNNIHTYQGKTLQGTSYQVTSECWSPFHYQRHVETTVDELVRHFFPDVTI

SEQ ID NO: 3592 - protein, 152 aa, Homo sapiens
  Payload ID: 786;
  Gene Symbol:;
  Gene Name: AF165138.7;
  ENSP ID: ENSP00000401381
EGSMDSLYEPIPEQQANQENMSSRTDSPIPPFGESEQTPNNLFVGVSNLENAKPKKRKLFRRFMSENKIFEGKTVNDKIWQEHSKHKNDSHIRRPCQLKDLNEDDFLSNNIHTYQGKTLQGTSYQVTSECWSPFHYQRHVETTVDELAQEFM

SEQ ID NO: 3593 - protein, 1210 aa, Homo sapiens
  Payload ID: 787;
  Gene Symbol: AFF1;
  Gene Name: AF4/FMR2 family, member 1;
  Uniprot ID:  P51825;
  ENSP ID: ENSP00000305689
MAAQSSLYNDDRNLLRIREKERRNQEAHQEKEAFPEKIPLFGEPYKTAKGDELSSRIQNMLGNYEEVKEFLSTKSHTHRLDASENRLGKPKYPLIPDKGSSIPSSSFHTSVHHQSIHTPASGPLSVGNISHNPKMAQPRTEPMPSLHAKSCGPPDSQHLTQDRLGQEGFGSSHHKKGDRRADGDHCASVTDSAPERELSPLISLPSPVPPLSPIHSNQQTLPRTQGSSKVHGSSNNSKGYCPAKSPKDLAVKVHDKETPQDSLVAPAQPPSQTFPPPSLPSKSVAMQQKPTAYVRPMDGQDQAPSESPELKPLPEDYRQQTFEKTDLKVPAKAKLTKLKMPSQSVEQTYSNEVHCVEEILKEMTHSWPPPLTAIHTPSTAEPSKFPFPTKDSQHVSSVTQNQKQYDTSSKTHSNSQQGTSSMLEDDLQLSDSEDSDSEQTPEKPPSSSAPPSAPQSLPEPVASAHSSSAESESTSDSDSSSDSESESSSSDSEENEPLETPAPEPEPPTTNKWQLDNWLTKVSQPAAPPEGPRSTEPPRRHPESKGSSDSATSQEHSESKDPPPKSSSKAPRAPPEAPHPGKRSCQKSPAQQEPPQRQTVGTKQPKKPVKASARAGSRTSLQGEREPGLLPYGSRDQTSKDKPKVKTKGRPRAAASNEPKPAVPPSSEKKKHKSSLPAPSKALSGPEPAKDNVEDRTPEHFALVPLTESQGPPHSGSGSRTSGCRQAVVVQEDSRKDRLPLPLRDTKLLSPLRDTPPPQSLMVKITLDLLSRIPQPPGKGSRQRKAEDKQPPAGKKHSSEKRSSDSSSKLAKKRKGEAERDCDNKKIRLEKEIKSQSSSSSSSHKESSKTKPSRPSSQSSKKEMLPPPPVSSSSQKPAKPALKRSRREADTCGQDPPKSASSTKSNHKDSSIPKQRRVEGKGSRSSSEHKGSSGDTANPFPVPSLPNGNSKPGKPQVKFDKQQADLHMREAKKMKQKAELMTDRVGKAFKYLEAVLSFIECGIATESESQSSKSAYSVYSETVDLIKFIMSLKSFSDATAPTQEKIFAVLCMRCQSILNMAMFRCKKDIAIKYSRTLNKHFESSSKVAQAPSPCIASTGTPSPLSPMPSPASSVGSQSSAGSVGSSGVAATISTPVTIQNMTSSYVTITSHVLTAFDLWEQAEALTRKNKEFFARLSTNVCTLALNSSLVDLVHYTRQGFQQLQELTKTP

SEQ ID NO: 3594 - protein, 1218 aa, Homo sapiens
  Payload ID: 787;
  Gene Symbol: AFF1;
  Gene Name: AF4/FMR2 family, member 1;
  Uniprot ID:  P51825;
  ENSP ID: ENSP00000378578
MAFTERVNSSGNSLYNDDRNLLRIREKERRNQEAHQEKEAFPEKIPLFGEPYKTAKGDELSSRIQNMLGNYEEVKEFLSTKSHTHRLDASENRLGKPKYPLIPDKGSSIPSSSFHTSVHHQSIHTPASGPLSVGNISHNPKMAQPRTEPMPSLHAKSCGPPDSQHLTQDRLGQEGFGSSHHKKGDRRADGDHCASVTDSAPERELSPLISLPSPVPPLSPIHSNQQTLPRTQGSSKVHGSSNNSKGYCPAKSPKDLAVKVHDKETPQDSLVAPAQPPSQTFPPPSLPSKSVAMQQKPTAYVRPMDGQDQAPSESPELKPLPEDYRQQTFEKTDLKVPAKAKLTKLKMPSQSVEQTYSNEVHCVEEILKEMTHSWPPPLTAIHTPSTAEPSKFPFPTKDSQHVSSVTQNQKQYDTSSKTHSNSQQGTSSMLEDDLQLSDSEDSDSEQTPEKPPSSSAPPSAPQSLPEPVASAHSSSAESESTSDSDSSSDSESESSSSDSEENEPLETPAPEPEPPTTNKWQLDNWLTKVSQPAAPPEGPRSTEPPRRHPESKGSSDSATSQEHSESKDPPPKSSSKAPRAPPEAPHPGKRSCQKSPAQQEPPQRQTVGTKQPKKPVKASARAGSRTSLQGEREPGLLPYGSRDQTSKDKPKVKTKGRPRAAASNEPKPAVPPSSEKKKHKSSLPAPSKALSGPEPAKDNVEDRTPEHFALVPLTESQGPPHSGSGSRTSGCRQAVVVQEDSRKDRLPLPLRDTKLLSPLRDTPPPQSLMVKITLDLLSRIPQPPGKGSRQRKAEDKQPPAGKKHSSEKRSSDSSSKLAKKRKGEAERDCDNKKIRLEKEIKSQSSSSSSSHKESSKTKPSRPSSQSSKKEMLPPPPVSSSSQKPAKPALKRSRREADTCGQDPPKSASSTKSNHKDSSIPKQRRVEGKGSRSSSEHKGSSGDTANPFPVPSLPNGNSKPGKPQVKFDKQQADLHMREAKKMKQKAELMTDRVGKAFKYLEAVLSFIECGIATESESQSSKSAYSVYSETVDLIKFIMSLKSFSDATAPTQEKIFAVLCMRCQSILNMAMFRCKKDIAIKYSRTLNKHFESSSKVAQAPSPCIARSTGTPSPLSPMPSPASSVGSQSSAGSVGSSGVAATISTPVTIQNMTSSYVTITSHVLTAFDLWEQAEALTRKNKEFFARLSTNVCTLALNSSLVDLVHYTRQGFQQLQELTKTP

SEQ ID NO: 3595 - protein, 417 aa, Homo sapiens
  Payload ID: 787;
  Gene Symbol: AFF1;
  Gene Name: AF4/FMR2 family, member 1;
  ENSP ID: ENSP00000424483
MAFTERVNSSGNSLYNDDRNLLRIREKERRNQEAHQEKEAFPEKIPLFGEPYKTAKGDELSSRIQNMLGNYEEVKEFLSTKSHTHRLDASENRLGKPKYPLIPDKGSSIPSSSFHTSVHHQSIHTPASGPLSVGNISHNPKMAQPRTEPMPSLHAKSCGPPDSQHLTQDRLGQEGFGSSHHKKGDRRADGDHCASVTDSAPERELSPLISLPSPVPPLSPIHSNQQTLPRTQGSSKVHGSSNNSKGYCPAKSPKDLAVKVHDKETPQDSLVAPAQPPSQTFPPPSLPSKSVAMQQKPTAYVRPMDGQDQAPSESPELKPLPEDYRQQTFEKTDLKVPAKAKLTKLKMPSQSVEQTYSNEVHCVEEILKDSQHVSSVTQNQKQYDTSSKTHSNSQQGTSSMLEDDLQLSDSEDSDSEQ

SEQ ID NO: 3596 - protein, 137 aa, Homo sapiens
  Payload ID: 787;
  Gene Symbol: AFF1;
  Gene Name: AF4/FMR2 family, member 1;
  ENSP ID: ENSP00000424766
MTHSWPPPLTAIHTPSTAEPSKFPFPTKDSQHVSSVTQNQKQYDTSSKTHSNSQQGTSSMLEDDLQLSDSEDSDSEQTPEKPPSSSAPPSAPQSLPEPVASAHSSSAESESTSDSDSSSDSESESSSSDSEENEPLE

SEQ ID NO: 3597 - protein, 194 aa, Homo sapiens
  Payload ID: 787;
  Gene Symbol: AFF1;
  Gene Name: AF4/FMR2 family, member 1;
  ENSP ID: ENSP00000424881
TVSISFNAVVPSGLGPSSHARQRQLWYQLPGSPVALLQTYSNEVHCVEEILKEMTHSWPPPLTAIHTPSTAEPSKFPFPTKDSQHVSSVTQNQKQYDTSSKTHSNSQQGTSSMLEDDLQLSDSEDSDSEQTPEKPPSSSAPPSAPQSLPEPVASAHSSSAESESTSDSDSSSDSESESSSSDSEENEPLETPAP

SEQ ID NO: 3598 - protein, 52 aa, Homo sapiens
  Payload ID: 787;
  Gene Symbol: AFF1;
  Gene Name: AF4/FMR2 family, member 1;
  ENSP ID: ENSP00000425755
MLGNYEEVKEFLSTKSHTHRLDASENRLGKPKYPLIPDKGSSIPSSSFHTSV

SEQ ID NO: 3599 - protein, 406 aa, Homo sapiens
  Payload ID: 787;
  Gene Symbol: AFF1;
  Gene Name: AF4/FMR2 family, member 1;
  ENSP ID: ENSP00000427593
MAFTERVNSSGNSLYNDDRNLLRIREKERRNQEAHQEKEAFPEKIPLFGEPYKTAKGDELSSRIQNMLGNYEEVKEFLSTKSHTHRLDASENRLGKPKYPLIPDKGSSIPSSSFHTSVHHQSIHTPASGPLSVGNISHNPKMAQPRTEPMPSLHAKSCGPPDSQHLTQDRLGQEGFGSSHHKKGDRRADGDHCASVTDSAPERELSPLISLPSPVPPLSPIHSNQQTLPRTQGSSKVHGSSNNSKGYCPAKSPKDLAVKVHDKETPQDSLVAPAQPPSQTFPPPSLPSKSVAMQQKPTAYVRPMDGQDQAPSESPELKPLPEDYRQQTFEKTDLKVPAKAKLTKLKMPSQSVETYSNEVHCVEEILKEMTHSWPPPLTAIHTPSTAEPSKFPFPTKDSQHVSSVTQ

SEQ ID NO: 3600 - protein, 1205 aa, Homo sapiens
  Payload ID: 787;
  Gene Symbol: AFF1;
  Gene Name: AF4/FMR2 family, member 1;
  ENSP ID: ENSP00000440843
MAAQSSLYNDDRNLLRIREKERRNQEAHQEKEAFPEKIPLFGEPYKTAKGDELSSRIQNMLGNYEEVKEFLSTKSHTHRLDASENRLGKPKYPLIPDKGSSIPSSSFHTSVHHQSIHTPASGPLSVGNISHNPKMAQPRTEPMPSLHAKSCGPPDSQHLTQDRLGQEGFGSSHHKKGDRRADGDHCASVTDSAPERELSPLISLPSPVPPLSPIHSNQQTLPRTQGSSKVHGSSNNSKGYCPAKSPKDLAVKVHDKETPQDSLVAPAQPPSQTFPPPSLPSKSVAMQQKPTAYVRPMDGQDQAPSESPELKPLPEDYRQQTFEKTDLKVPAKAKLTKLKMPSQSVEQTYSNEVHCVEEILKEMTHSWPPPLTAIHTPSTAEPSKFPFPTKDSQHVSSVTQNQKQYDTSSKTHSNSQQGTSSMLEDDLQLSDSEDSDSEQTPEKPPSSSAPPSAPQSLPEPVASAHSSSAESESTSDSDSSSDSESESSSSDSEENEPLETPAPEPEPPTTNKWQLDNWLTKVSQPAAPPEGPRSTEPPRRHPESKGSSDSATSQEHSESKDPPPKSSSKAPRAPPEAPHPGKRSCQKSPAQQEPPQRQTVGTKQPKKPVKASARAGSRTSLQGEREPGLLPYGSRDQTSKDKPKVKTKGRPRAAASNEPKPAVPPSSEKKKHKSSLPAPSKALSGPEPAKDNVEDRTPEHFALVPLTESQGPPHSGSGSRTSGCRQAVVVQEDSRKDRLPLPLRDTKLLSPLRDTPPPQSLMVKITLDLLSRIPQPPGKGSRQRKAEDKQPPAGKKHSSEKRSSDSSSKLAKKRKGEAERDCDNKKIRLEKEIKSQSSSSSSSHKESSKTKPSRPSSQSSKKEMLPPPPVSSSSQKPAKPALKRSRREADTCGQDPPKVPAVPRATTDSSIPKQRRVEGKGSRSSSEHKGSSGDTANPFPVPSLPNGNSKPGKPQVKFDKQQADLHMREAKKMKQKAELMTDRVGKAFKYLEAVLSFIECGIATESESQSSKSAYSVYSETVDLIKFIMSLKSFSDATAPTQEKIFAVLCMRCQSILNMAMFRCKKDIAIKYSRTLNKHFESSSKVAQAPSPCIARSTGTPSPLSPMPSPASSVGSQSSAGSVGSSGVAATISTPVTIQNMTSSYVTITSHVLTAFDLWEQAEALTRKNKEFFARLSQMCAPWPSTAVWWTWCTIHDRVFSSYKN

SEQ ID NO: 3601 - protein, 952 aa, Homo sapiens
  Payload ID: 788;
  Gene Symbol: AFF2;
  Gene Name: AF4/FMR2 family, member 2;
  Uniprot ID:  P51816;
  ENSP ID: ENSP00000286437
MKFKRRHQAFPSFFKMKVSLPSDPSCVEEILRESQHLTPGFTLQKWNDPTTRASTKSVSFKSMLEDDLKLSSDEDDLEPVKTLTTQCTATELYQAVEKAKPRNNPVNPPLATPQPPPAVQASGGSGSSSESESSSESDSDTESSTTDSESNEAPRVATPEPEPPSTNKWQLDKWLNKVTSQNKSFICGQNETPMETISLPPPIIQPMEVQMKVKTNASQVPAEPKERPLLSLIREKARPRPTQKIPETKALKHKLSTTSETVSQRTIGKKQPKKVEKNTSTDEFTWPKPNITSSTPKEKESVELHDPPRGRNKATAHKPAPRKEPRPNIPLAPEKKKYRGPGKIVPKSREFIETDSSTSDSNTDQEETLQIKVLPPCIISGGNTAKSKEICGASLTLSTLMSSSGSNNNLSISNEEPTFSPIPVMQTEILSPLRDHENLKNLWVKIDLDLLSRVPGHSSLHAAPAKPDHKETATKPKRQTAVTAVEKPAPKGKRKHKPIEVAEKIPEKKQRLEEATTICLLPPCISPAPPHKPPNTRENNSSRRANRRKEEKLFPPPLSPLPEDPPRRRNVSGNNGPFGQDKNIAMTGQITSTKPKRTEGKFCATFKGISVNEGDTPKKASSATITVTNTAIATATVTATAIVTTTVTATATATATTTTTTTTISTITSTITTGLMDSSHLEMTSWAALPLLSSSSTNVRRPKLTFDDSVHNADYYMQEAKKLKHKADALFEKFGKAVNYADAALSFTECGNAMERDPLEAKSPYTMYSETVELLRYAMRLKNFASPLASDGDKKLAVLCYRCLSLLYLRMFKLKKDHAMKYSRSLMEYFKQNASKVAQIPSPWVSNGKNTPSPVSLNNVSPINAMGNCNNGPVTIPQRIHHMAASHVNITSNVLRGYEHWDMADKLTRENKEFFGDLDTLMGPLTQHSSMTNLVRYVRQGLCWLRIDAHLL

SEQ ID NO: 3602 - protein, 1276 aa, Homo sapiens
  Payload ID: 788;
  Gene Symbol: AFF2;
  Gene Name: AF4/FMR2 family, member 2;
  Uniprot ID:  P51816;
  ENSP ID: ENSP00000345459
MDLFDFFRDWDLEQQCHYEQDRSALKKREWERRNQEVQQEDDLFSSGFDLFGEPYKTNKGDALANRVQNTLGNYDEMKNLLTNHSNQNHLVGIPKNSVPQNPNNKNEPSFFPEQKNRIIPPHQDNTHPSAPMPPPSVVILNSTLIHSNRKSKPEWSRDSHNPSTVLASQASGQPNKMQTLTQDQSQAKLEDFFVYPAEQPQIGEVEESNPSAKEDSNPNSSGEDAFKEIFQSNSPEESEFAVQAPGSPLVASSLLAPSSGLSVQNFPPGLYCKTSMGQQKPTAYVRPMDGQDQAPDISPTLKPSIEFENSFGNLSFGTLLDGKPSAASSKTKLPKFTILQTSEVSLPSDPSCVEEILRESQHLTPGFTLQKWNDPTTRASTKSVSFKSMLEDDLKLSSDEDDLEPVKTLTTQCTATELYQAVEKAKPRNNPVNPPLATPQPPPAVQASGGSGSSSESESSSESDSDTESSTTDSESNEAPRVATPEPEPPSTNKWQLDKWLNKVTSQNKSFICGQNETPMETISLPPPIIQPMEVQMKVKTNASQVPAEPKERPLLSLIREKARPRPTQKIPETKALKHKLSTTSETVSQRTIGKKQPKKVEKNTSTDEFTWPKPNITSSTPKEKESVELHDPPRGRNKATAHKPAPRKEPRPNIPLAPEKKKYRGPGKIVPKSREFIETDSSTSDSNTDQEETLQIKVLPPCIISGGNTAKSKEICGASLTLSTLMSSSGSNNNLSISNEEPTFSPIPVMQTEILSPLRDHENLKNLWVKIDLDLLSRVPGHSSLHAAPAKPDHKETATKPKRQTAVTAVEKPAPKGKRKHKPIEVAEKIPEKKQRLEEATTICLLPPCISPAPPHKPPNTRENNSSRRANRRKEEKLFPPPLSPLPEDPPRRRNVSGNNGPFGQDKNIAMTGQITSTKPKRTEGKFCATFKGISEGDTPKKASSATITVTNTAIATATVTATAIVTTTVTATATATATTTTTTTTISTITSTITTGLMDSSHLEMTSWAALPLLSSSSTNVRRPKLTFDDSVHNADYYMQEAKKLKHKADALFEKFGKAVNYADAALSFTECGNAMERDPLEAKSPYTMYSETVELLRYAMRLKNFASPLASDGDKKLAVLCYRCLSLLYLRMFKLKKDHAMKYSRSLMEYFKQNASKVAQIPSPWVSNGKNTPSPVSLNNVSPINAMGNCNNGPVTIPQRIHHMAASHVNITSNVLRGYEHWDMADKLTRENKEFFGDLDTLMGPLTQHSSMTNLVRYVRQGLCWLRIDAHLL

SEQ ID NO: 3603 - protein, 1276 aa, Homo sapiens
  Payload ID: 788;
  Gene Symbol: AFF2;
  Gene Name: AF4/FMR2 family, member 2;
  Uniprot ID:  P51816;
  ENSP ID: ENSP00000359486
MDLFDFFRDWDLEQQCHYEQDRSALKKREWERRNQEVQQEDDLFSSGFDLFGEPYKVAEYTNKGDALANRVQNTLGNYDEMKNLLTNHSNQNHLVGIPKNSVPQNPNNKNEPSFFPEQKNRIIPPHQDNTHPSAPMPPPSVVILNSTLIHSNRKSKPEWSRDSHNPSTVLASQASGQPNKMQTLTQDQSQAKLEDFFVYPAEQPQIGEVEESNPSAKEDSNPNSSGEDAFKEIFQSNSPEESEFAVQAPGSPLVASSLLAPSSGLSVQNFPPGLYCKTSMGQQKPTAYVRPMDGQDQAPDISPTLKPSIEFENSFGNLSFGTLLDGKPSAASSKTKLPKFTILQTSEVSLPSDPSCVEEILRESQHLTPGFTLQKWNDPTTRASTKMLEDDLKLSSDEDDLEPVKTLTTQCTATELYQAVEKAKPRNNPVNPPLATPQPPPAVQASGGSGSSSESESSSESDSDTESSTTDSESNEAPRVATPEPEPPSTNKWQLDKWLNKVTSQNKSFICGQNETPMETISLPPPIIQPMEVQMKVKTNASQVPAEPKERPLLSLIREKARPRPTQKIPETKALKHKLSTTSETVSQRTIGKKQPKKVEKNTSTDEFTWPKPNITSSTPKEKESVELHDPPRGRNKATAHKPAPRKEPRPNIPLAPEKKKYRGPGKIVPKSREFIETDSSTSDSNTDQEETLQIKVLPPCIISGGNTAKSKEICGASLTLSTLMSSSGSNNNLSISNEEPTFSPIPVMQTEILSPLRDHENLKNLWVKIDLDLLSRVPGHSSLHAAPAKPDHKETATKPKRQTAVTAVEKPAPKGKRKHKPIEVAEKIPEKKQRLEEATTICLLPPCISPAPPHKPPNTRENNSSRRANRRKEEKLFPPPLSPLPEDPPRRRNVSGNNGPFGQDKNIAMTGQITSTKPKRTEGKFCATFKGISVNEGDTPKKASSATITVTNTAIATATVTATAIVTTTVTATATATATTTTTTTTISTITSTITTGLMDSSHLEMTSWAALPLLSSSSTNVRRPKLTFDDSVHNADYYMQEAKKLKHKADALFEKFGKAVNYADAALSFTECGNAMERDPLEAKSPYTMYSETVELLRYAMRLKNFASPLASDGDKKLAVLCYRCLSLLYLRMFKLKKDHAMKYSRSLMEYFKQNASKVAQIPSPWVSNGKNTPSPVSLNNVSPINAMGNCNNGPVTIPQRIHHMAASHVNITSNVLRGYEHWDMADKLTRENKEFFGDLDTLMGPLTQHSSMTNLVRYVRQGLCWLRIDAHLL

SEQ ID NO: 3604 - protein, 427 aa, Homo sapiens
  Payload ID: 788;
  Gene Symbol: AFF2;
  Gene Name: AF4/FMR2 family, member 2;
  Uniprot ID:  P51816;
  ENSP ID: ENSP00000359487
MDLFDFFRDWDLEQQCHYEQDRSALKKREWERRNQEVQQEDDLFSSGFDLFGEPYKTNKGDALANRVQNTLGNYDEMKNLLTNHSNQNHLVGIPKNSVPQNPNNKNEPSFFPEQKNRIIPPHQDNTHPSAPMPPPSVVILNSTLIHSNRKSKPEWSRDSHNPSTVLASQASGQPNKMQTLTQDQSQAKLEDFFVYPAEQPQIGEVEESNPSAKEDSNPNSSGEDAFKEIFQSNSPEESEFAVQAPGSPLVASSLLAPSSGLSVQNFPPGLYCKTSMGQQKPTAYVRPMDGQDQAPDISPTLKPSIEFENSFGNLSFGTLLDGKPSAASSKTKLPKFTILQTSEVSLPSDPSCVEEILRESQHLTPGFTLQKWNDPTTRASTKMLEDDLKLSSDEDDLEPVKTLTTQCTATELYQAVEKAKPRNNPVK

SEQ ID NO: 3605 - protein, 1311 aa, Homo sapiens
  Payload ID: 788;
  Gene Symbol: AFF2;
  Gene Name: AF4/FMR2 family, member 2;
  Uniprot ID:  P51816;
  ENSP ID: ENSP00000359489
MDLFDFFRDWDLEQQCHYEQDRSALKKREWERRNQEVQQEDDLFSSGFDLFGEPYKVAEYTNKGDALANRVQNTLGNYDEMKNLLTNHSNQNHLVGIPKNSVPQNPNNKNEPSFFPEQKNRIIPPHQDNTHPSAPMPPPSVVILNSTLIHSNRKSKPEWSRDSHNPSTVLASQASGQPNKMQTLTQDQSQAKLEDFFVYPAEQPQIGEVEESNPSAKEDSNPNSSGEDAFKEIFQSNSPEESEFAVQAPGSPLVASSLLAPSSGLSVQNFPPGLYCKTSMGQQKPTAYVRPMDGQDQAPDISPTLKPSIEFENSFGNLSFGTLLDGKPSAASSKTKLPKFTILQTSEVSLPSDPSCVEEILREMTHSWPTPLTSMHTAGHSEQSTFSIPGQESQHLTPGFTLQKWNDPTTRASTKSVSFKSMLEDDLKLSSDEDDLEPVKTLTTQCTATELYQAVEKAKPRNNPVNPPLATPQPPPAVQASGGSGSSSESESSSESDSDTESSTTDSESNEAPRVATPEPEPPSTNKWQLDKWLNKVTSQNKSFICGQNETPMETISLPPPIIQPMEVQMKVKTNASQVPAEPKERPLLSLIREKARPRPTQKIPETKALKHKLSTTSETVSQRTIGKKQPKKVEKNTSTDEFTWPKPNITSSTPKEKESVELHDPPRGRNKATAHKPAPRKEPRPNIPLAPEKKKYRGPGKIVPKSREFIETDSSTSDSNTDQEETLQIKVLPPCIISGGNTAKSKEICGASLTLSTLMSSSGSNNNLSISNEEPTFSPIPVMQTEILSPLRDHENLKNLWVKIDLDLLSRVPGHSSLHAAPAKPDHKETATKPKRQTAVTAVEKPAPKGKRKHKPIEVAEKIPEKKQRLEEATTICLLPPCISPAPPHKPPNTRENNSSRRANRRKEEKLFPPPLSPLPEDPPRRRNVSGNNGPFGQDKNIAMTGQITSTKPKRTEGKFCATFKGISVNEGDTPKKASSATITVTNTAIATATVTATAIVTTTVTATATATATTTTTTTTISTITSTITTGLMDSSHLEMTSWAALPLLSSSSTNVRRPKLTFDDSVHNADYYMQEAKKLKHKADALFEKFGKAVNYADAALSFTECGNAMERDPLEAKSPYTMYSETVELLRYAMRLKNFASPLASDGDKKLAVLCYRCLSLLYLRMFKLKKDHAMKYSRSLMEYFKQNASKVAQIPSPWVSNGKNTPSPVSLNNVSPINAMGNCNNGPVTIPQRIHHMAASHVNITSNVLRGYEHWDMADKLTRENKEFFGDLDTLMGPLTQHSSMTNLVRYVRQGLCWLRIDAHLL

SEQ ID NO: 3606 - protein, 1226 aa, Homo sapiens
  Payload ID: 789;
  Gene Symbol: AFF3;
  Gene Name: AF4/FMR2 family, member 3;
  Uniprot ID:  P51826;
  ENSP ID: ENSP00000317421
MDSFDLALLQEWDLESLCVYEPDRNALRRKERERRNQETQQDDGTFNSSYSLFSEPYKTNKGDELSNRIQNTLGNYDEMKDFLTDRSNQSHLVGVPKPGVPQTPVNKIDEHFVADSRAQNQPSSICSTTTSTPAAVPVQQSKRGTMGWQKAGHPPSDGQQRATQQGSLRTLLGDGVGRQQPRAKQVCNVEVGLQTQERPPAMAAKHSSSGHCVQNFPPSLASKPSLVQQKPTAYVRPMDGQDQAPDESPKLKSSSETSVHCTSYRGVPASKPEPARAKAKLSKFSIPKQGEESRSGETNSCVEEIIREMTWLPPLSAIQAPGKVEPTKFPFPNKDSQLVSSGHNNPKKGDAEPESPDNGTSNTSMLEDDLKLSSDEEENEQQAAQRTALRALSDSAVVQQPNCRTSVPSSKGSSSSSSSGSSSSSSDSESSSGSDSETESSSSESEGSKPPHFSSPEAEPASSNKWQLDKWLNKVNPHKPPILIQNESHGSESNQYYNPVKEDVQDCGKVPDVCQPSLREKEIKSTCKEEQRPRTANKAPGSKGVKQKSPPAAVAVAVSAAAPPPAVPCAPAENAPAPARRSAGKKPTRRTERTSAGDGANCHRPEEPAAADALGTSVVVPPEPTKTRPCGNNRASHRKELRSSVTCEKRRTRGLSRIVPKSKEFIETESSSSSSSSDSDLESEQEEYPLSKAQTVAASASSGNDQRLKEAAANGGSGPRAPVGSINARTTSDIAKELEEQFYTLVPFGRNELLSPLKDSDEIRSLWVKIDLTLLSRIPEHLPQEPGVLSAPATKDSESAPPSHTSDTPAEKALPKSKRKRKCDNEDDYREIKKSQGEKDSSSRLATSTSNTLSANHCNMNINSVAIPINKNEKMLRSPISPLSDASKHKYTSEDLTSSSRPNGNSLFTSASSSKKPKADSQLQPHGGDLTKAAHNNSENIPLHKSRPQTKPWSPGSNGHRDCKRQKLVFDDMPRSADYFMQEAKRMKHKADAMVEKFGKALNYAEAALSFIECGNAMEQGPMESKSPYTMYSETVELIRYAMRLKTHSGPNATPEDKQLAALCYRCLALLYWRMFRLKRDHAVKYSKALIDYFKNSSKAAQAPSPWGASGKSTGTPSPMSPNPSPASSVGSQGSLSNASALSPSTIVSIPQRIHQMAANHVSITNSILHSYDYWEMADNLAKENREFFNDLDLLMGPVTLHSSMEHLVQYSQQGLHWLRNSAHLS

SEQ ID NO: 3607 - protein, 1251 aa, Homo sapiens
  Payload ID: 789;
  Gene Symbol: AFF3;
  Gene Name: AF4/FMR2 family, member 3;
  Uniprot ID:  P51826;
  ENSP ID: ENSP00000386834
MDSFDLALLQEWDLESLWGEDILNQRNDSLVVEFQSSASRCRSVYEPDRNALRRKERERRNQETQQDDGTFNSSYSLFSEPYKTNKGDELSNRIQNTLGNYDEMKDFLTDRSNQSHLVGVPKPGVPQTPVNKIDEHFVADSRAQNQPSSICSTTTSTPAAVPVQQSKRGTMGWQKAGHPPSDGQQRATQQGSLRTLLGDGVGRQQPRAKQVCNVEVGLQTQERPPAMAAKHSSSGHCVQNFPPSLASKPSLVQQKPTAYVRPMDGQDQAPDESPKLKSSSETSVHCTSYRGVPASKPEPARAKAKLSKFSIPKQGEESRSGETNSCVEEIIREMTWLPPLSAIQAPGKVEPTKFPFPNKDSQLVSSGHNNPKKGDAEPESPDNGTSNTSMLEDDLKLSSDEEENEQQAAQRTALRALSDSAVVQQPNCRTSVPSSKGSSSSSSSGSSSSSSDSESSSGSDSETESSSSESEGSKPPHFSSPEAEPASSNKWQLDKWLNKVNPHKPPILIQNESHGSESNQYYNPVKEDVQDCGKVPDVCQPSLREKEIKSTCKEEQRPRTANKAPGSKGVKQKSPPAAVAVAVSAAAPPPAVPCAPAENAPAPARRSAGKKPTRRTERTSAGDGANCHRPEEPAAADALGTSVVVPPEPTKTRPCGNNRASHRKELRSSVTCEKRRTRGLSRIVPKSKEFIETESSSSSSSSDSDLESEQEEYPLSKAQTVAASASSGNDQRLKEAAANGGSGPRAPVGSINARTTSDIAKELEEQFYTLVPFGRNELLSPLKDSDEIRSLWVKIDLTLLSRIPEHLPQEPGVLSAPATKDSESAPPSHTSDTPAEKALPKSKRKRKCDNEDDYREIKKSQGEKDSSSRLATSTSNTLSANHCNMNINSVAIPINKNEKMLRSPISPLSDASKHKYTSEDLTSSSRPNGNSLFTSASSSKKPKADSQLQPHGGDLTKAAHNNSENIPLHKSRPQTKPWSPGSNGHRDCKRQKLVFDDMPRSADYFMQEAKRMKHKADAMVEKFGKALNYAEAALSFIECGNAMEQGPMESKSPYTMYSETVELIRYAMRLKTHSGPNATPEDKQLAALCYRCLALLYWRMFRLKRDHAVKYSKALIDYFKNSSKAAQAPSPWGASGKSTGTPSPMSPNPSPASSVGSQGSLSNASALSPSTIVSIPQRIHQMAANHVSITNSILHSYDYWEMADNLAKENREFFNDLDLLMGPVTLHSSMEHLVQYSQQGLHWLRNSAHLS

SEQ ID NO: 3608 - protein, 1226 aa, Homo sapiens; identical to SEQ ID NO: 3606
  Payload ID: 789;
  Gene Symbol: AFF3;
  Gene Name: AF4/FMR2 family, member 3;
  Uniprot ID:  P51826;
  ENSP ID: ENSP00000387207

SEQ ID NO: 3609 - protein, 155 aa, Homo sapiens
  Payload ID: 789;
  Gene Symbol: AFF3;
  Gene Name: AF4/FMR2 family, member 3;
  ENSP ID: ENSP00000393732
MSKKLITCLSRPETGGKFEVDTQRPVCPPSRARAARASAAAVAAAATLTPPTMDSFDLALLQEWDLESLWGEDILNQRNDSLVVEFQSSASRCRSVYEPDRNALRRKERERRNQETQQDDGTFNSSYSLFSEPYKTNKGDELSNRIQNTLGNYDE

SEQ ID NO: 3610 - protein, 99 aa, Homo sapiens
  Payload ID: 789;
  Gene Symbol: AFF3;
  Gene Name: AF4/FMR2 family, member 3;
  ENSP ID: ENSP00000395068
MDSFDLALLQEWDLESLCVYEPDRNALRRKERERRNQETQQDDGTFNSSYSLFSEPYKTNKGDELSNRIQNTLGNYDEMKDFLTDRSNQSHLVGVPKPG

SEQ ID NO: 3611 - protein, 155 aa, Homo sapiens
  Payload ID: 789;
  Gene Symbol: AFF3;
  Gene Name: AF4/FMR2 family, member 3;
  ENSP ID: ENSP00000396582
MDSFDLALLQEWDLESLCVYEPDRNALRRKERERRNQETQQDDGTFNSSYSLFSEPYKTNKGDELSNRIQNTLGNYDEMKDFLTDRSNQSHLVGVPKPGVPQTPVNKIDEHFVADSRAQNQPSSICSTTTSTPAAVPVQQSKRGTMGWQKAGHPP

SEQ ID NO: 3612 - protein, 128 aa, Homo sapiens
  Payload ID: 789;
  Gene Symbol: AFF3;
  Gene Name: AF4/FMR2 family, member 3;
  ENSP ID: ENSP00000399795
MDSFDLALLQEWDLESLCVYEPDRNALRRKERERRNQETQQDDGTFNSSYSLFSEPYKTNKGDELSNRIQNTLGNYDEMKDFLTDRSNQSHLVGVPKPGVPQTPVNKIDEHFVADSRAQNQPSSICST

SEQ ID NO: 3613 - protein, 161 aa, Homo sapiens
  Payload ID: 789;
  Gene Symbol: AFF3;
  Gene Name: AF4/FMR2 family, member 3;
  ENSP ID: ENSP00000406484
MDSFDLALLQEWDLESLCVYEPDRNALRRKERERRNQETQQDDGTFNSSYSLFSEPYKTNKGDELSNRIQNTLGNYDEMKDFLTDRSNQSHLVGVPKPGVPQTPVNKIDEHFVADSRAQNQPSSICSTTTSTPAAVPVQQSKRGTMGWQKAGHPPSDGQQR

SEQ ID NO: 3614 - protein, 183 aa, Homo sapiens
  Payload ID: 789;
  Gene Symbol: AFF3;
  Gene Name: AF4/FMR2 family, member 3;
  ENSP ID: ENSP00000407448
MTLRLDAGGIPSLAPRVYISGSPSQRFLPRKRNKGESAGRDSLLAGSARFGSRGEAQLQGSELLSRNSGESLVRIRSCGQELITCLSRPETGGKFEVDTQRPVCPPSRARAARASAAAVAAAATLTPPTMDSFDLALLQEWDLESLWGEDILNQRNDSLVVEFQSSASRCRSVYEPDRNALRR

SEQ ID NO: 3615 - protein, 114 aa, Homo sapiens
  Payload ID: 789;
  Gene Symbol: AFF3;
  Gene Name: AF4/FMR2 family, member 3;
  ENSP ID: ENSP00000411383
MDSFDLALLQEWDLESLCVYEPDRNALRRKERERRNQETQQDDGTFNSSYSLFSEPYKTNKGDELSNRIQNTLGNYDEMKDFLTDRSNQSHLVGVPKPGVPQTPVNKIDEHFVA

SEQ ID NO: 3616 - protein, 179 aa, Homo sapiens
  Payload ID: 789;
  Gene Symbol: AFF3;
  Gene Name: AF4/FMR2 family, member 3;
  ENSP ID: ENSP00000414099
  MOD_RES (1)..(1): Any amino acid
XASKPSLVQQKPTAYVRPMDGQDQAPDESPKLKSSSETSVHCTSYRGVPASKPEPARAKAKLSKFSIPKQGEESRSGETNSCVEEIIREMTWLPPLSAIQAPGKVEPTKFPFPNKDSQLVSSGHNNPKKGDAEPESPDNGTSNTSMLEDDLKLSSDEEENEQQAAQRTALRALSDSLSW

SEQ ID NO: 3617 - protein, 17 aa, Homo sapiens
  Payload ID: 789;
  Gene Symbol: AFF3;
  Gene Name: AF4/FMR2 family, member 3;
  ENSP ID: ENSP00000416131
MDSFDLALLQEWDLESL

SEQ ID NO: 3618 - protein, 185 aa, Homo sapiens
  Payload ID: 789;
  Gene Symbol: AFF3;
  Gene Name: AF4/FMR2 family, member 3;
  ENSP ID: ENSP00000416685
GHRDCKRQKLVFDDMPRSADYFMQEAKRMKHKADAMVEKFGKALNYAEAALSFIECGNAMEQGPMESKSPYTMYSETVELIRYAMRLKTHSGPNATPEDKQLAALCYRCLALLYWRMFRLKRDHAVKYSKALIDYFKNSSKAAQAPSPWGASGNSVGSQGSLSNASALSPSTIVSIPQRIHQMAA

SEQ ID NO: 3619 - protein, 1163 aa, Homo sapiens
  Payload ID: 790;
  Gene Symbol: AFF4;
  Gene Name: AF4/FMR2 family, member 4;
  Uniprot ID:  Q9UHB7;
  ENSP ID: ENSP00000265343
MNREDRNVLRMKERERRNQEIQQGEDAFPPSSPLFAEPYKVTSKEDKLSSRIQSMLGNYDEMKDFIGDRSIPKLVAIPKPTVPPSADEKSNPNFFEQRHGGSHQSSKWTPVGPAPSTSQSQKRSSGLQSGHSSQRTSAGSSSGTNSSGQRHDRESYNNSGSSSRKKGQHGSEHSKSRSSSPGKPQAVSSLNSSHSRSHGNDHHSKEHQRSKSPRDPDANWDSPSRVPFSSGQHSTQSFPPSLMSKSNSMLQKPTAYVRPMDGQESMEPKLSSEHYSSQSHGNSMTELKPSSKAHLTKLKIPSQPLDASASGDVSCVDEILKEMTHSWPPPLTAIHTPCKTEPSKFPFPTKESQQSNFGTGEQKRYNPSKTSNGHQSKSMLKDDLKLSSSEDSDGEQDCDKTMPRSTPGSNSEPSHHNSEGADNSRDDSSSHSGSESSSGSDSESESSSSDSEANEPSQSASPEPEPPPTNKWQLDNWLNKVNPHKVSPASSVDSNIPSSQGYKKEGREQGTGNSYTDTSGPKETSSATPGRDSKTIQKGSESGRGRQKSPAQSDSTTQRRTVGKKQPKKAEKAAAEEPRGGLKIESETPVDLASSMPSSRHKAATKGSRKPNIKKESKSSPRPTAEKKKYKSTSKSSQKSREIIETDTSSSDSDESESLPPSSQTPKYPESNRTPVKPSSVEEEDSFFRQRMFSPMEEKELLSPLSEPDDRYPLIVKIDLNLLTRIPGKPYKETEPPKGEKKNVPEKHTREAQKQASEKVSNKGKRKHKNEDDNRASESKKPKTEDKNSAGHKPSSNRESSKQSAAKEKDLLPSPAGPVPSKDPKTEHGSRKRTISQSSSLKSSSNSNKETSGSSKNSSSTSKQKKTEGKTSSSSKEVKEKAPSSSSNCPPSAPTLDSSKPRRTKLVFDDRNYSADHYLQEAKKLKHNADALSDRFEKAVYYLDAVVSFIECGNALEKNAQESKSPFPMYSETVDLIKYTMKLKNYLAPDATAADKRLTVLCLRCESLLYLRLFKLKKENALKYSKTLTEHLKNSYNNSQAPSPGLGSKAVGMPSPVSPKLSPGNSGNYSSGASSASASGSSVTIPQKIHQMAASYVQVTSNFLYATEIWDQAEQLSKEQKEFFAELDKVMGPLIFNASIMTDLVRYTRQGLHWLRQDAKLIS

SEQ ID NO: 3620 - protein, 900 aa, Homo sapiens
  Payload ID: 790;
  Gene Symbol: AFF4;
  Gene Name: AF4/FMR2 family, member 4;
  Uniprot ID:  Q9UHB7;
  ENSP ID: ENSP00000367858
MNREDRNVLRMKERERRNQEIQQGEDAFPPSSPLFAEPYKVTSKEDKLSSRIQSMLGNYDEMKDFIGDRSIPKLVAIPKPTVPPSADEKSNPNFFEQRHGGSHQSSKWTPVGPAPSTSQSQKRSSGLQSGHSSQRTSAGSSSGTNSSGQRHDRESYNNSGSSSRKKGQHGSEHSKSRSSSPGKPQAVSSLNSSHSRSHGNDHHSKEHQRSKSPRDPDANWDSPSRVPFSSGQHSTQSFPPSLMSKSNSMLQKPTAYVRPMDGQESMEPKLSSEHYSSQSHGNSMTELKPSSKAHLTKLKIPSQPLDASASGDVSCVDEILKEMTHSWPPPLTAIHTPCKTEPSKFPFPTKESQQSNFGTGEQKRYNPSKTSNGHQSKSMLKDDLKLSSSEDSDGEQDCDKTMPRSTPGSNSEPSHHNSEGADNSRDDSSSHSGSESSSGSDSESESSSSDSEANEPSQSASPEPEPPPTNKWQLDNWLNKVNPHKVSPASSVDSNIPSSQGYKKEGREQGTGNSYTDTSGPKETSSATPGRDSKTIQKGSESGRGRQKSPAQSDSTTQRRTVGKKQPKKAEKAAAEEPRGGLKIESETPVDLASSMPSSRHKAATKGSRKPNIKKESKSSPRPTAEKKKYKSTSKSSQKSREIIETDTSSSDSDESESLPPSSQTPKYPESNRTPVKPSSVEEEDSFFRQRMFSPMEEKELLSPLSEPDDRYPLIVKIDLNLLTRIPGKPYKETEPPKGEKKNVPEKHTREAQKQASEKVSNKGKRKHKNEDDNRASESKKPKTEDKNSAGHKPSSNRESSKQSAAKEKDLLPSPAGPVPSKDPKTEHGSRKRTISQSSSLKSSSNSNKETSGSSKNSSSTSKQKKTEGKTSSSSKEVKVKCWGPGAFENHSTCHVTFPG

SEQ ID NO: 3621 - protein, 148 aa, Homo sapiens
  Payload ID: 790;
  Gene Symbol: AFF4;
  Gene Name: AF4/FMR2 family, member 4;
  ENSP ID: ENSP00000395268
MNREDRNVLRMKERERRNQEIQQGEDAFPPSSPLFAEPYKVTSKEDKLSSRIQSMLGNYDEMKDFIGDRSIPKLVAIPKPTVPPSADEKSNPNFFEQRHGGSHQSSKWTPVGPAPSTSQSQKRSSGLQSGHSSQRTSAGSSSGTNSSG

SEQ ID NO: 3622 - protein, 171 aa, Homo sapiens
  Payload ID: 790;
  Gene Symbol: AFF4;
  Gene Name: AF4/FMR2 family, member 4;
  ENSP ID: ENSP00000409069
  MOD_RES (1)..(1): Any amino acid
XSQSHGNSMTELKPSSKAHLTKLKIPSQPLDASASGDVSCVDEILKESQQSNFGTGEQKRYNPSKTSNGHQSKSMLKDDLKLSSSEDSDGEQDCDKTMPRSTPGSNSEPSHHNSEGADNSRDDSSSHSGSESSSGSDSESESSSSDSEANEPSQSASPEPEPPPTNKWQLD

SEQ ID NO: 3623 - protein, 599 aa, Homo sapiens
  Payload ID: 791;
  Gene Symbol: AFM;
  Gene Name: afamin;
  Uniprot ID:  P43652;
  ENSP ID: ENSP00000226355
MKLLKLTGFIFFLFFLTESLTLPTQPRDIENFNSTQKFIEDNIEYITIIAFAQYVQEATFEEMEKLVKDMVEYKDRCMADKTLPECSKLPNNVLQEKICAMEGLPQKHNFSHCCSKVDAQRRLCFFYNKKSDVGFLPPFPTLDPEEKCQAYESNRESLLNHFLYEVARRNPFVFAPTLLTVAVHFEEVAKSCCEEQNKVNCLQTRAIPVTQYLKAFSSYQKHVCGALLKFGTKVVHFIYIAILSQKFPKIEFKELISLVEDVSSNYDGCCEGDVVQCIRDTSKVMNHICSKQDSISSKIKECCEKKIPERGQCIINSNKDDRPKDLSLREGKFTDSENVCQERDADPDTFFAKFTFEYSRRHPDLSIPELLRIVQIYKDLLRNCCNTENPPGCYRYAEDKFNETTEKSLKMVQQECKHFQNLGKDGLKYHYLIRLTKIAPQLSTEELVSLGEKMVTAFTTCCTLSEEFACVDNLADLVFGELCGVNENRTINPAVDHCCKTNFAFRRPCFESLKADKTYVPPPFSQDLFTFHADMCQSQNEELQRKTDRFLVNLVKLKHELTDEELQSLFTNFANVVDKCCKAESPEVCFNEESPKIGN

SEQ ID NO: 3624 - protein, 797 aa, Homo sapiens
  Payload ID: 792;
  Gene Symbol: AFG3L2;
  Gene Name: AFG3-like AAA ATPase 2;
  Uniprot ID:  Q9Y4W6;
  ENSP ID: ENSP00000269143
MAHRCLRLWGRGGCWPRGLQQLLVPGGVGPGEQPCLRTLYRFVTTQARASRNSLLTDIIAAYQRFCSRPPKGFEKYFPNGKNGKKASEPKEVMGEKKESKPAATTRSSGGGGGGGGKRGGKKDDSHWWSRFQKGDIPWDDKDFRMFFLWTALFWGGVMFYLLLKRSGREITWKDFVNNYLSKGVVDRLEVVNKRFVRVTFTPGKTPVDGQYVWFNIGSVDTFERNLETLQQELGIEGENRVPVVYIAESDGSFLLSMLPTVLIIAFLLYTIRRGPAGIGRTGRGMGGLFSVGETTAKVLKDEIDVKFKDVAGCEEAKLEIMEFVNFLKNPKQYQDLGAKIPKGAILTGPPGTGKTLLAKATAGEANVPFITVSGSEFLEMFVGVGPARVRDLFALARKNAPCILFIDEIDAVGRKRGRGNFGGQSEQENTLNQLLVEMDGFNTTTNVVILAGTNRPDILDPALLRPGRFDRQIFIGPPDIKGRASIFKVHLRPLKLDSTLEKDKLARKLASLTPGFSGADVANVCNEAALIAARHLSDSINQKHFEQAIERVIGGLEKKTQVLQPEEKKTVAYHEAGHAVAGWYLEHADPLLKVSIIPRGKGLGYAQYLPKEQYLYTKEQLLDRMCMTLGGRVSEEIFFGRITTGAQDDLRKVTQSAYAQIVQFGMNEKVGQISFDLPRQGDMVLEKPYSEATARLIDDEVRILINDAYKRTVALLTEKKADVEKVALLLLEKEVLDKNDMVELLGPRPFAEKSTYEEFVEGTGSLDEDTSLPEGLKDWNKEREKEKEEPPGEKVAN

SEQ ID NO: 3625 - protein, 209 aa, Homo sapiens
  Payload ID: 792;
  Gene Symbol: AFG3L2;
  Gene Name: AFG3-like AAA ATPase 2;
  ENSP ID: ENSP00000467236
  MOD_RES (1)..(1): Any amino acid
XVGPGEQPCLRTGDIPWDDKDFRMFFLWTALFWGGVMFYLLLKRSGREITWKDFVNNYLSKGVVDRLEVVNKRFVRVTFTPGKTPVDGQYVWFNIGSVDTFERNLETLQQELGIEGENRVPVVYIAESDGSFLLSMLPTVLIIAFLLYTIRRGPAGIGRTGRGMGGLFSVGETTAKVLKDEIDVKFKDVAGCEEAKLEIMEFVNFLKNP

SEQ ID NO: 3626 - protein, 936 aa, Homo sapiens
  Payload ID: 793;
  Gene Symbol: AFTPH;
  Gene Name: aftiphilin;
  Uniprot ID:  Q6ULP2;
  ENSP ID: ENSP00000238855
MEPDIIRMYSSSPPPLDNGAEDDDDDEFGEFGGFSEVSPSGVGFVDFDTPDYTRPKEEFVPSNHFMPIHEFSENVDSLTSFKSIKNGNDKDITAELSAPVKGQSDVLLSTTSKEIISSEMLATSIDGMERPGNLNKVVEQRQNVGTLESFSPGDFRTNMNVVHQNKQLESCNGEKPPCLEILTNGFAVLETVNPQGTDDLDNVADSKGRKPLSTHSTEYNLDSVPSPAEEFADFATFSKKERIQLEEIECAVLNDREALTIRENNKINRVNELNSVKEVALGRSLDNKGDTDGEDQVCVSEISIVTNRGFSVEKQGLPTLQQDEFLQSGVQSKAWSLVDSADNSEAIRREQCKTEEKLDLLTSKCAHLCMDSVKTSDDEVGSPKEESRKFTNFQSPNIDPTEENDLDDSLSVKNGDSSNDFVTCNDINEDDFGDFGDFGSASGSTPPFVTGTQDSMSDATFEESSEHFPHFSEPGDDFGEFGDINAVSCQEETILTKSDLKQTSDNLSEECQLARKSSGTGTEPVAKLKNGQEGEIGHFDSVPNIQDDCNGFQDSDDFADFSSAGPSQVVDWNAFEDEQKDSCSWAAFGDQQATESHHRKEAWQSHRTDENIDTPGTPKTHSVPSATSKGAVASGHLQESATSVQTALLNRLERIFEACFPSILVPDAEEEVTSLKHLLETSTLPIKTREALPESGELLDVWTELQDIHDAHGLRYQWGGSHSNKKLLSSLGIDTRNILFTGNKKQPVIVPMYAAGLGMLEPTKEPLKPLSAAEKIASIGQTATMSPDMNTCTSDQFQESLPPVQFDWSSSGLTNPLDASGGSTLLNLDFFGPVDDSSSSSSTTIPGVDPELYELTTSKLEISTSSLKVTDAFARLMSTVEKTSTSTRKPKREEHLSEEAIKVIAGLPDLTFMHAKVLMFPATLTPSTSSQEKADG

SEQ ID NO: 3627 - protein, 909 aa, Homo sapiens
  Payload ID: 793;
  Gene Symbol: AFTPH;
  Gene Name: aftiphilin;
  Uniprot ID:  Q6ULP2;
  ENSP ID: ENSP00000238856
MEPDIIRMYSSSPPPLDNGAEDDDDDEFGEFGGFSEVSPSGVGFVDFDTPDYTRPKEEFVPSNHFMPIHEFSENVDSLTSFKSIKNGNDKDITAELSAPVKGQSDVLLSTTSKEIISSEMLATSIDGMERPGNLNKVVEQRQNVGTLESFSPGDFRTNMNVVHQNKQLESCNGEKPPCLEILTNGFAVLETVNPQGTDDLDNVADSKGRKPLSTHSTEYNLDSVPSPAEEFADFATFSKKERIQLEEIECAVLNDREALTIRENNKINRVNELNSVKEVALGRSLDNKGDTDGEDQVCVSEISIVTNRGFSVEKQGLPTLQQDEFLQSGVQSKAWSLVDSADNSEAIRREQCKTEEKLDLLTSKCAHLCMDSVKTSDDEVGSPKEESRKFTNFQSPNIDPTEENDLDDSLSVKNGDSSNDFVTCNDINEDDFGDFGDFGSASGSTPPFVTGTQDSMSDATFEESSEHFPHFSEPGDDFGEFGDINAVSCQEETILTKSDLKQTSDNLSEECQLARKSSGTGTEPVAKLKNGQEGEIGHFDSVPNIQDDCNGFQDSDDFADFSSAGPSQVVDWNAFEDEQKDSCSWAAFGDQQATESHHRKEAWQSHRTDENIDTPGTPKTHSVPSATSKGAVASGHLQESATSVQTALLNRLERIFEACFPSILVPDAEEEVTSLKHLLETSTLPIKTREALPESGELLDVWTELQDIHDAHGLRYQWGGSHSNKKLLSSLGIDTRNILFTGNKKQPVIVPMYAAGLGMLEPTKEPLKPLSAAEKIASIGQTATMSPDMNTCTSDQFQESLPPVQFDWSSSGLTNPLDGVDPELYELTTSKLEISTSSLKVTDAFARLMSTVEKTSTSTSRKPKREEHLSEEAIKVIAGLPDLTFMHAKVLMFPATLTPSTSSQEKADG

SEQ ID NO: 3628 - protein, 592 aa, Homo sapiens
  Payload ID: 793;
  Gene Symbol: AFTPH;
  Gene Name: aftiphilin;
  ENSP ID: ENSP00000386913
  MOD_RES (1)..(1): Any amino acid
XIRREQCKTEEKLDLLTSKCAHLCMDSVKTSDDEVGSPKEESRKFTNFQSPNIDPTEENDLDDSLSVKNGDSSNDFVTCNDINEDDFGDFGDFGSASGSTPPFVTGTQDSMSDATFEESSEHFPHFSEPGDDFGEFGDINAVSCQEETILTKSDLKQTSDNLSEECQLARKSSGTGTEPVAKLKNGQEGEIGHFDSVPNIQDDCNGFQDSDDFADFSSAGPSQVVDWNAFEDEQKDSCSWAAFGDQQATESHHRKEAWQSHRTDENIDTPGTPKTHSVPSATSKGAVASGHLQESATSVQTALLNRLERIFEACFPSILVPDAEEEVTSLKHLLETSTLPIKTREALPESGELLDVWTELQDIHDAHGLRYQWGGSHSNKKLLSSLGIDTRNILFTGNKKQPVIVPMYAAGLGMLEPTKEPLKPLSAAEKIASIGQTATMSPDMNTCTSDQFQESLPPVQFDWSSSGLTNPLDASGGSTLLNLDFFGPVDDSSSSSSTTIPGVDPELYELTTSKLEISTSSLKVTDAFARLMSTVEKTSTSTSRKPKREEHLSEEAIKVIAGLPDLTFMHAKVLMFPATLTPSTSSQEKADG

SEQ ID NO: 3629 - protein, 936 aa, Homo sapiens; identical to SEQ ID NO: 3626
  Payload ID: 793;
  Gene Symbol: AFTPH;
  Gene Name: aftiphilin;
  Uniprot ID:  Q6ULP2;
  ENSP ID: ENSP00000387071

SEQ ID NO: 3630 - protein, 138 aa, Homo sapiens
  Payload ID: 793;
  Gene Symbol: AFTPH;
  Gene Name: aftiphilin;
  ENSP ID: ENSP00000397726
MYAAGLGMLEPTKEPLKPLSAAEKIASIGQTATMSPDMNTCTSDQFQESLPPVQFDWSSSGLTNPLDGVDPELYELTTSKLEISTSSLKVTDAFARLMSTVEKTSTSTRKPKREEHLSEEAIKVIAGLPDLTFMHAKV

SEQ ID NO: 3631 - protein, 227 aa, Homo sapiens
  Payload ID: 793;
  Gene Symbol: AFTPH;
  Gene Name: aftiphilin;
  ENSP ID: ENSP00000489378
FPHFSEPGDDFGEFGDINAVSCQEETILTKSDLKQTSDNLSEECQLARKSSGTGTEPVAKLKNGQEGEIGHFDSVPNIQDDCNGFQDSDDFADFSSAGPSQVVDWNAFEDEQKDSCSWAAFGDQQATESHHRKEAWQSHRTDENIDTPGTPKTHSVPSATSKGAVASGHLQESATSVQGMLEPTKEPLKPLSAAEKIASIGQTATMSPDMNTCTSDQFQVWIRSCMS

SEQ ID NO: 3632 - protein, 107 aa, Homo sapiens
  Payload ID: 794;
  Gene Symbol: ARMS2;
  Gene Name: age-related maculopathy susceptibility 2;
  Uniprot ID:  P0C7Q2;
  ENSP ID: ENSP00000436682
MLRLYPGPMVTEAEGKGGPEMASLSSSVVPVSFISTLRESVLDPGVGGEGASDKQRSKLSLSHSMIPAAKIHTELCLPAFFSPAGTQRRFQQPQHHLTLSIIHTAAR

SEQ ID NO: 3633 - protein, 2431 aa, Homo sapiens
  Payload ID: 795;
  Gene Symbol: ACAN;
  Gene Name: aggrecan;
  ENSP ID: ENSP00000341615
MTTLLWVFVTLRVITAAVTVETSDHDNSLSVSIPQPSPLRVLLGTSLTIPCYFIDPMHPVTTAPSTAPLAPRIKWSRVSKEKEVVLLVATEGRVRVNSAYQDKVSLPNYPAIPSDATLEVQSLRSNDSGVYRCEVMHGIEDSEATLEVVVKGIVFHYRAISTRYTLDFDRAQRACLQNSAIIATPEQLQAAYEDGFHQCDAGWLADQTVRYPIHTPREGCYGDKDEFPGVRTYGIRDTNETYDVYCFAEEMEGEVFYATSPEKFTFQEAANECRRLGARLATTGQLYLAWQAGMDMCSAGWLADRSVRYPISKARPNCGGNLLGVRTVYVHANQTGYPDPSSRYDAICYTGEDFVDIPENFFGVGGEEDITVQTVTWPDMELPLPRNITEGEARGSVILTVKPIFEVSPSPLEPEEPFTFAPEIGATAFAEVENETGEATRPWGFPTPGLGPATAFTSEDLVVQVTAVPGQPHLPGGVVFHYRPGPTRYSLTFEEAQQACLRTGAVIASPEQLQAAYEAGYEQCDAGWLRDQTVRYPIVSPRTPCVGDKDSSPGVRTYGVRPSTETYDVYCFVDRLEGEVFFATRLEQFTFQEALEFCESHNATLATTGQLYAAWSRGLDKCYAGWLADGSLRYPIVTPRPACGGDKPGVRTVYLYPNQTGLPDPLSRHHAFCFRGISAVPSPGEEEGGTPTSPSGVEEWIVTQVVPGVAAVPVEEETTAVPSGETTAILEFTTEPENQTEWEPAYTPVGTSPLPGILPTWPPTGAATEESTEGPSATEVPSASEEPSPSEVPFPSEEPSPSEEPFPSVRPFPSVELFPSEEPFPSKEPSPSEEPSASEEPYTPSPPVPSWTELPSSGEESGAPDVSGDFTGSGDVSGHLDFSGQLSGDRASGLPSGDLDSSGLTSTVGSGLPVESGLPSGDEERIEWPSTPTVGELPSGAEILEGSASGVGDLSGLPSGEVLETSASGVGDLSGLPSGEVLETTAPGVEDISGLPSGEVLETTAPGVEDISGLPSGEVLETTAPGVEDISGLPSGEVLETTAPGVEDISGLPSGEVLETTAPGVEDISGLPSGEVLETTAPGVEDISGLPSGEVLETAAPGVEDISGLPSGEVLETAAPGVEDISGLPSGEVLETAAPGVEDISGLPSGEVLETAAPGVEDISGLPSGEVLETAAPGVEDISGLPSGEVLETAAPGVEDISGLPSGEVLETAAPGVEDISGLPSGEVLETAAPGVEDISGLPSGEVLETAAPGVEDISGLPSGEVLETAAPGVEDISGLPSGEVLETAAPGVEDISGLPSGEVLETAAPGVEDISGLPSGEVLETAAPGVEDISGLPSGEVLETAAPGVEDISGLPSGEVLETAAPGVEDISGLPSGEVLETAAPGVEDISGLPSGEVLETTAPGVEEISGLPSGEVLETTAPGVDEISGLPSGEVLETTAPGVEEISGLPSGEVLETSTSAVGDLSGLPSGGEVLEISVSGVEDISGLPSGEVVETSASGIEDVSELPSGEGLETSASGVEDLSRLPSGEEVLEISASGFGDLSGLPSGGEGLETSASEVGTDLSGLPSGREGLETSASGAEDLSGLPSGKEDLVGSASGDLDLGKLPSGTLGSGQAPETSGLPSGFSGEYSGVDLGSGPPSGLPDFSGLPSGFPTVSLVDSTLVEVVTASTASELEGRGTIGISGAGEISGLPSSELDISGRASGLPSGTELSGQASGSPDVSGEIPGLFGVSGQPSGFPDTSGETSGVTELSGLSSGQPGISGEASGVLYGTSQPFGITDLSGETSGVPDLSGQPSGLPGFSGATSGVPDLVSGTTSGSGESSGITFVDTSLVEVAPTTFKEEEGLGSVELSGLPSGEADLSGKSGMVDVSGQFSGTVDSSGFTSQTPEFSGLPSGIAEVSGESSRAEIGSSLPSGAYYGSGTPSSFPTVSLVDRTLVESVTQAPTAQEAGEGPSGILELSGAHSGAPDMSGEHSGFLDLSGLQSGLIEPSGEPPGTPYFSGDFASTTNVSGESSVAMGTSGEASGLPEVTLITSEFVEGVTEPTISQELGQRPPVTHTPQLFESSGKVSTAGDISGATPVLPGSGVEVSSVPESSSETSAYPEAGFGASAAPEASREDSGSPDLSETTSAFHEANLERSSGLGVSGSTLTFQEGEASAAPEVSGESTTTSDVGTEAPGLPSATPTASGDRTEISGDLSGHTSQLGVVISTSIPESEWTQQTQRPAETHLEIESSSLLYSGEETHTVETATSPTDASIPASPEWKRESESTAADQEVCEEGWNKYQGHCYRHFPDRETWVDAERRCREQQSHLSSIVTPEEQEFVNNNAQDYQWIGLNDRTIEGDFRWSDGHPMQFENWRPNQPDNFFAAGEDCVVMIWHEKGEWNDVPCNYHLPFTCKKGTATTYKRRLQKRSSRHPRRSRPSTAH

SEQ ID NO: 3634 - protein, 2530 aa, Homo sapiens
  Payload ID: 795;
  Gene Symbol: ACAN;
  Gene Name: aggrecan;
  ENSP ID: ENSP00000387356
MTTLLWVFVTLRVITAAVTVETSDHDNSLSVSIPQPSPLRVLLGTSLTIPCYFIDPMHPVTTAPSTAPLAPRIKWSRVSKEKEVVLLVATEGRVRVNSAYQDKVSLPNYPAIPSDATLEVQSLRSNDSGVYRCEVMHGIEDSEATLEVVVKGIVFHYRAISTRYTLDFDRAQRACLQNSAIIATPEQLQAAYEDGFHQCDAGWLADQTVRYPIHTPREGCYGDKDEFPGVRTYGIRDTNETYDVYCFAEEMEGEVFYATSPEKFTFQEAANECRRLGARLATTGQLYLAWQAGMDMCSAGWLADRSVRYPISKARPNCGGNLLGVRTVYVHANQTGYPDPSSRYDAICYTGEDFVDIPENFFGVGGEEDITVQTVTWPDMELPLPRNITEGEARGSVILTVKPIFEVSPSPLEPEEPFTFAPEIGATAFAEVENETGEATRPWGFPTPGLGPATAFTSEDLVVQVTAVPGQPHLPGGVVFHYRPGPTRYSLTFEEAQQACLRTGAVIASPEQLQAAYEAGYEQCDAGWLRDQTVRYPIVSPRTPCVGDKDSSPGVRTYGVRPSTETYDVYCFVDRLEGEVFFATRLEQFTFQEALEFCESHNATLATTGQLYAAWSRGLDKCYAGWLADGSLRYPIVTPRPACGGDKPGVRTVYLYPNQTGLPDPLSRHHAFCFRGISAVPSPGEEEGGTPTSPSGVEEWIVTQVVPGVAAVPVEEETTAVPSGETTAILEFTTEPENQTEWEPAYTPVGTSPLPGILPTWPPTGAATEESTEGPSATEVPSASEEPSPSEVPFPSEEPSPSEEPFPSVRPFPSVELFPSEEPFPSKEPSPSEEPSASEEPYTPSPPVPSWTELPSSGEESGAPDVSGDFTGSGDVSGHLDFSGQLSGDRASGLPSGDLDSSGLTSTVGSGLPVESGLPSGDEERIEWPSTPTVGELPSGAEILEGSASGVGDLSGLPSGEVLETSASGVGDLSGLPSGEVLETTAPGVEDISGLPSGEVLETTAPGVEDISGLPSGEVLETTAPGVEDISGLPSGEVLETTAPGVEDISGLPSGEVLETTAPGVEDISGLPSGEVLETTAPGVEDISGLPSGEVLETAAPGVEDISGLPSGEVLETAAPGVEDISGLPSGEVLETAAPGVEDISGLPSGEVLETAAPGVEDISGLPSGEVLETAAPGVEDISGLPSGEVLETAAPGVEDISGLPSGEVLETAAPGVEDISGLPSGEVLETAAPGVEDISGLPSGEVLETAAPGVEDISGLPSGEVLETAAPGVEDISGLPSGEVLETAAPGVEDISGLPSGEVLETAAPGVEDISGLPSGEVLETAAPGVEDISGLPSGEVLETAAPGVEDISGLPSGEVLETAAPGVEDISGLPSGEVLETAAPGVEDISGLPSGEVLETTAPGVEEISGLPSGEVLETTAPGVDEISGLPSGEVLETTAPGVEEISGLPSGEVLETSTSAVGDLSGLPSGGEVLEISVSGVEDISGLPSGEVVETSASGIEDVSELPSGEGLETSASGVEDLSRLPSGEEVLEISASGFGDLSGLPSGGEGLETSASEVGTDLSGLPSGREGLETSASGAEDLSGLPSGKEDLVGSASGDLDLGKLPSGTLGSGQAPETSGLPSGFSGEYSGVDLGSGPPSGLPDFSGLPSGFPTVSLVDSTLVEVVTASTASELEGRGTIGISGAGEISGLPSSELDISGRASGLPSGTELSGQASGSPDVSGEIPGLFGVSGQPSGFPDTSGETSGVTELSGLSSGQPGISGEASGVLYGTSQPFGITDLSGETSGVPDLSGQPSGLPGFSGATSGVPDLVSGTTSGSGESSGITFVDTSLVEVAPTTFKEEEGLGSVELSGLPSGEADLSGKSGMVDVSGQFSGTVDSSGFTSQTPEFSGLPSGIAEVSGESSRAEIGSSLPSGAYYGSGTPSSFPTVSLVDRTLVESVTQAPTAQEAGEGPSGILELSGAHSGAPDMSGEHSGFLDLSGLQSGLIEPSGEPPGTPYFSGDFASTTNVSGESSVAMGTSGEASGLPEVTLITSEFVEGVTEPTISQELGQRPPVTHTPQLFESSGKVSTAGDISGATPVLPGSGVEVSSVPESSSETSAYPEAGFGASAAPEASREDSGSPDLSETTSAFHEANLERSSGLGVSGSTLTFQEGEASAAPEVSGESTTTSDVGTEAPGLPSATPTASGDRTEISGDLSGHTSQLGVVISTSIPESEWTQQTQRPAETHLEIESSSLLYSGEETHTVETATSPTDASIPASPEWKRESESTAAAPARSCAEEPCGAGTCKETEGHVICLCPPGYTGEHCNIDQEVCEEGWNKYQGHCYRHFPDRETWVDAERRCREQQSHLSSIVTPEEQEFVNNNAQDYQWIGLNDRTIEGDFRWSDGHPMQFENWRPNQPDNFFAAGEDCVVMIWHEKGEWNDVPCNYHLPFTCKKGTVACGEPPVVEHARTFGQKKDRYEINSLVRYQCTEGFVQRHMPTIRCQPSGHWEEPQITCTDPTTYKRRLQKRSSRHPRRSRPSTAH

SEQ ID NO: 3635 - protein, 156 aa, Homo sapiens
  Payload ID: 795;
  Gene Symbol: ACAN;
  Gene Name: aggrecan;
  ENSP ID: ENSP00000452682
  MOD_RES (1)..(1): Any amino acid
XWNDVPCNYHLPFTCKKGTVACGEPPVVEHARTFGQKKDRYEINSLVRYQCTEGFVQRHMPTIRCQPSGHWEEPQITCTDREHHPGHLAEHRPPPTNADYRSGAHGTLGGAAPAQPTEKSFQDAPRTLSPGACQADVHPTQTVSSSCRFLSYKESH

SEQ ID NO: 3636 - protein, 721 aa, Homo sapiens
  Payload ID: 795;
  Gene Symbol: ACAN;
  Gene Name: aggrecan;
  ENSP ID: ENSP00000453003
MTTLLWVFVTLRVITAAVTVETSDHDNSLSVSIPQPSPLRVLLGTSLTIPCYFIDPMHPVTTAPSTAPLAPRIKWSRVSKEKEVVLLVATEGRVRVNSAYQDKVSLPNYPAIPSDATLEVQSLRSNDSGVYRCEVMHGIEDSEATLEVVVKGIVFHYRAISTRYTLDFDRAQRACLQNSAIIATPEQLQAAYEDGFHQCDAGWLADQTVRYPIHTPREGCYGDKDEFPGVRTYGIRDTNETYDVYCFAEEMEGEVFYATSPEKFTFQEAANECRRLGARLATTGQLYLAWQAGMDMCSAGWLADRSVRYPISKARPNCGGNLLGVRTVYVHANQTGYPDPSSRYDAICYTGEDFVDIPENFFGVGGEEDITVQTVTWPDMELPLPRNITEGEARGSVILTVKPIFEVSPSPLEPEEPFTFAPEIGATAFAEVENETGEATRPWGFPTPGLGPATAFTSEDLVVQVTAVPGQPHLPGGVVFHYRPGPTRYSLTFEEAQQACLRTGAVIASPEQLQAAYEAGYEQCDAGWLRDQTVRYPIVSPRTPCVGDKDSSPGVRTYGVRPSTETYDVYCFVDRLEGEVFFATRLEQFTFQEALEFCESHNATLATTGQLYAAWSRGLDKCYAGWLADGSLRYPIVTPRPACGGDKPGVRTVYLYPNQTGLPDPLSRHHAFCFRGMQPHFGSNSPFCLERTPLGSPDPATTQYPIHQSKKMSVPLGQSQL

SEQ ID NO: 3637 - protein, 2530 aa, Homo sapiens; identical to SEQ ID NO: 3634
  Payload ID: 795;
  Gene Symbol: ACAN;
  Gene Name: aggrecan;
  ENSP ID: ENSP00000453342

SEQ ID NO: 3638 - protein, 2492 aa, Homo sapiens
  Payload ID: 795;
  Gene Symbol: ACAN;
  Gene Name: aggrecan;
  ENSP ID: ENSP00000453499
MTTLLWVFVTLRVITAAVTVETSDHDNSLSVSIPQPSPLRVLLGTSLTIPCYFIDPMHPVTTAPSTAPLAPRIKWSRVSKEKEVVLLVATEGRVRVNSAYQDKVSLPNYPAIPSDATLEVQSLRSNDSGVYRCEVMHGIEDSEATLEVVVKGIVFHYRAISTRYTLDFDRAQRACLQNSAIIATPEQLQAAYEDGFHQCDAGWLADQTVRYPIHTPREGCYGDKDEFPGVRTYGIRDTNETYDVYCFAEEMEGEVFYATSPEKFTFQEAANECRRLGARLATTGQLYLAWQAGMDMCSAGWLADRSVRYPISKARPNCGGNLLGVRTVYVHANQTGYPDPSSRYDAICYTGEDFVDIPENFFGVGGEEDITVQTVTWPDMELPLPRNITEGEARGSVILTVKPIFEVSPSPLEPEEPFTFAPEIGATAFAEVENETGEATRPWGFPTPGLGPATAFTSEDLVVQVTAVPGQPHLPGGVVFHYRPGPTRYSLTFEEAQQACLRTGAVIASPEQLQAAYEAGYEQCDAGWLRDQTVRYPIVSPRTPCVGDKDSSPGVRTYGVRPSTETYDVYCFVDRLEGEVFFATRLEQFTFQEALEFCESHNATLATTGQLYAAWSRGLDKCYAGWLADGSLRYPIVTPRPACGGDKPGVRTVYLYPNQTGLPDPLSRHHAFCFRGISAVPSPGEEEGGTPTSPSGVEEWIVTQVVPGVAAVPVEEETTAVPSGETTAILEFTTEPENQTEWEPAYTPVGTSPLPGILPTWPPTGAATEESTEGPSATEVPSASEEPSPSEVPFPSEEPSPSEEPFPSVRPFPSVELFPSEEPFPSKEPSPSEEPSASEEPYTPSPPVPSWTELPSSGEESGAPDVSGDFTGSGDVSGHLDFSGQLSGDRASGLPSGDLDSSGLTSTVGSGLPVESGLPSGDEERIEWPSTPTVGELPSGAEILEGSASGVGDLSGLPSGEVLETSASGVGDLSGLPSGEVLETTAPGVEDISGLPSGEVLETTAPGVEDISGLPSGEVLETTAPGVEDISGLPSGEVLETTAPGVEDISGLPSGEVLETTAPGVEDISGLPSGEVLETTAPGVEDISGLPSGEVLETAAPGVEDISGLPSGEVLETAAPGVEDISGLPSGEVLETAAPGVEDISGLPSGEVLETAAPGVEDISGLPSGEVLETAAPGVEDISGLPSGEVLETAAPGVEDISGLPSGEVLETAAPGVEDISGLPSGEVLETAAPGVEDISGLPSGEVLETAAPGVEDISGLPSGEVLETAAPGVEDISGLPSGEVLETAAPGVEDISGLPSGEVLETAAPGVEDISGLPSGEVLETAAPGVEDISGLPSGEVLETAAPGVEDISGLPSGEVLETAAPGVEDISGLPSGEVLETAAPGVEDISGLPSGEVLETTAPGVEEISGLPSGEVLETTAPGVDEISGLPSGEVLETTAPGVEEISGLPSGEVLETSTSAVGDLSGLPSGGEVLEISVSGVEDISGLPSGEVVETSASGIEDVSELPSGEGLETSASGVEDLSRLPSGEEVLEISASGFGDLSGLPSGGEGLETSASEVGTDLSGLPSGREGLETSASGAEDLSGLPSGKEDLVGSASGDLDLGKLPSGTLGSGQAPETSGLPSGFSGEYSGVDLGSGPPSGLPDFSGLPSGFPTVSLVDSTLVEVVTASTASELEGRGTIGISGAGEISGLPSSELDISGRASGLPSGTELSGQASGSPDVSGEIPGLFGVSGQPSGFPDTSGETSGVTELSGLSSGQPGISGEASGVLYGTSQPFGITDLSGETSGVPDLSGQPSGLPGFSGATSGVPDLVSGTTSGSGESSGITFVDTSLVEVAPTTFKEEEGLGSVELSGLPSGEADLSGKSGMVDVSGQFSGTVDSSGFTSQTPEFSGLPSGIAEVSGESSRAEIGSSLPSGAYYGSGTPSSFPTVSLVDRTLVESVTQAPTAQEAGEGPSGILELSGAHSGAPDMSGEHSGFLDLSGLQSGLIEPSGEPPGTPYFSGDFASTTNVSGESSVAMGTSGEASGLPEVTLITSEFVEGVTEPTISQELGQRPPVTHTPQLFESSGKVSTAGDISGATPVLPGSGVEVSSVPESSSETSAYPEAGFGASAAPEASREDSGSPDLSETTSAFHEANLERSSGLGVSGSTLTFQEGEASAAPEVSGESTTTSDVGTEAPGLPSATPTASGDRTEISGDLSGHTSQLGVVISTSIPESEWTQQTQRPAETHLEIESSSLLYSGEETHTVETATSPTDASIPASPEWKRESESTAADQEVCEEGWNKYQGHCYRHFPDRETWVDAERRCREQQSHLSSIVTPEEQEFVNNNAQDYQWIGLNDRTIEGDFRWSDGHPMQFENWRPNQPDNFFAAGEDCVVMIWHEKGEWNDVPCNYHLPFTCKKGTVACGEPPVVEHARTFGQKKDRYEINSLVRYQCTEGFVQRHMPTIRCQPSGHWEEPQITCTDPTTYKRRLQKRSSRHPRRSRPSTAH

SEQ ID NO: 3639 - protein, 226 aa, Homo sapiens
  Payload ID: 795;
  Gene Symbol: ACAN;
  Gene Name: aggrecan;
  ENSP ID: ENSP00000453581
  MOD_RES (1)..(1): Any amino acid
XPEVSGESTTTSDVGTEAPGLPSATPTASGDRTEISGDLSGHTSQLGVVISTSIPESEWTQQTQRPAETHLEIESSSLLYSGEETHTVETATSPTDASIPASPEWKRESESTAAAPARSCAEEPCGAGTCKETEGHVICLCPPGYTGEHCNIDIDECLSSPCLNGATCVDAIDSFTCLCLPSYEGDLCEIDQEVCEEGWNKYQGHCYRHFPDRETWVDAERRCREQ

SEQ ID NO: 3640 - protein, 2473 aa, Homo sapiens
  Payload ID: 795;
  Gene Symbol: ACAN;
  Gene Name: aggrecan;
  ENSP ID: ENSP00000484456
MTTLLWVFVTLRVITAAVTVETSDHDNSLSVSIPQPSPLRVLLGTSLTIPCYFIDPMHPVTTAPSTAPLAPRIKWSRVSKEKEVVLLVATEGRVRVNSAYQDKVSLPNYPAIPSDATLEVQSLRSNDSGVYRCEVMHGIEDSEATLEVVVKGIVFHYRAISTRYTLDFDRAQRACLQNSAIIATPEQLQAAYEDGFHQCDAGWLADQTVRYPIHTPREGCYGDKDEFPGVRTYGIRDTNETYDVYCFAEEMEGEVFYATSPEKFTFQEAANECRRLGARLATTGQLYLAWQAGMDMCSAGWLADRSVRYPISKARPNCGGNLLGVRTVYVHANQTGYPDPSSRYDAICYTGEDFVDIPENFFGVGGEEDITVQTVTWPDMELPLPRNITEGEARGSVILTVKPIFEVSPSPLEPEEPFTFAPEIGATAFAEVENETGEATRPWGFPTPGLGPATAFTSEDLVVQVTAVPGQPHLPGGVVFHYRPGPTRYSLTFEEAQQACLRTGAVIASPEQLQAAYEAGYEQCDAGWLRDQTVRYPIVSPRTPCVGDKDSSPGVRTYGVRPSTETYDVYCFVDRLEGEVFFATRLEQFTFQEALEFCESHNATLATTGQLYAAWSRGLDKCYAGWLADGSLRYPIVTPRPACGGDKPGVRTVYLYPNQTGLPDPLSRHHAFCFRGISAVPSPGEEEGGTPTSPSGVEEWIVTQVVPGVAAVPVEEETTAVPSGETTAILEFTTEPENQTEWEPAYTPVGTSPLPGILPTWPPTGAATEESTEGPSATEVPSASEEPSPSEVPFPSEEPSPSEEPFPSVRPFPSVELFPSEEPFPSKEPSPSEEPSASEEPYTPSPPVPSWTELPSSGEESGAPDVSGDFTGSGDVSGHLDFSGQLSGDRASGLPSGDLDSSGLTSTVGSGLPVESGLPSGDEERIEWPSTPTVGELPSGAEILEGSASGVGDLSGLPSGEVLETSASGVGDLSGLPSGEVLETTAPGVEDISGLPSGEVLETTAPGVEDISGLPSGEVLETTAPGVEDISGLPSGEVLETTAPGVEDISGLPSGEVLETTAPGVEDISGLPSGEVLETAAPGVEDISGLPSGEVLETAAPGVEDISGLPSGEVLETAAPGVEDISGLPSGEVLETAAPGVEDISGLPSGEVLETAAPGVEDISGLPSGEVLETAAPGVEDISGLPSGEVLETAAPGVEDISGLPSGEVLETAAPGVEDISGLPSGEVLETAAPGVEDISGLPSGEVLETAAPGVEDISGLPSGEVLETAAPGVEDISGLPSGEVLETAAPGVEDISGLPSGEVLETAAPGVEDISGLPSGEVLETAAPGVEDISGLPSGEVLETAAPGVEDISGLPSGEVLETAAPGVEDISGLPSGEVLETTAPGVEEISGLPSGEVLETTAPGVDEISGLPSGEVLETTAPGVEEISGLPSGEVLETSTSAVGDLSGLPSGGEVLEISVSGVEDISGLPSGEVVETSASGIEDVSELPSGEGLETSASGVEDLSRLPSGEEVLEISASGFGDLSGLPSGGEGLETSASEVGTDLSGLPSGREGLETSASGAEDLSGLPSGKEDLVGSASGDLDLGKLPSGTLGSGQAPETSGLPSGFSGEYSGVDLGSGPPSGLPDFSGLPSGFPTVSLVDSTLVEVVTASTASELEGRGTIGISGAGEISGLPSSELDISGRASGLPSGTELSGQASGSPDVSGEIPGLFGVSGQPSGFPDTSGETSGVTELSGLSSGQPGISGEASGVLYGTSQPFGITDLSGETSGVPDLSGQPSGLPGFSGATSGVPDLVSGTTSGSGESSGITFVDTSLVEVAPTTFKEEEGLGSVELSGLPSGEADLSGKSGMVDVSGQFSGTVDSSGFTSQTPEFSGLPSGIAEVSGESSRAEIGSSLPSGAYYGSGTPSSFPTVSLVDRTLVESVTQAPTAQEAGEGPSGILELSGAHSGAPDMSGEHSGFLDLSGLQSGLIEPSGEPPGTPYFSGDFASTTNVSGESSVAMGTSGEASGLPEVTLITSEFVEGVTEPTISQELGQRPPVTHTPQLFESSGKVSTAGDISGATPVLPGSGVEVSSVPESSSETSAYPEAGFGASAAPEASREDSGSPDLSETTSAFHEANLERSSGLGVSGSTLTFQEGEASAAPEVSGESTTTSDVGTEAPGLPSATPTASGDRTEISGDLSGHTSQLGVVISTSIPESEWTQQTQRPAETHLEIESSSLLYSGEETHTVETATSPTDASIPASPEWKRESESTAADQEVCEEGWNKYQGHCYRHFPDRETWVDAERRCREQQSHLSSIVTPEEQEFVNNNAQDYQWIGLNDRTIEGDFRWSDGHPMQFENWRPNQPDNFFAAGEDCVVMIWHEKGEWNDVPCNYHLPFTCKKGTVACGEPPVVEHARTFGQKKDRYEINSLVRYQCTEGFVQRHMPTIRCQPSGHWEEPQITCTDPTTYKRRLQKRSSRHPRRSRPSTAH

SEQ ID NO: 3641 - protein, 352 aa, Homo sapiens
  Payload ID: 796;
  Gene Symbol: AGMAT;
  Gene Name: agmatine ureohydrolase (agmatinase);
  Uniprot ID:  Q9BSE5;
  ENSP ID: ENSP00000364986
MLRLLASGCARGPGPGVGARPAAGLFHPGRRQSRQASDAPRNQPPSPEFVARPVGVCSMMRLPVQTSPEGLDAAFIGVPLDTGTSNRPGARFGPRRIREESVMLGTVNPSTGALPFQSLMVADLGDVNVNLYNLQDSCRRIQEAYEKIVAAGCIPLTLGGDHTITYPILQAMAKKHGPVGLLHVDAHTDTTDKALGEKLYHGAPFRRCVDEGLLDCKRVVQIGIRGSSTTLDPYRYNRSQGFRVVLAEDCWMKSLVPLMGEVRQQMGGKPIYISFDIDALDPAYAPGTGTPEIAGLTPSQALEIIRGCQGLNVMGCDLVEVSPPYDLSGNTALLAANLLFEMLCALPKVTTV

SEQ ID NO: 3642 - protein, 132 aa, Homo sapiens
  Payload ID: 797;
  Gene Symbol: AGRP;
  Gene Name: agouti related neuropeptide;
  Uniprot ID:  O00253;
  ENSP ID: ENSP00000290953
MLTAAVLSCALLLALPATRGAQMGLAPMEGIRRPDQALLPELPGLGLRAPLKKTTAEQAEEDLLQEAQALAEVLDLQDREPRSSRRCVRLHESCLGQQVPCCDPCATCYCRFFNAFCYCRKLGTAMNPCSRT

SEQ ID NO: 3643 - protein, 132 aa, Homo sapiens
  Payload ID: 798;
  Gene Symbol: ASIP;
  Gene Name: agouti signaling prt;
  Uniprot ID:  P42127;
  ENSP ID: ENSP00000364092
MDVTRLLLATLLVFLCFFTANSHLPPEEKLRDDRSLRSNSSVNLLDVPSVSIVALNKKSKQIGRKAAEKKRSSKKEASMKKVVRPRTPLSAPCVATRNSCKPPAPACCDPCASCQCRFFRSACSCRVLSLNC

SEQ ID NO: 3644 - protein, 132 aa, Homo sapiens; identical to SEQ ID NO: 3643
  Payload ID: 798;
  Gene Symbol: ASIP;
  Gene Name: agouti signaling prt;
  Uniprot ID:  P42127;
  ENSP ID: ENSP00000454804

SEQ ID NO: 3645 - protein, 2045 aa, Homo sapiens
  Payload ID: 799;
  Gene Symbol: AGRN;
  Gene Name: agrin;
  Uniprot ID:  O00468;
  ENSP ID: ENSP00000368678
MAGRSHPGPLRPLLPLLVVAACVLPGAGGTCPERALERREEEANVVLTGTVEEILNVDPVQHTYSCKVRVWRYLKGKDLVARESLLDGGNKVVISGFGDPLICDNQVSTGDTRIFFVNPAPPYLWPAHKNELMLNSSLMRITLRNLEEVEFCVEDKPGTHFTPVPPTPPDACRGMLCGFGAVCEPNAEGPGRASCVCKKSPCPSVVAPVCGSDASTYSNECELQRAQCSQQRRIRLLSRGPCGSRDPCSNVTCSFGSTCARSADGLTASCLCPATCRGAPEGTVCGSDGADYPGECQLLRRACARQENVFKKFDGPCDPCQGALPDPSRSCRVNPRTRRPEMLLRPESCPARQAPVCGDDGVTYENDCVMGRSGAARGLLLQKVRSGQCQGRDQCPEPCRFNAVCLSRRGRPRCSCDRVTCDGAYRPVCAQDGRTYDSDCWRQQAECRQQRAIPSKHQGPCDQAPSPCLGVQCAFGATCAVKNGQAACECLQACSSLYDPVCGSDGVTYGSACELEATACTLGREIQVARKGPCDRCGQCRFGALCEAETGRCVCPSECVALAQPVCGSDGHTYPSECMLHVHACTHQISLHVASAGPCETCGDAVCAFGAVCSAGQCVCPRCEHPPPGPVCGSDGVTYGSACELREAACLQQTQIEEARAGPCEQAECGSGGSGSGEDGDCEQELCRQRGGIWDEDSEDGPCVCDFSCQSVPGSPVCGSDGVTYSTECELKKARCESQRGLYVAAQGACRGPTFAPLPPVAPLHCAQTPYGCCQDNITAARGVGLAGCPSACQCNPHGSYGGTCDPATGQCSCRPGVGGLRCDRCEPGFWNFRGIVTDGRSGCTPCSCDPQGAVRDDCEQMTGLCSCKPGVAGPKCGQCPDGRALGPAGCEADASAPATCAEMRCEFGARCVEESGSAHCVCPMLTCPEANATKVCGSDGVTYGNECQLKTIACRQGLQISIQSLGPCQEAVAPSTHPTSASVTVTTPGLLLSQALPAPPGALPLAPSSTAHSQTTPPPSSRPRTTASVPRTTVWPVLTVPPTAPSPAPSLVASAFGESGSTDGSSDEELSGDQEASGGGSGGLEPLEGSSVATPGPPVERASCYNSALGCCSDGKTPSLDAEGSNCPATKVFQGVLELEGVEGQELFYTPEMADPKSELFGETARSIESTLDDLFRNSDVKKDFRSVRLRDLGPGKSVRAIVDVHFDPTTAFRAPDVARALLRQIQVSRRRSLGVRRPLQEHVRFMDFDWFPAFITGATSGAIAAGATARATTASRLPSSAVTPRAPHPSHTSQPVAKTTAAPTTRRPPTTAPSRVPGRRPPAPQQPPKPCDSQPCFHGGTCQDWALGGGFTCSCPAGRGGAVCEKVLGAPVPAFEGRSFLAFPTLRAYHTLRLALEFRALEPQGLLLYNGNARGKDFLALALLDGRVQLRFDTGSGPAVLTSAVPVEPGQWHRLELSRHWRRGTLSVDGETPVLGESPSGTDGLNLDTDLFVGGVPEDQAAVALERTFVGAGLRGCIRLLDVNNQRLELGIGPGAATRGSGVGECGDHPCLPNPCHGGAPCQNLEAGRFHCQCPPGRVGPTCADEKSPCQPNPCHGAAPCRVLPEGGAQCECPLGREGTFCQTASGQDGSGPFLADFNGFSHLELRGLHTFARDLGEKMALEVVFLARGPSGLLLYNGQKTDGKGDFVSLALRDRRLEFRYDLGKGAAVIRSREPVTLGAWTRVSLERNGRKGALRVGDGPRVLGESPVPHTVLNLKEPLYVGGAPDFSKLARAAAVSSGFDGAIQLVSLGGRQLLTPEHVLRQVDVTSFAGHPCTRASGHPCLNGASCVPREAAYVCLCPGGFSGPHCEKGLVEKSAGDVDTLAFDGRTFVEYLNAVTESEKALQSNHFELSLRTEATQGLVLWSGKATERADYVALAIVDGHLQLSYNLGSQPVVLRSTVPVNTNRWLRVVAHREQREGSLQVGNEAPVTGSSPLGATQLDTDGALWLGGLPELPVGPALPKAYGTGFVGCLRDVVVGRHPLHLLEDAVTKPELRPCPTP

SEQ ID NO: 3646 - protein, 271 aa, Homo sapiens
  Payload ID: 799;
  Gene Symbol: AGRN;
  Gene Name: agrin;
  ENSP ID: ENSP00000400771
  MOD_RES (1)..(1): Any amino acid
XRYDLGKGAAVIRSREPVTLGAWTRVSLERNGRKGALRVGDGPRVLGESPKSRKVPHTVLNLKEPLYVGGAPDFSKLARAAAVSSGFDGAIQLVSLGGRQLLTPEHVLRQVDVTSFAGHPCTRASGHPCLNGASCVPREAAYVCLCPGGFSGPHCEKGLVEKSAGDVDTLAFDGRTFVEYLNAVTESELANEIPVPETLDSGALHSEKALQSNHFELSLRTEATQGLVLWSGKATERADYVALAIVDGHLQLSYNLGSQPVVLRSTVPVNT

SEQ ID NO: 3647 - protein, 1930 aa, Homo sapiens
  Payload ID: 799;
  Gene Symbol: AGRN;
  Gene Name: agrin;
  ENSP ID: ENSP00000484607
MRITLRNLEEVEFCVEDKPGTHFTPVPPTPPDACRGMLCGFGAVCEPNAEGPGRASCVCKKSPCPSVVAPVCGSDASTYSNECELQRAQCSQQRRIRLLSRGPCGSRDPCSNVTCSFGSTCARSADGLTASCLCPATCRGAPEGTVCGSDGADYPGECQLLRRACARQENVFKKFDGPCDPCQGALPDPSRSCRVNPRTRRPEMLLRPESCPARQAPVCGDDGVTYENDCVMGRSGAARGLLLQKVRSGQCQGRDQCPEPCRFNAVCLSRRGRPRCSCDRVTCDGAYRPVCAQDGRTYDSDCWRQQAECRQQRAIPSKHQGPCDQAPSPCLGVQCAFGATCAVKNGQAACECLQACSSLYDPVCGSDGVTYGSACELEATACTLGREIQVARKGPCDRCGQCRFGALCEAETGRCVCPSECVALAQPVCGSDGHTYPSECMLHVHACTHQISLHVASAGPCETCGDAVCAFGAVCSAGQCVCPRCEHPPPGPVCGSDGVTYGSACELREAACLQQTQIEEARAGPCEQAECGSGGSGSGEDGDCEQELCRQRGGIWDEDSEDGPCVCDFSCQSVPGSPVCGSDGVTYSTECELKKARCESQRGLYVAAQGACRGPTFAPLPPVAPLHCAQTPYGCCQDNITAARGVGLAGCPSACQCNPHGSYGGTCDPATGQCSCRPGVGGLRCDRCEPGFWNFRGIVTDGRSGCTPCSCDPQGAVRDDCEQMTGLCSCKPGVAGPKCGQCPDGRALGPAGCEADASAPATCAEMRCEFGARCVEESGSAHCVCPMLTCPEANATKVCGSDGVTYGNECQLKTIACRQGLQISIQSLGPCQEAVAPSTHPTSASVTVTTPGLLLSQALPAPPGALPLAPSSTAHSQTTPPPSSRPRTTASVPRTTVWPVLTVPPTAPSPAPSLVASAFGESGSTDGSSDEELSGDQEASGGGSGGLEPLEGSSVATPGPPVERASCYNSALGCCSDGKTPSLDAEGSNCPATKVFQGVLELEGVEGQELFYTPEMADPKSELFGETARSIESTLDDLFRNSDVKKDFRSVRLRDLGPGKSVRAIVDVHFDPTTAFRAPDVARALLRQIQVSRRRSLGVRRPLQEHVRFMDFDWFPAFITGATSGAIAAGATARATTASRLPSSAVTPRAPHPSHTSQPVAKTTAAPTTRRPPTTAPSRVPGRRPPAPQQPPKPCDSQPCFHGGTCQDWALGGGFTCSCPAGRGGAVCEKVLGAPVPAFEGRSFLAFPTLRAYHTLRLALEFRALEPQGLLLYNGNARGKDFLALALLDGRVQLRFDTGSGPAVLTSAVPVEPGQWHRLELSRHWRRGTLSVDGETPVLGESPSGTDGLNLDTDLFVGGVPEDQAAVALERTFVGAGLRGCIRLLDVNNQRLELGIGPGAATRGSGVGECGDHPCLPNPCHGGAPCQNLEAGRFHCQCPPGRVGPTCADEKSPCQPNPCHGAAPCRVLPEGGAQCECPLGREGTFCQTASGQDGSGPFLADFNGFSHLELRGLHTFARDLGEKMALEVVFLARGPSGLLLYNGQKTDGKGDFVSLALRDRRLEFRYDLGKGAAVIRSREPVTLGAWTRVSLERNGRKGALRVGDGPRVLGESPKSRKVPHTVLNLKEPLYVGGAPDFSKLARAAAVSSGFDGAIQLVSLGGRQLLTPEHVLRQVDVTSFAGHPCTRASGHPCLNGASCVPREAAYVCLCPGGFSGPHCEKGLVEKSAGDVDTLAFDGRTFVEYLNAVTESELANEIPVPETLDSGALHSEKALQSNHFELSLRTEATQGLVLWSGKATERADYVALAIVDGHLQLSYNLGSQPVVLRSTVPVNTNRWLRVVAHREQREGSLQVGNEAPVTGSSPLGATQLDTDGALWLGGLPELPVGPALPKAYGTGFVGCLRDVVVGRHPLHLLEDAVTKPELRPCPTP

SEQ ID NO: 3648 - protein, 338 aa, Homo sapiens
  Payload ID: 800;
  Gene Symbol: AHSA1;
  Gene Name: AHA1, activator of heat shock 90kDa prt ATPase homolog 1 (yeast);
  Uniprot ID:  O95433;
  ENSP ID: ENSP00000216479
MAKWGEGDPRWIVEERADATNVNNWHWTERDASNWSTDKLKTLFLAVQVQNEEGKCEVTEVSKLDGEASINNRKGKLIFFYEWSVKLNWTGTSKSGVQYKGHVEIPNLSDENSVDEVEISVSLAKDEPDTNLVALMKEEGVKLLREAMGIYISTLKTEFTQGMILPTMNGESVDPVGQPALKTEERKAKPAPSKTQARPVGVKIPTCKITLKETFLTSPEELYRVFTTQELVQAFTHAPATLEADRGGKFHMVDGNVSGEFTDLVPEKHIVMKWRFKSWPEGHFATITLTFIDKNGETELCMEGRGIPAPEEERTRQGWQRYYFEGIKQTFGYGARLF

SEQ ID NO: 3649 - protein, 288 aa, Homo sapiens
  Payload ID: 800;
  Gene Symbol: AHSA1;
  Gene Name: AHA1, activator of heat shock 90kDa prt ATPase homolog 1 (yeast);
  Uniprot ID:  O95433;
  ENSP ID: ENSP00000440108
MAKWGEGDPRWIVEERADATNVNNWHWTERDASNWSTDKLKTLFLAVQVQNEEGKCEVTEVSKLDGEASINNRKGKLIFFYEWSVKLNWTGTSKSGVQYKGHVEIPNLSDENSVDEVEISVSLAKDEPDTNLVALMKEEGVKLLREAMGIYISTLKTEFTQGMILPTMNGESVDPVGQPALKTEERKAKPAPSKTQARPVGVKIPTCKITLKETFLTSPEELYRVFTTQELVQAFTHAPATLEADRGGKFHMVDGNVSGEFTDLVPEKHIVMKWRFKSWPEGSHCHSG

SEQ ID NO: 3650 - protein, 90 aa, Homo sapiens
  Payload ID: 800;
  Gene Symbol: AHSA1;
  Gene Name: AHA1, activator of heat shock 90kDa prt ATPase homolog 1 (yeast);
  ENSP ID: ENSP00000450890
  MOD_RES (1)..(1): Any amino acid
XVGVKIPTCKITLKETFLTSPEELYRVFTTQELVQAFTHAPATLEADRGGKFHMVDGNVSGEFTDLVPEKHIVMKWRFKSWPEGSHCHSG

SEQ ID NO: 3651 - protein, 100 aa, Homo sapiens
  Payload ID: 800;
  Gene Symbol: AHSA1;
  Gene Name: AHA1, activator of heat shock 90kDa prt ATPase homolog 1 (yeast);
  ENSP ID: ENSP00000451467
MAKWGEGDPRWIVEERADATNVNNWHWTERDASNWSTDKLKTLFLAVQVQNEEGKCEVTEVSKLDGEASINNRKGKLIFFYEWSVKLNWTGKSKLGCQRD

SEQ ID NO: 3652 - protein, 216 aa, Homo sapiens
  Payload ID: 800;
  Gene Symbol: AHSA1;
  Gene Name: AHA1, activator of heat shock 90kDa prt ATPase homolog 1 (yeast);
  ENSP ID: ENSP00000451475
  MOD_RES (1)..(1): Any amino acid
XCEVTEVSKLDGEASINNRKGKLIFFYEWSVKLNWTGTSKSGVQYKGHVEIPNLSDENSVDEVEISVSLAKDEPDTNLVALMKEEGVKLLREAMGIYISTLKTEFTQGMILPTMNGESVDPVGQPALKTEERKAKPAPSKTQARPVGVKIPTCKITLKETFLTSPEELYRVFTTQELVQAFTHAPATLEADRGGKFHMVDGNVSGEFTDLVSTCRP

SEQ ID NO: 3653 - protein, 203 aa, Homo sapiens
  Payload ID: 800;
  Gene Symbol: AHSA1;
  Gene Name: AHA1, activator of heat shock 90kDa prt ATPase homolog 1 (yeast);
  ENSP ID: ENSP00000451569
MKEEGVKLLREAMGIYISTLKTEFTQGMILPTMNGESVDPVGQPALKTEERKAKPAPSKTQARPVGVKIPTCKITLKETFLTSPEELYRVFTTQELVQAFTHAPATLEADRGGKFHMVDGNVSGEFTDLVPEKHIVMKWRFKSWPEGHFATITLTFIDKNGETELCMEGRGIPAPEEERTRQGWQRYYFEGIKQTFGYGARLF

SEQ ID NO: 3654 - protein, 133 aa, Homo sapiens
  Payload ID: 800;
  Gene Symbol: AHSA1;
  Gene Name: AHA1, activator of heat shock 90kDa prt ATPase homolog 1 (yeast);
  ENSP ID: ENSP00000452127
  MOD_RES (1)..(1): Any amino acid
XWSVKLNWTGTSKSGVQYKGHVEIPNLSDENSVDEVEISVSLAKDEPDTNLVALMKEEGVKLLREAMGIYISTLKTGHFATITLTFIDKNGETELCMEGRGIPAPEEERTRQGWQRYYFEGIKQTFGYGARLF

SEQ ID NO: 3655 - protein, 137 aa, Homo sapiens
  Payload ID: 801;
  Gene Symbol: AHSA2;
  Gene Name: AHA1, activator of heat shock 90kDa prt ATPase homolog 2 (yeast);
  Uniprot ID:  Q719I0;
  ENSP ID: ENSP00000349525
MILPTKAMATQELTVKRKLSGNTLQVQASSPVALGVRIPTVALHMMELFDTTVEQLYSIFTVKELTNKKIIMKWRCGNWPEEHYAMVALNFVPTLGQTELQLKEFLSICKEENMKFCWQKQHFEEIKGSLQLTPLNG

SEQ ID NO: 3656 - protein, 137 aa, Homo sapiens; identical to SEQ ID NO: 3655
  Payload ID: 801;
  Gene Symbol: AHSA2;
  Gene Name: AHA1, activator of heat shock 90kDa prt ATPase homolog 2 (yeast);
  Uniprot ID:  Q719I0;
  ENSP ID: ENSP00000377970

SEQ ID NO: 3657 - protein, 146 aa, Homo sapiens
  Payload ID: 801;
  Gene Symbol: AHSA2;
  Gene Name: AHA1, activator of heat shock 90kDa prt ATPase homolog 2 (yeast);
  ENSP ID: ENSP00000386721
MILPTKAMATQELTVKRKLSGNTLQVQASSPVALGVRIPTVALHMMELFDTTVEQLYSIFTVKEEERVCVLFSLTNKKIIMKWRCGNWPEEHYAMVALNFVPTLGQTELQLKEFLSICKEENMKFCWQKQHFEEIKGSLQLTPLNG

SEQ ID NO: 3658 - protein, 149 aa, Homo sapiens
  Payload ID: 802;
  Gene Symbol: AHNAK;
  Gene Name: AHNAK nucleoprt;
  Uniprot ID:  Q09666;
  ENSP ID: ENSP00000257247
MEKEETTRELLLPNWQGSGSHGLTIAQRDDGVFVQEVTQNSPAARTGVVKEGDQIVGATIYFDNLQSGEVTQLLNTMGHHTVGLKLHRKGDRSPEPGQTWTREVFSSCSSEVVLNTPQPSALECKDQNKQKEASSQAGAVSVSTPNAGL

SEQ ID NO: 3659 - protein, 5890 aa, Homo sapiens
  Payload ID: 802;
  Gene Symbol: AHNAK;
  Gene Name: AHNAK nucleoprt;
  Uniprot ID:  Q09666;
  ENSP ID: ENSP00000367263
MEKEETTRELLLPNWQGSGSHGLTIAQRDDGVFVQEVTQNSPAARTGVVKEGDQIVGATIYFDNLQSGEVTQLLNTMGHHTVGLKLHRKGDRSPEPGQTWTREVFSSCSSEVVLSGDDEEYQRIYTTKIKPRLKSEDGVEGDLGETQSRTITVTRRVTAYTVDVTGREGAKDIDISSPEFKIKIPRHELTEISNVDVETQSGKTVIRLPSGSGAASPTGSAVDIRAGAISASGPELQGAGHSKLQVTMPGIKVGGSGVNVNAKGLDLGGRGGVQVPAVDISSSLGGRAVEVQGPSLESGDHGKIKFPTMKVPKFGVSTGREGQTPKAGLRVSAPEVSVGHKGGKPGLTIQAPQLEVSVPSANIEGLEGKLKGPQITGPSLEGDLGLKGAKPQGHIGVDASAPQIGGSITGPSVEVQAPDIDVQGPGSKLNVPKMKVPKFSVSGAKGEETGIDVTLPTGEVTVPGVSGDVSLPEIATGGLEGKMKGTKVKTPEMIIQKPKISMQDVDLSLGSPKLKGDIKVSAPGVQGDVKGPQVALKGSRVDIETPNLEGTLTGPRLGSPSGKTGTCRISMSEVDLNVAAPKVKGGVDVTLPRVEGKVKVPEVDVRGPKVDVSAPDVEAHGPEWNLKMPKMKMPTFSTPGAKGEGPDVHMTLPKGDISISGPKVNVEAPDVNLEGLGGKLKGPDVKLPDMSVKTPKISMPDVDLHVKGTKVKGEYDVTVPKLEGELKGPKVDIDAPDVDVHGPDWHLKMPKMKMPKFSVPGFKAEGPEVDVNLPKADVDISGPKIDVTAPDVSIEEPEGKLKGPKFKMPEMNIKVPKISMPDVDLHLKGPNVKGEYDVTMPKVESEIKVPDVELKSAKMDIDVPDVEVQGPDWHLKMPKMKMPKFSMPGFKAEGPEVDVNLPKADVDISGPKVGVEVPDVNIEGPEGKLKGPKFKMPEMNIKAPKISMPDVDLHMKGPKVKGEYDMTVPKLEGDLKGPKVDVSAPDVEMQGPDWNLKMPKIKMPKFSMPSLKGEGPEFDVNLSKANVDISAPKVDTNAPDLSLEGPEGKLKGPKFKMPEMHFRAPKMSLPDVDLDLKGPKMKGNVDISAPKIEGEMQVPDVDIRGPKVDIKAPDVEGQGLDWSLKIPKMKMPKFSMPSLKGEGPEVDVNLPKADVVVSGPKVDIEAPDVSLEGPEGKLKGPKFKMPEMHFKTPKISMPDVDLHLKGPKVKGDVDVSVPKVEGEMKVPDVEIKGPKMDIDAPDVEVQGPDWHLKMPKMKMPKFSMPGFKGEGREVDVNLPKADIDVSGPKVDVEVPDVSLEGPEGKLKGPKFKMPEMHFKAPKISMPDVDLNLKGPKLKGDVDVSLPEVEGEMKVPDVDIKGPKVDISAPDVDVHGPDWHLKMPKVKMPKFSMPGFKGEGPEVDVKLPKADVDVSGPKMDAEVPDVNIEGPDAKLKGPKFKMPEMSIKPQKISIPDVGLHLKGPKMKGDYDVTVPKVEGEIKAPDVDIKGPKVDINAPDVEVHGPDWHLKMPKVKMPKFSMPGFKGEGPEVDMNLPKADLGVSGPKVDIDVPDVNLEAPEGKLKGPKFKMPSMNIQTHKISMPDVGLNLKAPKLKTDVDVSLPKVEGDLKGPEIDVKAPKMDVNVGDIDIEGPEGKLKGPKFKMPEMHFKAPKISMPDVDLHLKGPKVKGDMDVSVPKVEGEMKVPDVDIKGPKVDIDAPDVEVHDPDWHLKMPKMKMPKFSMPGFKAEGPEVDVNLPKADIDVSGPSVDTDAPDLDIEGPEGKLKGSKFKMPKLNIKAPKVSMPDVDLNLKGPKLKGEIDASVPELEGDLRGPQVDVKGPFVEAEVPDVDLECPDAKLKGPKFKMPEMHFKAPKISMPDVDLHLKGPKVKGDADVSVPKLEGDLTGPSVGVEVPDVELECPDAKLKGPKFKMPDMHFKAPKISMPDVDLHLKGPKVKGDVDVSVPKLEGDLTGPSVGVEVPDVELECPDAKLKGPKFKMPEMHFKTPKISMPDVDLHLKGPKVKGDMDVSVPKVEGEMKVPDVDIKGPKMDIDAPDVDVHGPDWHLKMPKMKMPKFSMPGFKAEGPEVDVNLPKADVVVSGPKVDVEVPDVSLEGPEGKLKGPKLKMPEMHFKAPKISMPDVDLHLKGPKVKGDVDVSLPKLEGDLTGPSVDVEVPDVELECPDAKLKGPKFKMPEMHFKTPKISMPDVNLNLKGPKVKGDMDVSVPKVEGEMKVPDVDIRGPKVDIDAPDVDVHGPDWHLKMPKMKMPKFSMPGFKGEGPEVDVNLPKADVDVSGPKVDVEVPDVSLEGPEGKLKGPKFKMPEMHFKTPKISMPDVDFNLKGPKIKGDVDVSAPKLEGELKGPELDVKGPKLDADMPEVAVEGPNGKWKTPKFKMPDMHFKAPKISMPDLDLHLKSPKAKGEVDVDVPKLEGDLKGPHVDVSGPDIDIEGPEGKLKGPKFKMPDMHFKAPNISMPDVDLNLKGPKIKGDVDVSVPEVEGKLEVPDMNIRGPKVDVNAPDVQAPDWHLKMPKMKMPKFSMPGFKAEGPEVDVNLPKADVDISGPKVDIEGPDVNIEGPEGKLKGPKLKMPEMNIKAPKISMPDFDLHLKGPKVKGDVDVSLPKVEGDLKGPEVDIKGPKVDINAPDVGVQGPDWHLKMPKVKMPKFSMPGFKGEGPDGDVKLPKADIDVSGPKVDIEGPDVNIEGPEGKLKGPKFKMPEMNIKAPKISMPDIDLNLKGPKVKGDVDVSLPKVEGDLKGPEVDIKGPKVDIDAPDVDVHGPDWHLKMPKIKMPKISMPGFKGEGPDVDVNLPKADIDVSGPKVDVECPDVNIEGPEGKWKSPKFKMPEMHFKTPKISMPDIDLNLTGPKIKGDVDVTGPKVEGDLKGPEVDLKGPKVDIDVPDVNVQGPDWHLKMPKMKMPKFSMPGFKAEGPEVDVNLPKADVDVSGPKVDVEGPDVNIEGPEGKLKGPKFKMPEMNIKAPKIPMPDFDLHLKGPKVKGDVDISLPKVEGDLKGPEVDIRGPQVDIDVPDVGVQGPDWHLKMPKVKMPKFSMPGFKGEGPDVDVNLPKADLDVSGPKVDIDVPDVNIEGPEGKLKGPKFKMPEMNIKAPKISMPDIDLNLKGPKVKGDMDVSLPKVEGDMKVPDVDIKGPKVDINAPDVDVQGPDWHLKMPKIKMPKISMPGFKGEGPEVDVNLPKADLDVSGPKVDVDVPDVNIEGPDAKLKGPKFKMPEMNIKAPKISMPDLDLNLKGPKMKGEVDVSLANVEGDLKGPALDIKGPKIDVDAPDIDIHGPDAKLKGPKLKMPDMHVNMPKISMPEIDLNLKGSKLKGDVDVSGPKLEGDIKAPSLDIKGPEVDVSGPKLNIEGKSKKSRFKLPKFNFSGSKVQTPEVDVKGKKPDIDITGPKVDINAPDVEVQGKVKGSKFKMPFLSISSPKVSMPDVELNLKSPKVKGDLDIAGPNLEGDFKGPKVDIKAPEVNLNAPDVDVHGPDWNLKMPKMKMPKFSVSGLKAEGPDVAVDLPKGDINIEGPSMNIEGPDLNVEGPEGGLKGPKFKMPDMNIKAPKISMPDIDLNLKGPKVKGDVDISLPKLEGDLKGPEVDIKGPKVDINAPDVDVHGPDWHLKMPKVKMPKFSMPGFKGEGPEVDVTLPKADIDISGPNVDVDVPDVNIEGPDAKLKGPKFKMPEMNIKAPKISMPDFDLNLKGPKMKGDVVVSLPKVEGDLKGPEVDIKGPKVDIDTPDINIEGSEGKFKGPKFKIPEMHLKAPKISMPDIDLNLKGPKVKGDVDVSLPKMEGDLKGPEVDIKGPKVDINAPDVDVQGPDWHLKMPKVKMPKFSMPGFKGEGPDVDVNLPKADLDVSGPKVDIDVPDVNIEGPEGKLKGPKFKMPEMNIKAPKISMPDIDLNLKGPKVKGDMDVSLPKVEGDMQVPDLDIKGPKVDINAPDVDVRGPDWHLKMPKIKMPKISMPGFKGEGPEVDVNLPKADLDVSGPKVDVDVPDVNIEGPDAKLKGPKFKMPEMNIKAPKISMPDFDLHLKGPKVKGDVDVSLPKMEGDLKAPEVDIKGPKVDIDAPDVDVHGPDWHLKMPKVKMPKFSMPGFKGEGPEVDVNLPKADIDVSGPKVDIDTPDIDIHGPEGKLKGPKFKMPDLHLKAPKISMPEVDLNLKGPKMKGDVDVSLPKVEGDLKGPEVDIKGPKVDIDVPDVDVQGPDWHLKMPKVKMPKFSMPGFKGEGPDVDVNLPKADLDVSGPKVDIDVPDVNIEGPDAKLKGPKFKMPEMNIKAPKISMPDFDLHLKGPKVKGDVDVSLPKVEGDLKGPEVDIKGPKVDIDAPDVDVHGPDWHLKMPKVKMPKFSMPGFKGEGPDVDVTLPKADIEISGPKVDIDAPDVSIEGPDAKLKGPKFKMPEMNIKAPKISMPDIDFNLKGPKVKGDVDVSLPKVEGDLKGPEIDIKGPSLDIDTPDVNIEGPEGKLKGPKFKMPEMNIKAPKISMPDFDLHLKGPKVKGDVDVSLPKVESDLKGPEVDIEGPEGKLKGPKFKMPDVHFKSPQISMSDIDLNLKGPKIKGDMDISVPKLEGDLKGPKVDVKGPKVGIDTPDIDIHGPEGKLKGPKFKMPDLHLKAPKISMPEVDLNLKGPKVKGDMDISLPKVEGDLKGPEVDIRDPKVDIDVPDVDVQGPDWHLKMPKVKMPKFSMPGFKGEGPDVDVNLPKADIDVSGPKVDVDVPDVNIEGPDAKLKGPKFKMPEMSIKAPKISMPDIDLNLKGPKVKGDVDVTLPKVEGDLKGPEADIKGPKVDINTPDVDVHGPDWHLKMPKVKMPKFSMPGFKGEGPDVDVSLPKADIDVSGPKVDVDIPDVNIEGPDAKLKGPKFKMPEINIKAPKISIPDVDLDLKGPKVKGDFDVSVPKVEGTLKGPEVDLKGPRLDFEGPDAKLSGPSLKMPSLEISAPKVTAPDVDLHLKAPKIGFSGPKLEGGEVDLKGPKVEAPSLDVHMDSPDINIEGPDVKIPKFKKPKFGFGAKSPKADIKSPSLDVTVPEAELNLETPEISVGGKGKKSKFKMPKIHMSGPKIKAKKQGFDLNVPGGEIDASLKAPDVDVNIAGPDAALKVDVKSPKTKKTMFGKMYFPDVEFDIKSPKFKAEAPLPSPKLEGELQAPDLELSLPAIHVEGLDIKAKAPKVKMPDVDISVPKIEGDLKGPKVQANLGAPDINIEGLDAKVKTPSFGISAPQVSIPDVNVNLKGPKIKGDVPSVGLEGPDVDLQGPEAKIKFPKFSMPKIGIPGVKMEGGGAEVHAQLPSLEGDLRGPDVKLEGPDVSLKGPGVDLPSVNLSMPKVSGPDLDLNLKGPSLKGDLDASVPSMKVHAPGLNLSGVGGKMQVGGDGVKVPGIDATTKLNVGAPDVTLRGPSLQGDLAVSGDIKCPKVSVGAPDLSLEASEGSIKLPKMKLPQFGISTPGSDLHVNAKGPQVSGELKGPGVDVNLKGPRISAPNVDFNLEGPKVKGSLGATGEIKGPTVGGGLPGIGVQGLEGNLQMPGIKSSGCDVNLPGVNVKLPTGQISGPEIKGGLKGSEVGFHGAAPDISVKGPAFNMASPESDFGINLKGPKIKGGADVSGGVSAPDISLGEGHLSVKGSGGEWKGPQVSSALNLDTSKFAGGLHFSGPKVEGGVKGGQIGLQAPGLSVSGPQGHLESGSGKVTFPKMKIPKFTFSGRELVGREMGVDVHFPKAEASIQAGAGDGEWEESEVKLKKSKIKMPKFNFSKPKGKGGVTGSPEASISGSKGDLKSSKASLGSLEGEAEAEASSPKGKFSLFKSKKPRHRSNSFSDEREFSGPSTPTGTLEFEGGEVSLEGGKVKGKHGKLKFGTFGGLGSKSKGHYEVTGSDDETGKLQGSGVSLASKKSRLSSSSSNDSGNKVGIQLPEVELSVSTKKE

SEQ ID NO: 3660 - protein, 144 aa, Homo sapiens
  Payload ID: 802;
  Gene Symbol: AHNAK;
  Gene Name: AHNAK nucleoprt;
  ENSP ID: ENSP00000433286
MEKEETTRELLLPNWQGSGSHGLTIAQRDDGVFVQEVTQNSPAARTGVVKEGDQIVGATIYFDNLQSGEVTQLLNTMGHHTVGLKLHRKGDRSPEPGQTWTREVFSSCSSEVVLSGDDEEYQRIYTTKIKPRLKSEDGVEGDLG

SEQ ID NO: 3661 - protein, 121 aa, Homo sapiens
  Payload ID: 802;
  Gene Symbol: AHNAK;
  Gene Name: AHNAK nucleoprt;
  ENSP ID: ENSP00000433635
MEKEETTRELLLPNWQGSGSHGLTIAQRDDGVFVQEVTQNSPAARTGVVKEGDQIVGATIYFDNLQSGEVTQLLNTMGHHTVGLKLHRKGDRSPEPGQTWTREVFSSCSSEVVLNTPQPSA

SEQ ID NO: 3662 - protein, 131 aa, Homo sapiens
  Payload ID: 802;
  Gene Symbol: AHNAK;
  Gene Name: AHNAK nucleoprt;
  ENSP ID: ENSP00000433789
MEKEETTRELLLPNWQGSGSHGLTIAQRDDGVFVQEVTQNSPAARTGVVKEGDQIVGATIYFDNLQSGEVTQLLNTMGHHTVGLKLHRKGDRSPEPGQTWTREVFSSCSSEVVLDCRSGQEENHPLLRLFL

SEQ ID NO: 3663 - protein, 123 aa, Homo sapiens
  Payload ID: 802;
  Gene Symbol: AHNAK;
  Gene Name: AHNAK nucleoprt;
  ENSP ID: ENSP00000435357
MEKEETTRELLLPNWQGSGSHGLTIAQRDDGVFVQEVTQNSPAARTGVVKEGDQIVGATIYFDNLQSGEVTQLLNTMGHHTVGLKLHRKGDRSPEPGQTWTREVFSSCSSEVVLSGDDEEYQR

SEQ ID NO: 3664 - protein, 85 aa, Homo sapiens
  Payload ID: 802;
  Gene Symbol: AHNAK;
  Gene Name: AHNAK nucleoprt;
  ENSP ID: ENSP00000436845
MEKEETTRELLLPNWQGSGSHGLTIAQRDDGVFVQEVTQNSPAARTGVVKEGDQIVGATIYFDNLQSGEVTQLLNTMGHHTVGLK

SEQ ID NO: 3665 - protein, 5795 aa, Homo sapiens
  Payload ID: 803;
  Gene Symbol: AHNAK2;
  Gene Name: AHNAK nucleoprt 2;
  Uniprot ID:  Q8IVF2;
  ENSP ID: ENSP00000353114
MCDCFHMVLPTWPGTPGSVSGRQLQPGEPGAETEDDHSVTEGPADEGIRPRPQGSSPVYEYTTEAADFGLQEDAPGRQGSAGRRRSWWKRDSGDSRTFFRMSRPEAVQEATEVTLKTEVEAGASGYSVTGGGDQGIFVKQVLKDSSAAKLFNLREGDQLLSTTVFFENIKYEDALKILQYSEPYKVQFKIRRQLPAPQDEEWASSDAQHGPQGKEKEDTDVADGCRETPTKTLEGDGDQERLISKPRVGRGRQSQRERLSWPKFQSIKSKRGPGPQRSHSSSEAYEPRDAHDVSPTSTDTEAQLTVERQEQKAGPGSQRRRKFLNLRFRTGSGQGPSSTGQPGRGFQSGVGRAGVLEELGPWGDSLEETGAATGSRREERAEQDREVMPAQSMPLPTELGDPRLCEGTPQEGGLRAARLHGKTLEGQAQETAVAQRKPRAQPTPGMSREGEGEGLQSLEIGIARLSLRDTTEGGTQIGPPEIRVRVHDLKTPKFAFSTEKEPERERRLSTPQRGKRQDASSKAGTGLKGEEVEGAGWMPGREPTTHAEAQGDEGDGEEGLQRTRITEEQDKGREDTEGQIRMPKFKIPSLGWSPSKHTKTGREKATEDTEQGREGEATATADRREQRRTEEGLKDKEDSDSMTNTTKIQLIHDEKRLKKEQILTEKEVATKDSKFKMPKFKMPLFGASAPGKSMEASVDVSAPKVEADVSLLSMQGDLKTTDLSVQTPSADLEVQDGQVDVKLPEGPLPEGASLKGHLPKVQRPSLKMPKVDLKGPKLDLKGPKAEVTAPDVKMSLSSMEVDVQAPRAKLDGARLEGDLSLADKEVTAKDSKFKMPKFKMPSFGVSAPGKSMEDSVDVSAPKVEADVSLSSMQGDLKATDLSIQPPSADLEVQAGQVDVKLPEGPVPEGAGPKVHLPKVEMPSFKMPKVDLKGPQIDVKGPKLDLKGPKAEVTAPDGEVSLPSMEVDVQAQKAKLDGAWLEGDLSLADKDVTAKDSKFKMPKFKMPSFGVSAPGKSIKALVDVSAPKVEADLSLPSMQGDLKTTDLSIQPASTDLKVQADQVDVKLPEGHLPEGAGLKGHLPKVEMPSFKMPKVALKGPQVDVKGPKLDLKSPKAEVTAPDVEVSLPSVEVDVEAPGAKLDSARLEGELSLADKDVTAKDSRFKMPKFKMPSFGASAPGKSIEASVDVSAPKVEADVSLPSMQGDLKTTDLSIQPPSADLEVHAGQVDVKLLEGHVPEGAGFKGHLPKVQMPSLKMPKVDLKGPQVEVRGPKLDLKGHKAEVTAHEVAVSLPSVEVDMQAPGAKLDGAQLDGDLSLADKDVTAKDSKFKMPKFKMPSFGVSAPGKSIEASVDLSAPKVEADMSLPSMQGDLKTTDLSIQPPSTDLELQAGQLDVKLPEGPVPEGAGLKGHLPKLQMPSFKVPKVDLKGPEIDIKGPKLDLKDPKVEVTAPDVEVSLPSVEVDVEAPGAKLDGGRLEEDMSLADKDLTTKDSKFKMPKFKMPSFGVSAPGKSIEASVDVSAPKVEADVSLPSMQGDLKATDLSIQPPSADLEVQAGQVDVKLPEGPVSEGAGLKGHLPKVQMPSFKMPKVDLKGPQIDVKGPKLDLKGPKVEVTAPDVKMSLSSMEVDVQAPRAKLDGAQLEGDLSLADKAVTAKDSKFKMPKFKMPSFGVSAPGKSIEASVDVSEPKVEADVSLPSMQGDLKTTDLSIQSPSADLEVQAGQVNVKLPEGPLPEGAGFKGHLPKVQMPSLKMPKVALKGPQMDVKGPKLDLKGPKAEVMAPDVEVSLPSVEVDVEAPGAKLDSVRLEGDLSLADKDVTAKDSKFKMPKFKMPSFGVSAPGKSIEASVDVSAPKVEAEVSLPSMQGDLKTTDLCIPLPSADLVVQAGQVDMKLPEGQVPEGAGLKGHLPKVDMPSFKMPKVDLKGPQTDVKGAKLDLKGPKAEVTAPDVEVSLPSMEVDVQAQKAKLDGARLEGDLSLADKDMTAKDSKFKMPKFKMPSFGVSAPGRSIEASVDVPAPKVEADVSLPSMQGDLKTTDLSIQPPSADLKVQTGQVDVKLPEGHVPEGAGLKGHLPKVEMPSLKMPKVDLKGPQVDIKGPKLDLKDPKVEMRVPDVEVSLPSMEVDVQAPRAKLDSAHLQGDLTLANKDLTTKDSKFKMPKFKMPSFGVSAPGKSIEASVDVSPPKVEADMSLPSMQGDLKTTDLSIQPLSADVKVQAGQVDVKLLEGPVPEEVGLKGHLPKLQMPSFKVPKVDLKGPEIDIKGPKLDLKDPKVEVTAPDVEVSLPSVEVDVKAPGAKLDGARLEGDMSLADKDVTAKDSKFKMPKFKMLSFGVSALGKSIEASADVSALKVEADVSLPSMQGDLKTTDLSVQPPSADLEVQAGQVDVKLPEGPVPEGAGLKGHLPKLQMPSFKMPKVDLKGPQIDVKGPKLDLKGPKTDVMAPDVEVSQPSVEVDVEAPGAKLDGAWLEGDLSVADKDVTTKDSRFKIPKFKMPSFGVSAPGKSIEASVDVSAPKVEADGSLSSMQGDLKATDLSIQPPSADLEVQAGQVDVKLPEGPVPEGAGLKGHLPKVQMPSFKMPEMDLKGPQLDVKGPKLDLKGPKAEVTAPDVEMSLSSMEVDVQAPRAKLDGARLEGDLSLADKGVTAKDSKFKMPKFKMPSFRVSAPGESIEALVDVSELKVEADMSLPSMQGDLKTTDISIQPPSAQLEVQAGQVDVKLPEGHVPEGAGLKGHLPKLQMPSFKMPEVDLKGPQIDVKGPNVDLKGPKAEVTAPDVKMSLSSMEVDVQAPRAKLDGARLEGDLSLADKGMTAKDSKFKMPKFKMPSFGVSAPGKSIEASVDVSELKVEADGSFPSMQGDLKTTDIRIQPPSAQLEVQAGQVDVKLPEGHVPEGAGLKGHLPKVQMPSFKMPKVDLKGPQIDVKGPKLDLKGPKAEVTAPDVEVSLPSVEVDVEAPRAKLDGARLEGDLSLADKDVTAKDSKFKMPKFKMPSFGVSAPGKSIEVSVDVSAPKVEAEVSLPSMQGDLKTTDISIEPPSAQLEVQAGQVDLKLPEGHVPEGAGLKGHLPKLQMPSFKMPKVDRKGPQIDVKGPKLDLKGPKTDVTAPDVEVSQPGMEVDVEAPGAKLDGARLEGDLSLADKDVTAKDSKFKMPKFKMPSFGVSAPGKSIEVLVDVSAPKVEADLSLPSMQGDLKNTDISIEPPSAQLEVQAGQVDVKLPEGHVLEGAGLKGHLPKLQMPSFKMPKVDRKGPQIDIKGPKLDLKGPKMDVTAPDVEVSQPSMEVDVEAPGAKLDGARLEGDLSLADKDVTAKDSKFKMPKFKMPSYRASAPGKSIQASVDVSAPKAEADVSLPSMQGDLKTTDLSIQLPSVDLEVQAGQVDVKLPEGHVPEGAGLKGHLPKVEMPSFKMPKVDLKSPQVDIKGPKLDLKVPKAEVTVPDVEVSLPSVEVDVQAPRAKLDGARLEGDLSLAEKDVTAKDSKFKMPKFKMPSFGVSAPGRSIEASLDVSAPKVEADVSLSSMQGDLKATDLSIQPPSADLEVQAVQVDVELLEGPVPEGAGLKGHLPKVEMPSLKTPKVDLKGPQIDVKGPKLDLKGPKAEVRVPDVEVSLPSVEVDVQAPKAKLDAGRLEGDLSLADKDVTAKDSKFKMPKFKMPSFRVSAPGKSMEASVDVSAPKVEADVSLPSMQGDLKTTDLSIQPPSADLKVQAGQMDVKLPEGQVPEGAGLKEHLPKVEMPSLKMPKVDLKGPQVDIKGPKLDLKVSKAEVTAPDVEVSLPSVEVDVQAPRAKLDSAQLEGDLSLADKDVTAKDSKFKMPKFKMPSFGVSAPGKSIEASVHVSAPKVEADVSLPSMQGDLKTTDLSIQPHSADLTVQARQVDMKLLEGHVPEEAGLKGHLPKVQMPSFKMPKVDLKGPEIDIKGPKLDLKDPKVEVTAPDVEVSLPSVEVDVEAPGAKLDGARLEGDLSLADKDMTAKDSKFKMPKFKMPSFGVSAPGKSMEASVDVTAPKVEADVSLPSMQGDLKATDLSVQPPSADLEVQAGQVDVKLPEGPVPEGASLKGHLPKVQMPSFKMPKVDLKGPQIDVKGPKLDLKGPKAEVTAPDVKMSLSSMEVDVQAPRAKLDGVQLEGDLSLADKDVTAKDSKFKMPKFKMPSFGVSAPGKSMEASVDVSELKAKADVSLPSMQGDLKTTDLSIQSPSADLEVQAGQVDVKLPEGPLPKGAGLKGHLPKVQMPCLKMPKVALKGPQVDVKGPKLDLKGPKADVMTPVVEVSLPSMEVDVEAPGAKLDSVRLEGDLSLADKDMTAKDSKFKMPKFKMPSFGVSAPGKSIEASLDVSALKVEADVSLPSMQGDLKTTHLSIQPPSADLEVQAGQEDVKLPEGPVHEGAGLKGHLPKLQMPSFKVPKVDLKGPQIDVNVPKLDLKGPKVEVTSPNLDVSLPSMEVDIQAPGAKLDSTRLEGDLSLADKDVTAKDSKFKMPKFKMPSFGMLSPGKSIEVSVDVSAPKMEADMSIPSMQGDLKTTDLRIQAPSADLEVQAGQVDLKLPEGHMPEVAGLKGHLPKVEMPSFKMPKVDLKGPQVDVKGPKLDLKGPKAEVMAPDVEVSLPSVETDVQAPGSMLDGARLEGDLSLAHEDVAGKDSKFQGPKLSTSGFEWSSKKVSMSSSEIEGNVTFHEKTSTFPIVESVVHEGDLHDPSRDGNLGLAVGEVGMDSKFKKLHFKVPKVSFSSTKTPKDSLVPGAKSSIGLSTIPLSSSECSSFELQQVSACSEPSMQMPKVGFAGFPSSRLDLTGPHFESSILSPCEDVTLTKYQVTVPRAALAPELALEIPSGSQADIPLPKTECSTDLQPPEGVPTSQAESHSGPLNSMIPVSLGQVSFPKFYKPKFVFSVPQMAVPEGDLHAAVGAPVMSPLSPGERVQCPLPSTQLPSPGTCVSQGPEELVASLQTSVVAPGEAPSEDADHEGKGSPLKMPKIKLPSFRWSPKKETGPKVDPECSVEDSKLSLVLDKDEVAPQSAIHMDLPPERDGEKGRSTKPGFAMPKLALPKMKASKSGVSLPQRDVDPSLSSATAGGSFQDTEKASSDGGRGGLGATASATGSEGVNLHRPQVHIPSLGFAKPDLRSSKAKVEVSQPEADLPLPKHDLSTEGDSRGCGLGDVPVSQPCGEGIAPTPEDPLQPSCRKPDAEVLTVESPEEEAMTKYSQESWFKMPKFRMPSLRRSFRDRGGAGKLEVAQTQAPAATGGEAAAKVKEFLVSGSNVEAAMSLQLPEADAEVTASESKSSTDILRCDLDSTGLKLHLSTAGMTGDELSTSEVRIHPSKGPLPFQMPGMRLPETQVLPGEIDETPLSKPGHDLASMEDKTEKWSSQPEGPLKLKASSTDMPSQISVVNVDQLWEDSVLTVKFPKLMVPRFSFPAPSSEDDVFIPTVREVQCPEANIDTALCKESPGLWGASILKAGAGVPGEQPVDLNLPLEAPPISKVRVHIQGAQVESQEVTIHSIVTPEFVDLSVPRTFSTQIVRESEIPTSEIQTPSYGFSLLKVKIPEPHTQARVYTTMTQHSRTQEGTEEAPIQATPGVDSISGDLQPDTGEPFEMISSSVNVLGQQTLTFEVPSGHQLADSCSDEEPAEILEFPPDDSQEATTPLADEGRAPKDKPESKKSGLLWFWLPNIGFSSSVDETGVDSKNDVQRSAPIQTQPEARPEAELPKKQEKAGWFRFPKLGFSSSPTKKSKSTEDGAELEEQKLQEETITFFDARESFSPEEKEEGELIGPVGTGLDSRVMVTSAARTELILPEQDRKADDESKGSGLGPNEG

SEQ ID NO: 3666 - protein, 793 aa, Homo sapiens
  Payload ID: 803;
  Gene Symbol: AHNAK2;
  Gene Name: AHNAK nucleoprt 2;
  Uniprot ID:  Q8IVF2;
  ENSP ID: ENSP00000450998
MDLPPERDGEKGRSTKPGFAMPKLALPKMKASKSGVSLPQRDVDPSLSSATAGGSFQDTEKASSDGGRGGLGATASATGSEGVNLHRPQVHIPSLGFAKPDLRSSKAKVEVSQPEADLPLPKHDLSTEGDSRGCGLGDVPVSQPCGEGIAPTPEDPLQPSCRKPDAEVLTVESPEEEAMTKYSQESWFKMPKFRMPSLRRSFRDRGGAGKLEVAQTQAPAATGGEAAAKVKEFLVSGSNVEAAMSLQLPEADAEVTASESKSSTDILRCDLDSTGLKLHLSTAGMTGDELSTSEVRIHPSKGPLPFQMPGMRLPETQVLPGEIDETPLSKPGHDLASMEDKTEKWSSQPEGPLKLKASSTDMPSQISVVNVDQLWEDSVLTVKFPKLMVPRFSFPAPSSEDDVFIPTVREVQCPEANIDTALCKESPGLWGASILKAGAGVPGEQPVDLNLPLEAPPISKVRVHIQGAQVESQEVTIHSIVTPEFVDLSVPRTFSTQIVRESEIPTSEIQTPSYGFSLLKVKIPEPHTQARVYTTMTQHSRTQEGTEEAPIQATPGVDSISGDLQPDTGEPFEMISSSVNVLGQQTLTFEVPSGHQLADSCSDEEPAEILEFPPDDSQEATTPLADEGRAPKDKPESKKSGLLWFWLPNIGFSSSVDETGVDSKNDVQRSAPIQTQPEARPEAELPKKQEKAGWFRFPKLGFSSSPTKKSKSTEDGAELEEQKLQEETITFFDARESFSPEEKEEGELIGPVGTGLDSRVMVTSAARTELILPEQDRKADDESKGSGLGPNEG

SEQ ID NO: 3667 - protein, 226 aa, Homo sapiens
  Payload ID: 804;
  Gene Symbol: AAED1;
  Gene Name: AhpC/TSA antioxidant enzyme domain containing 1;
  Uniprot ID:  Q7RTV5;
  ENSP ID: ENSP00000364382
MAAPAPVTRQVSGAAALVPAPSGPDSGQPLAAAVAELPVLDARGQRVPFGALFRERRAVVVFVRHFLCYICKEYVEDLAKIPRSFLQEANVTLIVIGQSSYHHIEPFCKLTGYSHEIYVDPEREIYKRLGMKRGEEIASSGQSPHIKSNLLSGSLQSLWRAVTGPLFDFQGDPAQQGGTLILGPGNNIHFIHRDRNRLDHKPINSVLQLVGVQHVNFTNRPSVIHV

SEQ ID NO: 3668 - protein, 180 aa, Homo sapiens
  Payload ID: 804;
  Gene Symbol: AAED1;
  Gene Name: AhpC/TSA antioxidant enzyme domain containing 1;
  ENSP ID: ENSP00000398933
  MOD_RES (1)..(1): Any amino acid
XGPRPPRVMAAPAPVTRQHFLCYICKEYVEDLAKIPRSFLQEANVTLIVIGQSSYHHIEPFCKLTGYSHEIYVDPEREIYKRLGMKRGEEIASSGQSPHIKSNLLSGSLQSLWRAVTGPLFDFQGDPAQQGGTLILGPGNNIHFIHRDRNRLDHKPINSVLQLVGVQHVNFTNRPSVIHV

SEQ ID NO: 3669 - protein, 110 aa, Homo sapiens
  Payload ID: 804;
  Gene Symbol: AAED1;
  Gene Name: AhpC/TSA antioxidant enzyme domain containing 1;
  ENSP ID: ENSP00000412378
  MOD_RES (1)..(1): Any amino acid
XYVEDLAKIPRSFLQEANVTLIVIGQSSYHHIEPFCKLTGYSHEIYVDPEREIYKRLGMKRGEEIASSGNNIHFIHRDRNRLDHKPINSVLQLVGVQHVNFTNRPSVIHV

SEQ ID NO: 3670 - protein, 62 aa, Homo sapiens
  Payload ID: 805;
  Gene Symbol:;
  Gene Name: AJ239318.1;
  ENSP ID: ENSP00000485142
MLKIAVMEVPQSAWKTVWMEVAWSHCHVPLSLKKRHICLCARQYIHLIYVYTLVYAFCYLTF

SEQ ID NO: 3671 - protein, 538 aa, Homo sapiens
  Payload ID: 806;
  Gene Symbol: AJUBA;
  Gene Name: ajuba LIM prt;
  Uniprot ID:  Q96IF1;
  ENSP ID: ENSP00000262713
MERLGEKASRLLEKFGRRKGESSRSGSDGTPGPGKGRLSGLGGPRKSGPRGATGGPGDEPLEPAREQGSLDAERNQRGSFEAPRYEGSFPAGPPPTRALPLPQSLPPDFRLEPTAPALSPRSSFASSSASDASKPSSPRGSLLLDGAGAGGAGGSRPCSNRTSGISMGYDQRHGSPLPAGPCLFGPPLAGAPAGYSPGGVPSAYPELHAALDRLYAQRPAGFGCQESRHSYPPALGSPGALAGAGVGAAGPLERRGAQPGRHSVTGYGDCAVGARYQDELTALLRLTVGTGGREAGARGEPSGIEPSGLEEPPGPFVPEAARARMREPEAREDYFGTCIKCNKGIYGQSNACQALDSLYHTQCFVCCSCGRTLRCKAFYSVNGSVYCEEDYLFSGFQEAAEKCCVCGHLILEKILQAMGKSYHPGCFRCIVCNKCLDGIPFTVDFSNQVYCVTDYHKNYAPKCAACGQPILPSEGCEDIVRVISMDRDYHFECYHCEDCRMQLSDEEGCCCFPLDGHLLCHGCHMQRLNARQPPANYI

SEQ ID NO: 3672 - protein, 538 aa, Homo sapiens; identical to SEQ ID NO: 3671
  Payload ID: 806;
  Gene Symbol: AJUBA;
  Gene Name: ajuba LIM prt;
  Uniprot ID:  Q96IF1;
  ENSP ID: ENSP00000354491

SEQ ID NO: 3673 - protein, 121 aa, Homo sapiens
  Payload ID: 806;
  Gene Symbol: AJUBA;
  Gene Name: ajuba LIM prt;
  Uniprot ID:  Q96IF1;
  ENSP ID: ENSP00000380543
MGKSYHPGCFRCIVCNKCLDGIPFTVDFSNQVYCVTDYHKNYAPKCAACGQPILPSEGCEDIVRVISMDRDYHFECYHCEDCRMQLSDEEGCCCFPLDGHLLCHGCHMQRLNARQPPANYI

SEQ ID NO: 3674 - protein, 80 aa, Homo sapiens
  Payload ID: 806;
  Gene Symbol: AJUBA;
  Gene Name: ajuba LIM prt;
  ENSP ID: ENSP00000451649
MGKSYHPGCFRCIVCNKCLDGIPFTVDFSNQVYCVTDYHKNYAPKCAACGQPILPSEGCEDIVRVISMDRDYHFECYHCE

SEQ ID NO: 3675 - protein, 143 aa, Homo sapiens
  Payload ID: 806;
  Gene Symbol: AJUBA;
  Gene Name: ajuba LIM prt;
  ENSP ID: ENSP00000451772
  MOD_RES (1)..(1): Any amino acid
XRHSYPPALGSPGALAGAGVGAAGPLERRGAQPGRHSVTGYGDCAVGARYQDELTALLRLTVGTGGREAGARGEPSGIEPSGLEEPPGPFVPEAARARMREPEAREDYFGIMLTWSPLHGALCQARSFSPSLEVCSGEKSFYN

SEQ ID NO: 3676 - protein, 64 aa, Homo sapiens
  Payload ID: 806;
  Gene Symbol: AJUBA;
  Gene Name: ajuba LIM prt;
  ENSP ID: ENSP00000452325
MGKSYHPGCFRCIVCNKCLDGIPFTVDFSNQVYCVTDYHKNYAPKCAACGQPILPSEGCEDIVR

SEQ ID NO: 3677 - protein, 80 aa, Homo sapiens; identical to SEQ ID NO: 3674
  Payload ID: 806;
  Gene Symbol: AJUBA;
  Gene Name: ajuba LIM prt;
  ENSP ID: ENSP00000452369

SEQ ID NO: 3678 - protein, 145 aa, Homo sapiens
  Payload ID: 807;
  Gene Symbol: AKIRIN1;
  Gene Name: akirin 1;
  ENSP ID: ENSP00000362075
MACGATLKRPMEFEAALLSPGSPKRRRCAPLPGPTPGLRPPDAEPPPPFQTQTPPQSLQQPAPPGSERRLPTPGSSWMKKDQPTFTLRQVGIICERLLKDYEDKIREEYEQILNTKLAEQYESFVKFTHDQIMRRYGTRPTSYVS

SEQ ID NO: 3679 - protein, 147 aa, Homo sapiens
  Payload ID: 807;
  Gene Symbol: AKIRIN1;
  Gene Name: akirin 1;
  Uniprot ID:  Q9H9L7;
  ENSP ID: ENSP00000389866
MACGATLKRPMEFEAALLSPGSPKRRRCAPLPGPTPGLRPPDAEPPPPFQTQTPPQSLQQPAPPGSERRLPTPEQIFQNIKQEYSRYQRWRHLEVVLNQSEACASESQPHSSALTAPSSPEQYESFVKFTHDQIMRRYGTRPTSYVS

SEQ ID NO: 3680 - protein, 192 aa, Homo sapiens
  Payload ID: 807;
  Gene Symbol: AKIRIN1;
  Gene Name: akirin 1;
  Uniprot ID:  Q9H9L7;
  ENSP ID: ENSP00000392678
MACGATLKRPMEFEAALLSPGSPKRRRCAPLPGPTPGLRPPDAEPPPPFQTQTPPQSLQQPAPPGSERRLPTPEQIFQNIKQEYSRYQRWRHLEVVLNQSEACASESQPHSSALTAPSSPGSSWMKKDQPTFTLRQVGIICERLLKDYEDKIREEYEQILNTKLAEQYESFVKFTHDQIMRRYGTRPTSYVS

SEQ ID NO: 3681 - protein, 130 aa, Homo sapiens
  Payload ID: 807;
  Gene Symbol: AKIRIN1;
  Gene Name: akirin 1;
  ENSP ID: ENSP00000436372
  MOD_RES (1)..(1): Any amino acid
XPPDAEPPPPFQTQTPPQSLQQPAPPGSERRLPTPEQIFQNIKQEYSRYQRWRHLEVVLNQSEACASESQPHSSALTAPSSPGSSWMKKDQPTFTLRQVGIICERLLKDYEDKIREEYEQILNTKLADVS

SEQ ID NO: 3682 - protein, 203 aa, Homo sapiens
  Payload ID: 808;
  Gene Symbol: AKIRIN2;
  Gene Name: akirin 2;
  Uniprot ID:  Q53H80;
  ENSP ID: ENSP00000257787
MACGATLKRTLDFDPLLSPASPKRRRCAPLSAPTSAAASPLSAAAATAASFSAAAASPQKYLRMEPSPFGDVSSRLTTEQILYNIKQEYKRMQKRRHLETSFQQTDPCCTSDAQPHAFLLSGPASPGTSSAASSPLKKEQPLFTLRQVGMICERLLKEREEKVREEYEEILNTKLAEQYDAFVKFTHDQIMRRYGEQPASYVS

SEQ ID NO: 3683 - protein, 722 aa, Homo sapiens
  Payload ID: 809;
  Gene Symbol: AKNAD1;
  Gene Name: AKNA domain containing 1;
  ENSP ID: ENSP00000359011
MDEADFSEHTTYKQEDLPYDGDLSQIKIGNDYSFTSKKDGLEVLNQIIFIADDPQEKAMHSETCGNTAVTIPLGKITENAANKKDEKEKQCTAALHIPANEGDASKSSISDILLHHLSKEPFLRGQGIDCETLPEISNADSFEEEAIIKSIISCYNKNSWPKEQTPELTDQLNPKRDGENSNKPGSATTTEENTSDLEGPVAAGDSSHQENVNVLTKTKGPGDKQKSYQGQSPQKQQTEKANSGNTFKYGQGQVHYQLPDFSKIAPKVKIPKNKIINKPLAIAKQASFSSKSRDKPTLVQDSLETTPESNCVEKQHQEQKGKITEPSQQIQMEPIVHIHQELLTGIESEASLSKLSPTSQKGTSSSSSYIFQKISQGKQMCQKLKEQTDQLKTKVQEFSKRIKQDSPYHLQDKKLVLEKLQGHLELLEQNFLATKDKHLTLQQQVHKHESTIVGDFDPERKVEGEIFKLEMLLEDVKEKMDESKYTSAPSLPVSSPVTLDDLASTFSSLSNEAPNEELCELAPQTYLNGHYGDAAAQNKPDQVAMRLSSNSGEDPNGTPRRQDCAEMTAPSPSCAFCRRLLEWKQNVEKKGHGRINCGRFSIVLHEKAPHSDSTPNSDTGHSFCSDSGTEMQSNKCQDCGTKIPTSRRACRKEPTKEFHYRYNTPGQNYSNHSKRGAFVQPHSLDESKNSSPCLVHSPDTSKSSPTSGWQEAELGLENMKSQ

SEQ ID NO: 3684 - protein, 761 aa, Homo sapiens
  Payload ID: 809;
  Gene Symbol: AKNAD1;
  Gene Name: AKNA domain containing 1;
  Uniprot ID:  Q5T1N1;
  ENSP ID: ENSP00000359012
MDEADFSEHTTYKQEDLPYDGDLSQIKIGNDYSFTSKKDGLEVLNQIIFIADDPQEKAMHSETCGNTAVTIPLGKITENAANKKDEKEKQCTAALHIPANEGDASKSSISDILLHHLSKEPFLRGQGIDCETLPEISNADSFEEEAIIKSIISCYNKNSWPKEQTPELTDQLNPKRDGENSNKPGSATTTEENTSDLEGPVAAGDSSHQENVNVLTKTKGPGDKQKSYQGQSPQKQQTEKANSGNTFKYGQGQVHYQLPDFSKIAPKVKIPKNKIINKPLAIAKQASFSSKSRDKPTLVQDSLETTPESNCVEKQHQEQKGKITEPSQQIQMEPIVHIHQELLTGIESEASLSKLSPTSQKGTSSSSSYIFQKISQGKQMCQKLKEQTDQLKTKVQEFSKRIKQDSPYHLQDKKLVLEKLQGHLELLEQNFLATKDKHLTLQQQVHKHESTIVGDFDPERKVEGEIFKLEMLLEDVKEKMDESKYTSAPSLPVSSPVTLDDLASTFSSLSNEIPKEHPGHPSGPRGSGGSEVTGTPQGGPQEAPNEELCELAPQTYLNGHYGDAAAQNKPDQVAMRLSSNSGEDPNGTPRRQDCAEMTAPSPSCAFCRRLLEWKQNVEKKGHGRINCGRFSIVLHEKAPHSDSTPNSDTGHSFCSDSGTEMQSNKCQDCGTKIPTSRRACRKEPTKEFHYRYNTPGQNYSNHSKRGAFVQPHSLDESKNSSPSLASPFCCPGLVHSPDTSKSSPTSGWQEAELGLENMKSQ

SEQ ID NO: 3685 - protein, 836 aa, Homo sapiens
  Payload ID: 809;
  Gene Symbol: AKNAD1;
  Gene Name: AKNA domain containing 1;
  Uniprot ID:  Q5T1N1;
  ENSP ID: ENSP00000359018
MDEADFSEHTTYKQEDLPYDGDLSQIKIGNDYSFTSKKDGLEVLNQIIFIADDPQEKAMHSETCGNTAVTIPLGKITENAANKKDEKEKQCTAALHIPANEGDASKSSISDILLHHLSKEPFLRGQGIDCETLPEISNADSFEEEAIIKSIISCYNKNSWPKEQTPELTDQLNPKRDGENSNKPGSATTTEENTSDLEGPVAAGDSSHQENVNVLTKTKGPGDKQKSYQGQSPQKQQTEKANSGNTFKYGQGQVHYQLPDFSKIAPKVKIPKNKIINKPLAIAKQASFSSKSRDKPTLVQDSLETTPESNCVEKQHQEQKGKITEPSQQIQMEPIVHIHQELLTGIESEASLSKLSPTSQKGTSSSSSYIFQKISQGKQMCQKLKEQTDQLKTKVQEFSKRIKQDSPYHLQDKKLVLEKLQGHLELLEQNFLATKDKHLTLQQQVHKHESTIVGDFDPERKVEGEIFKLEMLLEDVKEKMDESKYTSAPSLPVSSPVTLDDLASTFSSLSNEIPKEHPGHPSGPRGSGGSEVTGTPQGGPQEAPNEELCELAPQTYLNGHYGDAAAQNKPDQVAMRLSSNSGEDPNGTPRRQDCAEMTAPSPSCAFCRRLLEWKQNVEKKGHGRINCGRFSIVLHEKAPHSDSTPNSDTGHSFCSDSGTEMQSNKCQDCGTKIPTSRRACRKEPTKEFHYRYNTPGQNYSNHSKRGAFVQPHSLDESKNSSPSFLKPKRICSQRVNSKSFKGEHEPTPGKKKLQAFMTYSSDPATPSPHFYSCRISGSKSLCDFDSTEEIKSEILNSALDHALRTATILKETTDQMIKTIAEDLAKAQRWRNRLKY

SEQ ID NO: 3686 - protein, 415 aa, Homo sapiens
  Payload ID: 809;
  Gene Symbol: AKNAD1;
  Gene Name: AKNA domain containing 1;
  Uniprot ID:  Q5T1N1;
  ENSP ID: ENSP00000432262
MDEADFSEHTTYKQEDLPYDGDLSQIKIGNDYSFTSKKDGLEVLNQIIFIADDPQEKAMHSETCGNTAVTIPLGKITENAANKKDEKEKQCTAALHIPANEGDASKSSISDILLHHLSKEPFLRGQGIDCETLPEISNADSFEEEAIIKSIISCYNKNSWPKEQTPELTDQLNPKRDGENSNKPGSATTTEENTSDLEGPVAAGDSSHQENVNVLTKTKGPGDKQKSYQGQSPQKQQTEKANSGNTFKYGQGQVHYQLPDFSKIAPKVKIPKNKIINKPLAIAKQASFSSKSRDKPTLVQDSLETTPESNCVEKQHQEQKGKITEPSQQIQMEPIVHIHQELLTGIESEASLSKLSPTSQKGTSSSSSYIFQKISQGKQMCQKLKEQTDQLKTKVQEFSKRIKQDSPYHLQDKKL

SEQ ID NO: 3687 - protein, 569 aa, Homo sapiens
  Payload ID: 809;
  Gene Symbol: AKNAD1;
  Gene Name: AKNA domain containing 1;
  ENSP ID: ENSP00000433889
MDEADFSEHTTYKQEDLPYDGDLSQIKIGNDYSFTSKKDGLEVLNQIIFIADDPQEKAMHSETCGNTAVTIPLGKITENAANKKDEKEKQCTAALHIPANEGDASKSSISDILLHHLSKEPFLRGQGIDCETLPEISNADSFEEEAIIKSIISCYNKNSWPKEQTPELTDQLNPKRDGENSNKPGSATTTEENTSDLEGPVAAGDSSHQENVNVLTKTKGPGDKQKSYQGQSPQKQQTEKANSGNTFKYGQGQVHYQLPDFSKIAPKVKIPKNKIINKPLAIAKQASFSSKSRDKPTLVQDSLETTPESNCVEKQHQEQKGKITEPSQQIQMEPIVHIHQELLTGIESEASLSKLSPTSQKGTSSSSSYIFQKISQGKQMCQKLKEQTDQLKTKVQEFSKRIKQDSPYHLQDKKLVLEKLQGHLELLEQNFLATKDKHLTLQQQVHKHESTIVGDFDPERKVEGEIFKLEMLLEDVKEKMDESKYTSAPSLPVSSPVTLDDLASTFSSLSNEIPKEHPGHPSGPRGSGGSEVTGTPQGGPQEAPNEELCELAPQTRIPTALQEGRIVQR

SEQ ID NO: 3688 - protein, 652 aa, Homo sapiens
  Payload ID: 809;
  Gene Symbol: AKNAD1;
  Gene Name: AKNA domain containing 1;
  Uniprot ID:  Q5T1N1;
  ENSP ID: ENSP00000436835
MDEADFSEHTTYKQEDLPYDGDLSQIKIGNDYSFTSKKDGLEVLNQIIFIADDPQEKAMHSETCGNTAVTIPLGKITENAANKKDEKEKQCTAALHIPANEGDASKSSISDILLHHLSKEPFLRGQGIDCETLPEISNADSFEEEAIIKSIISCYNKNSWPKEQTPELTDQLNPKRDGENSNKPGSATTTEENTSDLEGPVAAGDSSHQENVNVLTKTKGPGDKQKSYQGQSPQKQQTEKANSGNTFKYGQGQVHYQLPDFSKIAPKVKIPKNKIINKPLAIAKQASFSSKSRDKPTLVQDSLETTPESNCVEKQHQEQKGKITEPSQQIQMEPIVHIHQELLTGIESEASLSKLSPTSQKGTSSSSSYIFQKISQGKQMCQKLKEQTDQLKTKVQEFSKRIKQDSPYHLQDKKLVLEKLQGHLELLEQNFLATKDKHLTLQQQVHKHESTIVGDFDPERKVEGEIFKLEMLLEDVKEKMDESKYTSAPSLPVSSPVTLDDLASTFSSLSNEEDPNGTPRRQDCAEMTAPSPSCAFCRRLLEWKQNVEKKGHGRINCGRFSIVLHEKAPHSDSTPNSDTGHSFCSDSGTEMQSNKCQDCGTKIPTSRRACRKEPTKEFHYRYNTPGQNYSNHSKRGAFVQPHSLDESKNSSP

SEQ ID NO: 3689 - protein, 293 aa, Homo sapiens
  Payload ID: 810;
  Gene Symbol: AKTIP;
  Gene Name: AKT interacting prt;
  Uniprot ID:  Q9H8T0;
  ENSP ID: ENSP00000300245
MNPFWSMSTSSVRKRSEGEEKTLTGDVKTSPPRTAPKKQLPSIPKNALPITKPTSPAPAAQSTNGTHASYGPFYLEYSLLAEFTLVVKQKLPGVYVQPSYRSALMWFGVIFIRHGLYQDGVFKFTVYIPDNYPDGDCPRLVFDIPVFHPLVDPTSGELDVKRAFAKWRRNHNHIWQVLMYARRVFYKIDTASPLNPEAAVLYEKDIQLFKSKVVDSVKVCTARLFDQPKIEDPYAISFSPWNPSVHDEAREKMLTQKKKPEEQHNKSVHVAGLSWVKPGSVQPFSKEEKTVAT

SEQ ID NO: 3690 - protein, 292 aa, Homo sapiens
  Payload ID: 810;
  Gene Symbol: AKTIP;
  Gene Name: AKT interacting prt;
  Uniprot ID:  Q9H8T0;
  ENSP ID: ENSP00000378152
MNPFWSMSTSSVRKRSEGEEKTLTGDVKTSPPRTAPKKQLPSIPKNALPITKPTSPAPAAQSTNGTHASYGPFYLEYSLLAEFTLVVKQKLPGVYVQPSYRSALMWFGVIFIRHGLYQDGVFKFTVYIPDNYPDGDCPRLVFDIPVFHPLVDPTSGELDVKRAFAKWRRNHNHIWQVLMYARRVFYKIDTASPLNPEAAVLYEKDIQLFKSKVVDSVKVCTARLFDQPKIEDPYAISFSPWNPSVHDEAREKMLTQKKPEEQHNKSVHVAGLSWVKPGSVQPFSKEEKTVAT

SEQ ID NO: 3691 - protein, 249 aa, Homo sapiens
  Payload ID: 810;
  Gene Symbol: AKTIP;
  Gene Name: AKT interacting prt;
  ENSP ID: ENSP00000454269
MNPFWSMSTSSVRKRSEGEEKTLTGDVKTSPPRTAPKKQLPSIPKNALPITKPTSPAPAAQSTNGTHASYGPFYLEYSLLAEFTLVVKQKLPGVYVQPSYRSALMWFGVIFIRHGLYQDGVFKFTVYIPDNYPDGDCPLSRGTSVLCSSFRHAIRALFLCSGSAREAGCLPSCSTHQRLVFDIPVFHPLVDPTSGELDVKRAFAKWRRNHNHIWQVLMYARRVFYKIDTASPLNPEAAVLYEKDIQLFK

SEQ ID NO: 3692 - protein, 127 aa, Homo sapiens
  Payload ID: 810;
  Gene Symbol: AKTIP;
  Gene Name: AKT interacting prt;
  ENSP ID: ENSP00000454771
MNPFWSMSTSSVRKRSEGEEKTLTGDVKTSPPRTAPKKQLPSIPKNALPITKPTSPAPAAQSTNGTHASYGPFYLEYSLLAEFTLVVKQKLPGVYVQPSYRSALMWFGVIFIRHGLYQDGVFKFTVY

SEQ ID NO: 3693 - protein, 292 aa, Homo sapiens; identical to SEQ ID NO: 3690
  Payload ID: 810;
  Gene Symbol: AKTIP;
  Gene Name: AKT interacting prt;
  Uniprot ID:  Q9H8T0;
  ENSP ID: ENSP00000455874

SEQ ID NO: 3694 - protein, 14 aa, Homo sapiens
  Payload ID: 810;
  Gene Symbol: AKTIP;
  Gene Name: AKT interacting prt;
  ENSP ID: ENSP00000456398
MNPFWSMSTSSVRK

SEQ ID NO: 3695 - protein, 149 aa, Homo sapiens
  Payload ID: 810;
  Gene Symbol: AKTIP;
  Gene Name: AKT interacting prt;
  ENSP ID: ENSP00000456418
MNPFWSMSTSSVRKRSEGEEKTLTGDVKTSPPRTAPKKQLPSIPKNALPITKPTSPAPAAQSTNGTHASYGPFYLEYSLLAEFTLVVKQKLPGVYVQPSYRSALMWFGVIFIRHGLYQDGVFKFTVYIPDNYPDGDCPRLVFDIPVFHP

SEQ ID NO: 3696 - protein, 40 aa, Homo sapiens
  Payload ID: 810;
  Gene Symbol: AKTIP;
  Gene Name: AKT interacting prt;
  ENSP ID: ENSP00000456922
MNPFWSMSTSSVRKRSEGEEKTLTGDVKTSPPRTAPKKQL

SEQ ID NO: 3697 - protein, 136 aa, Homo sapiens
  Payload ID: 810;
  Gene Symbol: AKTIP;
  Gene Name: AKT interacting prt;
  ENSP ID: ENSP00000458118
MNPFWSMSTSSVRKRSEGEEKTLTGDVKTSPPRTAPKKQLPSIPKNALPITKPTSPAPAAQSTNGTHASYGPFYLEYSLLAEFTLVVKQKLPGVYVQPSYRSALMWFGVIFIRHGLYQDGVFKFTVYIPDNYPDGD

SEQ ID NO: 3698 - protein, 256 aa, Homo sapiens
  Payload ID: 811;
  Gene Symbol: AKT1S1;
  Gene Name: AKT1 substrate 1 (proline-rich);
  Uniprot ID:  Q96B36;
  ENSP ID: ENSP00000341698
MASGRPEELWEAVVGAAERFRARTGTELVLLTAAPPPPPRPGPCAYAAHGRGALAEAARRCLHDIALAHRAATAARPPAPPPAPQPPSPTPSPPRPTLAREDNEEDEDEPTETETSGEQLGISDNGGLFVMDEDATLQDLPPFCESDPESTDDGSLSEETPAGPPTCSVPPASALPTQQYAKSLPVSVPVWGFKEKRTEARSSDEENGPPSSPDLDRIAASMRALVLREAEDTQVFGDLPRPRLNTSDFQKLKRKY

SEQ ID NO: 3699 - protein, 108 aa, Homo sapiens
  Payload ID: 811;
  Gene Symbol: AKT1S1;
  Gene Name: AKT1 substrate 1 (proline-rich);
  ENSP ID: ENSP00000375706
MASGRPEELWEAVVGAAERFRARTGTELVLLTAAPPPPPRPGPCAYAAHGRGALAEAARRCLHDIALAHRAATAARPPAPPPAPQPPSPTPSPPRPTLAREDNEEDED

SEQ ID NO: 3700 - protein, 256 aa, Homo sapiens; identical to SEQ ID NO: 3698
  Payload ID: 811;
  Gene Symbol: AKT1S1;
  Gene Name: AKT1 substrate 1 (proline-rich);
  Uniprot ID:  Q96B36;
  ENSP ID: ENSP00000375707

SEQ ID NO: 3701 - protein, 256 aa, Homo sapiens; identical to SEQ ID NO: 3698
  Payload ID: 811;
  Gene Symbol: AKT1S1;
  Gene Name: AKT1 substrate 1 (proline-rich);
  Uniprot ID:  Q96B36;
  ENSP ID: ENSP00000375708

SEQ ID NO: 3702 - protein, 256 aa, Homo sapiens; identical to SEQ ID NO: 3698
  Payload ID: 811;
  Gene Symbol: AKT1S1;
  Gene Name: AKT1 substrate 1 (proline-rich);
  Uniprot ID:  Q96B36;
  ENSP ID: ENSP00000375709

SEQ ID NO: 3703 - protein, 256 aa, Homo sapiens; identical to SEQ ID NO: 3698
  Payload ID: 811;
  Gene Symbol: AKT1S1;
  Gene Name: AKT1 substrate 1 (proline-rich);
  Uniprot ID:  Q96B36;
  ENSP ID: ENSP00000375710

SEQ ID NO: 3704 - protein, 276 aa, Homo sapiens
  Payload ID: 811;
  Gene Symbol: AKT1S1;
  Gene Name: AKT1 substrate 1 (proline-rich);
  Uniprot ID:  Q96B36;
  ENSP ID: ENSP00000375711
MSFEGGDGAGPAMLATGTARMASGRPEELWEAVVGAAERFRARTGTELVLLTAAPPPPPRPGPCAYAAHGRGALAEAARRCLHDIALAHRAATAARPPAPPPAPQPPSPTPSPPRPTLAREDNEEDEDEPTETETSGEQLGISDNGGLFVMDEDATLQDLPPFCESDPESTDDGSLSEETPAGPPTCSVPPASALPTQQYAKSLPVSVPVWGFKEKRTEARSSDEENGPPSSPDLDRIAASMRALVLREAEDTQVFGDLPRPRLNTSDFQKLKRKY

SEQ ID NO: 3705 - protein, 33 aa, Homo sapiens
  Payload ID: 811;
  Gene Symbol: AKT1S1;
  Gene Name: AKT1 substrate 1 (proline-rich);
  ENSP ID: ENSP00000472839
MASGRPEELWEAVVGAAERFRARTGTELVLLTA

SEQ ID NO: 3706 - protein, 112 aa, Homo sapiens
  Payload ID: 812;
  Gene Symbol:;
  Gene Name: AL008723.1;
  ENSP ID: ENSP00000485273
LDPPFAVNRFSADSQVPFCACSHVHLPAVAATGKARGAQDANGHVKSLGKVLPILSDAPTSDAPEVVRNEEEVVGCVGIQGHIHCEKEKKLLSKWTETNPMPLFYFKGPNIS

SEQ ID NO: 3707 - protein, 168 aa, Homo sapiens
  Payload ID: 813;
  Gene Symbol:;
  Gene Name: AL021546.6;
  ENSP ID: ENSP00000450281
  MOD_RES (1)..(1): Any amino acid
XSSGAHGEEGSARMWKTLTFFVALPGVAVSMLNVYLKSHHGEHERPEFIAYPHLRIRTKGSGRITAAVIEHLERLALVDFGSREAVARLEKAIAFADRLRAVDTDGVEPMESVLEDRCLYLRSDNVVEGNCADELLQNSHRVVEEYFVAPPGNISLPKLDEQEPFPHS

SEQ ID NO: 3708 - protein, 243 aa, Homo sapiens
  Payload ID: 814;
  Gene Symbol:;
  Gene Name: AL022578.1;
  ENSP ID: ENSP00000485673
MEKLRKWVLWDVRYPSAAWSGGEHGRAHVALPHGIHHVGGVSIRIEDEDTSELTEQAVSLELSALNSGGAVPLVAGSTGGDVSLGGLTGGGGLWTCSLWICVIPLRETEGPLGKNQGRPRLSPGRYHRMRSGEMSGWLQASPRTYHKGRRRRRNHGYASPPRICHEVGKRENSECWVPLLLCLWGLDARFECCSNLPYLPLHLPQLKRDYVVPILIIFNVSLVQCNMSIKIFRKLYYFYFLMK

SEQ ID NO: 3709 - protein, 201 aa, Homo sapiens
  Payload ID: 815;
  Gene Symbol:;
  Gene Name: AL023806.1;
  ENSP ID: ENSP00000485232
MALTKMLIMIWTMKSRLSWSQMEMRNLLGIGAKVTRYVLAKRLVAFCPCPKDLWNFELERDDLGYLVEEVSKQQSIQEVTWVLLKAFSFIREAEHKRLENLQPDNVIEKKILFSEEKFKLAAKIWISNEELNINPQDNGENVCRACQRSSQQLLLSQTWRPRRKKWFHGLGPRPPCSVQPKDLVPCVPATPAMAKRGQGTV

SEQ ID NO: 3710 - protein, 124 aa, Homo sapiens
  Payload ID: 816;
  Gene Symbol:;
  Gene Name: AL023875.1;
  ENSP ID: ENSP00000485038
MTLNEHAAFKHLFNKAHLAPPLIHLTLSGHSTCFREHRVGGKVTDQQDPKAEEFFLVPNKMKSLPCLPLSTQTRQPSDFSIFSPPFPPFYSTKPPLSSWPVLNELLGTPPRWGGGLAEGLLTSQ

SEQ ID NO: 3711 - protein, 119 aa, Homo sapiens
  Payload ID: 817;
  Gene Symbol:;
  Gene Name: AL049794.1;
  ENSP ID: ENSP00000485558
MISEGFLTSSPSGLRTRLFLSFLSANCGSVFDFKDSGMNSSMIRTCYYCPCFTAPGIGSLILQKLHTFRALGGTGTSKESEGMKAGEMRPTLERQEERREKAPRPGTVAHACNPSTLGG

SEQ ID NO: 3712 - protein, 21 aa, Homo sapiens
  Payload ID: 818;
  Gene Symbol:;
  Gene Name: AL049872.1;
  ENSP ID: ENSP00000485197
SSIFHFPGGPPAAAAAAAVAA

SEQ ID NO: 3713 - protein, 56 aa, Homo sapiens
  Payload ID: 819;
  Gene Symbol:;
  Gene Name: AL109927.1;
  ENSP ID: ENSP00000485497
MILESGRKKGGSGRPRKEPGQSIEKDIRSLSLQCKCCEDRSLWAISTPPPIVILHG

SEQ ID NO: 3714 - protein, 124 aa, Homo sapiens [sequence omitted]

SEQ ID NO: 3715 - protein, 33 aa, Homo sapiens
  Payload ID: 821;
  Gene Symbol:;
  Gene Name: AL133475.1;
  ENSP ID: ENSP00000486845
ECKLHNTGIFVYFVHYSINSAWYILLRSLLHKL

SEQ ID NO: 3716 - protein, 124 aa, Homo sapiens [sequence omitted]

SEQ ID NO: 3717 - protein, 31 aa, Homo sapiens
  Payload ID: 823;
  Gene Symbol:;
  Gene Name: AL135842.1;
  ENSP ID: ENSP00000485213
RQSLQRRVQSPQSCGSSWSPQTAGHCHCHSS

SEQ ID NO: 3718 - protein, 124 aa, Homo sapiens [sequence omitted]

SEQ ID NO: 3719 - protein, 23 aa, Homo sapiens
  Payload ID: 825;
  Gene Symbol:;
  Gene Name: AL137164.1;
  ENSP ID: ENSP00000485746
EYQKYIIMSDIPVCSKQKTQIHF

SEQ ID NO: 3720 - protein, 124 aa, Homo sapiens; identical to SEQ ID NO: 1098
  Payload ID: 826;
  Gene Symbol:;
  Gene Name: AL137860.1;
  ENSP ID: ENSP00000485435

SEQ ID NO: 3721 - protein, 19 aa, Homo sapiens
  Payload ID: 827;
  Gene Symbol:;
  Gene Name: AL138706.2;
  ENSP ID: ENSP00000485148
LVQLVVTCKYLLHFSSSET

SEQ ID NO: 3722 - protein, 11 aa, Homo sapiens
  Payload ID: 828;
  Gene Symbol:;
  Gene Name: AL138751.1;
  ENSP ID: ENSP00000486495
ISTKKGKVTRS

SEQ ID NO: 3723 - protein, 18 aa, Homo sapiens
  Payload ID: 829;
  Gene Symbol:;
  Gene Name: AL139333.1;
  ENSP ID: ENSP00000487357
STVLALKDRLSLFCPGWS

SEQ ID NO: 3724 - protein, 19 aa, Homo sapiens
  Payload ID: 830;
  Gene Symbol:;
  Gene Name: AL158839.1;
  ENSP ID: ENSP00000485251
LEEIYSQPNFTEDLLRAVL

SEQ ID NO: 3725 - protein, 18 aa, Homo sapiens
  Payload ID: 831;
  Gene Symbol:;
  Gene Name: AL162426.1;
  ENSP ID: ENSP00000485384
SRSRRSCRPWGRLLGRLG

SEQ ID NO: 3726 - protein, 243 aa, Homo sapiens
  Payload ID: 832;
  Gene Symbol:;
  Gene Name: AL354822.1;
  ENSP ID: ENSP00000480106
MRSAAFTIPSLKQRSPRCSTGRAELGKGEPSPCTGRPEQRGRRKSSLAPPAPTPDAGPQTSKDLEPPPHGCQEADRGGSWGATTSRPFRQNLSDLGRHSVLPLKRNLCPGGSSLGAPPLRTPQRRVTLAAQRWLSRPQRRAVGLGELDQGAQLAALGLRWGVDSLGGCPRASQPAGHSGLHHTLTCLRRHLALQAGASGHAGQLPQRASAAWEQQGQSYTALHLAAMYLGDGEAASGNIGRRC

SEQ ID NO: 3727 - protein, 404 aa, Homo sapiens
  Payload ID: 833;
  Gene Symbol:;
  Gene Name: AL354828.1;
  ENSP ID: ENSP00000485488
IFLRVSSSDKQLDFLLQAKINKSQRFPRRQNVPILWHRCSLPTHIRTQRWNVLISNLLCISYQTMGFFSLSFLFLCFLRDLLKTEVLLKSNENHNGNLKVPDVRVMLECSGAISAHCKLRLPGSRHSPASASRVAGTTGAHHHARLIFCIFSRGRVSPCYHKVRRSRAFWLTRENHPKKYKTKLAGRGGGRLPATREAEAGEWREPRRQSLQRRSGHCTPAWATGRDSISKKVGQHCRKQRATDCLKVDVGQAQWLMPVIPALLGGQGSQITRDQSGKHSETPSLLKIQKISRVWQCAPVIPATREAEAGESREPRRRRLQPRSQHCTPAQVTTMHGSRIYMAKEGEVGMGWGEDKILLPVTHITPPPPLLSSTSSLPTPTNTITAIITTITINTKTETTTTTT

SEQ ID NO: 3728 - protein, 227 aa, Homo sapiens
  Payload ID: 834;
  Gene Symbol:;
  Gene Name: AL354828.2;
  ENSP ID: ENSP00000485090
RLECSGLISAHCKLCLLGSRHSPASASRVAGTIGAHHHAQLIFCIFSRDGVSPCYHEVSRSRPSWLTRCTYIRKYKKLAGRGGGRLPATREAEAGEWREPGRRSLQPRSRHCTPAWATERDSVSIKKKDHGRLQNKEDTLKLCSGKVRWSMPVISLNTGGKATALRMSGAGSALHGETPSLLKIQKISWAWWQAPVVPAAGEAEAGEWREPRRRSLHERRLRHCTPA

SEQ ID NO: 3729 - protein, 170 aa, Homo sapiens
  Payload ID: 835;
  Gene Symbol:;
  Gene Name: AL356131.3;
  ENSP ID: ENSP00000489278
MGKDIMNKTPKAMATKARIDKWDLIKLKSFCTAKETIIRTNRQPTEWEKFLAIYPSDKGLISRIYMDKNRNYKKLKSRVTKQRVQPMKVDLKWDKKGRERLLRPVIPALWEAEAGRSPEARSWRPPWPTWQNPVSTKNTKISWVWWQLPVIAATREAKAGEWIEPGRQRL

SEQ ID NO: 3730 - protein, 11 aa, Homo sapiens
  Payload ID: 836;
  Gene Symbol:;
  Gene Name: AL356135.1;
  ENSP ID: ENSP00000485371
MARRKLSCFLI

SEQ ID NO: 3731 - protein, 190 aa, Homo sapiens
  Payload ID: 837;
  Gene Symbol:;
  Gene Name: AL356289.1;
  ENSP ID: ENSP00000485411
MCLCVCLYVCICVYVCVCHFVCFWVCLPLRVSVYLYLRVCVCVCVFVCLCMCVRGCVSVCVCVCIEREGERKGATDGSAWKVYPHSQPWEESVNPPTGQDQLWWCLADSGNVTFHLRMGLHFLGKECRSWSLKECFFFPFVIERAQPCVHWLTVTNLRVGDSHREETEGTADSEQESGGTSLPLGPNPQL

SEQ ID NO: 3732 - protein, 299 aa, Homo sapiens
  Payload ID: 838;
  Gene Symbol:;
  Gene Name: AL356585.2;
  ENSP ID: ENSP00000486163
SQTLASAQAPVQTPAPTLPGPALPGPFPGGRVVRLHPVLLASTVDSYERRNKGAARVIGTLLGTVNKHSVEVTNCFSVSYNESDEVVVDMEFAKNMYELHKKVSPNELILGWYAAGHDITEHSVLIHEYYSREAPNPIHLTVDTSLQNGHMSIKAYVSTLMGVPGRTVGVFTPLTVKYAYYDTECIRVDLIMKTCFSPNRVVGLSSDLQQVGGASAHIQDALSIVLQYAEDILSAKVSADNTIRKVGHFLMSLVNQVPKIVPDDFETMLHSNINDLLMVAYLANLTQSQIALNEKRVNL

SEQ ID NO: 3733 - protein, 299 aa, Homo sapiens; identical to SEQ ID NO: 3732
  Payload ID: 839;
  Gene Symbol:;
  Gene Name: AL356585.3;
  ENSP ID: ENSP00000485744

SEQ ID NO: 3734 - protein, 127 aa, Homo sapiens [sequence omitted]

SEQ ID NO: 3735 - protein, 182 aa, Homo sapiens
  Payload ID: 841;
  Gene Symbol:;
  Gene Name: AL358852.1;
  ENSP ID: ENSP00000485235
MQPAKSGPERAGSARQSKPLDPRQRGWAWAPAATAPPTRALEERTRYASPGPTWRGEQSSWTAATGLRADAEAARVRPSNPKYPWWGRAGRRTGGLPRASAARPRGREDLALPLTPGHRRRRRHFAFHSVSPPPHSAAGFPDVGISRRRLRGGRGLGAFARPAAARERAACGLRASLRRPQL

SEQ ID NO: 3736 - protein, 182 aa, Homo sapiens
  Payload ID: 842;
  Gene Symbol:;
  Gene Name: AL360294.1;
  ENSP ID: ENSP00000485122
MKSSEELQCLKQMEEELLFLKAGQGSQRARLTPPLPRALQGNFGAPALCGIWFAEHLHPAVGMPPNYNSSMLSLSPERTILSGGWSGKQTQQPVPPLRTLLLRSPFSLHKSSQPGSPKASQRIHPLFHSIPRSQLHSVLLGLPLLFIQTRPSPPAQYGAQMPLRYICFGPNIFWGSKKPQKE

SEQ ID NO: 3737 - protein, 139 aa, Homo sapiens
  Payload ID: 843;
  Gene Symbol:;
  Gene Name: AL365181.2;
  ENSP ID: ENSP00000485562
MSSECLPHLPSRVPSPTHANLPHKAPPTQASCHSTHLTLGYTLYLSEDLLAHFFLVPLHIVPCLCVSLNYLFLQILLVESPYLFFPPLVLPTTTSSLSTVKFLPFFPFLGKLEIFFCKFPFKLAFPPLIKWTTWGGNPG

SEQ ID NO: 3738 - protein, 98 aa, Homo sapiens
  Payload ID: 844;
  Gene Symbol:;
  Gene Name: AL365202.1;
  ENSP ID: ENSP00000485257
LFIKKSLALLPRLEYSGTILAHCNLCLLGSSNSHASASQVAGITGMCHHVWLIFVFLVETGFHHVAQAGLELLVSSSSPALASQSTEITGMSQCAWPL

SEQ ID NO: 3739 - protein, 16 aa, Homo sapiens
  Payload ID: 845;
  Gene Symbol:;
  Gene Name: AL445183.1;
  ENSP ID: ENSP00000485528
LGKPSATSTFSTHQLQ

SEQ ID NO: 3740 - protein, 835 aa, Homo sapiens
  Payload ID: 846;
  Gene Symbol:;
  Gene Name: AL513412.1;
  ENSP ID: ENSP00000442382
MKHYGLPWKRTEEAAADTALTIMEVAEVESPLNPSCKIMTFRPSMEEFREFNKYLAYMESKGAHRAGLAKVIPPKEWKPRQCYDDIDNLLIPAPIQQMVTGQSGLFTQYNIQKKAMTVKEFRQLANSGKYCTPRYLDYEDLERKYWKNLTFVAPIYGADINGSIYDEGVDEWNIARLNTVLDVVEEECGISIEGVNTPYLYFGMWKTTFAWHTEDMDLYSINYLHFGEPKSWYAIPPEHGKRLERLAQGFFPSSSQGCDAFLRHKMTLISPSVLKKYGIPFDKITQEAGEFMITFPYGYHAGFNHGFNCAESTNFATVRWIDYGKVAKLCTCRKDMVKISMDIFVRKFQPDRYQLWKQGKDIYTIDHTKPTPASTPEVKAWLQRRRKVRKASRSFQCARSTSKRPKADEEEEVSDEVDGAEVPNPDSVTDDLKVSEKSEAAVKLRNTEASSEEESSASRMQVEQNLSDHIKLSGNSCLSTSVTEDIKTEDDKAYAYRSVPSISSEADDSIPLSSGYEKPEKSDPSELSWPKSPESCSSVAESNGVLTEGEESDVESHGNGLEPGEIPAVPSGERNSFKVPSIAEGENKTSKSWRHPLSRPPARSPMTLVKQQAPSDEELPEVLSIEEEVEETESWAKPLIHLWQTKSPNFAAEQEYNATVARMKPHCAICTLLMPYHKPDSSNEENDARWETKLDEVVTSEGKTKPLIPEMCFIYSEENIEYSPPNAFLEEDGTSLLISCAKCCVRVHASCYGIPSHEICDGWLCARCKRNAWTAECCLCNLRGGALKQTKNNKWAHVMCAVAVPEVRFTNVPERTQIDVGRIPLQRLKLGRLGI

SEQ ID NO: 3741 - protein, 140 aa, Homo sapiens
  Payload ID: 847;
  Gene Symbol:;
  Gene Name: AL513523.1;
  ENSP ID: ENSP00000471409
MALWETGGGDCGRGQGAEDFHYGLILQSLWLQSDPKYHWEQQCEGLEAPGGGKGLGAAWQLLKLSQRRKLLLPPGELGDAARVFPLQSPQPLLTFESPRRRGQSSRGWDGECRASVTVRAHCRGPFSFPLGRLRFRVFLF

SEQ ID NO: 3742 - protein, 140 aa, Homo sapiens; identical to SEQ ID NO: 3741
  Payload ID: 848;
  Gene Symbol:;
  Gene Name: AL513523.2;
  ENSP ID: ENSP00000485583

SEQ ID NO: 3743 - protein, 210 aa, Homo sapiens [sequence omitted]

SEQ ID NO: 3744 - protein, 124 aa, Homo sapiens
  Payload ID: 850;
  Gene Symbol:;
  Gene Name: AL590235.1;
  ENSP ID: ENSP00000485158
MTLNEHAAFKHLFNKAHLAPPLIHSTLRGHSTCFREHRVGGKVTDQQDPKAEEFFLVQNKMKSLPCLPLSTQTWQPSDFSIFSPPFPPFYSTKPPLSSWPVLNELLSTPPRRGGGRADGLLTSQ

SEQ ID NO: 3745 - protein, 50 aa, Homo sapiens
  Payload ID: 851;
  Gene Symbol:;
  Gene Name: AL591806.1;
  ENSP ID: ENSP00000485345
PLIYLFIYLFIYLFIETESHHVGQAGLKLLTSSDPPALASQSAGITGVSH

SEQ ID NO: 3746 - protein, 123 aa, Homo sapiens
  Payload ID: 852;
  Gene Symbol:;
  Gene Name: AL592183.1;
  ENSP ID: ENSP00000479921
MALLASNGCFIRCNEAGDIEAKSKTAGEEEMIKIRSCAERETKKKDDIPEEDKGNVKQCEINYVKKFQSFQEHKLKISKEDSKILKKAQKDGFLQETLLDSLGYEHRWKRWLLYWIKDMSRDG

SEQ ID NO: 3747 - protein, 44 aa, Homo sapiens
  Payload ID: 853;
  Gene Symbol:;
  Gene Name: AL596220.1;
  ENSP ID: ENSP00000485451
MCVYTYIYLSIYLSIYLSIILYTHILKKRGIFLVGCYNFILLIK

SEQ ID NO: 3748 - protein, 92 aa, Homo sapiens
  Payload ID: 854;
  Gene Symbol:;
  Gene Name: AL645728.1;
  ENSP ID: ENSP00000485620
GVISAHCNLHLPGSSDSPASASRVAGITGTHHHAWLIFVFLVETGFHHVGQDGLDLLTSDPPTSASHSAGITDVSHHAWPWILIFFFFEMES

SEQ ID NO: 3749 - protein, 23 aa, Homo sapiens
  Payload ID: 855;
  Gene Symbol:;
  Gene Name: AL645922.1;
  ENSP ID: ENSP00000485579
PTLCCLSCFSSLWPRWEDHLRPG

SEQ ID NO: 3750 - protein, 137 aa, Homo sapiens
  Payload ID: 856;
  Gene Symbol:;
  Gene Name: AL662852.1;
  ENSP ID: ENSP00000481180
MEGALADMKFYFIQILEKLSEAMSVLPEDMRIMPDLCGLTLEHSVLEAGKFKIKVPANFITWCPIMAHSFTQQPLPASKPQDTDLHQHMGQHYLPNSVEKRTFHHWVMRVDSDSWLLNARHDWRPFIVLLEKSMKKL

SEQ ID NO: 3751 - protein, 137 aa, Homo sapiens; identical to SEQ ID NO: 3750
  Payload ID: 857;
  Gene Symbol:;
  Gene Name: AL929561.1;
  ENSP ID: ENSP00000479324

SEQ ID NO: 3752 - protein, 155 aa, Homo sapiens
  Payload ID: 858;
  Gene Symbol: AARD;
  Gene Name: alanine and arginine rich domain containing prt;
  Uniprot ID:  Q4LEZ3;
  ENSP ID: ENSP00000367528
MGPGDFRRCRERISQGLQGLPGRAELWFPPRPACDFFGDGRSTDIQEEALAASPLLEDLRRRLTRAFQWAVQRAISRRVQEAAAAAAAREEQSWTGVEATLARLRAELVEMHFQNHQLARTLLDLNMKVQQLKKEYELEITSDSQSPKDDAANPE

SEQ ID NO: 3753 - protein, 392 aa, Homo sapiens
  Payload ID: 859;
  Gene Symbol: AGXT;
  Gene Name: alanine-glyoxylate aminotransferase;
  Uniprot ID:  P21549;
  ENSP ID: ENSP00000302620
MASHKLLVTPPKALLKPLSIPNQLLLGPGPSNLPPRIMAAGGLQMIGSMSKDMYQIMDEIKEGIQYVFQTRNPLTLVISGSGHCALEAALVNVLEPGDSFLVGANGIWGQRAVDIGERIGARVHPMTKDPGGHYTLQEVEEGLAQHKPVLLFLTHGESSTGVLQPLDGFGELCHRYKCLLLVDSVASLGGTPLYMDRQGIDILYSGSQKALNAPPGTSLISFSDKAKKKMYSRKTKPFSFYLDIKWLANFWGCDDQPRMYHHTIPVISLYSLRESLALIAEQGLENSWRQHREAAAYLHGRLQALGLQLFVKDPALRLPTVTTVAVPAGYDWRDIVSYVIDHFDIEIMGGLGPSTGKVLRIGLLGCNATRENVDRVTEALRAALQHCPKKKL

SEQ ID NO: 3754 - protein, 514 aa, Homo sapiens
  Payload ID: 860;
  Gene Symbol: AGXT2;
  Gene Name: alanine--glyoxylate aminotransferase 2;
  Uniprot ID:  Q9BYV1;
  ENSP ID: ENSP00000231420
MTLIWRHLLRPLCLVTSAPRILEMHPFLSLGTSRTSVTKLSLHTKPRMPPCDFMPERYQSLGYNRVLEIHKEHLSPVVTAYFQKPLLLHQGHMEWLFDAEGSRYLDFFSGIVTVSVGHCHPKVNAVAQKQLGRLWHTSTVFFHPPMHEYAEKLAALLPEPLKVIFLVNSGSEANELAMLMARAHSNNIDIISFRGAYHGCSPYTLGLTNVGTYKMELPGGTGCQPTMCPDVFRGPWGGSHCRDSPVQTIRKCSCAPDCCQAKDQYIEQFKDTLSTSVAKSIAGFFAEPIQGVNGVVQYPKGFLKEAFELVRARGGVCIADEVQTGFGRLGSHFWGFQTHDVLPDIVTMAKGIGNGFPMAAVITTPEIAKSLAKCLQHFNTFGGNPMACAIGSAVLEVIKEENLQENSQEVGTYMLLKFAKLRDEFEIVGDVRGKGLMIGIEMVQDKISCRPLPREEVNQIHEDCKHMGLLVGRGSIFSQTFRIAPSMCITKPEVDFAVEVFRSALTQHMERRAK

SEQ ID NO: 3755 - protein, 439 aa, Homo sapiens
  Payload ID: 860;
  Gene Symbol: AGXT2;
  Gene Name: alanine--glyoxylate aminotransferase 2;
  Uniprot ID:  Q9BYV1;
  ENSP ID: ENSP00000422799
MTLIWRHLLRPLCLVTSAPRILEMHPFLSLGTSRTSVTKLSLHTKPRMPPCDFMPERYQSLGYNRVLEIHKEHLSPVVTAYFQKPLLLHQGHMEWLFDAEGSRYLDFFSGIVTVSVGHCHPKVNAVAQKQLGRLWHTSTVFFHPPMHEYAEKLAALLPEPLKVIFLVNSGSEANELAMLMARAHSNNIDIISFRGAYHGCSPYTLGLTNVGTYKMELPGGTGCQPTMCPDVFRGPWGGSHCRDSPVQTIRKCSCAPDCCQAKDQYIEQFKDTLSTSVAKSIAGFFAEPIQGVNGVVQYPKGFLKEAFELVRARGGVCIADEVIKEENLQENSQEVGTYMLLKFAKLRDEFEIVGDVRGKGLMIGIEMVQDKISCRPLPREEVNQIHEDCKHMGLLVGRGSIFSQTFRIAPSMCITKPEVDFAVEVFRSALTQHMERRAK

SEQ ID NO: 3756 - protein, 439 aa, Homo sapiens; identical to SEQ ID NO: 3755
  Payload ID: 860;
  Gene Symbol: AGXT2;
  Gene Name: alanine--glyoxylate aminotransferase 2;
  Uniprot ID:  Q9BYV1;
  ENSP ID: ENSP00000479154

SEQ ID NO: 3757 - protein, 967 aa, Homo sapiens
  Payload ID: 861;
  Gene Symbol: ANPEP;
  Gene Name: alanyl (membrane) aminopeptidase;
  Uniprot ID:  P15144;
  ENSP ID: ENSP00000300060
MAKGFYISKSLGILGILLGVAAVCTIIALSVVYSQEKNKNANSSPVASTTPSASATTNPASATTLDQSKAWNRYRLPNTLKPDSYRVTLRPYLTPNDRGLYVFKGSSTVRFTCKEATDVIIIHSKKLNYTLSQGHRVVLRGVGGSQPPDIDKTELVEPTEYLVVHLKGSLVKDSQYEMDSEFEGELADDLAGFYRSEYMEGNVRKVVATTQMQAADARKSFPCFDEPAMKAEFNITLIHPKDLTALSNMLPKGPSTPLPEDPNWNVTEFHTTPKMSTYLLAFIVSEFDYVEKQASNGVLIRIWARPSAIAAGHGDYALNVTGPILNFFAGHYDTPYPLPKSDQIGLPDFNAGAMENWGLVTYRENSLLFDPLSSSSSNKERVVTVIAHELAHQWFGNLVTIEWWNDLWLNEGFASYVEYLGADYAEPTWNLKDLMVLNDVYRVMAVDALASSHPLSTPASEINTPAQISELFDAISYSKGASVLRMLSSFLSEDVFKQGLASYLHTFAYQNTIYLNLWDHLQEAVNNRSIQLPTTVRDIMNRWTLQMGFPVITVDTSTGTLSQEHFLLDPDSNVTRPSEFNYVWIVPITSIRDGRQQQDYWLIDVRAQNDLFSTSGNEWVLLNLNVTGYYRVNYDEENWRKIQTQLQRDHSAIPVINRAQIINDAFNLASAHKVPVTLALNNTLFLIEERQYMPWEAALSSLSYFKLMFDRSEVYGPMKNYLKKQVTPLFIHFRNNTNNWREIPENLMDQYSEVNAISTACSNGVPECEEMVSGLFKQWMENPNNNPIHPNLRSTVYCNAIAQGGEEEWDFAWEQFRNATLVNEADKLRAALACSKELWILNRYLSYTLNPDLIRKQDATSTIISITNNVIGQGLVWDFVQSNWKKLFNDYGGGSFSFSNLIQAVTRRFSTEYELQQLEQFKKDNEETGFGSGTRALEQALEKTKANIKWVKENKEVVLQWFTENSK

SEQ ID NO: 3758 - protein, 103 aa, Homo sapiens
  Payload ID: 861;
  Gene Symbol: ANPEP;
  Gene Name: alanyl (membrane) aminopeptidase;
  ENSP ID: ENSP00000452934
MAKGFYISKSLGILGILLGVAAVCTIIALSVVYSQEKNKNANSSPVASTTPSASATTNPASATTLDQSKAWNRYRLPNTLKPDSYRVTLRPYLTPNDRGLYVF

SEQ ID NO: 3759 - protein, 65 aa, Homo sapiens
  Payload ID: 861;
  Gene Symbol: ANPEP;
  Gene Name: alanyl (membrane) aminopeptidase;
  ENSP ID: ENSP00000453405
TLIHPKDLTALSNMLPKGPSTPLPEDPNWNVTEFHTTPKMSTYLLAFIVSEFDYVEKQASNGVLV

SEQ ID NO: 3760 - protein, 61 aa, Homo sapiens
  Payload ID: 861;
  Gene Symbol: ANPEP;
  Gene Name: alanyl (membrane) aminopeptidase;
  ENSP ID: ENSP00000453413
MAKGFYISKSLGILGILLGVAAVCTIIALSVVYSQEKNKNANSSPVASTTPSASATTNPAS

SEQ ID NO: 3761 - protein, 122 aa, Homo sapiens
  Payload ID: 861;
  Gene Symbol: ANPEP;
  Gene Name: alanyl (membrane) aminopeptidase;
  ENSP ID: ENSP00000453545
NDLWLNEGFASYVEYLGADYAEPTWNLKDLMVLNDVYRVMAVDALASSHPLSTPASEINTPAQISELFDAISYSKVQPAPRGARGRRAPQSSGCSPASCPRTYSSRAWRPTSTPLPTRTPST

SEQ ID NO: 3762 - protein, 968 aa, Homo sapiens
  Payload ID: 862;
  Gene Symbol: AARS;
  Gene Name: alanyl-tRNA synthetase;
  Uniprot ID:  P49588;
  ENSP ID: ENSP00000261772
MDSTLTASEIRQRFIDFFKRNEHTYVHSSATIPLDDPTLLFANAGMNQFKPIFLNTIDPSHPMAKLSRAANTQKCIRAGGKHNDLDDVGKDVYHHTFFEMLGSWSFGDYFKELACKMALELLTQEFGIPIERLYVTYFGGDEAAGLEADLECKQIWQNLGLDDTKILPGNMKDNFWEMGDTGPCGPCSEIHYDRIGGRDAAHLVNQDDPNVLEIWNLVFIQYNREADGILKPLPKKSIDTGMGLERLVSVLQNKMSNYDTDLFVPYFEAIQKGTGARPYTGKVGAEDADGIDMAYRVLADHARTITVALADGGRPDNTGRGYVLRRILRRAVRYAHEKLNASRGFFATLVDVVVQSLGDAFPELKKDPDMVKDIINEEEVQFLKTLSRGRRILDRKIQSLGDSKTIPGDTAWLLYDTYGFPVDLTGLIAEEKGLVVDMDGFEEERKLAQLKSQGKGAGGEDLIMLDIYAIEELRARGLEVTDDSPKYNYHLDSSGSYVFENTVATVMALRREKMFVEEVSTGQECGVVLDKTCFYAEQGGQIYDEGYLVKVDDSSEDKTEFTVKNAQVRGGYVLHIGTIYGDLKVGDQVWLFIDEPRRRPIMSNHTATHILNFALRSVLGEADQKGSLVAPDRLRFDFTAKGAMSTQQIKKAEEIANEMIEAAKAVYTQDCPLAAAKAIQGLRAVFDETYPDPVRVVSIGVPVSELLDDPSGPAGSLTSVEFCGGTHLRNSSHAGAFVIVTEEAIAKGIRRIVAVTGAEAQKALRKAESLKKCLSVMEAKVKAQTAPNKDVQREIADLGEALATAVIPQWQKDELRETLKSLKKVMDDLDRASKADVQKRVLEKTKQFIDSNPNQPLVILEMESGASAKALNEALKLFKMHSPQTSAMLFTVDNEAGKITCLCQVPQNAANRGLKASEWVQQVSGLMDGKGGGKDVSAQATGKNVGCLQEALQLATSFAQLRLGDVKN

SEQ ID NO: 3763 - protein, 280 aa, Homo sapiens
  Payload ID: 862;
  Gene Symbol: AARS;
  Gene Name: alanyl-tRNA synthetase;
  ENSP ID: ENSP00000455360
  MOD_RES (1)..(1): Any amino acid
XDSSEDKTEFTVKNAQVRGGYVLHIGTIYGDLKVGDQVWLFIDEPRRRPIMSNHTATHILNFALRSVLGEADQKGSLVAPDRLRFDFTAKGAMSTQQIKKAEEIANEMIEAAKAVYTQDCPLAAAKAIQGLRAVFDETYPDPVRVVSIGVPVSELLDDPSGPAGSLTSVEFCGGTHLRNSSHAGAFVIVTEEAIAKGIRRIVAVTGAEAQKALRKAESLKKCLSVMEAKVKAQTAPNKDVQREIADLGEPCSRDPMDPVLGPWTFPAAPSAASRRALPKH

SEQ ID NO: 3764 - protein, 985 aa, Homo sapiens
  Payload ID: 863;
  Gene Symbol: AARS2;
  Gene Name: alanyl-tRNA synthetase 2, mitochondrial;
  Uniprot ID:  Q5JTZ9;
  ENSP ID: ENSP00000244571
MAASVAAAARRLRRAIRRSPAWRGLSHRPLSSEPPAAKASAVRAAFLNFFRDRHGHRLVPSASVRPRGDPSLLFVNAGMNQFKPIFLGTVDPRSEMAGFRRVANSQKCVRAGGHHNDLEDVGRDLSHHTFFEMLGNWAFGGEYFKEEACNMAWELLTQVYGIPEERLWISYFDGDPKAGLDPDLETRDIWLSLGVPASRVLSFGPQENFWEMGDTGPCGPCTEIHYDLAGGVGAPQLVELWNLVFMQHNREADGSLQPLPQRHVDTGMGLERLVAVLQGKHSTYDTDLFSPLLNAIQQGCRAPPYLGRVGVADEGRTDTAYRVVADHIRTLSVCISDGIFPGMSGPPLVLRRILRRAVRFSMEILKAPPGFLGSLVPVVVETLGDAYPELQRNSAQIANLVSEDEAAFLASLERGRRIIDRTLRTLGPSDMFPAEVAWSLSLCGDLGLPLDMVELMLEEKGVQLDSAGLERLAQEEAQHRARQAEPVQKQGLWLDVHALGELQRQGVPPTDDSPKYNYSLRPSGSYEFGTCEAQVLQLYTEDGTAVASVGKGQRCGLLLDRTNFYAEQGGQASDRGYLVRAGQEDVLFPVARAQVCGGFILHEAVAPECLRLGDQVQLHVDEAWRLGCMAKHTATHLLNWALRQTLGPGTEQQGSHLNPEQLRLDVTTQTPLTPEQLRAVENTVQEAVGQDEAVYMEEVPLALTAQVPGLRSLDEVYPDPVRVVSVGVPVAHALDPASQAALQTSVELCCGTHLLRTGAVGDLVIIGDRQLSKGTTRLLAVTGEQAQQARELGQSLAQEVKAATERLSLGSRDVAEALRLSKDIGRLIEAVETAVMPQWQRRELLATVKMLQRRANTAIRKLQMGQAAKKTQELLERHSKGPLIVDTVSAESLSVLVKVVRQLCEQAPSTSVLLLSPQPMGKVLCACQVAQGAMPTFTAEAWALAVCSHMGGKAWGSRVVAQGTGSTTDLEAALSIAQTYALSQL

SEQ ID NO: 3765 - protein, 84 aa, Homo sapiens
  Payload ID: 864;
  Gene Symbol: AARSD1;
  Gene Name: alanyl-tRNA synthetase domain containing 1;
  ENSP ID: ENSP00000387415
MQQHSGQHLITAVADHLFKLKTTSWELGRFRSAIELDTPSMTAEQVAAIEQSVNEKIRDRLPVNVRELSLDDPEVEQVRWPGFA

SEQ ID NO: 3766 - protein, 140 aa, Homo sapiens
  Payload ID: 864;
  Gene Symbol: AARSD1;
  Gene Name: alanyl-tRNA synthetase domain containing 1;
  ENSP ID: ENSP00000400735
MQQHSGQHLITAVADHLFKLKTTSWELGRFRSAIELDTPSMTAEQVAAIEQSVNEKIRDRLPVNVRELSLDDPEVEQVSGRGLPDDHAGPIRVVNIEGVDSNMCCGTHVSNLSDLQVIKILGTEKGKKNRTNLIFLSGNR

SEQ ID NO: 3767 - protein, 412 aa, Homo sapiens
  Payload ID: 864;
  Gene Symbol: AARSD1;
  Gene Name: alanyl-tRNA synthetase domain containing 1;
  Uniprot ID:  Q9BTE6;
  ENSP ID: ENSP00000400870
MAFWCQRDSYAREFTTTVVSCCPAELQTEGSNGKKEVLSGFQVVLEDTVLFPEGGGQPDDRGTINDISVLRVTRRGEQADHFTQTPLDPGSQVLVRVDWERRFDHMQQHSGQHLITAVADHLFKLKTTSWELGRFRSAIELDTPSMTAEQVAAIEQSVNEKIRDRLPVNVRELSLDDPEVEQVSGRGLPDDHAGPIRVVNIEGVDSNMCCGTHVSNLSDLQVIKILGTEKGKKNRTNLIFLSGNRVLKWMERSHGTEKALTALLKCGAEDHVEAVKKLQNSTKILQKNNLNLLRDLAVHIAHSLRNSPDWGGVVILHRKEGDSEFMNIIANEIGSEETLLFLTVGDEKGGGLFLLAGPPASVETLGPRVAEVLEGKGAGKKGRFQGKATKMSRRMEAQALLQDYISTQSAKE

SEQ ID NO: 3768 - protein, 98 aa, Homo sapiens
  Payload ID: 864;
  Gene Symbol: AARSD1;
  Gene Name: alanyl-tRNA synthetase domain containing 1;
  ENSP ID: ENSP00000404894
MAFWCQRDSYAREFTTTVVSCCPAELQTEGSNGKKEVLSGFQVVLEDTVLFPEGGGQMVSCSVARLERSGVISAYCNLRLPGSSNSPASVSRVARTTA

SEQ ID NO: 3769 - protein, 79 aa, Homo sapiens
  Payload ID: 864;
  Gene Symbol: AARSD1;
  Gene Name: alanyl-tRNA synthetase domain containing 1;
  ENSP ID: ENSP00000467696
  MOD_RES (1)..(1): Any amino acid
XSYAREFTTTVVSCCPAELQTEGSNGKKEVLSGFQVVLEDTVLFPEGGGQAGAQRRDLGLLQSPSARFKQFPCLSLPSS

SEQ ID NO: 3770 - protein, 94 aa, Homo sapiens
  Payload ID: 864;
  Gene Symbol: AARSD1;
  Gene Name: alanyl-tRNA synthetase domain containing 1;
  ENSP ID: ENSP00000467714
  MOD_RES (1)..(1): Any amino acid
XGKKNRTNLIFLSGNRVLKWMERSHGTEKALTALLKCGAEDHVEAVKKLQNSTKILQKNNLNLLRDLAVHIAHSLRNSPDWGGVVILHRRPSCS

SEQ ID NO: 3771 - protein, 609 aa, Homo sapiens [sequence omitted]

SEQ ID NO: 3772 - protein, 494 aa, Homo sapiens
  Payload ID: 865;
  Gene Symbol: ALB;
  Gene Name: albumin;
  ENSP ID: ENSP00000384695
MKWVTFISLLFLFSSAYSRGVFRRDAHKSEVAHRFKDLGEENFKALYLYEIARRHPYFYAPELLFFAKRYKAAFTECCQAADKAACLLPKLDELRDEGKASSAKQRLKCASLQKFGERAFKAWAVARLSQRFPKAEFAEVSKLVTDLTKVHTECCHGDLLECADDRADLAKYICENQDSISSKLKECCEKPLLEKSHCIAEVENDEMPADLPSLAADFVESKDVCKNYAEAKDVFLGMFLYEYARRHPDYSVVLLLRLAKTYETTLEKCCAAADPHECYAKVFDEFKPLVEEPQNLIKQNCELFEQLGEYKFQNALLVRYTKKVPQVSTPTLVEVSRNLGKVGSKCCKHPEAKRMPCAEDYLSVVLNQLCVLHEKTPVSDRVTKCCTESLVNRRPCFSALEVDETYVPKEFNAETFTFHADICTLSEKERQIKKQTALVELVKHKPKATKEQLKAVMDDFAAFVEKCCKADDKETCFAEEGKKLVAASQAALGL

SEQ ID NO: 3773 - protein, 197 aa, Homo sapiens
  Payload ID: 865;
  Gene Symbol: ALB;
  Gene Name: albumin;
  ENSP ID: ENSP00000392541
GFEWGGQRRASHNSTFSAYSRGVFRRDAHKSEVAHRFKDLGEENFKALVLIAFAQYLQQCPFEDHVKLVNEVTEFAKTCVADESAENCDKSLHTLFGDKLCTVATLRETYGEMADCCAKQEPERNECFLQHKDDNPNLPRLVRPEVDVMCTAFHDNEETFLKKYLYEIARRHPYFYAPELLFFAKRYKAAFTECCQA

SEQ ID NO: 3774 - protein, 417 aa, Homo sapiens
  Payload ID: 865;
  Gene Symbol: ALB;
  Gene Name: albumin;
  ENSP ID: ENSP00000401820
MKWVTFISLLFLFSSAYSRGVFRRDAHKSEVAHRFKDLGEENFKALAVARLSQRFPKAEFAEVSKLVTDLTKVHTECCHGDLLECADDRADLAKYICENQDSISSKLKECCEKPLLEKSHCIAEVENDEMPADLPSLAADFVESKDVCKNYAEAKDVFLGMFLYEYARRHPDYSVVLLLRLAKTYETTLEKCCAAADPHECYAKVFDEFKPLVEEPQNLIKQNCELFEQLGEYKFQNALLVRYTKKVPQVSTPTLVEVSRNLGKVGSKCCKHPEAKRMPCAEDYLSVVLNQLCVLHEKTPVSDRVTKCCTESLVNRRPCFSALEVDETYVPKEFNAETFTFHADICTLSEKERQIKKQTALVELVKHKPKATKEQLKAVMDDFAAFVEKCCKADDKETCFAEEGKKLVAASQAALGL

SEQ ID NO: 3775 - protein, 459 aa, Homo sapiens
  Payload ID: 865;
  Gene Symbol: ALB;
  Gene Name: albumin;
  ENSP ID: ENSP00000421027
MSQLKIVTNHLYLYEIARRHPYFYAPELLFFAKRYKAAFTECCQAADKAACLLPKLDELRDEGKASSAKQRLKCASLQKFGERAFKAWAVARLSQRFPKAEFAEVSKLVTDLTKVHTECCHGDLLECADDRADLAKYICENQDSISSKLKECCEKPLLEKSHCIAEVENDEMPADLPSLAADFVESKDVCKNYAEAKDVFLGMFLYEYARRHPDYSVVLLLRLAKTYETTLEKCCAAADPHECYAKVFDEFKPLVEEPQNLIKQNCELFEQLGEYKFQNALLVRYTKKVPQVSTPTLVEVSRNLGKVGSKCCKHPEAKRMPCAEDYLSVVLNQLCVLHEKTPVSDRVTKCCTESLVNRRPCFSALEVDETYVPKEFNAETFTFHADICTLSEKERQIKKQTALVELVKHKPKATKEQLKAVMDDFAAFVEKCCKADDKETCFAEEGKKLVAASQAALGL

SEQ ID NO: 3776 - protein, 604 aa, Homo sapiens
  Payload ID: 865;
  Gene Symbol: ALB;
  Gene Name: albumin;
  ENSP ID: ENSP00000422784
MKWVTFISLLFLFSSAYSRGVFRRDAHKSEVAHRFKDLGEENFKALVLIAFAQYLQQCPFEDHVKLVNEVTEFAKTCVADESAENCDKSLHTLFGDKLCTVATLRETYGEMADCCAKQEPERNECFLQHKDDNPNLPRLVRPEVDVMCTAFHDNEETFLKKYLYEIARRHPYFYAPELLFFAKRYKAAFTECCQAADKAACLLPKLDELRDEGKASSAKQRLKCASLQKFGERAFKAWAVARLSQRFPKAEFAEVSKLVTDLTKVHTECCHGDLLECADDRADLAKYICENQDSISSKLKECCEKPLLEKSHCIAEVENDEMPADLPSLAADFVESKDVCKNYAEAKDVFLGMFLYEYARRHPDYSVVLLLRLAKTYETTLEKCCAAADPHECYAKVFDEFKPLVEEPQNLIKQNCELFEQLGEYKFQNALLVRYTKKVPQVSTPTLVEVSRNLGKVGSKCCKHPEAKRMPCAEDYLSVVLNQLCVLHEKTPVSDRVTKCCTESLVNRRPCFSALEVDETYVPKEFNAETFTFHADICTLSEKERQIKKQTALVELVKHKPKATKEQLKAVMDDFAAFVEKCCKADDKETCFAEEPTMRIRERK

SEQ ID NO: 3777 - protein, 105 aa, Homo sapiens
  Payload ID: 865;
  Gene Symbol: ALB;
  Gene Name: albumin;
  ENSP ID: ENSP00000423727
MKWVTFISLLFLFSSAYSRGVFRRDAHTYMKLPEDILTFMPRNSFSLLKGIKLLLQNVAKLLIKLPACCQSSMNFGMKGRLRLPNRDSSVPVSKNLEKELSKHGQ

SEQ ID NO: 3778 - protein, 454 aa, Homo sapiens
  Payload ID: 865;
  Gene Symbol: ALB;
  Gene Name: albumin;
  ENSP ID: ENSP00000426179
  MOD_RES (1)..(1): Any amino acid
XFSKFRYLYEIARRHPYFYAPELLFFAKRYKAAFTECCQAADKAACLLPKLDELRDEGKASSAKQRLKCASLQKFGERAFKAWAVARLSQRFPKAEFAEVSKLVTDLTKVHTECCHGDLLECADDRADLAKYICENQDSISSKLKECCEKPLLEKSHCIAEVENDEMPADLPSLAADFVESKDVCKNYAEAKDVFLGMFLYEYARRHPDYSVVLLLRLAKTYETTLEKCCAAADPHECYAKVFDEFKPLVEEPQNLIKQNCELFEQLGEYKFQNALLVRYTKKVPQVSTPTLVEVSRNLGKVGSKCCKHPEAKRMPCAEDYLSVVLNQLCVLHEKTPVSDRVTKCCTESLVNRRPCFSALEVDETYVPKEFNAETFTFHADICTLSEKERQIKKQTALVELVKHKPKATKEQLKAVMDDFAAFVEKCCKADDKETCFAEEGKKLVAASQAALGL

SEQ ID NO: 3779 - protein, 396 aa, Homo sapiens
  Payload ID: 865;
  Gene Symbol: ALB;
  Gene Name: albumin;
  ENSP ID: ENSP00000480485
MKWVTFISLLFLFSSAYSRGVFRRDAHKSEVAHRFKDLGEENFKALVLIAFAQYLQQCPFEDHVKLVNEVTEFAKTCVADESAENCDKSLHTLFGDKLCTVATLRETYGEMADCCAKQEPERNECFLQHKDDNPNLPRLVRPEVDVMCTAFHDNEETFLKKYTYETTLEKCCAAADPHECYAKVFDEFKPLVEEPQNLIKQNCELFEQLGEYKFQNALLVRYTKKVPQVSTPTLVEVSRNLGKVGSKCCKHPEAKRMPCAEDYLSVVLNQLCVLHEKTPVSDRVTKCCTESLVNRRPCFSALEVDETYVPKEFNAETFTFHADICTLSEKERQIKKQTALVELVKHKPKATKEQLKAVMDDFAAFVEKCCKADDKETCFAEEGKKLVAASQAALGL

SEQ ID NO: 3780 - protein, 396 aa, Homo sapiens
  Payload ID: 865;
  Gene Symbol: ALB;
  Gene Name: albumin;
  Uniprot ID:  P02768;
  ENSP ID: ENSP00000483421
MKWVTFISLLFLFSSAYSRGVFRRDAHKSEVAHRFKDLGEENFKALVLIAFAQYLQQCPFEDHVKLVNEVTEFAKTCVADESAENCDKSLHTLFGDKLCTVATLRETYGEMADCCAKQEPERNECFLQHKDDNPNLPRLVRPEVDVMCTAFHDNEETFLKKYLYETTLEKCCAAADPHECYAKVFDEFKPLVEEPQNLIKQNCELFEQLGEYKFQNALLVRYTKKVPQVSTPTLVEVSRNLGKVGSKCCKHPEAKRMPCAEDYLSVVLNQLCVLHEKTPVSDRVTKCCTESLVNRRPCFSALEVDETYVPKEFNAETFTFHADICTLSEKERQIKKQTALVELVKHKPKATKEQLKAVMDDFAAFVEKCCKADDKETCFAEEGKKLVAASQAALGL

SEQ ID NO: 3781 - protein, 375 aa, Homo sapiens
  Payload ID: 866;
  Gene Symbol: ADH1A;
  Gene Name: alcohol dehydrogenase 1A (class I), alpha polypeptide;
  Uniprot ID:  P07327;
  ENSP ID: ENSP00000209668
MSTAGKVIKCKAAVLWELKKPFSIEEVEVAPPKAHEVRIKMVAVGICGTDDHVVSGTMVTPLPVILGHEAAGIVESVGEGVTTVKPGDKVIPLAIPQCGKCRICKNPESNYCLKNDVSNPQGTLQDGTSRFTCRRKPIHHFLGISTFSQYTVVDENAVAKIDAASPLEKVCLIGCGFSTGYGSAVNVAKVTPGSTCAVFGLGGVGLSAIMGCKAAGAARIIAVDINKDKFAKAKELGATECINPQDYKKPIQEVLKEMTDGGVDFSFEVIGRLDTMMASLLCCHEACGTSVIVGVPPDSQNLSMNPMLLLTGRTWKGAILGGFKSKECVPKLVADFMAKKFSLDALITHVLPFEKINEGFDLLHSGKSIRTILMF

SEQ ID NO: 3782 - protein, 375 aa, Homo sapiens
  Payload ID: 867;
  Gene Symbol: ADH1B;
  Gene Name: alcohol dehydrogenase 1B (class I), beta polypeptide;
  Uniprot ID:  P00325;
  ENSP ID: ENSP00000306606
MSTAGKVIKCKAAVLWEVKKPFSIEDVEVAPPKAYEVRIKMVAVGICHTDDHVVSGNLVTPLPVILGHEAAGIVESVGEGVTTVKPGDKVIPLFTPQCGKCRVCKNPESNYCLKNDLGNPRGTLQDGTRRFTCRGKPIHHFLGTSTFSQYTVVDENAVAKIDAASPLEKVCLIGCGFSTGYGSAVNVAKVTPGSTCAVFGLGGVGLSAVMGCKAAGAARIIAVDINKDKFAKAKELGATECINPQDYKKPIQEVLKEMTDGGVDFSFEVIGRLDTMMASLLCCHEACGTSVIVGVPPASQNLSINPMLLLTGRTWKGAVYGGFKSKEGIPKLVADFMAKKFSLDALITHVLPFEKINEGFDLLHSGKSIRTVLTF

SEQ ID NO: 3783 - protein, 335 aa, Homo sapiens
  Payload ID: 867;
  Gene Symbol: ADH1B;
  Gene Name: alcohol dehydrogenase 1B (class I), beta polypeptide;
  ENSP ID: ENSP00000425998
MVAVGICHTDDHVVSGNLVTPLPVILGHEAAGIVESVGEGVTTVKPGDKVIPLFTPQCGKCRVCKNPESNYCLKNDLGNPRGTLQDGTRRFTCRGKPIHHFLGTSTFSQYTVVDENAVAKIDAASPLEKVCLIGCGFSTGYGSAVNVAKVTPGSTCAVFGLGGVGLSAVMGCKAAGAARIIAVDINKDKFAKAKELGATECINPQDYKKPIQEVLKEMTDGGVDFSFEVIGRLDTMMASLLCCHEACGTSVIVGVPPASQNLSINPMLLLTGRTWKGAVYGGFKSKEGIPKLVADFMAKKFSLDALITHVLPFEKINEGFDLLHSGKSIRTVLTF

SEQ ID NO: 3784 - protein, 335 aa, Homo sapiens; identical to SEQ ID NO: 3783
  Payload ID: 867;
  Gene Symbol: ADH1B;
  Gene Name: alcohol dehydrogenase 1B (class I), beta polypeptide;
  ENSP ID: ENSP00000486614

SEQ ID NO: 3785 - protein, 375 aa, Homo sapiens
  Payload ID: 868;
  Gene Symbol: ADH1C;
  Gene Name: alcohol dehydrogenase 1C (class I), gamma polypeptide;
  Uniprot ID:  P00326;
  ENSP ID: ENSP00000426083
MSTAGKVIKCKAAVLWELKKPFSIEEVEVAPPKAHEVRIKMVAAGICRSDEHVVSGNLVTPLPVILGHEAAGIVESVGEGVTTVKPGDKVIPLFTPQCGKCRICKNPESNYCLKNDLGNPRGTLQDGTRRFTCSGKPIHHFVGVSTFSQYTVVDENAVAKIDAASPLEKVCLIGCGFSTGYGSAVKVAKVTPGSTCAVFGLGGVGLSVVMGCKAAGAARIIAVDINKDKFAKAKELGATECINPQDYKKPIQEVLKEMTDGGVDFSFEVIGRLDTMMASLLCCHEACGTSVIVGVPPDSQNLSINPMLLLTGRTWKGAIFGGFKSKESVPKLVADFMAKKFSLDALITNILPFEKINEGFDLLRSGKSIRTVLTF

SEQ ID NO: 3786 - protein, 192 aa, Homo sapiens
  Payload ID: 868;
  Gene Symbol: ADH1C;
  Gene Name: alcohol dehydrogenase 1C (class I), gamma polypeptide;
  ENSP ID: ENSP00000478439
MVAAGICRSDEHVVSGNLVTPLPVILGHEAAGIVESVGEGVTTVKPGDKVIPLFTPQCGKCRICKNPESNYCLKNDLGNPRGTLQDGTRRFTCSGKPIHHFVGVSTFSQYTVVDENAVAKIDAASPLEKVCLIGCGFSTGYGSAVKVAKVTPGSTCAVFGLGGVGLSVVMGCKAAGAARIIAVDINKDKFAK

SEQ ID NO: 3787 - protein, 170 aa, Homo sapiens
  Payload ID: 868;
  Gene Symbol: ADH1C;
  Gene Name: alcohol dehydrogenase 1C (class I), gamma polypeptide;
  ENSP ID: ENSP00000478545
MSTAGKMVAAGICRSDEHVVSGNLVTPLPVILGHEAAGIVESVGEGVTTVKPGDKVIPLFTPQCGKCRICKNPESNYCLKNDLGNPRGTLQDGTRRFTCSGKPIHHFVGVSTFSQYTVVDENAVAKIDAASPLEKVCLIGCGFSTGYGSAVKVAKVTPGSTCAVFGLGGV

SEQ ID NO: 3788 - protein, 380 aa, Homo sapiens
  Payload ID: 869;
  Gene Symbol: ADH4;
  Gene Name: alcohol dehydrogenase 4 (class II), pi polypeptide;
  Uniprot ID:  P08319;
  ENSP ID: ENSP00000265512
MGTKGKVIKCKAAIAWEAGKPLCIEEVEVAPPKAHEVRIQIIATSLCHTDATVIDSKFEGLAFPVIVGHEAAGIVESIGPGVTNVKPGDKVIPLYAPLCRKCKFCLSPLTNLCGKISNLKSPASDQQLMEDKTSRFTCKGKPVYHFFGTSTFSQYTVVSDINLAKIDDDANLERVCLLGCGFSTGYGAAINNAKVTPGSTCAVFGLGGVGLSAVMGCKAAGASRIIGIDINSEKFVKAKALGATDCLNPRDLHKPIQEVIIELTKGGVDFALDCAGGSETMKAALDCTTAGWGSCTFIGVAAGSKGLTIFPEELIIGRTINGTFFGGWKSVDSIPKLVTDYKNKKFNLDALVTHTLPFDKISEAFDLMNQGKSVRTILIF

SEQ ID NO: 3789 - protein, 257 aa, Homo sapiens
  Payload ID: 869;
  Gene Symbol: ADH4;
  Gene Name: alcohol dehydrogenase 4 (class II), pi polypeptide;
  ENSP ID: ENSP00000423571
MLVRGPHFELQRCKTHLFSSNYLTQVIKCKAAIAWEAGKPLCIEEVEVAPPKAHEVRIQIIATSLCHTDATVIDSKFEGLAFPVIVGHEAAGIVESIGPGVTNVKPGDKVIPLYAPLCRKCKFCLSPLTNLCGKISNLKSPASDQQLMEDKTSRFTCKGKPVYHFFGTSTFSQYTVVSDINLAKIDDDANLERVCLLGCGFSTGYGAAINNAKVTPGSTCAVFGLGGVGLSAVMGCKAAGASRIIGIDINSEKFVKA

SEQ ID NO: 3790 - protein, 115 aa, Homo sapiens
  Payload ID: 869;
  Gene Symbol: ADH4;
  Gene Name: alcohol dehydrogenase 4 (class II), pi polypeptide;
  ENSP ID: ENSP00000424583
NLERVCLLGCGFSTGYGAAINNAKVTPGSTCAVFGLGGVGLSAVMGCKAAGASRIIGIDINSEKFVKAKALGATDCLNPRDLHKPIQEVIIELTKGGVDFALDCAGGSETMVGKV

SEQ ID NO: 3791 - protein, 399 aa, Homo sapiens
  Payload ID: 869;
  Gene Symbol: ADH4;
  Gene Name: alcohol dehydrogenase 4 (class II), pi polypeptide;
  Uniprot ID:  P08319;
  ENSP ID: ENSP00000424630
MLVRGPHFELQRCKTHLFSSNYLTQVIKCKAAIAWEAGKPLCIEEVEVAPPKAHEVRIQIIATSLCHTDATVIDSKFEGLAFPVIVGHEAAGIVESIGPGVTNVKPGDKVIPLYAPLCRKCKFCLSPLTNLCGKISNLKSPASDQQLMEDKTSRFTCKGKPVYHFFGTSTFSQYTVVSDINLAKIDDDANLERVCLLGCGFSTGYGAAINNAKVTPGSTCAVFGLGGVGLSAVMGCKAAGASRIIGIDINSEKFVKAKALGATDCLNPRDLHKPIQEVIIELTKGGVDFALDCAGGSETMKAALDCTTAGWGSCTFIGVAAGSKGLTIFPEELIIGRTINGTFFGGWKSVDSIPKLVTDYKNKKFNLDALVTHTLPFDKISEAFDLMNQGKSVRTILIF

SEQ ID NO: 3792 - protein, 399 aa, Homo sapiens; identical to SEQ ID NO: 3791
  Payload ID: 869;
  Gene Symbol: ADH4;
  Gene Name: alcohol dehydrogenase 4 (class II), pi polypeptide;
  Uniprot ID:  P08319;
  ENSP ID: ENSP00000425416

SEQ ID NO: 3793 - protein, 36 aa, Homo sapiens
  Payload ID: 869;
  Gene Symbol: ADH4;
  Gene Name: alcohol dehydrogenase 4 (class II), pi polypeptide;
  ENSP ID: ENSP00000426667
MLVRGPHFELQRCKTHLFSSNYLTQREKLETLYQGY

SEQ ID NO: 3794 - protein, 36 aa, Homo sapiens; identical to SEQ ID NO: 3793
  Payload ID: 869;
  Gene Symbol: ADH4;
  Gene Name: alcohol dehydrogenase 4 (class II), pi polypeptide;
  ENSP ID: ENSP00000427261

SEQ ID NO: 3795 - protein, 206 aa, Homo sapiens
  Payload ID: 869;
  Gene Symbol: ADH4;
  Gene Name: alcohol dehydrogenase 4 (class II), pi polypeptide;
  ENSP ID: ENSP00000427525
MGTKGKVIKCKAAIAWEAGKPLCIEEVEVAPPKAHEVRIQIIATSLCHTDATVIDSKFEGLAFPVIVGHEAAGIVESIGPGVTNVKPGDKVIPLYAPLCRKCKFCLSPLTNLCGKIRFTCKGKPVYHFFGTSTFSQYTVVSDINLAKIDDDANLERVCLLGCGFSTGYGAAINNAKVTPGSTCAVFGLGGVGLSAVMGCKAAGASR

SEQ ID NO: 3796 - protein, 391 aa, Homo sapiens
  Payload ID: 869;
  Gene Symbol: ADH4;
  Gene Name: alcohol dehydrogenase 4 (class II), pi polypeptide;
  ENSP ID: ENSP00000486450
MGTKGKVIKCKAAIAWEAGKPLCIEEVEVAPPKAHEVRIQIIATSLCHTDATVIDSKFEGLAFPVIVGHEAAGIVESIGPGVTNVKPGDKVIPLYAPLCRKCKFCLSPLTNLCGKISNLKSPASDQQLMEDKTSRFTCKGKPVYHFFGTSTFSQYTVVSDINLAKIDDDANLERVCLLGCGFSTGYGAAINNAKVTPGSTCAVFGLGGVGLSAVMGCKAAGASRIIGIDINSEKFVKAKALGATDCLNPRDLHKPIQEVIIELTKGGVDFALDCAGGSETMKAALDCTTAGWGSCTFIGVAAGSKGLTIFPEELIIGRTINGTFFGGWKSVDSIPKLVTDYKNKKFNLDALVTHTLPFDKISEAFDLMNQGKSVRTILIFRCQEQFRILSD

SEQ ID NO: 3797 - protein, 374 aa, Homo sapiens
  Payload ID: 870;
  Gene Symbol: ADH5;
  Gene Name: alcohol dehydrogenase 5 (class III), chi polypeptide;
  Uniprot ID:  P11766;
  ENSP ID: ENSP00000296412
MANEVIKCKAAVAWEAGKPLSIEEIEVAPPKAHEVRIKIIATAVCHTDAYTLSGADPEGCFPVILGHEGAGIVESVGEGVTKLKAGDTVIPLYIPQCGECKFCLNPKTNLCQKIRVTQGKGLMPDGTSRFTCKGKTILHYMGTSTFSEYTVVADISVAKIDPLAPLDKVCLLGCGISTGYGAAVNTAKLEPGSVCAVFGLGGVGLAVIMGCKVAGASRIIGVDINKDKFARAKEFGATECINPQDFSKPIQEVLIEMTDGGVDYSFECIGNVKVMRAALEACHKGWGVSVVVGVAASGEEIATRPFQLVTGRTWKGTAFGGWKSVESVPKLVSEYMSKKIKVDEFVTHNLSFDEINKAFELMHSGKSIRTVVKI

SEQ ID NO: 3798 - protein, 115 aa, Homo sapiens
  Payload ID: 870;
  Gene Symbol: ADH5;
  Gene Name: alcohol dehydrogenase 5 (class III), chi polypeptide;
  ENSP ID: ENSP00000421556
MANEVIKCKAAVAWEAGKPLSIEEIEVAPPKAHEVRIKIIATAVCHTDAYTLSGADPEGCFPVILGHEGAGIVESVGEGVTKLKAGDTVIPLYIPQCGECKFCLNPKTNLCQKIR

SEQ ID NO: 3799 - protein, 95 aa, Homo sapiens
  Payload ID: 870;
  Gene Symbol: ADH5;
  Gene Name: alcohol dehydrogenase 5 (class III), chi polypeptide;
  ENSP ID: ENSP00000422119
MANEVIKCKAAVAWEAGKPLSIEEIEVAPPKAHEVRIKIIATAVCHTDAYTLSGADPEGCFPVILGHEGAGIVESVGEGVTKLKAVWRMQILSKS

SEQ ID NO: 3800 - protein, 56 aa, Homo sapiens
  Payload ID: 870;
  Gene Symbol: ADH5;
  Gene Name: alcohol dehydrogenase 5 (class III), chi polypeptide;
  ENSP ID: ENSP00000424650
MANEVIKCKAAVAWEAGKPLSIEEIEVAPPKAHEVRIKVTLSSHFTSHSVENANFV

SEQ ID NO: 3801 - protein, 15 aa, Homo sapiens
  Payload ID: 870;
  Gene Symbol: ADH5;
  Gene Name: alcohol dehydrogenase 5 (class III), chi polypeptide;
  ENSP ID: ENSP00000427026
MANEFCTKPVVFRTA

SEQ ID NO: 3802 - protein, 262 aa, Homo sapiens
  Payload ID: 870;
  Gene Symbol: ADH5;
  Gene Name: alcohol dehydrogenase 5 (class III), chi polypeptide;
  ENSP ID: ENSP00000427049
VIKCKAAVAWEAGKPLSIEEIEVAPPKAHEVRIKIIATAVCHTDAYTLSGADPEGCFPVILGHEGAGIVESVGDTVIPLYIPQCGECKFCLNPKTNLCQKIRVTQGKGLMPDGTSRFTCKGKTILHYMGTSTFSEYTVVADISVAKIDPLAPLDKVCLLGCGISTGYGAAVNTAKLEPGSVCAVFGLGGVGLAVIMGCKVAGASRIIGVDINKDKFARAKEFGATECINPQDFSKPIQEVLIEMTDGGVDYSFECIGNVKVM

SEQ ID NO: 3803 - protein, 56 aa, Homo sapiens; identical to SEQ ID NO: 3800
  Payload ID: 870;
  Gene Symbol: ADH5;
  Gene Name: alcohol dehydrogenase 5 (class III), chi polypeptide;
  ENSP ID: ENSP00000487496

SEQ ID NO: 3804 - protein, 368 aa, Homo sapiens
  Payload ID: 871;
  Gene Symbol: ADH6;
  Gene Name: alcohol dehydrogenase 6 (class V);
  Uniprot ID:  P28332;
  ENSP ID: ENSP00000237653
MSTTGQVIRCKAAILWKPGAPFSIEEVEVAPPKAKEVRIKVVATGLCGTEMKVLGSKHLDLLYPTILGHEGAGIVESIGEGVSTVKPGDKVITLFLPQCGECTSCLNSEGNFCIQFKQSKTQLMSDGTSRFTCKGKSIYHFGNTSTFCEYTVIKEISVAKIDAVAPLEKVCLISCGFSTGFGAAINTAKVTPGSTCAVFGLGGVGLSVVMGCKAAGAARIIGVDVNKEKFKKAQELGATECLNPQDLKKPIQEVLFDMTDAGIDFCFEAIGNLDVLAAALASCNESYGVCVVVGVLPASVQLKISGQLFFSGRSLKGSVFGGWKSRQHIPKLVADYMAEKLNLDPLITHTLNLDKINEAVELMKTGKW

SEQ ID NO: 3805 - protein, 295 aa, Homo sapiens
  Payload ID: 871;
  Gene Symbol: ADH6;
  Gene Name: alcohol dehydrogenase 6 (class V);
  ENSP ID: ENSP00000378358
MSTTGQVIRCKAAILWKPGAPFSIEEVEVAPPKAKEVRIKVVATGLCGTEMKVLGSKHLDLLYPTILGHEGAGIVESIGEGVSTVKPGDKVITLFLPQCGECTSCLNSEGNFCIQFKQSKTQLMSDGTSRFTCKGKSIYHFGNTSTFCEYTVIKEISVAKIDAVAPLEKVCLISCGFSTGFGAAINTAKVTPGSTCAVFGLGGVGLSVVMGCKAAGAARIIGVDVNKEKFKKAQELGATECLNPQDLKKPIQEVLFDMTDAGIDFCFEAIGNLDVLAGRADSTSLNWLLIIWQRS

SEQ ID NO: 3806 - protein, 375 aa, Homo sapiens
  Payload ID: 871;
  Gene Symbol: ADH6;
  Gene Name: alcohol dehydrogenase 6 (class V);
  ENSP ID: ENSP00000378359
MSTTGQVIRCKAAILWKPGAPFSIEEVEVAPPKAKEVRIKVVATGLCGTEMKVLGSKHLDLLYPTILGHEGAGIVESIGEGVSTVKPGDKVITLFLPQCGECTSCLNSEGNFCIQFKQSKTQLMSDGTSRFTCKGKSIYHFGNTSTFCEYTVIKEISVAKIDAVAPLEKVCLISCGFSTGFGAAINTAKVTPGSTCAVFGLGGVGLSVVMGCKAAGAARIIGVDVNKEKFKKAQELGATECLNPQDLKKPIQEVLFDMTDAGIDFCFEAIGNLDVLAAALASCNESYGVCVVVGVLPASVQLKISGQLFFSGRSLKGSVFGGWKSRQHIPKLVADYMAEKLNLDPLITHTLNLDKINEAVELMKTGKCIRCILLL

SEQ ID NO: 3807 - protein, 68 aa, Homo sapiens
  Payload ID: 871;
  Gene Symbol: ADH6;
  Gene Name: alcohol dehydrogenase 6 (class V);
  ENSP ID: ENSP00000422124
EKFKKAQELGATECLNPQDLKKPIQEVLFDMTDAGIDFCFEAIGNLDVLAGRADSTSLNWLLIIWQRS

SEQ ID NO: 3808 - protein, 58 aa, Homo sapiens
  Payload ID: 871;
  Gene Symbol: ADH6;
  Gene Name: alcohol dehydrogenase 6 (class V);
  ENSP ID: ENSP00000425275
MSTTGQVIRCKAAILWKPGAPFSIEEVEVAPPKAKEVRIKVTKLSHSFCHSVENVPLA

SEQ ID NO: 3809 - protein, 257 aa, Homo sapiens
  Payload ID: 871;
  Gene Symbol: ADH6;
  Gene Name: alcohol dehydrogenase 6 (class V);
  ENSP ID: ENSP00000426187
MSTTGQVIRCKAAILWKPGAPFSIEEVEVAPPKAKEVRIKVVATGLCGTEMKVLGSKHLDLLYPTILGHEGAGIVESIGEGVSTVKPVIKEISVAKIDAVAPLEKVCLISCGFSTGFGAAINTAKVTPGSTCAVFGLGGVGLSVVMGCKAAGAARIIGVDVNKEKFKKAQELGATECLNPQDLKKPIQEVLFDMTDAGIDFCFEAIGNLDVLAAALASCNESYGVCVVVGVLPASVQLKISGQLFFSGRSLKGSVFG

SEQ ID NO: 3810 - protein, 386 aa, Homo sapiens
  Payload ID: 872;
  Gene Symbol: ADH7;
  Gene Name: alcohol dehydrogenase 7 (class IV), mu or sigma polypeptide;
  Uniprot ID:  P40394;
  ENSP ID: ENSP00000209665
MFAEIQIQDKDRMGTAGKVIKCKAAVLWEQKQPFSIEEIEVAPPKTKEVRIKILATGICRTDDHVIKGTMVSKFPVIVGHEATGIVESIGEGVTTVKPGDKVIPLFLPQCRECNACRNPDGNLCIRSDITGRGVLADGTTRFTCKGKPVHHFMNTSTFTEYTVVDESSVAKIDDAAPPEKVCLIGCGFSTGYGAAVKTGKVKPGSTCVVFGLGGVGLSVIMGCKSAGASRIIGIDLNKDKFEKAMAVGATECISPKDSTKPISEVLSEMTGNNVGYTFEVIGHLETMIDALASCHMNYGTSVVVGVPPSAKMLTYDPMLLFTGRTWKGCVFGGLKSRDDVPKLVTEFLAKKFDLDQLITHVLPFKKISEGFELLNSGQSIRTVLTF

SEQ ID NO: 3811 - protein, 374 aa, Homo sapiens
  Payload ID: 872;
  Gene Symbol: ADH7;
  Gene Name: alcohol dehydrogenase 7 (class IV), mu or sigma polypeptide;
  ENSP ID: ENSP00000414254
MGTAGKVIKCKAAVLWEQKQPFSIEEIEVAPPKTKEVRIKILATGICRTDDHVIKGTMVSKFPVIVGHEATGIVESIGEGVTTVKPGDKVIPLFLPQCRECNACRNPDGNLCIRSDITGRGVLADGTTRFTCKGKPVHHFMNTSTFTEYTVVDESSVAKIDDAAPPEKVCLIGCGFSTGYGAAVKTGKVKPGSTCVVFGLGGVGLSVIMGCKSAGASRIIGIDLNKDKFEKAMAVGATECISPKDSTKPISEVLSEMTGNNVGYTFEVIGHLETMIDALASCHMNYGTSVVVGVPPSAKMLTYDPMLLFTGRTWKGCVFGGLKSRDDVPKLVTEFLAKKFDLDQLITHVLPFKKISEGFELLNSGQSIRTVLTF

SEQ ID NO: 3812 - protein, 394 aa, Homo sapiens
  Payload ID: 872;
  Gene Symbol: ADH7;
  Gene Name: alcohol dehydrogenase 7 (class IV), mu or sigma polypeptide;
  Uniprot ID:  P40394;
  ENSP ID: ENSP00000420269
MKCLVSRHTVRETLDMVFQRMSVEAGVIKCKAAVLWEQKQPFSIEEIEVAPPKTKEVRIKILATGICRTDDHVIKGTMVSKFPVIVGHEATGIVESIGEGVTTVKPGDKVIPLFLPQCRECNACRNPDGNLCIRSDITGRGVLADGTTRFTCKGKPVHHFMNTSTFTEYTVVDESSVAKIDDAAPPEKVCLIGCGFSTGYGAAVKTGKVKPGSTCVVFGLGGVGLSVIMGCKSAGASRIIGIDLNKDKFEKAMAVGATECISPKDSTKPISEVLSEMTGNNVGYTFEVIGHLETMIDALASCHMNYGTSVVVGVPPSAKMLTYDPMLLFTGRTWKGCVFGGLKSRDDVPKLVTEFLAKKFDLDQLITHVLPFKKISEGFELLNSGQSIRTVLTF

SEQ ID NO: 3813 - protein, 107 aa, Homo sapiens
  Payload ID: 872;
  Gene Symbol: ADH7;
  Gene Name: alcohol dehydrogenase 7 (class IV), mu or sigma polypeptide;
  ENSP ID: ENSP00000420300
MVSKFPVIVGHEATGIVESIGEGVTTVKPGDKVIPLFLPQCRECNACRNPDGNLCIRSDITGRGVLADGTTRFTCKGKPVHHFMNTSTFTEYTVVDESSVAKIDDAA

SEQ ID NO: 3814 - protein, 317 aa, Homo sapiens
  Payload ID: 872;
  Gene Symbol: ADH7;
  Gene Name: alcohol dehydrogenase 7 (class IV), mu or sigma polypeptide;
  ENSP ID: ENSP00000420613
MVSKFPVIVGHEATGIVESIGEGVTTVKPGDKVIPLFLPQCRECNACRNPDGNLCIRSDITGRGVLADGTTRFTCKGKPVHHFMNTSTFTEYTVVDESSVAKIDDAAPPEKVCLIGCGFSTGYGAAVKTGKVKPGSTCVVFGLGGVGLSVIMGCKSAGASRIIGIDLNKDKFEKAMAVGATECISPKDSTKPISEVLSEMTGNNVGYTFEVIGHLETMIDALASCHMNYGTSVVVGVPPSAKMLTYDPMLLFTGRTWKGCVFGGLKSRDDVPKLVTEFLAKKFDLDQLITHVLPFKKISEGFELLNSGQSIRTVLTF

SEQ ID NO: 3815 - protein, 38 aa, Homo sapiens
  Payload ID: 873;
  Gene Symbol: ADHFE1;
  Gene Name: alcohol dehydrogenase, iron containing, 1;
  ENSP ID: ENSP00000276576
MAAAARARVAYLLRQLQRAACQCPTHSHTYSQDGCFKY

SEQ ID NO: 3816 - protein, 126 aa, Homo sapiens
  Payload ID: 873;
  Gene Symbol: ADHFE1;
  Gene Name: alcohol dehydrogenase, iron containing, 1;
  ENSP ID: ENSP00000379864
MAAAARARVAYLLRQLQRAACQCPTHSHTYSQAPGLSPSGKTTDYAFEMAVSNIRYGAAVTKEVGMDLKNMGAKNVCLMTDKNLSKLPPVQVAMDSLVKNGIPFTVYDNVRVEPTDSSANYLRNRE

SEQ ID NO: 3817 - protein, 467 aa, Homo sapiens
  Payload ID: 873;
  Gene Symbol: ADHFE1;
  Gene Name: alcohol dehydrogenase, iron containing, 1;
  Uniprot ID:  Q8IWW8;
  ENSP ID: ENSP00000379865
MAAAARARVAYLLRQLQRAACQCPTHSHTYSQAPGLSPSGKTTDYAFEMAVSNIRYGAAVTKEVGMDLKNMGAKNVCLMTDKNLSKLPPVQVAMDSLVKNGIPFTVYDNVRVEPTDSSFMEAIEFAQKGAFDAYVAVGGGSTMDTCKAANLYASSPHSDFLDYVSAPIGKGKPVSVPLKPLIAVPTTSGTGSETTGVAIFDYEHLKVKIGITSRAIKPTLGLIDPLHTLHMPARVVANSGFDVLCHALESYTTLPYHLRSPCPSNPITRPAYQGSNPISDIWAIHALRIVAKYLKRAVRNPDDLEARSHMHLASAFAGIGFGNAGVHLCHGMSYPISGLVKMYKAKDYNVDHPLVPHGLSVVLTSPAVFTFTAQMFPERHLEMAEILGADTRTARIQDAGLVLADTLRKFLFDLDVDDGLAAVGYSKADIPALVKGTLPQERVTKLAPCPQSEEDLAALFEASMKLY

SEQ ID NO: 3818 - protein, 131 aa, Homo sapiens
  Payload ID: 873;
  Gene Symbol: ADHFE1;
  Gene Name: alcohol dehydrogenase, iron containing, 1;
  ENSP ID: ENSP00000387956
MAAAARARVAYLLRQLQRAACQCPTHSHTYSQAPGLSPSGKTTDYAFEMAVSNIRYGAAVTKEVGMDLKNMGAKNVCLMTDKNLSKLPPVQVAMDSLVKNGIPFTVYDNVRVEPTDSRHHFESHQTHTGTD

SEQ ID NO: 3819 - protein, 34 aa, Homo sapiens
  Payload ID: 873;
  Gene Symbol: ADHFE1;
  Gene Name: alcohol dehydrogenase, iron containing, 1;
  ENSP ID: ENSP00000392040
MAAAARARVAYLLRQLQRAAPWTFTFWENNRLCL

SEQ ID NO: 3820 - protein, 34 aa, Homo sapiens; identical to SEQ ID NO: 3819
  Payload ID: 873;
  Gene Symbol: ADHFE1;
  Gene Name: alcohol dehydrogenase, iron containing, 1;
  ENSP ID: ENSP00000392925

SEQ ID NO: 3821 - protein, 38 aa, Homo sapiens; identical to SEQ ID NO: 3815
  Payload ID: 873;
  Gene Symbol: ADHFE1;
  Gene Name: alcohol dehydrogenase, iron containing, 1;
  ENSP ID: ENSP00000406905

SEQ ID NO: 3822 - protein, 419 aa, Homo sapiens
  Payload ID: 873;
  Gene Symbol: ADHFE1;
  Gene Name: alcohol dehydrogenase, iron containing, 1;
  Uniprot ID:  Q8IWW8;
  ENSP ID: ENSP00000407115
MAVSNIRYGAAVTKEVGMDLKNMGAKNVCLMTDKNLSKLPPVQVAMDSLVKNGIPFTVYDNVRVEPTDSSFMEAIEFAQKGAFDAYVAVGGGSTMDTCKAANLYASSPHSDFLDYVSAPIGKGKPVSVPLKPLIAVPTTSGTGSETTGVAIFDYEHLKVKIGITSRAIKPTLGLIDPLHTLHMPARVVANSGFDVLCHALESYTTLPYHLRSPCPSNPITRPAYQGSNPISDIWAIHALRIVAKYLKRAVRNPDDLEARSHMHLASAFAGIGFGNAGVHLCHGMSYPISGLVKMYKAKDYNVDHPLVPHGLSVVLTSPAVFTFTAQMFPERHLEMAEILGADTRTARIQDAGLVLADTLRKFLFDLDVDDGLAAVGYSKADIPALVKGTLPQERVTKLAPCPQSEEDLAALFEASMKLY

SEQ ID NO: 3823 - protein, 35 aa, Homo sapiens
  Payload ID: 873;
  Gene Symbol: ADHFE1;
  Gene Name: alcohol dehydrogenase, iron containing, 1;
  ENSP ID: ENSP00000409714
MAAAARARVAYLLRQLQRAAWLFQILDMEQQLQRK

SEQ ID NO: 3824 - protein, 303 aa, Homo sapiens
  Payload ID: 873;
  Gene Symbol: ADHFE1;
  Gene Name: alcohol dehydrogenase, iron containing, 1;
  Uniprot ID:  Q8IWW8;
  ENSP ID: ENSP00000410883
MAAAARARVAYLLRQLQRAACQCPTHSHTYSQAPGLSPSGKTTDYAFEMAVSNIRYGAAVTKEVGMDLKNMGAKNVCLMTDKNLSKLPPVQVAMDSLVKNGIPFTVYDNVRVEPTDSSFMEAIEFAQKGAFDAYVAVGGGSTMDTCKAANLYASSPHSDFLDYVSAPIGKGKPVSVPLKPLIAVPTTSGTGSETTGVAIFDYEHLKVKIGITSRAIKPTLGLIDPLHTLHMPARVVANSGFDVLCHALESYTTLPYHLRSPCPSNPITRPAYQGSNPISDIWAIHALRIVAKYLKRAVNSTDK

SEQ ID NO: 3825 - protein, 35 aa, Homo sapiens; identical to SEQ ID NO: 3823
  Payload ID: 873;
  Gene Symbol: ADHFE1;
  Gene Name: alcohol dehydrogenase, iron containing, 1;
  ENSP ID: ENSP00000416450

SEQ ID NO: 3826 - protein, 88 aa, Homo sapiens
  Payload ID: 873;
  Gene Symbol: ADHFE1;
  Gene Name: alcohol dehydrogenase, iron containing, 1;
  ENSP ID: ENSP00000428055
MDLKNMGAKNVCLMTDKNLSKLPPVQVAMDSLVKNGIPFTVYDNVRVEPTDSSFMEAIEFAQKGAFDAYVAVGGGSTMDTCKAANLYA

SEQ ID NO: 3827 - protein, 501 aa, Homo sapiens
  Payload ID: 874;
  Gene Symbol: ALDH1A1;
  Gene Name: aldehyde dehydrogenase 1 family, member A1;
  Uniprot ID:  P00352;
  ENSP ID: ENSP00000297785
MSSSGTPDLPVLLTDLKIQYTKIFINNEWHDSVSGKKFPVFNPATEEELCQVEEGDKEDVDKAVKAARQAFQIGSPWRTMDASERGRLLYKLADLIERDRLLLATMESMNGGKLYSNAYLNDLAGCIKTLRYCAGWADKIQGRTIPIDGNFFTYTRHEPIGVCGQIIPWNFPLVMLIWKIGPALSCGNTVVVKPAEQTPLTALHVASLIKEAGFPPGVVNIVPGYGPTAGAAISSHMDIDKVAFTGSTEVGKLIKEAAGKSNLKRVTLELGGKSPCIVLADADLDNAVEFAHHGVFYHQGQCCIAASRIFVEESIYDEFVRRSVERAKKYILGNPLTPGVTQGPQIDKEQYDKILDLIESGKKEGAKLECGGGPWGNKGYFVQPTVFSNVTDEMRIAKEEIFGPVQQIMKFKSLDDVIKRANNTFYGLSAGVFTKDIDKAITISSALQAGTVWVNCYGVVSAQCPFGGFKMSGNGRELGEYGFHEYTEVKTVTVKISQKNS

SEQ ID NO: 3828 - protein, 230 aa, Homo sapiens
  Payload ID: 874;
  Gene Symbol: ALDH1A1;
  Gene Name: aldehyde dehydrogenase 1 family, member A1;
  ENSP ID: ENSP00000366138
MSSSGTPDLPVLLTDLKIQYTKIFINNEWHDSVSGKKFPVFNPATEEELCQVEEGDKEDVDKAVKAARQAFQIGSPWRTMDASERGRLLYKLADLIERDRLLLATMESMNGGKLYSNAYLNDLAGCIKTLRYCAGWADKIQGRTIPIDGNFFTYTRHEPIGVCGQIIPWNFPLVMLIWKIGPALSCGNTVVVKPAEQTPLTALHVASLIKEAGFPPGVVNIVPGYGASVV

SEQ ID NO: 3829 - protein, 238 aa, Homo sapiens
  Payload ID: 874;
  Gene Symbol: ALDH1A1;
  Gene Name: aldehyde dehydrogenase 1 family, member A1;
  ENSP ID: ENSP00000388026
MSSSGTPDLPVLLTDLKIQYTKIFINNEWHDSVSGKKFPVFNPATEEELCQVEEGDKEDVDKAVKAARQAFQIGSPWRTMDASERGRLLYKLADLIERDRLLLATMESMNGGKLYSNAYLNDLAGCIKTLRYCAGWADKIQGRTIPIDGNFFTYTRHEPIGVCGQIIPWNFPLVMLIWKIGPALSCGNTVVVKPAEQTPLTALHVASLIKEAGFPPGVVNIVPGYGPTAGAAISSHMD

SEQ ID NO: 3830 - protein, 203 aa, Homo sapiens
  Payload ID: 874;
  Gene Symbol: ALDH1A1;
  Gene Name: aldehyde dehydrogenase 1 family, member A1;
  ENSP ID: ENSP00000401361
MSSSGTPDLPVLLTDLKIQYTKIFINNEWHDSVSGKKFPVFNPATEEELCQVEEGDKEDVDKAVKAARQAFQIGSPWRTMDASERGRLLYKLADLIERDRLLLATMESMNGGKLYSNAYLNDLAGCIKTLRYCAGWADKIQGRTIPIDGNFFTYTRHEPIGVCGQIIPWNFPLVMLIWKIGPALSCGNTVVVKPAEQTPLTAL

SEQ ID NO: 3831 - protein, 518 aa, Homo sapiens
  Payload ID: 875;
  Gene Symbol: ALDH1A2;
  Gene Name: aldehyde dehydrogenase 1 family, member A2;
  Uniprot ID:  O94788;
  ENSP ID: ENSP00000249750
MTSSKIEMPGEVKADPAALMASLHLLPSPTPNLEIKYTKIFINNEWQNSESGRVFPVYNPATGEQVCEVQEADKADIDKAVQAARLAFSLGSVWRRMDASERGRLLDKLADLVERDRAVLATMESLNGGKPFLQAFYVDLQGVIKTFRYYAGWADKIHGMTIPVDGDYFTFTRHEPIGVCGQIIPWNFPLLMFAWKIAPALCCGNTVVIKPAEQTPLSALYMGALIKEAGFPPGVINILPGYGPTAGAAIASHIGIDKIAFTGSTEVGKLIQEAAGRSNLKRVTLELGGKSPNIIFADADLDYAVEQAHQGVFFNQGQCCTAGSRIFVEESIYEEFVRRSVERAKRRVVGSPFDPTTEQGPQIDKKQYNKILELIQSGVAEGAKLECGGKGLGRKGFFIEPTVFSNVTDDMRIAKEEIFGPVQEILRFKTMDEVIERANNSDFGLVAAVFTNDINKALTVSSAMQAGTVWINCYNALNAQSPFGGFKMSGNGREMGEFGLREYSEVKTVTVKIPQKNS

SEQ ID NO: 3832 - protein, 480 aa, Homo sapiens
  Payload ID: 875;
  Gene Symbol: ALDH1A2;
  Gene Name: aldehyde dehydrogenase 1 family, member A2;
  Uniprot ID:  O94788;
  ENSP ID: ENSP00000309623
MTSSKIEMPGEVKADPAALMASLHLLPSPTPNLEIKYTKIFINNEWQNSESGRVFPVYNPATGEQVCEVQEADKADIDKAVQAARLAFSLGSVWRRMDASERGRLLDKLADLVERDRAVLATMESLNGGKPFLQAFYVDLQGVIKTFRYYAGWADKIHGMTIPVDGDYFTFTRHEPIGVCGQIIPWNFPLLMFAWKIAPALCCGNTVVIKPAEQTPLSALYMGALIKEVGKLIQEAAGRSNLKRVTLELGGKSPNIIFADADLDYAVEQAHQGVFFNQGQCCTAGSRIFVEESIYEEFVRRSVERAKRRVVGSPFDPTTEQGPQIDKKQYNKILELIQSGVAEGAKLECGGKGLGRKGFFIEPTVFSNVTDDMRIAKEEIFGPVQEILRFKTMDEVIERANNSDFGLVAAVFTNDINKALTVSSAMQAGTVWINCYNALNAQSPFGGFKMSGNGREMGEFGLREYSEVKTVTVKIPQKNS

SEQ ID NO: 3833 - protein, 40 aa, Homo sapiens
  Payload ID: 875;
  Gene Symbol: ALDH1A2;
  Gene Name: aldehyde dehydrogenase 1 family, member A2;
  ENSP ID: ENSP00000416754
MTSSKIEMPGEVKADPAALMASLHLLPSPTPNLEIKYTKV

SEQ ID NO: 3834 - protein, 497 aa, Homo sapiens
  Payload ID: 875;
  Gene Symbol: ALDH1A2;
  Gene Name: aldehyde dehydrogenase 1 family, member A2;
  Uniprot ID:  O94788;
  ENSP ID: ENSP00000438296
MKNQCETVWLKSPIKLKLIFINNEWQNSESGRVFPVYNPATGEQVCEVQEADKADIDKAVQAARLAFSLGSVWRRMDASERGRLLDKLADLVERDRAVLATMESLNGGKPFLQAFYVDLQGVIKTFRYYAGWADKIHGMTIPVDGDYFTFTRHEPIGVCGQIIPWNFPLLMFAWKIAPALCCGNTVVIKPAEQTPLSALYMGALIKEAGFPPGVINILPGYGPTAGAAIASHIGIDKIAFTGSTEVGKLIQEAAGRSNLKRVTLELGGKSPNIIFADADLDYAVEQAHQGVFFNQGQCCTAGSRIFVEESIYEEFVRRSVERAKRRVVGSPFDPTTEQGPQIDKKQYNKILELIQSGVAEGAKLECGGKGLGRKGFFIEPTVFSNVTDDMRIAKEEIFGPVQEILRFKTMDEVIERANNSDFGLVAAVFTNDINKALTVSSAMQAGTVWINCYNALNAQSPFGGFKMSGNGREMGEFGLREYSEVKTVTVKIPQKNS

SEQ ID NO: 3835 - protein, 85 aa, Homo sapiens
  Payload ID: 875;
  Gene Symbol: ALDH1A2;
  Gene Name: aldehyde dehydrogenase 1 family, member A2;
  ENSP ID: ENSP00000452850
MDASERGRLLDKLADLVERDRAVLATMESLNGGKPFLQAFYVDLQGVIKTFRYYAGWADKIHGMTIPVDGDYFTFTRHEPIGVCG

SEQ ID NO: 3836 - protein, 25 aa, Homo sapiens
  Payload ID: 875;
  Gene Symbol: ALDH1A2;
  Gene Name: aldehyde dehydrogenase 1 family, member A2;
  ENSP ID: ENSP00000453292
MDASERGRLLDKLADLVERDRAVLA

SEQ ID NO: 3837 - protein, 422 aa, Homo sapiens
  Payload ID: 875;
  Gene Symbol: ALDH1A2;
  Gene Name: aldehyde dehydrogenase 1 family, member A2;
  Uniprot ID:  O94788;
  ENSP ID: ENSP00000453408
MDASERGRLLDKLADLVERDRAVLATMESLNGGKPFLQAFYVDLQGVIKTFRYYAGWADKIHGMTIPVDGDYFTFTRHEPIGVCGQIIPWNFPLLMFAWKIAPALCCGNTVVIKPAEQTPLSALYMGALIKEAGFPPGVINILPGYGPTAGAAIASHIGIDKIAFTGSTEVGKLIQEAAGRSNLKRVTLELGGKSPNIIFADADLDYAVEQAHQGVFFNQGQCCTAGSRIFVEESIYEEFVRRSVERAKRRVVGSPFDPTTEQGPQIDKKQYNKILELIQSGVAEGAKLECGGKGLGRKGFFIEPTVFSNVTDDMRIAKEEIFGPVQEILRFKTMDEVIERANNSDFGLVAAVFTNDINKALTVSSAMQAGTVWINCYNALNAQSPFGGFKMSGNGREMGEFGLREYSEVKTVTVKIPQKNS

SEQ ID NO: 3838 - protein, 489 aa, Homo sapiens
  Payload ID: 875;
  Gene Symbol: ALDH1A2;
  Gene Name: aldehyde dehydrogenase 1 family, member A2;
  ENSP ID: ENSP00000453600
MKGRNWKTTKIFINNEWQNSESGRVFPVYNPATGEQVCEVQEADKADIDKAVQAARLAFSLGSVWRRMDASERGRLLDKLADLVERDRAVLATMESLNGGKPFLQAFYVDLQGVIKTFRYYAGWADKIHGMTIPVDGDYFTFTRHEPIGVCGQIIPWNFPLLMFAWKIAPALCCGNTVVIKPAEQTPLSALYMGALIKEAGFPPGVINILPGYGPTAGAAIASHIGIDKIAFTGSTEVGKLIQEAAGRSNLKRVTLELGGKSPNIIFADADLDYAVEQAHQGVFFNQGQCCTAGSRIFVEESIYEEFVRRSVERAKRRVVGSPFDPTTEQGPQIDKKQYNKILELIQSGVAEGAKLECGGKGLGRKGFFIEPTVFSNVTDDMRIAKEEIFGPVQEILRFKTMDEVIERANNSDFGLVAAVFTNDINKALTVSSAMQAGTVWINCYNALNAQSPFGGFKMSGNGREMGEFGLREYSEVKTVTVKIPQKNS

SEQ ID NO: 3839 - protein, 24 aa, Homo sapiens
  Payload ID: 875;
  Gene Symbol: ALDH1A2;
  Gene Name: aldehyde dehydrogenase 1 family, member A2;
  ENSP ID: ENSP00000453734
  MOD_RES (1)..(1): Any amino acid
XGEFGLREYSEVKTVTVKIPQKNS

SEQ ID NO: 3840 - protein, 9 aa, Homo sapiens
  Payload ID: 875;
  Gene Symbol: ALDH1A2;
  Gene Name: aldehyde dehydrogenase 1 family, member A2;
  ENSP ID: ENSP00000454028
MDASERGRL

SEQ ID NO: 3841 - protein, 512 aa, Homo sapiens
  Payload ID: 876;
  Gene Symbol: ALDH1A3;
  Gene Name: aldehyde dehydrogenase 1 family, member A3;
  Uniprot ID:  P47895;
  ENSP ID: ENSP00000332256
MATANGAVENGQPDRKPPALPRPIRNLEVKFTKIFINNEWHESKSGKKFATCNPSTREQICEVEEGDKPDVDKAVEAAQVAFQRGSPWRRLDALSRGRLLHQLADLVERDRATLAALETMDTGKPFLHAFFIDLEGCIRTLRYFAGWADKIQGKTIPTDDNVVCFTRHEPIGVCGAITPWNFPLLMLVWKLAPALCCGNTMVLKPAEQTPLTALYLGSLIKEAGFPPGVVNIVPGFGPTVGAAISSHPQINKIAFTGSTEVGKLVKEAASRSNLKRVTLELGGKNPCIVCADADLDLAVECAHQGVFFNQGQCCTAASRVFVEEQVYSEFVRRSVEYAKKRPVGDPFDVKTEQGPQIDQKQFDKILELIESGKKEGAKLECGGSAMEDKGLFIKPTVFSEVTDNMRIAKEEIFGPVQPILKFKSIEEVIKRANSTDYGLTAAVFTKNLDKALKLASALESGTVWINCYNALYAQAPFGGFKMSGNGRELGEYALAEYTEVKTVTIKLGDKNP

SEQ ID NO: 3842 - protein, 405 aa, Homo sapiens
  Payload ID: 876;
  Gene Symbol: ALDH1A3;
  Gene Name: aldehyde dehydrogenase 1 family, member A3;
  ENSP ID: ENSP00000343294
MATANGAVENGQPDRKPPALPRPIRNLEVKFTKIFINNEWHESKSGKKFATCNPSTREQICEVEEGDKPDVDKAVEAAQVAFQRGSPWRRLDALSRGRLLHQLADLVERDRATLAAGFPPGVVNIVPGFGPTVGAAISSHPQINKIAFTGSTEVGKLVKEAASRSNLKRVTLELGGKNPCIVCADADLDLAVECAHQGVFFNQGQCCTAASRVFVEEQVYSEFVRRSVEYAKKRPVGDPFDVKTEQGPQIDQKQFDKILELIESGKKEGAKLECGGSAMEDKGLFIKPTVFSEVTDNMRIAKEEIFGPVQPILKFKSIEEVIKRANSTDYGLTAAVFTKNLDKALKLASALESGTVWINCYNALYAQAPFGGFKMSGNGRELGEYALAEYTEVKTVTIKLGDKNP

SEQ ID NO: 3843 - protein, 144 aa, Homo sapiens
  Payload ID: 876;
  Gene Symbol: ALDH1A3;
  Gene Name: aldehyde dehydrogenase 1 family, member A3;
  ENSP ID: ENSP00000452789
MSECEIFINNEWHESKSGKKFATCNPSTREQICEVEEGDKPDVDKAVEAAQVAFQRGSPWRRLDALSRGRLLHQLADLVERDRATLAALETMDTGKPFLHAFFIDLEGCIRTLRYFAGWADKIQGKTIPTDDNVVCFTRHEPIG

SEQ ID NO: 3844 - protein, 102 aa, Homo sapiens
  Payload ID: 876;
  Gene Symbol: ALDH1A3;
  Gene Name: aldehyde dehydrogenase 1 family, member A3;
  ENSP ID: ENSP00000453328
MATANGAVENGQPDRKPPALPRPIRNLEVKFTKVRRAPLPPDGRGPLRWAARLGAAGAREQRAGGPPGAAETRASLPGRGSPETAPFAGRLGRDRRRRGSAL

SEQ ID NO: 3845 - protein, 141 aa, Homo sapiens
  Payload ID: 876;
  Gene Symbol: ALDH1A3;
  Gene Name: aldehyde dehydrogenase 1 family, member A3;
  ENSP ID: ENSP00000454107
MATANGAVENGQPDRKPPALPRPIRNLEVKFTKIFINNEWHESKSGKKFATCNPSTREQICEVEEGDKPDVDKAVEAAQVAFQRGSPWRRLDALSRGRLLHQLADLVERDRATLAMTTSCASPGMSPLVSVGPSLHGTSPC

SEQ ID NO: 3846 - protein, 517 aa, Homo sapiens [sequence omitted]

SEQ ID NO: 3847 - protein, 130 aa, Homo sapiens
  Payload ID: 877;
  Gene Symbol: ALDH1B1;
  Gene Name: aldehyde dehydrogenase 1 family, member B1;
  ENSP ID: ENSP00000489053
MLRFLAPRLLSLQGRTARYSSAAALPSPILNPDIPYNQLFINNEWQDAVSKKTFPTVNPTTGEVIGHVAEGDRADVDRAVKAAREAFRLGSPWRRMDASERGRLLNRLADLVERDRVYLASLETLDNGKP

SEQ ID NO: 3848 - protein, 912 aa, Homo sapiens
  Payload ID: 878;
  Gene Symbol: ALDH1L1;
  Gene Name: aldehyde dehydrogenase 1 family, member L1;
  Uniprot ID:  O75891;
  ENSP ID: ENSP00000273450
MAGPSNPPATMKIAVIGQSLFGQEVYCHLRKEGHEVVGVFTVPDKDGKADPLGLEAEKDGVPVFKYSRWRAKGQALPDVVAKYQALGAELNVLPFCSQFIPMEIISAPRHGSIIYHPSLLPRHRGASAINWTLIHGDKKGGFSIFWADDGLDTGDLLLQKECEVLPDDTVSTLYNRFLFPEGIKGMVQAVRLIAEGKAPRLPQPEEGATYEGIQKKETAKINWDQPAEAIHNWIRGNDKVPGAWTEACEQKLTFFNSTLNTSGLVPEGDALPIPGAHRPGVVTKAGLILFGNDDKMLLVKNIQLEDGKMILASNFFKGAASSVLELTEAELVTAEAVRSVWQRILPKVLEVEDSTDFFKSGAASVDVVRLVEEVKELCDGLELENEDVYMASTFGDFIQLLVRKLRGDDEEGECSIDYVEMAVNKRTVRMPHQLFIGGEFVDAEGAKTSETINPTDGSVICQVSLAQVTDVDKAVAAAKDAFENGRWGKISARDRGRLMYRLADLMEQHQEELATIEALDAGAVYTLALKTHVGMSIQTFRYFAGWCDKIQGSTIPINQARPNRNLTLTRKEPVGVCGIIIPWNYPLMMLSWKTAACLAAGNTVVIKPAQVTPLTALKFAELTLKAGIPKGVVNVLPGSGSLVGQRLSDHPDVRKIGFTGSTEVGKHIMKSCAISNVKKVSLELGGKSPLIIFADCDLNKAVQMGMSSVFFNKGENCIAAGRLFVEDSIHDEFVRRVVEEVRKMKVGNPLDRDTDHGPQNHHAHLVKLMEYCQHGVKEGATLVCGGNQVPRPGFFFEPTVFTDVEDHMFIAKEESFGPVMIISRFADGDLDAVLSRANATEFGLASGVFTRDINKALYVSDKLQAGTVFVNTYNKTDVAAPFGGFKQSGFGKDLGEAALNEYLRVKTVTFEY

SEQ ID NO: 3849 - protein, 505 aa, Homo sapiens
  Payload ID: 878;
  Gene Symbol: ALDH1L1;
  Gene Name: aldehyde dehydrogenase 1 family, member L1;
  Uniprot ID:  O75891;
  ENSP ID: ENSP00000377081
MKIAVIGQSLFGQEVYCHLRKEGHEVVGVFTVPDKDGKADPLGLEAEKDGVPVFKYSRWRAKGQALPDVVAKYQALGAELNVLPFCSQFIPMEIISAPRHGSIIYHPSLLPRHRGASAINWTLIHGDKKGGFSIFWADDGLDTGDLLLQKECEVLPDDTVSTLYNRFLFPEGIKGMVQAVRLIAEGKAPRLPQPEEGATYEGIQKKETAKINWDQPAEAIHNWIRGNDKVPGAWTEACEQKLTFFNSTLNTSGLVPEGDALPIPGAHRPGVVTKAGLILFGNDDKMLLVKNIQLEDGKMILASNFFKGAASSVLELTEAELVTAEAVRSVWQRILPKVLEVEDSTDFFKSGAASVDVVRLVEEVKELCDGLELENEDVYMASTFGDFIQLLVRKLRGDDEEGECSIDYVEMAVNKRTVRMPHQLFIGGEFVDAEGAKTSETINPTDGSVICQVSLAQVTDVDKAVAAAKDAFENGRWGKISARDRGRLMYRAPPSPSTRPDPTAT

SEQ ID NO: 3850 - protein, 902 aa, Homo sapiens
  Payload ID: 878;
  Gene Symbol: ALDH1L1;
  Gene Name: aldehyde dehydrogenase 1 family, member L1;
  Uniprot ID:  O75891;
  ENSP ID: ENSP00000377083
MKIAVIGQSLFGQEVYCHLRKEGHEVVGVFTVPDKDGKADPLGLEAEKDGVPVFKYSRWRAKGQALPDVVAKYQALGAELNVLPFCSQFIPMEIISAPRHGSIIYHPSLLPRHRGASAINWTLIHGDKKGGFSIFWADDGLDTGDLLLQKECEVLPDDTVSTLYNRFLFPEGIKGMVQAVRLIAEGKAPRLPQPEEGATYEGIQKKETAKINWDQPAEAIHNWIRGNDKVPGAWTEACEQKLTFFNSTLNTSGLVPEGDALPIPGAHRPGVVTKAGLILFGNDDKMLLVKNIQLEDGKMILASNFFKGAASSVLELTEAELVTAEAVRSVWQRILPKVLEVEDSTDFFKSGAASVDVVRLVEEVKELCDGLELENEDVYMASTFGDFIQLLVRKLRGDDEEGECSIDYVEMAVNKRTVRMPHQLFIGGEFVDAEGAKTSETINPTDGSVICQVSLAQVTDVDKAVAAAKDAFENGRWGKISARDRGRLMYRLADLMEQHQEELATIEALDAGAVYTLALKTHVGMSIQTFRYFAGWCDKIQGSTIPINQARPNRNLTLTRKEPVGVCGIIIPWNYPLMMLSWKTAACLAAGNTVVIKPAQVTPLTALKFAELTLKAGIPKGVVNVLPGSGSLVGQRLSDHPDVRKIGFTGSTEVGKHIMKSCAISNVKKVSLELGGKSPLIIFADCDLNKAVQMGMSSVFFNKGENCIAAGRLFVEDSIHDEFVRRVVEEVRKMKVGNPLDRDTDHGPQNHHAHLVKLMEYCQHGVKEGATLVCGGNQVPRPGFFFEPTVFTDVEDHMFIAKEESFGPVMIISRFADGDLDAVLSRANATEFGLASGVFTRDINKALYVSDKLQAGTVFVNTYNKTDVAAPFGGFKQSGFGKDLGEAALNEYLRVKTVTFEY

SEQ ID NO: 3851 - protein, 801 aa, Homo sapiens
  Payload ID: 878;
  Gene Symbol: ALDH1L1;
  Gene Name: aldehyde dehydrogenase 1 family, member L1;
  Uniprot ID:  O75891;
  ENSP ID: ENSP00000395881
MKIAVIGQSLFGQEVYCHLRKEGHEVVGVFTVPDKDGKADPLGLEAEKDGVPVFKYSRWRAKGQALPDVVAKYQALGAELNVLPFCSQFIPMEIISAPRHGSIIYHPSLLPRHRGASAIHNWIRGNDKVPGAWTEACEQKLTFFNSTLNTSGLVPEGDALPIPGAHRPGVVTKAGLILFGNDDKMLLVKNIQLEDGKMILASNFFKGAASSVLELTEAELVTAEAVRSVWQRILPKVLEVEDSTDFFKSGAASVDVVRLVEEVKELCDGLELENEDVYMASTFGDFIQLLVRKLRGDDEEGECSIDYVEMAVNKRTVRMPHQLFIGGEFVDAEGAKTSETINPTDGSVICQVSLAQVTDVDKAVAAAKDAFENGRWGKISARDRGRLMYRLADLMEQHQEELATIEALDAGAVYTLALKTHVGMSIQTFRYFAGWCDKIQGSTIPINQARPNRNLTLTRKEPVGVCGIIIPWNYPLMMLSWKTAACLAAGNTVVIKPAQVTPLTALKFAELTLKAGIPKGVVNVLPGSGSLVGQRLSDHPDVRKIGFTGSTEVGKHIMKSCAISNVKKVSLELGGKSPLIIFADCDLNKAVQMGMSSVFFNKGENCIAAGRLFVEDSIHDEFVRRVVEEVRKMKVGNPLDRDTDHGPQNHHAHLVKLMEYCQHGVKEGATLVCGGNQVPRPGFFFEPTVFTDVEDHMFIAKEESFGPVMIISRFADGDLDAVLSRANATEFGLASGVFTRDINKALYVSDKLQAGTVFVNTYNKTDVAAPFGGFKQSGFGKDLGEAALNEYLRVKTVTFEY

SEQ ID NO: 3852 - protein, 505 aa, Homo sapiens; identical to SEQ ID NO: 3849
  Payload ID: 878;
  Gene Symbol: ALDH1L1;
  Gene Name: aldehyde dehydrogenase 1 family, member L1;
  Uniprot ID:  O75891;
  ENSP ID: ENSP00000414126

SEQ ID NO: 3853 - protein, 177 aa, Homo sapiens
  Payload ID: 878;
  Gene Symbol: ALDH1L1;
  Gene Name: aldehyde dehydrogenase 1 family, member L1;
  ENSP ID: ENSP00000418711
MKIAVIGQSLFGQEVYCHLRKEGHEVVGVFTVPDKDGKADPLGLEAEKDGVPVFKYSRWRAKGQALPDVVAKYQALGAELNVLPFCSQFIPMEIISAPRHGSIIYHPSLLPRHRGASAINWTLIHGDKKGGFSIFWADDGLDTGDLLLQKECEVLPDDTVSTLYNRFLFPEGIKGMV

SEQ ID NO: 3854 - protein, 81 aa, Homo sapiens
  Payload ID: 878;
  Gene Symbol: ALDH1L1;
  Gene Name: aldehyde dehydrogenase 1 family, member L1;
  ENSP ID: ENSP00000418905
MKIAVIGQSLFGQEVYCHLRKEGHEVVGVFTVPDKDGKADPLGPSFTEIRKGGFPSSGRMMVWTPETCCCRRSVRCSRTTP

SEQ ID NO: 3855 - protein, 47 aa, Homo sapiens
  Payload ID: 878;
  Gene Symbol: ALDH1L1;
  Gene Name: aldehyde dehydrogenase 1 family, member L1;
  ENSP ID: ENSP00000419448
MKIAVIGQSLFGQEVYCHLRKEGHEVVGVFTVPDKDGKADPLDTRTE

SEQ ID NO: 3856 - protein, 168 aa, Homo sapiens
  Payload ID: 878;
  Gene Symbol: ALDH1L1;
  Gene Name: aldehyde dehydrogenase 1 family, member L1;
  ENSP ID: ENSP00000419826
MKIAVIGQSLFGQEVYCHLRKEGHEVVGVFTVPDKDGKADPLGLEAEKDGVPVFKYSRWRAKGQALPDVVAKYQALGAELNVLPFCSQFIPMEIISAPRHGSIIYHPSLLPRHRGASAINWTLIHGDKKGGFSIFWADDGLDTGDLLLQKECEVLPDDTVSTLYNRFL

SEQ ID NO: 3857 - protein, 157 aa, Homo sapiens
  Payload ID: 878;
  Gene Symbol: ALDH1L1;
  Gene Name: aldehyde dehydrogenase 1 family, member L1;
  ENSP ID: ENSP00000419955
MKIAVIGQSLFGQEVYCHLRKEGHEVVGVFTVPDKDGKADPLGLEAEKDGVPVFKYSRWRAKGQALPDVVAKYQALGAELNVLPFCSQFIPMEIISAPRHGSIIYHPSLLPRHRGASAINWTLIHGDKKGGFSIFWADDGLDTGDLLLQKECEVLPD

SEQ ID NO: 3858 - protein, 902 aa, Homo sapiens; identical to SEQ ID NO: 3850
  Payload ID: 878;
  Gene Symbol: ALDH1L1;
  Gene Name: aldehyde dehydrogenase 1 family, member L1;
  Uniprot ID:  O75891;
  ENSP ID: ENSP00000420293

SEQ ID NO: 3859 - protein, 100 aa, Homo sapiens
  Payload ID: 878;
  Gene Symbol: ALDH1L1;
  Gene Name: aldehyde dehydrogenase 1 family, member L1;
  ENSP ID: ENSP00000426594
MKIAVIGQSLFGQEVYCHLRKEGHEVVGVFTVPDKDGKADPLGLEAEKDGVPVFKYSRWRAKGQALPDVVAKYQALGAELNVLPFCSQFIPMEIISAPRH

SEQ ID NO: 3860 - protein, 47 aa, Homo sapiens; identical to SEQ ID NO: 3855
  Payload ID: 878;
  Gene Symbol: ALDH1L1;
  Gene Name: aldehyde dehydrogenase 1 family, member L1;
  ENSP ID: ENSP00000426713

SEQ ID NO: 3861 - protein, 923 aa, Homo sapiens
  Payload ID: 879;
  Gene Symbol: ALDH1L2;
  Gene Name: aldehyde dehydrogenase 1 family, member L2;
  Uniprot ID:  Q3SY69;
  ENSP ID: ENSP00000258494
MLRRGSQALRRFSTGRVYFKNKLKLALIGQSLFGQEVYSHLRKEGHRVVGVFTVPDKDGKADPLALAAEKDGTPVFKLPKWRVKGKTIKEVAEAYRSVGAELNVLPFCTQFIPMDIIDSPKHGSIIYHPSILPRHRGASAINWTLIMGDKKAGFSVFWADDGLDTGPILLQRSCDVEPNDTVDALYNRFLFPEGIKAMVEAVQLIADGKAPRIPQPEEGATYEGIQKKENAEISWDQSAEVLHNWIRGHDKVPGAWTEINGQMVTFYGSTLLNSSVPPGEPLEIKGAKKPGLVTKNGLVLFGNDGKALTVRNLQFEDGKMIPASQYFSTGETSVVELTAEEVKVAETIKVIWAGILSNVPIIEDSTDFFKSGASSMDVARLVEEIRQKCGGLQLQNEDVYMATKFEGFIQKVVRKLRGEDQEVELVVDYISKEVNEIMVKMPYQCFINGQFTDADDGKTYDTINPTDGSTICKVSYASLADVDKAVAAAKDAFENGEWGRMNARERGRLMYRLADLLEENQEELATIEALDSGAVYTLALKTHIGMSVQTFRYFAGWCDKIQGSTIPINQARPNRNLTFTKKEPLGVCAIIIPWNYPLMMLAWKSAACLAAGNTLVLKPAQVTPLTALKFAELSVKAGFPKGVINIIPGSGGIAGQRLSEHPDIRKLGFTGSTPIGKQIMKSCAVSNLKKVSLELGGKSPLIIFNDCELDKAVRMGMGAVFFNKGENCIAAGRLFVEESIHDEFVTRVVEEIKKMKIGDPLDRSTDHGPQNHKAHLEKLLQYCETGVKEGATLVYGGRQVQRPGFFMEPTVFTDVEDYMYLAKEESFGPIMVISKFQNGDIDGVLQRANSTEYGLASGVFTRDINKAMYVSEKLEAGTVFINTYNKTDVAAPFGGVKQSGFGKDLGEEALNEYLKTKTVTLEY

SEQ ID NO: 3862 - protein, 92 aa, Homo sapiens
  Payload ID: 879;
  Gene Symbol: ALDH1L2;
  Gene Name: aldehyde dehydrogenase 1 family, member L2;
  ENSP ID: ENSP00000447464
  MOD_RES (1)..(1): Any amino acid
XVEEIKKMKIGDPLDRSTDHGPQNHKAHLEKLLQYCETGVKEGATLVYGGRQVQRPGFFMEPTVFTDVEDYMYLAKEESFGPIMVISKFQNG

SEQ ID NO: 3863 - protein, 203 aa, Homo sapiens
  Payload ID: 879;
  Gene Symbol: ALDH1L2;
  Gene Name: aldehyde dehydrogenase 1 family, member L2;
  Uniprot ID:  Q3SY69;
  ENSP ID: ENSP00000447538
MLRRGSQALRRFSTGRVYFKNKLKLALIGQSLFGQEVYSHLRKEGHRVVGVFTVPDKDGKADPLALAAEKDGTPVFKLPKWRVKGKTIKEVAEAYRSVGAELNVLPFCTQFIPMDIIDSPKHGSIIYHPSILPRHRGASAINWTLIMGDKKAGFSVFWADDGLDTGPILLQRSCDVEPNDTVDALYNRFLFPEGIKAMKLSNS

SEQ ID NO: 3864 - protein, 802 aa, Homo sapiens
  Payload ID: 880;
  Gene Symbol: ALDH16A1;
  Gene Name: aldehyde dehydrogenase 16 family, member A1;
  Uniprot ID:  Q8IZ83;
  ENSP ID: ENSP00000293350
MAATRAGPRAREIFTSLEYGPVPESHACALAWLDTQDRCLGHYVNGKWLKPEHRNSVPCQDPITGENLASCLQAQAEDVAAAVEAARMAFKGWSAHPGVVRAQHLTRLAEVIQKHQRLLWTLESLVTGRAVREVRDGDVQLAQQLLHYHAIQASTQEEALAGWEPMGVIGLILPPTFSFLEMMWRICPALAVGCTVVALVPPASPAPLLLAQLAGELGPFPGILNVLSGPASLVPILASQPGIRKVAFCGAPEEGRALRRSLAGECAELGLALGTESLLLLTDTADVDSAVEGVVDAAWSDRGPGGLRLLIQESVWDEAMRRLQERMGRLRSGRGLDGAVDMGARGAAACDLVQRFVREAQSQGAQVFQAGDVPSERPFYPPTLVSNLPPASPCAQVEVPWPVVVASPFRTAKEALLVANGTPRGGSASVWSERLGQALELGYGLQVGTVWINAHGLRDPSVPTGGCKESGCSWHGGPDGLYEYLRPSGTPARLSCLSKNLNYDTFGLAVPSTLPAGPEIGPSPAPPYGLFVGGRFQAPGARSSRPIRDSSGNLHGYVAEGGAKDIRGAVEAAHQAFPGWAGQSPGARAALLWALAAALERRKSTLASRLERQGAELKAAEAEVELSARRLRAWGARVQAQGHTLQVAGLRGPVLRLREPLGVLAVVCPDEWPLLAFVSLLAPALAYGNTVVMVPSAACPLLALEVCQDMATVFPAGLANVVTGDRDHLTRCLALHQDVQAMWYFGSAQGSQFVEWASAGNLKPVWASRGCPRAWDQEAEGAGPELGLRVARTKALWLPMGD

SEQ ID NO: 3865 - protein, 751 aa, Homo sapiens
  Payload ID: 880;
  Gene Symbol: ALDH16A1;
  Gene Name: aldehyde dehydrogenase 16 family, member A1;
  Uniprot ID:  Q8IZ83;
  ENSP ID: ENSP00000410142
MAATRAGPRAREIFTSLEYGPVPESHACALAWLDTQDRCLGHYVNGKWLKPEHRNSVPCQDPITGENLASCLQAQAEDVAAAVEAARMAFKGWSAHPGVVRAQHLTRLAEVIQKHQRLLWTLESLVTGRAVREVRDGDVQLAQQLLHYHAIQASTQEEALAGWEPMGVIGLILPPTFSFLEMMWRICPALAVGCTVVALVPPASPAPLLLAQLAGELGPFPGILNVLSGPASLVPILASQPGIRKVAFCGAPEGGLRLLIQESVWDEAMRRLQERMGRLRSGRGLDGAVDMGARGAAACDLVQRFVREAQSQGAQVFQAGDVPSERPFYPPTLVSNLPPASPCAQVEVPWPVVVASPFRTAKEALLVANGTPRGGSASVWSERLGQALELGYGLQVGTVWINAHGLRDPSVPTGGCKESGCSWHGGPDGLYEYLRPSGTPARLSCLSKNLNYDTFGLAVPSTLPAGPEIGPSPAPPYGLFVGGRFQAPGARSSRPIRDSSGNLHGYVAEGGAKDIRGAVEAAHQAFPGWAGQSPGARAALLWALAAALERRKSTLASRLERQGAELKAAEAEVELSARRLRAWGARVQAQGHTLQVAGLRGPVLRLREPLGVLAVVCPDEWPLLAFVSLLAPALAYGNTVVMVPSAACPLLALEVCQDMATVFPAGLANVVTGDRDHLTRCLALHQDVQAMWYFGSAQGSQFVEWASAGNLKPVWASRGCPRAWDQEAEGAGPELGLRVARTKALWLPMGD

SEQ ID NO: 3866 - protein, 639 aa, Homo sapiens
  Payload ID: 880;
  Gene Symbol: ALDH16A1;
  Gene Name: aldehyde dehydrogenase 16 family, member A1;
  ENSP ID: ENSP00000445088
MRTGVIGLILPPTFSFLEMMWRICPALAVGCTVVALVPPASPAPLLLAQLAGELGPFPGILNVLSGPASLVPILASQPGIRKVAFCGAPEEGRALRRSLAGECAELGLALGTESLLLLTDTADVDSAVEGVVDAAWSDRGPGGLRLLIQESVWDEAMRRLQERMGRLRSGRGLDGAVDMGARGAAACDLVQRFVREAQSQGAQVFQAGDVPSERPFYPPTLVSNLPPASPCAQVEVPWPVVVASPFRTAKEALLVANGTPRGGSASVWSERLGQALELGYGLQVGTVWINAHGLRDPSVPTGGCKESGCSWHGGPDGLYEYLRPSGTPARLSCLSKNLNYDTFGLAVPSTLPAGPEIGPSPAPPYGLFVGGRFQAPGARSSRPIRDSSGNLHGYVAEGGAKDIRGAVEAAHQAFPGWAGQSPGARAALLWALAAALERRKSTLASRLERQGAELKAAEAEVELSARRLRAWGARVQAQGHTLQVAGLRGPVLRLREPLGVLAVVCPDEWPLLAFVSLLAPALAYGNTVVMVPSAACPLLALEVCQDMATVFPAGLANVVTGDRDHLTRCLALHQDVQAMWYFGSAQGSQFVEWASAGNLKPVWASRGCPRAWDQEAEGAGPELGLRVARTKALWLPMGD

SEQ ID NO: 3867 - protein, 163 aa, Homo sapiens
  Payload ID: 880;
  Gene Symbol: ALDH16A1;
  Gene Name: aldehyde dehydrogenase 16 family, member A1;
  ENSP ID: ENSP00000469507
INAHGLRDPSVPTGGCKESGCSWHGGPDGLYEYLRPSGTPARLSCLSKNLNYDTFGLAVPSTLPAGPEIGPSPAPPYGLFVGGRFQAPGARSSRPIRDSSGNLHGYVAEGGAKDIRAGRASPQEPGQPCCGPWRLHWSAGSLPWPRGWRGRERSSRLRRRRWS

SEQ ID NO: 3868 - protein, 103 aa, Homo sapiens
  Payload ID: 880;
  Gene Symbol: ALDH16A1;
  Gene Name: aldehyde dehydrogenase 16 family, member A1;
  ENSP ID: ENSP00000470160
MAATRAGPRAREIFTSLEYGPVPESHACALAGRGDPEAPAAAVDPGIPGDWAGCSRGSRRGRPAGPAAAPLPCNPGIHPGGGTGRLGAHGSNWPHPATHILLP

SEQ ID NO: 3869 - protein, 793 aa, Homo sapiens
  Payload ID: 881;
  Gene Symbol: ALDH18A1;
  Gene Name: aldehyde dehydrogenase 18 family, member A1;
  Uniprot ID:  P54886;
  ENSP ID: ENSP00000360265
MLSQVYRCGFQPFNQHLLPWVKCTTVFRSHCIQPSVIRHVRSWSNIPFITVPLSRTHGKSFAHRSELKHAKRIVVKLGSAVVTRGDECGLALGRLASIVEQVSVLQNQGREMMLVTSGAVAFGKQRLRHEILLSQSVRQALHSGQNQLKEMAIPVLEARACAAAGQSGLMALYEAMFTQYSICAAQILVTNLDFHDEQKRRNLNGTLHELLRMNIVPIVNTNDAVVPPAEPNSDLQGVISVKDNDSLAARLAVEMKTDLLIVLSDVEGLFDSPPGSDDAKLIDIFYPGDQQSVTFGTKSRVGMGGMEAKVKAALWALQGGTSVVIANGTHPKVSGHVITDIVEGKKVGTFFSEVKPAGPTVEQQGEMARSGGRMLATLEPEQRAEIIHHLADLLTDQRDEILLANKKDLEEAEGRLAAPLLKRLSLSTSKLNSLAIGLRQIAASSQDSVGRVLRRTRIAKNLELEQVTVPIGVLLVIFESRPDCLPQVAALAIASGNGLLLKGGKEAAHSNRILHLLTQEALSIHGVKEAVQLVNTREEVEDLCRLDKMIDLIIPRGSSQLVRDIQKAAKGIPVMGHSEGICHMYVDSEASVDKVTRLVRDSKCEYPAACNALETLLIHRDLLRTPLFDQIIDMLRVEQVKIHAGPKFASYLTFSPSEVKSLRTEYGDLELCIEVVDNVQDAIDHIHKYGSSHTDVIVTEDENTAEFFLQHVDSACVFWNASTRFSDGYRFGLGAEVGISTSRIHARGPVGLEGLLTTKWLLRGKDHVVSDFSEHGSLKYLHENLPIPQRNTN

SEQ ID NO: 3870 - protein, 795 aa, Homo sapiens [sequence omitted]

SEQ ID NO: 3871 - protein, 517 aa, Homo sapiens
  Payload ID: 882;
  Gene Symbol: ALDH2;
  Gene Name: aldehyde dehydrogenase 2 family (mitochondrial);
  Uniprot ID:  P05091;
  ENSP ID: ENSP00000261733
MLRAAARFGPRLGRRLLSAAATQAVPAPNQQPEVFCNQIFINNEWHDAVSRKTFPTVNPSTGEVICQVAEGDKEDVDKAVKAARAAFQLGSPWRRMDASHRGRLLNRLADLIERDRTYLAALETLDNGKPYVISYLVDLDMVLKCLRYYAGWADKYHGKTIPIDGDFFSYTRHEPVGVCGQIIPWNFPLLMQAWKLGPALATGNVVVMKVAEQTPLTALYVANLIKEAGFPPGVVNIVPGFGPTAGAAIASHEDVDKVAFTGSTEIGRVIQVAAGSSNLKRVTLELGGKSPNIIMSDADMDWAVEQAHFALFFNQGQCCCAGSRTFVQEDIYDEFVERSVARAKSRVVGNPFDSKTEQGPQVDETQFKKILGYINTGKQEGAKLLCGGGIAADRGYFIQPTVFGDVQDGMTIAKEEIFGPVMQILKFKTIEEVVGRANNSTYGLAAAVFTKDLDKANYLSQALQAGTVWVNCYDVFGAQSPFGGYKMSGSGRELGEYGLQAYTEVKTVTVKVPQKNS

SEQ ID NO: 3872 - protein, 470 aa, Homo sapiens
  Payload ID: 882;
  Gene Symbol: ALDH2;
  Gene Name: aldehyde dehydrogenase 2 family (mitochondrial);
  Uniprot ID:  P05091;
  ENSP ID: ENSP00000403349
MLRAAARFGPRLGRRLLSAAATQAVPAPNQQPEVFCNQIFINNEWHDAVSRKTFPTVNPSTGEVICQVAEGDKALETLDNGKPYVISYLVDLDMVLKCLRYYAGWADKYHGKTIPIDGDFFSYTRHEPVGVCGQIIPWNFPLLMQAWKLGPALATGNVVVMKVAEQTPLTALYVANLIKEAGFPPGVVNIVPGFGPTAGAAIASHEDVDKVAFTGSTEIGRVIQVAAGSSNLKRVTLELGGKSPNIIMSDADMDWAVEQAHFALFFNQGQCCCAGSRTFVQEDIYDEFVERSVARAKSRVVGNPFDSKTEQGPQVDETQFKKILGYINTGKQEGAKLLCGGGIAADRGYFIQPTVFGDVQDGMTIAKEEIFGPVMQILKFKTIEEVVGRANNSTYGLAAAVFTKDLDKANYLSQALQAGTVWVNCYDVFGAQSPFGGYKMSGSGRELGEYGLQAYTEVKTVTVKVPQKNS

SEQ ID NO: 3873 - protein, 79 aa, Homo sapiens
  Payload ID: 882;
  Gene Symbol: ALDH2;
  Gene Name: aldehyde dehydrogenase 2 family (mitochondrial);
  ENSP ID: ENSP00000448179
MLRAAARFGPRLGRRLLSAAATQAVPAPNQQPEVFCNQSRLKMSTPDITVLLETIKRKWELGHPPTTPRPRAFTCVIFS

SEQ ID NO: 3874 - protein, 117 aa, Homo sapiens
  Payload ID: 882;
  Gene Symbol: ALDH2;
  Gene Name: aldehyde dehydrogenase 2 family (mitochondrial);
  ENSP ID: ENSP00000474669
  MOD_RES (1)..(1): Any amino acid
XEQAHFALFFNQGQCCCAGSRTFVQEDIYDEFVERSVARAKSRVVGNPFDSKTEQGPQVDETQFKKILGYINTGKQEGAKLLCGGGIAADRGYFIQPTVFGDVQDGMTIAKEEGQLL

SEQ ID NO: 3875 - protein, 453 aa, Homo sapiens
  Payload ID: 883;
  Gene Symbol: ALDH3A1;
  Gene Name: aldehyde dehydrogenase 3 family, member A1;
  Uniprot ID:  P30838;
  ENSP ID: ENSP00000225740
MSKISEAVKRARAAFSSGRTRPLQFRIQQLEALQRLIQEQEQELVGALAADLHKNEWNAYYEEVVYVLEEIEYMIQKLPEWAADEPVEKTPQTQQDELYIHSEPLGVVLVIGTWNYPFNLTIQPMVGAIAAGNSVVLKPSELSENMASLLATIIPQYLDKDLYPVINGGVPETTELLKERFDHILYTGSTGVGKIIMTAAAKHLTPVTLELGGKSPCYVDKNCDLDVACRRIAWGKFMNSGQTCVAPDYILCDPSIQNQIVEKLKKSLKEFYGEDAKKSRDYGRIISARHFQRVMGLIEGQKVAYGGTGDAATRYIAPTILTDVDPQSPVMQEEIFGPVLPIVCVRSLEEAIQFINQREKPLALYMFSSNDKVIKKMIAETSSGGVAANDVIVHITLHSLPFGGVGNSGMGSYHGKKSFETFSHRRSCLVRPLMNDEGLKVRYPPSPAKMTQH

SEQ ID NO: 3876 - protein, 389 aa, Homo sapiens
  Payload ID: 883;
  Gene Symbol: ALDH3A1;
  Gene Name: aldehyde dehydrogenase 3 family, member A1;
  ENSP ID: ENSP00000378923
MSKISEAVKRARAAFSSGRTRPLQFRIQQLEALQRLIQEQEQELVGALAADLHKNEWNAYYEEVVYVLEEIEYMIQKLPEWAADEPVEKTPQTQQDELYIHSEPLGVVLVIGTWNYPFNLTIQPMVGAIAAGNSVVLKPSELSENMASLLATIIPQYLDKDLYPVINGGVPETTELLKERFDHILYTGSTGVGKIIMTAAAKHLTPVTLELGGKSPCYVDKNCDLDVACRRIAWGKFMNSGQTCVAPDYILCDPSIQNQIVEKLKKSLKEIFGPVLPIVCVRSLEEAIQFINQREKPLALYMFSSNDKVIKKMIAETSSGGVAANDVIVHITLHSLPFGGVGNSGMGSYHGKKSFETFSHRRSCLVRPLMNDEGLKVRYPPSPAKMTQH

SEQ ID NO: 3877 - protein, 259 aa, Homo sapiens
  Payload ID: 883;
  Gene Symbol: ALDH3A1;
  Gene Name: aldehyde dehydrogenase 3 family, member A1;
  ENSP ID: ENSP00000388369
MSKISEAVKRARAAFSSGRTRPLQFRIQQLEALQRLIQEQEQELNEWNAYYEEVVYVLEEIEYMIQKLPEWAADEPVEKTPQTQQDELYIHSEPLGVVLVIGTWNYPFNLTIQPMVGAIAAGNSVVLKPSELSENMASLLATIIPQYLDKDLYPVINGGVPETTELLKERFDHILYTGSTGVGKIIMTAAAKHLTPVTLELGGKSPCYVDKNCDLDVACRRIAWGKFMNSGQTCVAPDYILCDPSIQNQIVEKLKKSLK

SEQ ID NO: 3878 - protein, 453 aa, Homo sapiens; identical to SEQ ID NO: 3875
  Payload ID: 883;
  Gene Symbol: ALDH3A1;
  Gene Name: aldehyde dehydrogenase 3 family, member A1;
  Uniprot ID:  P30838;
  ENSP ID: ENSP00000388469

SEQ ID NO: 3879 - protein, 372 aa, Homo sapiens
  Payload ID: 883;
  Gene Symbol: ALDH3A1;
  Gene Name: aldehyde dehydrogenase 3 family, member A1;
  ENSP ID: ENSP00000389766
MSKISEAVKRARAAFSSGRTRPLQFRIQQLEALQRLIQEQEQELVGALAADLHKNEWNAYYEEVVYVLEEIEYMIQKLPEWAADEPVEKTPQTQQDELYIHSEPLGVVLVIGTWNYPFNLTIQPMVGAIAAGNSVVLKPSELSENMASLLATIIPQYLDKDLYPVINGGVPETTELLKERFDHILYTGSTGVGKIIMTAAAKHLTPVTLELGGKSPCYVDKNCDLDVACRRIAWGKFMNSGQTCVAPDYILCDPSIQNQIVEKLKKSLKEFYGEDAKKSRDYGRIISARHFQRVMGLIEGQKVAYGGTGDAATRYIAPTILTDVDPQSPVMQEEIFGPVLPIVCVRSLEEAIQFINQREKPLALYMFSSNDK

SEQ ID NO: 3880 - protein, 453 aa, Homo sapiens; identical to SEQ ID NO: 3875
  Payload ID: 883;
  Gene Symbol: ALDH3A1;
  Gene Name: aldehyde dehydrogenase 3 family, member A1;
  Uniprot ID:  P30838;
  ENSP ID: ENSP00000411821

SEQ ID NO: 3881 - protein, 396 aa, Homo sapiens
  Payload ID: 883;
  Gene Symbol: ALDH3A1;
  Gene Name: aldehyde dehydrogenase 3 family, member A1;
  ENSP ID: ENSP00000434685
MSKISEAVKRARAAFSSGRTRPLQFRIQQLEALQRLIQEQEQELVGALAADLHKNEWNAYYEEVVYVLEEIEYMIQKLPEWAADEPVEKTPQTQQDELYIHSEPLGVVLVIGTWNYPFNLTIQPMVGAIAAGNSVVLKPSELSENMASLLATIIPQYLDKDLYPVINGGVPETTELLKERFDHILYTGSTGVGKIIMTAAAKHLTPVTLELGGKSPCYVDKNCDLDVACRRIAWGKFMNSGQTCVAPDYILCDPSIQNQIVEKLKKSLKEFYGEDAKKSRDYGRIISARHFQRVMGLIEGQKVAYGGTGDAATRYIAPTILTDVDPQSPVMQEEIFGPVLPIVCVRSLEEAIQFINQREKPLALYMFSSNDKGTAAWDPTMARRASRLSLTAALAW

SEQ ID NO: 3882 - protein, 131 aa, Homo sapiens
  Payload ID: 883;
  Gene Symbol: ALDH3A1;
  Gene Name: aldehyde dehydrogenase 3 family, member A1;
  ENSP ID: ENSP00000458841
MSKISEAVKRARAAFSSGRTRPLQFRIQQLEALQRLIQEQEQELVGALAADLHKNEWNAYYEEVVYVLEEIEYMIQKLPEWAADEPVEKTPQTQQDELYIHSEPLGVVLVIGTWNYPFNLTIQPMVGAIAA

SEQ ID NO: 3883 - protein, 380 aa, Homo sapiens
  Payload ID: 883;
  Gene Symbol: ALDH3A1;
  Gene Name: aldehyde dehydrogenase 3 family, member A1;
  ENSP ID: ENSP00000460482
MIQKLPEWAADEPVEKTPQTQQDELYIHSEPLGVVLVIGTWNYPFNLTIQPMVGAIAAGNSVVLKPSELSENMASLLATIIPQYLDKDLYPVINGGVPETTELLKERFDHILYTGSTGVGKIIMTAAAKHLTPVTLELGGKSPCYVDKNCDLDVACRRIAWGKFMNSGQTCVAPDYILCDPSIQNQIVEKLKKSLKEFYGEDAKKSRDYGRIISARHFQRVMGLIEGQKVAYGGTGDAATRYIAPTILTDVDPQSPVMQEEIFGPVLPIVCVRSLEEAIQFINQREKPLALYMFSSNDKVIKKMIAETSSGGVAANDVIVHITLHSLPFGGVGNSGMGSYHGKKSFETFSHRRSCLVRPLMNDEGLKVRYPPSPAKMTQH

SEQ ID NO: 3884 - protein, 74 aa, Homo sapiens
  Payload ID: 883;
  Gene Symbol: ALDH3A1;
  Gene Name: aldehyde dehydrogenase 3 family, member A1;
  ENSP ID: ENSP00000460792
MSKISEAVKRARAAFSSGRTRPLQFRIQQLEALQRLIQEQEQELVGALAADLHKNEWNAYYEEVVYVLEEIEYM

SEQ ID NO: 3885 - protein, 119 aa, Homo sapiens
  Payload ID: 883;
  Gene Symbol: ALDH3A1;
  Gene Name: aldehyde dehydrogenase 3 family, member A1;
  ENSP ID: ENSP00000461189
MSKISEAVKRARAAFSSGRTRPLQFRIQQLEALQRLIQEQEQELVGALAADLHKNEWNAYYEEVVYVLEEIEYMIQKLPEWAADEPVEKTPQTQQDELYIHSEPLGVVLVIGTWNYPFN

SEQ ID NO: 3886 - protein, 485 aa, Homo sapiens
  Payload ID: 884;
  Gene Symbol: ALDH3A2;
  Gene Name: aldehyde dehydrogenase 3 family, member A2;
  Uniprot ID:  P51648;
  ENSP ID: ENSP00000176643
MELEVRRVRQAFLSGRSRPLRFRLQQLEALRRMVQEREKDILTAIAADLCKSEFNVYSQEVITVLGEIDFMLENLPEWVTAKPVKKNVLTMLDEAYIQPQPLGVVLIIGAWNYPFVLTIQPLIGAIAAGNAVIIKPSELSENTAKILAKLLPQYLDQDLYIVINGGVEETTELLKQRFDHIFYTGNTAVGKIVMEAAAKHLTPVTLELGGKSPCYIDKDCDLDIVCRRITWGKYMNCGQTCIAPDYILCEASLQNQIVWKIKETVKEFYGENIKESPDYERIINLRHFKRILSLLEGQKIAFGGETDEATRYIAPTVLTDVDPKTKVMQEEIFGPILPIVPVKNVDEAINFINEREKPLALYVFSHNHKLIKRMIDETSSGGVTGNDVIMHFTLNSFPFGGVGSSGMGAYHGKHSFDTFSHQRPCLLKSLKREGANKLRYPPNSQSKVDWGKFFLLKRFNKEKLGLLLLTFLGIVAAVLVKAEYY

SEQ ID NO: 3887 - protein, 508 aa, Homo sapiens
  Payload ID: 884;
  Gene Symbol: ALDH3A2;
  Gene Name: aldehyde dehydrogenase 3 family, member A2;
  Uniprot ID:  P51648;
  ENSP ID: ENSP00000345774
MELEVRRVRQAFLSGRSRPLRFRLQQLEALRRMVQEREKDILTAIAADLCKSEFNVYSQEVITVLGEIDFMLENLPEWVTAKPVKKNVLTMLDEAYIQPQPLGVVLIIGAWNYPFVLTIQPLIGAIAAGNAVIIKPSELSENTAKILAKLLPQYLDQDLYIVINGGVEETTELLKQRFDHIFYTGNTAVGKIVMEAAAKHLTPVTLELGGKSPCYIDKDCDLDIVCRRITWGKYMNCGQTCIAPDYILCEASLQNQIVWKIKETVKEFYGENIKESPDYERIINLRHFKRILSLLEGQKIAFGGETDEATRYIAPTVLTDVDPKTKVMQEEIFGPILPIVPVKNVDEAINFINEREKPLALYVFSHNHKLIKRMIDETSSGGVTGNDVIMHFTLNSFPFGGVGSSGMGAYHGKHSFDTFSHQRPCLLKSLKREGANKLRYPPNSQSKVDWGKFFLLKRFNKEKLGLLLLTFLGIVAAVLVKKYQAVLRRKALLIFLVVHRLRWSSKQR

SEQ ID NO: 3888 - protein, 485 aa, Homo sapiens; identical to SEQ ID NO: 3886
  Payload ID: 884;
  Gene Symbol: ALDH3A2;
  Gene Name: aldehyde dehydrogenase 3 family, member A2;
  Uniprot ID:  P51648;
  ENSP ID: ENSP00000378942

SEQ ID NO: 3889 - protein, 166 aa, Homo sapiens
  Payload ID: 884;
  Gene Symbol: ALDH3A2;
  Gene Name: aldehyde dehydrogenase 3 family, member A2;
  ENSP ID: ENSP00000395845
MELEVRRVRQAFLSGRSRPLRFRLQQLEALRRMVQEREKDILTAIAADLCKSEFNVYSQEVITVLGEIDFMLENLPEWVTAKPVKKNVLTMLDEAYIQPQPLGVVLIIGAWNYPFVLTIQPLIGAIAAGNAVIIKPSELSENTAKILAKLLPQYLDQDLYIVINGG

SEQ ID NO: 3890 - protein, 182 aa, Homo sapiens
  Payload ID: 884;
  Gene Symbol: ALDH3A2;
  Gene Name: aldehyde dehydrogenase 3 family, member A2;
  ENSP ID: ENSP00000458397
MELEVRRVRQAFLSGRSRPLRFRLQQLEALRRMVQEREKDILTAIAADLCKSEFNVYSQEVITVLGEIDFMLENLPEWVTAKPVKKNVLTMLDEAYIQPQPLGVVLIIGAWNYPFVLTIQPLIGAIAAGNAVIIKPSELSENTAKILAKLLPQYLDQPFCSNSCDDPIKKDEMEDSEMSRIE

SEQ ID NO: 3891 - protein, 162 aa, Homo sapiens
  Payload ID: 884;
  Gene Symbol: ALDH3A2;
  Gene Name: aldehyde dehydrogenase 3 family, member A2;
  ENSP ID: ENSP00000458942
TTELLKQRFDHIFYTGNTAVGKIVMEAAAKHLTPVTLELGGKSPCYIDKDCDLDIVCRRITWGKYMNCGQTCIAPDYILCEASLQNQIVWKIKETVKEFYGENIKESPDYERIINLRHFKRILSLLEGQKIAFGGETDEATRYIGNGNSPFPMGRWQFGSFC

SEQ ID NO: 3892 - protein, 97 aa, Homo sapiens
  Payload ID: 884;
  Gene Symbol: ALDH3A2;
  Gene Name: aldehyde dehydrogenase 3 family, member A2;
  ENSP ID: ENSP00000459977
MQEEIFGPILPIVPVKNVDEAINFINEREKPLALYVFSHNHKLIKRMIDETSSGGVTGNDVIMHFTLNSFPFGGVGRILLKNDPVQPPSASTELFLF

SEQ ID NO: 3893 - protein, 85 aa, Homo sapiens
  Payload ID: 884;
  Gene Symbol: ALDH3A2;
  Gene Name: aldehyde dehydrogenase 3 family, member A2;
  ENSP ID: ENSP00000461235
FSHQRPCLLKSLKREGANKLRYPPNSQSKVDWGKFFLLKRFNKEKLGLLLLTFLGIVAAVLVKFTDCVGPVSRDEHQISKPSPVC

SEQ ID NO: 3894 - protein, 508 aa, Homo sapiens; identical to SEQ ID NO: 3887
  Payload ID: 884;
  Gene Symbol: ALDH3A2;
  Gene Name: aldehyde dehydrogenase 3 family, member A2;
  Uniprot ID:  P51648;
  ENSP ID: ENSP00000461916

SEQ ID NO: 3895 - protein, 62 aa, Homo sapiens
  Payload ID: 884;
  Gene Symbol: ALDH3A2;
  Gene Name: aldehyde dehydrogenase 3 family, member A2;
  ENSP ID: ENSP00000462933
IFGPILPIVPVKNVDEAINFINEREKPLALYVFSHNHKVPVGWELITENIVLILFLISVPVY

SEQ ID NO: 3896 - protein, 146 aa, Homo sapiens
  Payload ID: 884;
  Gene Symbol: ALDH3A2;
  Gene Name: aldehyde dehydrogenase 3 family, member A2;
  ENSP ID: ENSP00000462964
MELEVRRVRQAFLSGRSRPLRFRLQQLEALRRMVQEREKDILTAIAADLCKSEFNVYSQEVITVLGEIDFMLENLPEWVTAKPVKKNVLTMLDEAYIQPQPLGVVLIIGAWNYPFVLTIQPLIGAIAAGNAVIIKPSELSENTAKI

SEQ ID NO: 3897 - protein, 54 aa, Homo sapiens
  Payload ID: 884;
  Gene Symbol: ALDH3A2;
  Gene Name: aldehyde dehydrogenase 3 family, member A2;
  ENSP ID: ENSP00000463128
MELEVRRVRQAFLSGRSRPLRFRLQQLEALRRMVQEREKDILTAIAADLCKEML

SEQ ID NO: 3898 - protein, 485 aa, Homo sapiens; identical to SEQ ID NO: 3886
  Payload ID: 884;
  Gene Symbol: ALDH3A2;
  Gene Name: aldehyde dehydrogenase 3 family, member A2;
  Uniprot ID:  P51648;
  ENSP ID: ENSP00000463637

SEQ ID NO: 3899 - protein, 58 aa, Homo sapiens
  Payload ID: 884;
  Gene Symbol: ALDH3A2;
  Gene Name: aldehyde dehydrogenase 3 family, member A2;
  ENSP ID: ENSP00000463924
  MOD_RES (1)..(1): Any amino acid
XLKREGANKLRYPPNSQSKVDWGKFFLLKRFNKEKLGLLLLTFLGIVAAVLVKTALVQ

SEQ ID NO: 3900 - protein, 393 aa, Homo sapiens
  Payload ID: 884;
  Gene Symbol: ALDH3A2;
  Gene Name: aldehyde dehydrogenase 3 family, member A2;
  ENSP ID: ENSP00000464153
MELEVRRVRQAFLSGRSRPLRFRLQQLEALRRMVQEREKDILTAIAADLCKSEFNVYSQEVITVLGEIDFMLENLPEWVTAKPVKKNVLTMLDEAYIQPQPLGVVLIIGAWNYPFVLTIQPLIGAIAAGNAVIIKPSELSENTAKILAKLLPQYLDQDLYIVINGGVEETTELLKQRFDHIFYTGNTAVGKIVMEAAAKHLTPVTLELGGKSPCYIDKDCDLDIVCRRITWGKYMNCGQTCIAPDYILCEASLQNQIVWKIKETVKEFYGENIKESPDYERIINLRHFKRILSLLEGQKIAFGGETDEATRYIAPTVLTDVDPKTKVMQEEIFGPILPIVPVKNVDEAINFINEREKPLALYVFSHNHKVPVGWELITENIVLILFLISVPVY

SEQ ID NO: 3901 - protein, 134 aa, Homo sapiens
  Payload ID: 884;
  Gene Symbol: ALDH3A2;
  Gene Name: aldehyde dehydrogenase 3 family, member A2;
  ENSP ID: ENSP00000464453
  MOD_RES (1)..(1): Any amino acid
XKHLTPVTLELGGKSPCYIDKDCDLDIVCSCSGCFPLRRITWGKYMNCGQTCIAPDYILCEASLQNQIVWKIKETVKEFYGENIKESPDYERIINLRHFKRILSLLEGQKIAFGGETDEATRYIAPTVLTDVDP

SEQ ID NO: 3902 - protein, 126 aa, Homo sapiens
  Payload ID: 884;
  Gene Symbol: ALDH3A2;
  Gene Name: aldehyde dehydrogenase 3 family, member A2;
  ENSP ID: ENSP00000466814
MVQEREKDILTAIAADLCKSEFNVYSQEVITVLGEIDFMLENLPEWVTAKPVKKNVLTMLDEAYIQPQPLGVVLIIGAWNYPFVLTIQPLIGAIAAGNAVIIKPSELSENTAKILAKLLPQYLDQD

SEQ ID NO: 3903 - protein, 393 aa, Homo sapiens; identical to SEQ ID NO: 3900
  Payload ID: 884;
  Gene Symbol: ALDH3A2;
  Gene Name: aldehyde dehydrogenase 3 family, member A2;
  ENSP ID: ENSP00000486085

SEQ ID NO: 3904 - protein, 182 aa, Homo sapiens; identical to SEQ ID NO: 3890
  Payload ID: 884;
  Gene Symbol: ALDH3A2;
  Gene Name: aldehyde dehydrogenase 3 family, member A2;
  ENSP ID: ENSP00000486283

SEQ ID NO: 3905 - protein, 97 aa, Homo sapiens; identical to SEQ ID NO: 3892
  Payload ID: 884;
  Gene Symbol: ALDH3A2;
  Gene Name: aldehyde dehydrogenase 3 family, member A2;
  ENSP ID: ENSP00000487353

SEQ ID NO: 3906 - protein, 468 aa, Homo sapiens
  Payload ID: 885;
  Gene Symbol: ALDH3B1;
  Gene Name: aldehyde dehydrogenase 3 family, member B1;
  Uniprot ID:  P43353;
  ENSP ID: ENSP00000473990
MDPLGDTLRRLREAFHAGRTRPAEFRAAQLQGLGRFLQENKQLLHDALAQDLHKSAFESEVSEVAISQGEVTLALRNLRAWMKDERVPKNLATQLDSAFIRKEPFGLVLIIAPWNYPLNLTLVPLVGALAAGNCVVLKPSEISKNVEKILAEVLPQYVDQSCFAVVLGGPQETGQLLEHRFDYIFFTGSPRVGKIVMTAAAKHLTPVTLELGGKNPCYVDDNCDPQTVANRVAWFRYFNAGQTCVAPDYVLCSPEMQERLLPALQSTITRFYGDDPQSSPNLGRIINQKQFQRLRALLGCGRVAIGGQSDESDRYIAPTVLVDVQEMEPVMQEEIFGPILPIVNVQSLDEAIEFINRREKPLALYAFSNSSQVVKRVLTQTSSGGFCGNDGFMHMTLASLPFGGVGASGMGRYHGKFSFDTFSHHRACLLRSPGMEKLNALRYPPQSPRRLRMLLVAMEAQGCSCTLL

SEQ ID NO: 3907 - protein, 66 aa, Homo sapiens
  Payload ID: 885;
  Gene Symbol: ALDH3B1;
  Gene Name: aldehyde dehydrogenase 3 family, member B1;
  ENSP ID: ENSP00000477789
LALRNLRAWMKDERVPKNLATQLDSAFIRKEPFGLVLIIAPWNYPLNLTLVPLVGALAAGSASESG

SEQ ID NO: 3908 - protein, 71 aa, Homo sapiens
  Payload ID: 885;
  Gene Symbol: ALDH3B1;
  Gene Name: aldehyde dehydrogenase 3 family, member B1;
  ENSP ID: ENSP00000478380
QSDESDRYIAPTVLVDVQEMEPVMQEEIFGPILPIVNVQSLDEAIEFINRREKPLALYAFSNSSQERIPQR

SEQ ID NO: 3909 - protein, 468 aa, Homo sapiens; identical to SEQ ID NO: 3906
  Payload ID: 885;
  Gene Symbol: ALDH3B1;
  Gene Name: aldehyde dehydrogenase 3 family, member B1;
  Uniprot ID:  P43353;
  ENSP ID: ENSP00000478486

SEQ ID NO: 3910 - protein, 169 aa, Homo sapiens
  Payload ID: 885;
  Gene Symbol: ALDH3B1;
  Gene Name: aldehyde dehydrogenase 3 family, member B1;
  ENSP ID: ENSP00000478632
MDPLGDTLRRLREAFHAGRTRPAEFRAAQLQGLGRFLQENKQLLHDALAQDLHKSAFESEVSEVAISQGEVTLALRNLRAWMKDERVPKNLATQLDSAFIRKEPFGLVLIIAPWNYPLNLTLVPLVGALAAGNCVVLKPSEISKNVEKILAEVLPQYVDQGALVWARLL

SEQ ID NO: 3911 - protein, 230 aa, Homo sapiens
  Payload ID: 885;
  Gene Symbol: ALDH3B1;
  Gene Name: aldehyde dehydrogenase 3 family, member B1;
  ENSP ID: ENSP00000479948
MDPLGDTLRRLREAFHAGRTRPAEFRAAQLQGLGRFLQENKQLLHDALAQDLHKSAFESEVSEVAISQGEVTLALRNLRAWMKDERVPKNLATQLDSAFIRKEPFGLVLIIAPWNYPLNLTLVPLVGALAAGNCVVLKPSEISKNVEKILAEVLPQYVDQSCFAVVLGGPQETGQLLEHRFDYIFFTGSPRVGKIVMTAAAKHPSKQRLPPPSWVFPLPASASSLSRSQP

SEQ ID NO: 3912 - protein, 431 aa, Homo sapiens
  Payload ID: 885;
  Gene Symbol: ALDH3B1;
  Gene Name: aldehyde dehydrogenase 3 family, member B1;
  Uniprot ID:  P43353;
  ENSP ID: ENSP00000481604
MDPLGDTLRRLREAFHAGRTRPAEFRAAQLQGLGRFLQENKQLLHDALAQDLHKATQLDSAFIRKEPFGLVLIIAPWNYPLNLTLVPLVGALAAGNCVVLKPSEISKNVEKILAEVLPQYVDQSCFAVVLGGPQETGQLLEHRFDYIFFTGSPRVGKIVMTAAAKHLTPVTLELGGKNPCYVDDNCDPQTVANRVAWFRYFNAGQTCVAPDYVLCSPEMQERLLPALQSTITRFYGDDPQSSPNLGRIINQKQFQRLRALLGCGRVAIGGQSDESDRYIAPTVLVDVQEMEPVMQEEIFGPILPIVNVQSLDEAIEFINRREKPLALYAFSNSSQVVKRVLTQTSSGGFCGNDGFMHMTLASLPFGGVGASGMGRYHGKFSFDTFSHHRACLLRSPGMEKLNALRYPPQSPRRLRMLLVAMEAQGCSCTLL

SEQ ID NO: 3913 - protein, 211 aa, Homo sapiens
  Payload ID: 885;
  Gene Symbol: ALDH3B1;
  Gene Name: aldehyde dehydrogenase 3 family, member B1;
  ENSP ID: ENSP00000483988
MAEGSGARVFMMDPLGDTLRRLREAFHAGRTRPAEFRAAQLQGLGRFLQENKQLLHDALAQDLHKSAFESEVSEVAISQGEVTLALRNLRAWMKDERVPKNLATQLDSAFIRKEPFGLVLIIAPWNYPLNLTLVPLVGALAAGNCVVLKPSEISKNVEKILAEVLPQYVDQSCFAVVLGGPQETGQLLEHRFDYIFFTGSPRVGKIVMTAA

SEQ ID NO: 3914 - protein, 351 aa, Homo sapiens
  Payload ID: 885;
  Gene Symbol: ALDH3B1;
  Gene Name: aldehyde dehydrogenase 3 family, member B1;
  ENSP ID: ENSP00000484901
MDPLGDTLRRLREAFHAGRTRPAEFRAAQLQGLGRFLQENKQLLHDALAQDLHKSAFESEVSEVAISQGEVTLALRNLRAWMKDERVPKNLATQLDSAFIRKEPFGLVLIIAPWNYPLNLTLVPLVGALAAGNCVVLKPSEISKNVEKILAEVLPQYVDQSSPNLGRIINQKQFQRLRALLGCGRVAIGGQSDESDRYIAPTVLVDVQEMEPVMQEEIFGPILPIVNVQSLDEAIEFINRREKPLALYAFSNSSQVVKRVLTQTSSGGFCGNDGFMHMTLASLPFGGVGASGMGRYHGKFSFDTFSHHRACLLRSPGMEKLNALRYPPQSPRRLRMLLVAMEAQGCSCTLL

SEQ ID NO: 3915 - protein, 385 aa, Homo sapiens
  Payload ID: 886;
  Gene Symbol: ALDH3B2;
  Gene Name: aldehyde dehydrogenase 3 family, member B2;
  Uniprot ID:  P48448;
  ENSP ID: ENSP00000255084
MKDEPRSTNLFMKLDSVFIWKEPFGLVLIIAPWNYPLNLTLVLLVGALAAGSCVVLKPSEISQGTEKVLAEVLPQYLDQSCFAVVLGGPQETGQLLEHKLDYIFFTGSPRVGKIVMTAATKHLTPVTLELGGKNPCYVDDNCDPQTVANRVAWFCYFNAGQTCVAPDYVLCSPEMQERLLPALQSTITRFYGDDPQSSPNLGHIINQKQFQRLRALLGCSRVAIGGQSNESDRYIAPTVLVDVQETEPVMQEEIFGPILPIVNVQSVDEAIKFINRQEKPLALYAFSNSSQVVNQMLERTSSGSFGGNEGFTYISLLSVPFGGVGHSGMGRYHGKFTFDTFSHHRTCLLAPSGLEKLKEIHYPPYTDWNQQLLRWGMGSQSCTLL

SEQ ID NO: 3916 - protein, 385 aa, Homo sapiens; identical to SEQ ID NO: 3915
  Payload ID: 886;
  Gene Symbol: ALDH3B2;
  Gene Name: aldehyde dehydrogenase 3 family, member B2;
  Uniprot ID:  P48448;
  ENSP ID: ENSP00000431595

SEQ ID NO: 3917 - protein, 94 aa, Homo sapiens
  Payload ID: 886;
  Gene Symbol: ALDH3B2;
  Gene Name: aldehyde dehydrogenase 3 family, member B2;
  ENSP ID: ENSP00000433466
MKDEPRSTNLFMKLDSVFIWKEPFGLVLIIAPWNYPLNLTLVLLVGALAAGSCVVLKPSEISQGTEKVLAEVLPQYLDQSCFAVVLGGPQETGQ

SEQ ID NO: 3918 - protein, 147 aa, Homo sapiens
  Payload ID: 886;
  Gene Symbol: ALDH3B2;
  Gene Name: aldehyde dehydrogenase 3 family, member B2;
  ENSP ID: ENSP00000433718
MKDEPRSTNLFMKLDSVFIWKEPFGLVLIIAPWNYPLNLTLVLLVGALAAGSCVVLKPSEISQGTEKVLAEVLPQYLDQSCFAVVLGGPQETGQLLEHKLDYIFFTGSPRVGKIVMTAATKHLTPVTLELGGKNPCYVDDNCDPQTV

SEQ ID NO: 3919 - protein, 128 aa, Homo sapiens
  Payload ID: 886;
  Gene Symbol: ALDH3B2;
  Gene Name: aldehyde dehydrogenase 3 family, member B2;
  ENSP ID: ENSP00000435476
  MOD_RES (1)..(1): Any amino acid
XSDRYIAPTVLVDVQETEPVMQEEIFGPILPIVNVQSVDEAIKFINRQEKPLALPQWDGPVPRQVHLRHLLPPPHLPARPLRPGEIKGDPLPTLYRLEPAAVTLGHGLPELHPPVSVPPASNGSHRET

SEQ ID NO: 3920 - protein, 563 aa, Homo sapiens
  Payload ID: 887;
  Gene Symbol: ALDH4A1;
  Gene Name: aldehyde dehydrogenase 4 family, member A1;
  Uniprot ID:  P30038;
  ENSP ID: ENSP00000290597
MLLPAPALRRALLSRPWTGAGLRWKHTSSLKVANEPVLAFTQGSPERDALQKALKDLKGRMEAIPCVVGDEEVWTSDVQYQVSPFNHGHKVAKFCYADKSLLNKAIEAALAARKEWDLKPIADRAQIFLKAADMLSGPRRAEILAKTMVGQGKTVIQAEIDAAAELIDFFRFNAKYAVELEGQQPISVPPSTNSTVYRGLEGFVAAISPFNFTAIGGNLAGAPALMGNVVLWKPSDTAMLASYAVYRILREAGLPPNIIQFVPADGPLFGDTVTSSEHLCGINFTGSVPTFKHLWKQVAQNLDRFHTFPRLAGECGGKNFHFVHRSADVESVVSGTLRSAFEYGGQKCSACSRLYVPHSLWPQIKGRLLEEHSRIKVGDPAEDFGTFFSAVIDAKSFARIKKWLEHARSSPSLTILAGGKCDDSVGYFVEPCIVESKDPQEPIMKEEIFGPVLSVYVYPDDKYKETLQLVDSTTSYGLTGAVFSQDKDVVQEATKVLRNAAGNFYINDKSTGSIVGQQPFGGARASGTNDKPGGPHYILRWTSPQVIKETHKPLGDWSYAYMQ

SEQ ID NO: 3921 - protein, 563 aa, Homo sapiens; identical to SEQ ID NO: 3920
  Payload ID: 887;
  Gene Symbol: ALDH4A1;
  Gene Name: aldehyde dehydrogenase 4 family, member A1;
  Uniprot ID:  P30038;
  ENSP ID: ENSP00000364490

SEQ ID NO: 3922 - protein, 214 aa, Homo sapiens
  Payload ID: 887;
  Gene Symbol: ALDH4A1;
  Gene Name: aldehyde dehydrogenase 4 family, member A1;
  ENSP ID: ENSP00000393209
MLLPAPALRRALLSRPWTGAGLRWKHTSSLKVANEPVLAFTQGSPERDALQKALKDLKGRMEAIPCVVGDEEVWTSDVQYQVSSLLNKAIEAALAARKEWDLKPIADRAQIFLKAADMLSGPRRAEILAKTMVGQGKTVIQAEIDAAAELIDFFRFNAKYAVELEGQQPISVPPSTNSTVYRGLEGFVAAISPFNFTAIGGNLAGAPALMVRCG

SEQ ID NO: 3923 - protein, 503 aa, Homo sapiens
  Payload ID: 887;
  Gene Symbol: ALDH4A1;
  Gene Name: aldehyde dehydrogenase 4 family, member A1;
  Uniprot ID:  P30038;
  ENSP ID: ENSP00000442988
MEAIPCVVGDEEVWTSDVQYQVSPFNHGHKVAKFCYADKSLLNKAIEAALAARKEWDLKPIADRAQIFLKAADMLSGPRRAEILAKTMVGQGKTVIQAEIDAAAELIDFFRFNAKYAVELEGQQPISVPPSTNSTVYRGLEGFVAAISPFNFTAIGGNLAGAPALMGNVVLWKPSDTAMLASYAVYRILREAGLPPNIIQFVPADGPLFGDTVTSSEHLCGINFTGSVPTFKHLWKQVAQNLDRFHTFPRLAGECGGKNFHFVHRSADVESVVSGTLRSAFEYGGQKCSACSRLYVPHSLWPQIKGRLLEEHSRIKVGDPAEDFGTFFSAVIDAKSFARIKKWLEHARSSPSLTILAGGKCDDSVGYFVEPCIVESKDPQEPIMKEEIFGPVLSVYVYPDDKYKETLQLVDSTTSYGLTGAVFSQDKDVVQEATKVLRNAAGNFYINDKSTGSIVGQQPFGGARASGTNDKPGGPHYILRWTSPQVIKETHKPLGDWSYAYMQ

SEQ ID NO: 3924 - protein, 512 aa, Homo sapiens
  Payload ID: 887;
  Gene Symbol: ALDH4A1;
  Gene Name: aldehyde dehydrogenase 4 family, member A1;
  Uniprot ID:  P30038;
  ENSP ID: ENSP00000446071
MLLPAPALRRALLSRPWTGAGLRWKHTSSLKVANEPVLAFTQGSPERDALQKALKDLKGRMEAIPCVVGDEEVWTSDVQYQVSPFNHGHKVAKFCYADKSLLNKAIEAALAARKEWDLKPIADRAQIFLKAADMLSGPRRAEILAKTMVGQGKTVIQAEIDAAAELIDFFRFNAKYAVELEGQQPISVPPSTNSTVYRGLEGFVAAISPFNFTAIGGNLAGAPALMGNVVLWKPSDTAMLASYAVYRILREAGLPPNIIQFVPADGPLFGDTVTSSEHLCGINFTGSVPTFKHLWKQVAQNLDRFHTFPRLAGECGGKNFHFVHRSADVESVVSGTLRSAFEYGGQKCSACSRLYVPHSLWPQIKGRLLEEHSRIKVGDPAEDFGTFFSAVIDAKEIFGPVLSVYVYPDDKYKETLQLVDSTTSYGLTGAVFSQDKDVVQEATKVLRNAAGNFYINDKSTGSIVGQQPFGGARASGTNDKPGGPHYILRWTSPQVIKETHKPLGDWSYAYMQ

SEQ ID NO: 3925 - protein, 548 aa, Homo sapiens
  Payload ID: 888;
  Gene Symbol: ALDH5A1;
  Gene Name: aldehyde dehydrogenase 5 family, member A1;
  Uniprot ID:  P51649;
  ENSP ID: ENSP00000314649
MATCIWLRSCGARRLGSTFPGCRLRPRAGGLVPASGPAPGPAQLRCYAGRLAGLSAALLRTDSFVGGRWLPAAATFPVQDPASGAALGMVADCGVREARAAVRAAYEAFCRWREVSAKERSSLLRKWYNLMIQNKDDLARIITAESGKPLKEAHGEILYSAFFLEWFSEEARRVYGDIIHTPAKDRRALVLKQPIGVAAVITPWNFPSAMITRKVGAALAAGCTVVVKPAEDTPFSALALAEVNQGFLLDLDPLLLASQAGIPSGVYNVIPCSRKNAKEVGEAICTDPLVSKISFTGSTTTGKILLHHAANSVKRVSMELGGLAPFIVFDSANVDQAVAGAMASKFRNTGQTCVCSNQFLVQRGIHDAFVKAFAEAMKKNLRVGNGFEEGTTQGPLINEKAVEKVEKQVNDAVSKGATVVTGGKRHQLGKNFFEPTLLCNVTQDMLCTHEETFGPLAPVIKFDTEEEAIAIANAADVGLAGYFYSQDPAQIWRVAEQLEVGMVGVNEGLISSVECPFGGVKQSGLGREGSKYGIDEYLELKYVCYGGL

SEQ ID NO: 3926 - protein, 535 aa, Homo sapiens
  Payload ID: 888;
  Gene Symbol: ALDH5A1;
  Gene Name: aldehyde dehydrogenase 5 family, member A1;
  Uniprot ID:  P51649;
  ENSP ID: ENSP00000350191
MATCIWLRSCGARRLGSTFPGCRLRPRAGGLVPASGPAPGPAQLRCYAGRLAGLSAALLRTDSFVGGRWLPAAATFPVQDPASGAALGMVADCGVREARAAVRAAYEAFCRWREVSAKERSSLLRKWYNLMIQNKDDLARIITAESGKPLKEAHGEILYSAFFLEWFSEEARRVYGDIIHTPAKDRRALVLKQPIGVAAVITPWNFPSAMITRKVGAALAAGCTVVVKPAEDTPFSALALAELASQAGIPSGVYNVIPCSRKNAKEVGEAICTDPLVSKISFTGSTTTGKILLHHAANSVKRVSMELGGLAPFIVFDSANVDQAVAGAMASKFRNTGQTCVCSNQFLVQRGIHDAFVKAFAEAMKKNLRVGNGFEEGTTQGPLINEKAVEKVEKQVNDAVSKGATVVTGGKRHQLGKNFFEPTLLCNVTQDMLCTHEETFGPLAPVIKFDTEEEAIAIANAADVGLAGYFYSQDPAQIWRVAEQLEVGMVGVNEGLISSVECPFGGVKQSGLGREGSKYGIDEYLELKYVCYGGL

SEQ ID NO: 3927 - protein, 507 aa, Homo sapiens
  Payload ID: 888;
  Gene Symbol: ALDH5A1;
  Gene Name: aldehyde dehydrogenase 5 family, member A1;
  ENSP ID: ENSP00000417687
MATCIWLRSCGARRLGSTFPGCRLRPRAGGLVPASGPAPGPAQLRCYAGRLAGLSAALLRTDSFVGGRWLPAAATFPVQDPASGAALGMVADCGVREARAAVRAAYEAFCRWREVSAKGKPLKEAHGEILYSAFFLEWFSEEARRVYGDIIHTPAKDRRALVLKQPIGVAAVITPWNFPSAMITRKVGAALAAGCTVVVKPAEDTPFSALALAELASQAGIPSGVYNVIPCSRKNAKEVGEAICTDPLVSKISFTGSTTTGKILLHHAANSVKRVSMELGGLAPFIVFDSANVDQAVAGAMASKFRNTGQTCVCSNQFLVQRGIHDAFVKAFAEAMKKNLRVGNGFEEGTTQGPLINEKAVEKVEKQVNDAVSKGATVVTGGKRHQLGKNFFEPTLLCNVTQDMLCTHEETFGPLAPVIKFDTEEEAIAIANAADVGLAGYFYSQDPAQIWRVAEQLEVGMVGVNEGLISSVECPFGGVKQSGLGREGSKYGIDEYLELKYVCYGGL

SEQ ID NO: 3928 - protein, 522 aa, Homo sapiens
  Payload ID: 889;
  Gene Symbol: ALDH6A1;
  Gene Name: aldehyde dehydrogenase 6 family, member A1;
  Uniprot ID:  Q02252;
  ENSP ID: ENSP00000342564
MAALLAAAAVRARILQVSSKVKSSPTWYSASSFSSSVPTVKLFIGGKFVESKSDKWIDIHNPATNEVIGRVPQATKAEMDAAIASCKRAFPAWADTSVLSRQQKEIAKLITLEQGKTLADAEGDVFRGLQVVEHACSVTSLMMGETMPSITKDMDLYSYRLPLGVCAGIAPFNFPAMIPLWMFPMAMVCGNTFLMKPSERVPGATMLLAKLLQDSGAPDGTLNIIHGQHEAVNFICDHPDIKAISFVGSNKAGEYIFERGSRHGKRVQANMGAKNHGVVMPDANKENTLNQLVGAAFGAAGQRCMALSTAVLVGEAKKWLPELVEHAKNLRVNAGDQPGADLGPLITPQAKERVCNLIDSGTKEGASILLDGRKIKVKGYENGNFVGPTIISNVKPNMTCYKEEIFGPVLVVLETETLDEAIQIVNNNPYGNGTAIFTTNGATARKYAHLVDVGQVGVNVPIPVPLPMFSFTGSRSSFRGDTNFYGKQGIQFYTQLKTITSQWKEEDATLSSPAVVMPTMGR

SEQ ID NO: 3929 - protein, 535 aa, Homo sapiens
  Payload ID: 889;
  Gene Symbol: ALDH6A1;
  Gene Name: aldehyde dehydrogenase 6 family, member A1;
  Uniprot ID:  Q02252;
  ENSP ID: ENSP00000450436
MAALLAAAAVRARILQVSSKVKSSPTWYSASSFSSSVPTVKLFIGGKFVESKSDKWIDIHNPATNEVIGRVPQATKAEMDAAIASCKRAFPAWADTSVLSRQQVLLRYQQLIKENLKEIAKLITLEQGKTLADAEGDVFRGLQVVEHACSVTSLMMGETMPSITKDMDLYSYRLPLGVCAGIAPFNFPAMIPLWMFPMAMVCGNTFLMKPSERVPGATMLLAKLLQDSGAPDGTLNIIHGQHEAVNFICDHPDIKAISFVGSNKAGEYIFERGSRHGKRVQANMGAKNHGVVMPDANKENTLNQLVGAAFGAAGQRCMALSTAVLVGEAKKWLPELVEHAKNLRVNAGDQPGADLGPLITPQAKERVCNLIDSGTKEGASILLDGRKIKVKGYENGNFVGPTIISNVKPNMTCYKEEIFGPVLVVLETETLDEAIQIVNNNPYGNGTAIFTTNGATARKYAHLVDVGQVGVNVPIPVPLPMFSFTGSRSSFRGDTNFYGKQGIQFYTQLKTITSQWKEEDATLSSPAVVMPTMGR

SEQ ID NO: 3930 - protein, 252 aa, Homo sapiens
  Payload ID: 889;
  Gene Symbol: ALDH6A1;
  Gene Name: aldehyde dehydrogenase 6 family, member A1;
  ENSP ID: ENSP00000452081
MGAKNHGVVMPDANKENTLNQLVGAAFGAAGQRCMALSTAVLVGEAKKWLPELVEHAKNLRVNAGDQPGADLGPLITPQAKERVCNLIDSGTKEGASILLDGRKIKVKGYENGNFVGPTIISNVKPNMTCYKEEIFGPVLVVLETETLDEAIQIVNNNPYGNGTAIFTTNGATARKYAHLVDVGQVGVNVPIPVPLPMFSFTGSRSSFRGDTNFYGKQGIQFYTQLKTITSQWKEEDATLSSPAVVMPTMGR

SEQ ID NO: 3931 - protein, 539 aa, Homo sapiens
  Payload ID: 890;
  Gene Symbol: ALDH7A1;
  Gene Name: aldehyde dehydrogenase 7 family, member A1;
  Uniprot ID:  P49419;
  ENSP ID: ENSP00000387123
MWRLPRALCVHAAKTSKLSGPWSRPAAFMSTLLINQPQYAWLKELGLREENEGVYNGSWGGRGEVITTYCPANNEPIARVRQASVADYEETVKKAREAWKIWADIPAPKRGEIVRQIGDALREKIQVLGSLVSLEMGKILVEGVGEVQEYVDICDYAVGLSRMIGGPILPSERSGHALIEQWNPVGLVGIITAFNFPVAVYGWNNAIAMICGNVCLWKGAPTTSLISVAVTKIIAKVLEDNKLPGAICSLTCGGADIGTAMAKDERVNLLSFTGSTQVGKQVGLMVQERFGRSLLELGGNNAIIAFEDADLSLVVPSALFAAVGTAGQRCTTARRLFIHESIHDEVVNRLKKAYAQIRVGNPWDPNVLYGPLHTKQAVSMFLGAVEEAKKEGGTVVYGGKVMDRPGNYVEPTIVTGLGHDASIAHTETFAPILYVFKFKNEEEVFAWNNEVKQGLSSSIFTKDLGRIFRWLGPKGSDCGIVNVNIPTSGAEIGGAFGGEKHTGGGRESGSDAWKQYMRRSTCTINYSKDLPLAQGIKFQ

SEQ ID NO: 3932 - protein, 97 aa, Homo sapiens
  Payload ID: 890;
  Gene Symbol: ALDH7A1;
  Gene Name: aldehyde dehydrogenase 7 family, member A1;
  ENSP ID: ENSP00000403929
MWRLPRALCVHAAKTSKLSGPWSRPAAFMSTLLINQPQYAWLKELGLREENEGVYNGSWGGRGEFASLDVPKSCHVVRWAVNSFEDWIFSISPLPRA

SEQ ID NO: 3933 - protein, 502 aa, Homo sapiens
  Payload ID: 890;
  Gene Symbol: ALDH7A1;
  Gene Name: aldehyde dehydrogenase 7 family, member A1;
  Uniprot ID:  P49419;
  ENSP ID: ENSP00000414132
MGSPGRGAGLYFSSSQGLGLIPSPGLSMWRLPRALCVHAAKTSKLSGPWSRPAAFMSTLLINQPQYAWLKELGLREENEGVYNGSWGGRGEVITTYCPANNEPIARVRQASVADYEETVKKAREAWKIWADIPAPKRGEIVRQIGDALREKIQVLGSLVSLEMGKILVEGVGEVQEYVDICDYAVGLSRMIGGPILPSERSGHALIEQWNPVGLVGIITAFNFPVAVYGWNNAIAMICGNVCLWKGAPTTSLISVAVTKIIAKVLEDNKLPGAICSLTCGGADIGTAMAKDERVNLLSFTGSTQVGKQVGLMVQERFGRSLLELGGNNAIIAFEDADLSLVVPSALFAAVGTAGQRCTTARRLVMDRPGNYVEPTIVTGLGHDASIAHTETFAPILYVFKFKNEEEVFAWNNEVKQGLSSSIFTKDLGRIFRWLGPKGSDCGIVNVNIPTSGAEIGGAFGGEKHTGGGRESGSDAWKQYMRRSTCTINYSKDLPLAQGIKFQ

SEQ ID NO: 3934 - protein, 77 aa, Homo sapiens
  Payload ID: 890;
  Gene Symbol: ALDH7A1;
  Gene Name: aldehyde dehydrogenase 7 family, member A1;
  ENSP ID: ENSP00000414536
MWRLPRALCVHAAKTSKLSGPWSRPAAFMSTLLINQPQYAWLKELGLREENEGVYNGSWGGRGEGLRFLYMIIILLF

SEQ ID NO: 3935 - protein, 239 aa, Homo sapiens
  Payload ID: 890;
  Gene Symbol: ALDH7A1;
  Gene Name: aldehyde dehydrogenase 7 family, member A1;
  ENSP ID: ENSP00000447388
RLPRALCVHAAKTSKLSGPWSRPAAFMSTLLINQPQYAWLKELGLREENEGVYNGSWGGRGEVITTYCPANNEPIARVRQASVADYEETVKKAREAWKIWADVSLEMGKILVEGVGEVQEYVDICDYAVGLSRMIGGPILPSERSGHALIEQWNPVGLVGIITAFNFPVAVYGWNNAIAMICGNVCLWKGAPTTSLISVAVTKIIAKVLEDNKLPGAICSLTCGGADIGTAMAKDERVN

SEQ ID NO: 3936 - protein, 475 aa, Homo sapiens
  Payload ID: 890;
  Gene Symbol: ALDH7A1;
  Gene Name: aldehyde dehydrogenase 7 family, member A1;
  ENSP ID: ENSP00000448593
MWRLPRALCVHAAKTSKLSGPWSRPAAFMSTLLINQPQYAWLKELGLREENEGVYNGSWGGRGEVITTYCPANNEPIARVRQASVADYEETVKKAREAWKIWADIPAPKRGEIVRQIGDALREKIQVLGSLVSLEMGKILVEGVGEVQEYVDICDYAVGLSRMIGGPILPSERSGHALIEQWNPVGLVGIITAFNFPVAVYGWNNAIAMICGNVCLWKGAPTTSLISVAVTKIIAKVLEDNKLPGAICSLTCGGADIGTAMAKDERVNLLSFTGSTQVGKQVGLMVQERFGRSLLELGGNNAIIAFEDADLSLVVPSALFAAVGTAGQRCTTARRLVMDRPGNYVEPTIVTGLGHDASIAHTETFAPILYVFKFKNEEEVFAWNNEVKQGLSSSIFTKDLGRIFRWLGPKGSDCGIVNVNIPTSGAEIGGAFGGEKHTGGGRESGSDAWKQYMRRSTCTINYSKDLPLAQGIKFQ

SEQ ID NO: 3937 - protein, 141 aa, Homo sapiens
  Payload ID: 890;
  Gene Symbol: ALDH7A1;
  Gene Name: aldehyde dehydrogenase 7 family, member A1;
  ENSP ID: ENSP00000449318
MWRLPRALCVHAAKTSKLSGPWSRPAAFMSTLLINQPQYAWLKELGLREENEGVYNGSWGGRGEIPAPKRGEIVRQIGDALREKIQVLGSLVSLEMGKILVEGVGEVQEYVDICDYAVGLSRMIGGPILPSERSGHALIEQ

SEQ ID NO: 3938 - protein, 294 aa, Homo sapiens
  Payload ID: 890;
  Gene Symbol: ALDH7A1;
  Gene Name: aldehyde dehydrogenase 7 family, member A1;
  ENSP ID: ENSP00000487936
MWRLPRALCVHAAKTSKLSGPWSRPAAFMSTLLINQPQYAWLKELGLREENEGVYNGSWGGRGEVITTYCPANNEPIARVRQASVADYEETVKKAREAWKIWADIPAPKRGEIVRQIGDALREKIQVLGSLVSLEMGKILVEGVGEVQEYVDICDYAVGLSRMIGGPILPSERSGHALIEQWNPVGLVGIITAFNFPVAVYGWNNAIAMICGNVCLWKGAPTTSLISVAVTKIIAKVLEDNKLPGAICSLTCGGADIGTAMAKDERVNLLSFTGSTQVGKQVGLMVQERFEQWK

SEQ ID NO: 3939 - protein, 27 aa, Homo sapiens
  Payload ID: 890;
  Gene Symbol: ALDH7A1;
  Gene Name: aldehyde dehydrogenase 7 family, member A1;
  ENSP ID: ENSP00000487998
  MOD_RES (1)..(1): Any amino acid
XELGLREENEGVYNGSWGGRGEDLAMH

SEQ ID NO: 3940 - protein, 41 aa, Homo sapiens
  Payload ID: 890;
  Gene Symbol: ALDH7A1;
  Gene Name: aldehyde dehydrogenase 7 family, member A1;
  ENSP ID: ENSP00000488032
  MOD_RES (1)..(1): Any amino acid
XSTLLINQPQYAWLKELGLREENEGVYNGSWGGRGEDLAMH

SEQ ID NO: 3941 - protein, 487 aa, Homo sapiens
  Payload ID: 891;
  Gene Symbol: ALDH8A1;
  Gene Name: aldehyde dehydrogenase 8 family, member A1;
  Uniprot ID:  Q9H2A2;
  ENSP ID: ENSP00000265605
MAGTNALLMLENFIDGKFLPCSSYIDSYDPSTGEVYCRVPNSGKDEIEAAVKAAREAFPSWSSRSPQERSRVLNQVADLLEQSLEEFAQAESKDQGKTLALARTMDIPRSVQNFRFFASSSLHHTSECTQMDHLGCMHYTVRAPVGVAGLISPWNLPLYLLTWKIAPAMAAGNTVIAKPSELTSVTAWMLCKLLDKAGVPPGVVNIVFGTGPRVGEALVSHPEVPLISFTGSQPTAERITQLSAPHCKKLSLELGGKNPAIIFEDANLDECIPATVRSSFANQGEICLCTSRIFVQKSIYSEFLKRFVEATRKWKVGIPSDPLVSIGALISKAHLEKVRSYVKRALAEGAQIWCGEGVDKLSLPARNQAGYFMLPTVITDIKDESCCMTEEIFGPVTCVVPFDSEEEVIERANNVKYGLAATVWSSNVGRVHRVAKKLQSGLVWTNCWLIRELNLPFGGMKSSGIGREGAKDSYDFFTEIKTITVKH

SEQ ID NO: 3942 - protein, 160 aa, Homo sapiens
  Payload ID: 891;
  Gene Symbol: ALDH8A1;
  Gene Name: aldehyde dehydrogenase 8 family, member A1;
  Uniprot ID:  Q9H2A2;
  ENSP ID: ENSP00000325473
MAGTNALLMLENFIDGKFLPCSSYIDSYDPSTGEVYCRVPNSGKDEIEAAVKAAREAFPSWSSRSPQERSRVLNQVADLLEQSLEEFAQAESKDQGKTLALARTMDIPRSVQNFRFFASSSLHHTSECTQMDHLGCMHYTVRAPVGVVPGYTCRTCRFVT

SEQ ID NO: 3943 - protein, 433 aa, Homo sapiens
  Payload ID: 891;
  Gene Symbol: ALDH8A1;
  Gene Name: aldehyde dehydrogenase 8 family, member A1;
  Uniprot ID:  Q9H2A2;
  ENSP ID: ENSP00000356819
MAGTNALLMLENFIDGKFLPCSSYIDSYDPSTGEVYCRVPNSGKDEIEAAVKAAREAFPSWSSRSPQERSRVLNQVADLLEQSLEEFAQAESKDQGKTLALARTMDIPRSVQNFRFFASSSLHHTSECTQMDHLGCMHYTVRAPVGVAGLISPWNLPLYLLTWKIAPAMAAGNTVIAKPSELTSVTAWMLCKLLDKAGVPPGVVNIVFGTGPRVGEALVSHPEVPLISFTGSQPTAERITQLSAPHCKKLSLELGGKNPAIIFEDANLDECIPATVRSSFANQVRSYVKRALAEGAQIWCGEGVDKLSLPARNQAGYFMLPTVITDIKDESCCMTEEIFGPVTCVVPFDSEEEVIERANNVKYGLAATVWSSNVGRVHRVAKKLQSGLVWTNCWLIRELNLPFGGMKSSGIGREGAKDSYDFFTEIKTITVKH

SEQ ID NO: 3944 - protein, 437 aa, Homo sapiens
  Payload ID: 891;
  Gene Symbol: ALDH8A1;
  Gene Name: aldehyde dehydrogenase 8 family, member A1;
  Uniprot ID:  Q9H2A2;
  ENSP ID: ENSP00000356821
MAGTNALLMLENFIDGKFLPCSSYIDSYDPSTGEVYCRVPNSGKDEIEAAVKAAREAFPSWSSRSPQERSRVLNQVADLLEQSLEEFAQAESKDQGKTLALARTMDIPRSVQNFRFFASSSLHHTSECTQMDHLGCMHYTVRAPVGVGVPPGVVNIVFGTGPRVGEALVSHPEVPLISFTGSQPTAERITQLSAPHCKKLSLELGGKNPAIIFEDANLDECIPATVRSSFANQGEICLCTSRIFVQKSIYSEFLKRFVEATRKWKVGIPSDPLVSIGALISKAHLEKVRSYVKRALAEGAQIWCGEGVDKLSLPARNQAGYFMLPTVITDIKDESCCMTEEIFGPVTCVVPFDSEEEVIERANNVKYGLAATVWSSNVGRVHRVAKKLQSGLVWTNCWLIRELNLPFGGMKSSGIGREGAKDSYDFFTEIKTITVKH

SEQ ID NO: 3945 - protein, 15 aa, Homo sapiens
  Payload ID: 891;
  Gene Symbol: ALDH8A1;
  Gene Name: aldehyde dehydrogenase 8 family, member A1;
  ENSP ID: ENSP00000435297
MDIPRSVQNFRFFAS

SEQ ID NO: 3946 - protein, 134 aa, Homo sapiens
  Payload ID: 891;
  Gene Symbol: ALDH8A1;
  Gene Name: aldehyde dehydrogenase 8 family, member A1;
  ENSP ID: ENSP00000437161
EFLKRFVEATRKWKVGIPSDPLVRSYVKRALAEGAQIWCGEGVDKLSLPARNQAGYFMLPTVITDIKDESCCMTEEIFGPVTCVVPFDSEEEVIERANNVKYGLAATVWSSNVGRVHRVAKKLQSGLVWTNCWL

SEQ ID NO: 3947 - protein, 518 aa, Homo sapiens
  Payload ID: 892;
  Gene Symbol: ALDH9A1;
  Gene Name: aldehyde dehydrogenase 9 family, member A1;
  Uniprot ID:  P49189;
  ENSP ID: ENSP00000346827
MFLRAGLAALSPLLRSLRPSPVAAMSTGTFVVSQPLNYRGGARVEPADASGTEKAFEPATGRVIATFTCSGEKEVNLAVQNAKAAFKIWSQKSGMERCRILLEAARIIREREDEIATMECINNGKSIFEARLDIDISWQCLEYYAGLAASMAGEHIQLPGGSFGYTRREPLGVCVGIGAWNYPFQIASWKSAPALACGNAMVFKPSPFTPVSALLLAEIYSEAGVPPGLFNVVQGGAATGQFLCQHPDVAKVSFTGSVPTGMKIMEMSAKGIKPVTLELGGKSPLIIFSDCDMNNAVKGALMANFLTQGQVCCNGTRVFVQKEILDKFTEEVVKQTQRIKIGDPLLEDTRMGPLINRPHLERVLGFVKVAKEQGAKVLCGGDIYVPEDPKLKDGYYMRPCVLTNCRDDMTCVKEEIFGPVMSILSFDTEAEVLERANDTTFGLAAGVFTRDIQRAHRVVAELQAGTCFINNYNVSPVELPFGGYKKSGFGRENGRVTIEYYSQLKTVCVEMGDVESAF

SEQ ID NO: 3948 - protein, 193 aa, Homo sapiens
  Payload ID: 893;
  Gene Symbol: AOX1;
  Gene Name: aldehyde oxidase 1;
  ENSP ID: ENSP00000260930
SKNPKGTWKDWAQTAFDESINLSAVGYFRGYESDMNWEKGEGQPFEYFVYGAACSEVEIDCLTGDHKNIRTDIVMDVGCSINPAIDIGQGILHTRGPDQYKIPAICDMPTELHIALLPPSQNSNTLYSSKGLGESGVFLGCSVFFAIHDAVSAARQERGLHGPLTLNSPLTPEKIRMACEDKFTKMIPRDEPG

SEQ ID NO: 3949 - protein, 1338 aa, Homo sapiens
  Payload ID: 893;
  Gene Symbol: AOX1;
  Gene Name: aldehyde oxidase 1;
  Uniprot ID:  Q06278;
  ENSP ID: ENSP00000363832
MDRASELLFYVNGRKVIEKNVDPETMLLPYLRKKLRLTGTKYGCGGGGCGACTVMISRYNPITKRIRHHPANACLIPICSLYGAAVTTVEGIGSTHTRIHPVQERIAKCHGTQCGFCTPGMVMSIYTLLRNHPEPTLDQLTDALGGNLCRCTGYRPIIDACKTFCKTSGCCQSKENGVCCLDQGINGLPEFEEGSKTSPKLFAEEEFLPLDPTQELIFPPELMIMAEKQSQRTRVFGSERMMWFSPVTLKELLEFKFKYPQAPVIMGNTSVGPEVKFKGVFHPVIISPDRIEELSVVNHAYNGLTLGAGLSLAQVKDILADVVQKLPEEKTQMYHALLKHLGTLAGSQIRNMASLGGHIISRHPDSDLNPILAVGNCTLNLLSKEGKRQIPLNEQFLSKCPNADLKPQEILVSVNIPYSRKWEFVSAFRQAQRQENALAIVNSGMRVFFGEGDGIIRELCISYGGVGPATICAKNSCQKLIGRHWNEQMLDIACRLILNEVSLLGSAPGGKVEFKRTLIISFLFKFYLEVSQILKKMDPVHYPSLADKYESALEDLHSKHHCSTLKYQNIGPKQHPEDPIGHPIMHLSGVKHATGEAIYCDDMPLVDQELFLTFVTSSRAHAKIVSIDLSEALSMPGVVDIMTAEHLSDVNSFCFFTEAEKFLATDKVFCVGQLVCAVLADSEVQAKRAAKRVKIVYQDLEPLILTIEESIQHNSSFKPERKLEYGNVDEAFKVVDQILEGEIHMGGQEHFYMETQSMLVVPKGEDQEMDVYVSTQFPKYIQDIVASTLKLPANKVMCHVRRVGGAFGGKVLKTGIIAAVTAFAANKHGRAVRCVLERGEDMLITGGRHPYLGKYKAGFMNDGRILALDMEHYSNAGASLDESLFVIEMGLLKMDNAYKFPNLRCRGWACRTNLPSNTAFRGFGFPQAALITESCITEVAAKCGLSPEKVRIINMYKEIDQTPYKQEINAKNLIQCWRECMAMSSYSLRKVAVEKFNAENYWKKKGLAMVPLKFPVGLGSRAAGQAAALVHIYLDGSVLVTHGGIEMGQGVHTKMIQVVSRELRMPMSNVHLRGTSTETVPNANISGGSVVADLNGLAVKDACQTLLKRLEPIISKNPKGTWKDWAQTAFDESINLSAVGYFRGYESDMNWEKGEGQPFEYFVYGAACSEVEIDCLTGDHKNIRTDIVMDVGCSINPAIDIGQIEGAFIQGMGLYTIEELNYSPQGILHTRGPDQYKIPAICDMPTELHIALLPPSQNSNTLYSSKGLGESGVFLGCSVFFAIHDAVSAARQERGLHGPLTLNSPLTPEKIRMACEDKFTKMIPRDEPGSYVPWNVPI

SEQ ID NO: 3950 - protein, 151 aa, Homo sapiens
  Payload ID: 893;
  Gene Symbol: AOX1;
  Gene Name: aldehyde oxidase 1;
  ENSP ID: ENSP00000392485
MLLPYLRKKLRLTGTKYGCGGGGCGACTVMISRYNPITKRIRHHPANACLIPICSLYGAAVTTVEGIGSTHTRIHPVQERIAKCHGTQCGFCTPGMVMSIYTLLRNHPEPTLDQLTDALGGNLCRCTGYRPIIDACKTFCKTSGCCQSKEN

SEQ ID NO: 3951 - protein, 190 aa, Homo sapiens
  Payload ID: 893;
  Gene Symbol: AOX1;
  Gene Name: aldehyde oxidase 1;
  ENSP ID: ENSP00000413326
YFVYGAACSEVEIDCLTGDHKNIRTDIVMDVGCSINPAIDIGQIEGAFIQGMGLYTIEELNYSPQGILHTRGPDQYKIPAICDMPTELHIALLPPSQNSNTLYSSKGLGESGVFLGCSVFFAIHDAVSAARQERGLHGPLTLNSPLTPEKIRMACEDKFTKMGAHGKPVRRTQEQVLLIQLHKIQPMLVA

SEQ ID NO: 3952 - protein, 325 aa, Homo sapiens
  Payload ID: 894;
  Gene Symbol: AKR1A1;
  Gene Name: aldo-keto reductase family 1, member A1 (aldehyde reductase);
  Uniprot ID:  P14550;
  ENSP ID: ENSP00000312606
MAASCVLLHTGQKMPLIGLGTWKSEPGQVKAAVKYALSVGYRHIDCAAIYGNEPEIGEALKEDVGPGKAVPREELFVTSKLWNTKHHPEDVEPALRKTLADLQLEYLDLYLMHWPYAFERGDNPFPKNADGTICYDSTHYKETWKALEALVAKGLVQALGLSNFNSRQIDDILSVASVRPAVLQVECHPYLAQNELIAHCQARGLEVTAYSPLGSSDRAWRDPDEPVLLEEPVVLALAEKYGRSPAQILLRWQVQRKVICIPKSITPSRILQNIKVFDFTFSPEEMKQLNALNKNWRYIVPMLTVDGKRVPRDAGHPLYPFNDPY

SEQ ID NO: 3953 - protein, 325 aa, Homo sapiens; identical to SEQ ID NO: 3952
  Payload ID: 894;
  Gene Symbol: AKR1A1;
  Gene Name: aldo-keto reductase family 1, member A1 (aldehyde reductase);
  Uniprot ID:  P14550;
  ENSP ID: ENSP00000361140

SEQ ID NO: 3954 - protein, 147 aa, Homo sapiens
  Payload ID: 894;
  Gene Symbol: AKR1A1;
  Gene Name: aldo-keto reductase family 1, member A1 (aldehyde reductase);
  ENSP ID: ENSP00000398414
MAASCVLLHTGQKMPLIGLGTWKSEPGQVKAAVKYALSVGYRHIDCAAIYGNEPEIGEALKEDVGPGKAVPREELFVTSKLWNTKHHPEDVEPALRKTLADLQLEYLDLYLMHWPYAFERGDNPFPKNADGTICYDSTHYKETWKAL

SEQ ID NO: 3955 - protein, 119 aa, Homo sapiens
  Payload ID: 894;
  Gene Symbol: AKR1A1;
  Gene Name: aldo-keto reductase family 1, member A1 (aldehyde reductase);
  ENSP ID: ENSP00000476713
MAASCVLLHTGQKMPLIGLGTWKSEPGQVKAAVKYALSVGYRHIDCAAIYGNEPEIGEALKEDVGPGKAVPREELFVTSKLWNTKHHPEDVEPALRKTLADLQLEYLDLYLMHWPYAFE

SEQ ID NO: 3956 - protein, 140 aa, Homo sapiens
  Payload ID: 894;
  Gene Symbol: AKR1A1;
  Gene Name: aldo-keto reductase family 1, member A1 (aldehyde reductase);
  ENSP ID: ENSP00000476978
MAASCVLLHTGQKMPLIGLGTWKSEPGQVKAAVKYALSVGYRHIDCAAIYGNEPEIGEALKEDVGPGKAVPREELFVTSKLWNTKHHPEDVEPALRKTLADLQLEYLDLYLMHWPYAFEWGCLSLRRGDNPFPKNADGTI

SEQ ID NO: 3957 - protein, 325 aa, Homo sapiens; identical to SEQ ID NO: 3952
  Payload ID: 894;
  Gene Symbol: AKR1A1;
  Gene Name: aldo-keto reductase family 1, member A1 (aldehyde reductase);
  Uniprot ID:  P14550;
  ENSP ID: ENSP00000480713

SEQ ID NO: 3958 - protein, 316 aa, Homo sapiens
  Payload ID: 895;
  Gene Symbol: AKR1B1;
  Gene Name: aldo-keto reductase family 1, member B1 (aldose reductase);
  Uniprot ID:  P15121;
  ENSP ID: ENSP00000285930
MASRLLLNNGAKMPILGLGTWKSPPGQVTEAVKVAIDVGYRHIDCAHVYQNENEVGVAIQEKLREQVVKREELFIVSKLWCTYHEKGLVKGACQKTLSDLKLDYLDLYLIHWPTGFKPGKEFFPLDESGNVVPSDTNILDTWAAMEELVDEGLVKAIGISNFNHLQVEMILNKPGLKYKPAVNQIECHPYLTQEKLIQYCQSKGIVVTAYSPLGSPDRPWAKPEDPSLLEDPRIKAIAAKHNKTTAQVLIRFPMQRNLVVIPKSVTPERIAENFKVFDFELSSQDMTTLLSYNRNWRVCALLSCTSHKDYPFHEEF

SEQ ID NO: 3959 - protein, 102 aa, Homo sapiens
  Payload ID: 895;
  Gene Symbol: AKR1B1;
  Gene Name: aldo-keto reductase family 1, member B1 (aldose reductase);
  ENSP ID: ENSP00000413205
MASRLLLNNGAKMPILGLGTWKSPPGQVTEAVKVAIDVGYRHIDCAHVYQNENEVGVAIQEKLREQVVKREELFIVSKPGSCLVAGNDDMCPLAGLAVVHVP

SEQ ID NO: 3960 - protein, 263 aa, Homo sapiens
  Payload ID: 895;
  Gene Symbol: AKR1B1;
  Gene Name: aldo-keto reductase family 1, member B1 (aldose reductase);
  ENSP ID: ENSP00000414399
MASRLLLNNGAKMPILGLGTWKSPPGQVTEAVKVAIDVGYRHIDCAHVYQNENEVGVAIQEKLREQVVKREELFIVSKLWCTYHEKGLVKGACQKTLSDLKLDYLDLYLIHWPTGFKPGKEFFPLDESGNVVPSDTNILDTWAAMEELVDEGLVKAIGISNFNHLQVEMILNKPGLKYKPAVNQIECHPYLTQEKLIQYCQSKGIVVTAYSPLGSPDRPWAKPEDPSLLEDPRIKAIAAKHNKTTAQVQPLQVLLTVHNCLHS

SEQ ID NO: 3961 - protein, 316 aa, Homo sapiens
  Payload ID: 896;
  Gene Symbol: AKR1B10;
  Gene Name: aldo-keto reductase family 1, member B10 (aldose reductase);
  Uniprot ID:  O60218;
  ENSP ID: ENSP00000352584
MATFVELSTKAKMPIVGLGTWKSPLGKVKEAVKVAIDAGYRHIDCAYVYQNEHEVGEAIQEKIQEKAVKREDLFIVSKLWPTFFERPLVRKAFEKTLKDLKLSYLDVYLIHWPQGFKSGDDLFPKDDKGNAIGGKATFLDAWEAMEELVDEGLVKALGVSNFSHFQIEKLLNKPGLKYKPVTNQVECHPYLTQEKLIQYCHSKGITVTAYSPLGSPDRPWAKPEDPSLLEDPKIKEIAAKHKKTAAQVLIRFHIQRNVIVIPKSVTPARIVENIQVFDFKLSDEEMATILSFNRNWRACNVLQSSHLEDYPFNAEY

SEQ ID NO: 3962 - protein, 344 aa, Homo sapiens
  Payload ID: 897;
  Gene Symbol: AKR1B15;
  Gene Name: aldo-keto reductase family 1, member B15;
  Uniprot ID:  C9JRZ8;
  ENSP ID: ENSP00000389289
MVLQMEPQVNSTNNFHQGPLDQPVGPLTGLKSSLLKDTTSAGPLLRPYPASLLGKVKEAVKVAIDAEYRHIDCAYFYENQHEVGEAIQEKIQEKAVMREDLFIVSKVWPTFFERPLVRKAFEKTLKDLKLSYLDVYLIHWPQGFKTGDDFFPKDDKGNMISGKGTFLDAWEAMEELVDEGLVKALGVSNFNHFQIERLLNKPGLKYKPVTNQVECHPYLTQEKLIQYCHSKGITVTAYSPLGSPDRPWAKPEDPSLLEDPKIKEIAAKHKKTTAQVLIRFHIQRNVTVIPKSMTPAHIVENIQVFDFKLSDEEMATILSFNRNWRAFDFKEFSHLEDFPFDAEY

SEQ ID NO: 3963 - protein, 344 aa, Homo sapiens; identical to SEQ ID NO: 3962
  Payload ID: 897;
  Gene Symbol: AKR1B15;
  Gene Name: aldo-keto reductase family 1, member B15;
  Uniprot ID:  C9JRZ8;
  ENSP ID: ENSP00000397009

SEQ ID NO: 3964 - protein, 205 aa, Homo sapiens
  Payload ID: 898;
  Gene Symbol: AKR1C1;
  Gene Name: aldo-keto reductase family 1, member C1;
  ENSP ID: ENSP00000370240
MGVVSLFLCIVEQIFTSSKKIQFRGIFMAKVPKSKALEATKLAIEAGFRHIDSAHLYNNEEQVGLAIRSKIADGSVKREDIFYTSKLWCNSHRPELVRPALERSLKNLQLDYVDLYLIHFPVSVKPGEEVIPKDENGKILFDTVDLCATWEAVEKCKDAGLAKSIGVSNFNRRQLEMILNKPGLKYKPVCNQPRDNSIFSLSPDW

SEQ ID NO: 3965 - protein, 323 aa, Homo sapiens
  Payload ID: 898;
  Gene Symbol: AKR1C1;
  Gene Name: aldo-keto reductase family 1, member C1;
  Uniprot ID:  Q04828;
  ENSP ID: ENSP00000370254
MDSKYQCVKLNDGHFMPVLGFGTYAPAEVPKSKALEATKLAIEAGFRHIDSAHLYNNEEQVGLAIRSKIADGSVKREDIFYTSKLWCNSHRPELVRPALERSLKNLQLDYVDLYLIHFPVSVKPGEEVIPKDENGKILFDTVDLCATWEAVEKCKDAGLAKSIGVSNFNRRQLEMILNKPGLKYKPVCNQVECHPYFNQRKLLDFCKSKDIVLVAYSALGSHREEPWVDPNSPVLLEDPVLCALAKKHKRTPALIALRYQLQRGVVVLAKSYNEQRIRQNVQVFEFQLTSEEMKAIDGLNRNVRYLTLDIFAGPPNYPFSDEY

SEQ ID NO: 3966 - protein, 324 aa, Homo sapiens
  Payload ID: 898;
  Gene Symbol: AKR1C1;
  Gene Name: aldo-keto reductase family 1, member C1;
  ENSP ID: ENSP00000412248
MDSKYQCVKLNDGHFMPVLGFGTYAPAEVPKSKALEATKLAIEAGFRHIDSAHLYNNEEQVGLAIRSKIADGSVKREDIFYTSKLWCNSHRPELVRPALERSLKNLQLDYVDLYLIHFPVSVKPGEEVIPKDENGKILFDTVDLCATWEVMEKCKDAGLAKSIGVSNFNRRQLEMILNKPGLKYKPVCNQVECHPYFNQRKLLDFCKSKDIVLVAYSALGSHREEPWVDPNSPVLLEDPVLCALAKKHKRTPALIALRYQLQRGVVVLAKSYNEQRIRQNVQVFEFQLTSEEMKAIDGLNRNVRYLTLDMYFASHPNYPYSDEY

SEQ ID NO: 3967 - protein, 248 aa, Homo sapiens
  Payload ID: 898;
  Gene Symbol: AKR1C1;
  Gene Name: aldo-keto reductase family 1, member C1;
  ENSP ID: ENSP00000416415
  MOD_RES (1)..(1): Any amino acid
XSKYQCVKLNDGHFMPVLGFGTYAPAEVGLAIRSKIADGSVKREDIFYTSKLWCNSHRPELVRPALERSLKNLQLDYVDLYLIHFPVSVKPGEEVIPKDENGKILFDTVDLCATWEAVEKCKDAGLAKSIGVSNFNRRQLEMILNKPGLKYKPVCNQVECHPYFNQRKLLDFCKSKDIVLVAYSALGSHREEPWVDPNSPVLLEDPVLCALAKKHKRTPALIALRYQLQRGVVVLAKSYNEQRIRQNV

SEQ ID NO: 3968 - protein, 323 aa, Homo sapiens
  Payload ID: 899;
  Gene Symbol: AKR1C2;
  Gene Name: aldo-keto reductase family 1, member C2;
  Uniprot ID:  P52895;
  ENSP ID: ENSP00000370129
MDSKYQCVKLNDGHFMPVLGFGTYAPAEVPKSKALEAVKLAIEAGFHHIDSAHVYNNEEQVGLAIRSKIADGSVKREDIFYTSKLWSNSHRPELVRPALERSLKNLQLDYVDLYLIHFPVSVKPGEEVIPKDENGKILFDTVDLCATWEAMEKCKDAGLAKSIGVSNFNHRLLEMILNKPGLKYKPVCNQVECHPYFNQRKLLDFCKSKDIVLVAYSALGSHREEPWVDPNSPVLLEDPVLCALAKKHKRTPALIALRYQLQRGVVVLAKSYNEQRIRQNVQVFEFQLTSEEMKAIDGLNRNVRYLTLDIFAGPPNYPFSDEY

SEQ ID NO: 3969 - protein, 323 aa, Homo sapiens
  Payload ID: 899;
  Gene Symbol: AKR1C2;
  Gene Name: aldo-keto reductase family 1, member C2;
  ENSP ID: ENSP00000385221
MDPKYQCVELNDGHFMPVLGFGTCVPPEVPRNRVVEVTKLAIEAGFFHIDSAHLYNNEEQVGLAIRSKIADGSVKREDIFYTSKLWSNSHRPELVRPALERSLKNLQLDYVDLYLIHFPVSVKPGEEVIPKDENGKILFDTVDLCATWEAMEKCKDAGLAKSIGVSNFNHRLLEMILNKPGLKYKPVCNQVECHPYFNQRKLLDFCKSKDIVLVAYSALGSHREEPWVDPNSPVLLEDPVLCALAKKHKRTPALIALRYQLQRGVVVLAKSYNEQRIRQNVQVFEFQLTSEEMKAIDGLNRNVRYLTLDILAGHPDYPFSGEY

SEQ ID NO: 3970 - protein, 297 aa, Homo sapiens
  Payload ID: 899;
  Gene Symbol: AKR1C2;
  Gene Name: aldo-keto reductase family 1, member C2;
  ENSP ID: ENSP00000392694
MDSKYQCVKLNDGHFMPVLGFGTYAPAEVPKSKALEAVKLAIEAGFHHIDSAHVYNNEEQVGLAIRSKIADGSVKREDIFYTSKLWSNSHRPELVRPALERSLKNLQLDYVDLYLIHFPVSVKAMEKCKDAGLAKSIGVSNFNHRLLEMILNKPGLKYKPVCNQVECHPYFNQRKLLDFCKSKDIVLVAYSALGSHREEPWVDPNSPVLLEDPVLCALAKKHKRTPALIALRYQLQRGVVVLAKSYNEQRIRQNVQVFEFQLTSEEMKAIDGLNRNVRYLTLDIFAGPPNYPFSDEY

SEQ ID NO: 3971 - protein, 139 aa, Homo sapiens
  Payload ID: 899;
  Gene Symbol: AKR1C2;
  Gene Name: aldo-keto reductase family 1, member C2;
  Uniprot ID:  P52895;
  ENSP ID: ENSP00000408440
MDSKYQCVKLNDGHFMPVLGFGTYAPAEVPKSKALEAVKLAIEAGFHHIDSAHVYNNEEQVGLAIRSKIADGSVKREDIFYTSKLWSNSHRPELVRPALERSLKNLQLDYVDLYLIHFPVSVKEDIGILTWKKSPKHNS

SEQ ID NO: 3972 - protein, 200 aa, Homo sapiens
  Payload ID: 899;
  Gene Symbol: AKR1C2;
  Gene Name: aldo-keto reductase family 1, member C2;
  ENSP ID: ENSP00000474566
MDSKYQCVKLNDGHFMPVLGFGTYAPAEVPKSKALEAVKLAIEAGFHHIDSAHVYNNEEQVGLAIRSKIADGSVKREDIFYTSKLWSNSHRPELVRPALERSLKNLQLDYVDLYLIHFPVSVKPGEEVIPKDENGKILFDTVDLCATWEAMEKCKDAGLAKSIGVSNFNHRLLEMILNKPGLKYKPVCNQVECHPYFNQR

SEQ ID NO: 3973 - protein, 323 aa, Homo sapiens
  Payload ID: 900;
  Gene Symbol: AKR1C3;
  Gene Name: aldo-keto reductase family 1, member C3;
  Uniprot ID:  P42330;
  ENSP ID: ENSP00000369927
MDSKHQCVKLNDGHFMPVLGFGTYAPPEVPRSKALEVTKLAIEAGFRHIDSAHLYNNEEQVGLAIRSKIADGSVKREDIFYTSKLWSTFHRPELVRPALENSLKKAQLDYVDLYLIHSPMSLKPGEELSPTDENGKVIFDIVDLCTTWEAMEKCKDAGLAKSIGVSNFNRRQLEMILNKPGLKYKPVCNQVECHPYFNRSKLLDFCKSKDIVLVAYSALGSQRDKRWVDPNSPVLLEDPVLCALAKKHKRTPALIALRYQLQRGVVVLAKSYNEQRIRQNVQVFEFQLTAEDMKAIDGLDRNLHYFNSDSFASHPNYPYSDEY

SEQ ID NO: 3974 - protein, 155 aa, Homo sapiens
  Payload ID: 900;
  Gene Symbol: AKR1C3;
  Gene Name: aldo-keto reductase family 1, member C3;
  ENSP ID: ENSP00000474188
MQISQVPRSKALEVTKLAIEAGFRHIDSAHLYNNEEQVGLAIRSKIADGSVKREDIFYTSKLWSTFHRPELVRPALENSLKKAQLDYVDLYLIHSPMSLKPGEELSPTDENGKVIFDIVDLCTTWEAMEKCKDAGLAKSIGVSNFNRRQLEMILN

SEQ ID NO: 3975 - protein, 300 aa, Homo sapiens
  Payload ID: 900;
  Gene Symbol: AKR1C3;
  Gene Name: aldo-keto reductase family 1, member C3;
  ENSP ID: ENSP00000474882
MQISQVPRSKALEVTKLAIEAGFRHIDSAHLYNNEEQVGLAIRSKIADGSVKREDIFYTSKLWSTFHRPELVRPALENSLKKAQLDYVDLYLIHSPMSLKPGEELSPTDENGKVIFDIVDLCTTWEAMEKCKDAGLAKSIGVSNFNRRQLEMILNKPGLKYKPVCNQVECHPYFNRSKLLDFCKSKDIVLVAYSALGSQRDKRWVDPNSPVLLEDPVLCALAKKHKRTPALIALRYQLQRGVVVLAKSYNEQRIRQNVQVFEFQLTAEDMKAIDGLDRNLHYFNSDSFASHPNYPYSDEY

SEQ ID NO: 3976 - protein, 323 aa, Homo sapiens
  Payload ID: 901;
  Gene Symbol:;
  Gene Name: aldo-keto reductase family 1, member C3 [Source:EntrezGene;Acc:8644];
  ENSP ID: ENSP00000401327
MDSKHQCLKLNDGHFMPVLGFGTYAPPEVPRSKALEVTKLAIEAGFRHIDSAHLYNNEEQVGLAIRSKIADGSVKREDIFYTSKLWSTFHRPELVRPALENSLKKAQLDYVDLYLIHSPMSLKPGEELSPTDENGKVIFDIVDLCTTWEAMEKCKDAGLAKSIGVSNFNRRQLEMILNKPGLKYKPVCNQVECHPYFNRSKLLDFCKSKDIVLVAYSALGSQRDKRWVDPNSPVLLEDPVLCALAKKHKRTPALIALRYQLQRGVVVLAKSYNEQRIRQNVQVFEFQLTAEDMKAIDGLDRNLHYFNSDSFASHPNYPYSDEY

SEQ ID NO: 3977 - protein, 323 aa, Homo sapiens
  Payload ID: 902;
  Gene Symbol: AKR1C4;
  Gene Name: aldo-keto reductase family 1, member C4;
  Uniprot ID:  P17516;
  ENSP ID: ENSP00000263126
MDPKYQRVELNDGHFMPVLGFGTYAPPEVPRNRAVEVTKLAIEAGFRHIDSAYLYNNEEQVGLAIRSKIADGSVKREDIFYTSKLWCTFFQPQMVQPALESSLKKLQLDYVDLYLLHFPMALKPGETPLPKDENGKVIFDTVDLSATWEVMEKCKDAGLAKSIGVSNFNCRQLEMILNKPGLKYKPVCNQVECHPYLNQSKLLDFCKSKDIVLVAHSALGTQRHKLWVDPNSPVLLEDPVLCALAKKHKQTPALIALRYQLQRGVVVLAKSYNEQRIRENIQVFEFQLTSEDMKVLDGLNRNYRYVVMDFLMDHPDYPFSDEY

SEQ ID NO: 3978 - protein, 323 aa, Homo sapiens; identical to SEQ ID NO: 3977
  Payload ID: 902;
  Gene Symbol: AKR1C4;
  Gene Name: aldo-keto reductase family 1, member C4;
  Uniprot ID:  P17516;
  ENSP ID: ENSP00000369814

SEQ ID NO: 3979 - protein, 326 aa, Homo sapiens
  Payload ID: 903;
  Gene Symbol: AKR1D1;
  Gene Name: aldo-keto reductase family 1, member D1;
  Uniprot ID:  P51857;
  ENSP ID: ENSP00000242375
MDLSAASHRIPLSDGNSIPIIGLGTYSEPKSTPKGACATSVKVAIDTGYRHIDGAYIYQNEHEVGEAIREKIAEGKVRREDIFYCGKLWATNHVPEMVRPTLERTLRVLQLDYVDLYIIEVPMAFKPGDEIYPRDENGKWLYHKSNLCATWEAMEACKDAGLVKSLGVSNFNRRQLELILNKPGLKHKPVSNQVECHPYFTQPKLLKFCQQHDIVITAYSPLGTSRNPIWVNVSSPPLLKDALLNSLGKRYNKTAAQIVLRFNIQRGVVVIPKSFNLERIKENFQIFDFSLTEEEMKDIEALNKNVRFVELLMWRDHPEYPFHDEY

SEQ ID NO: 3980 - protein, 290 aa, Homo sapiens
  Payload ID: 903;
  Gene Symbol: AKR1D1;
  Gene Name: aldo-keto reductase family 1, member D1;
  Uniprot ID:  P51857;
  ENSP ID: ENSP00000389197
MDLSAASHRIPLSDGNSIPIIGLGTYSEPKSTPKGACATSVKVAIDTGYRHIDGAYIYQNEHEVGEAIREKIAEGKVRREDIFYCGKLWATNHVPEMVRPTLERTLRVLQLDYVDLYIIEVPMAFKPGDEIYPRDENGKWLYHKSNLCATWEAMEACKDAGLVKSLGVSNFNRRQLELILNKPGLKHKPVSNQVECHPYFTQPKLLKFCQQHDIVITAYSPLGTSRNPIWVNVSSPPLLKDALLNSLGKRYNKTAAQIVLRFNIQRGVVVIPKSFNLERIKENFQVARSS

SEQ ID NO: 3981 - protein, 96 aa, Homo sapiens
  Payload ID: 903;
  Gene Symbol: AKR1D1;
  Gene Name: aldo-keto reductase family 1, member D1;
  ENSP ID: ENSP00000397042
MDLSAASHRIPLSDGNSIPIIGLGTYSEPKSLWATNHVPEMVRPTLERTLRVLQLDYVDLYIIEVPMAFKPGDEIYPRDENGKWLYHKSNLCATWE

SEQ ID NO: 3982 - protein, 285 aa, Homo sapiens
  Payload ID: 903;
  Gene Symbol: AKR1D1;
  Gene Name: aldo-keto reductase family 1, member D1;
  Uniprot ID:  P51857;
  ENSP ID: ENSP00000402374
MDLSAASHRIPLSDGNSIPIIGLGTYSEPKSTPKGACATSVKVAIDTGYRHIDGAYIYQNEHEVGEAIREKIAEGKVRREDIFYCGKLWATNHVPEMVRPTLERTLRVLQLDYVDLYIIEVPMAFKPGDEIYPRDENGKWLYHKSNLCATWEVECHPYFTQPKLLKFCQQHDIVITAYSPLGTSRNPIWVNVSSPPLLKDALLNSLGKRYNKTAAQIVLRFNIQRGVVVIPKSFNLERIKENFQIFDFSLTEEEMKDIEALNKNVRFVELLMWRDHPEYPFHDEY

SEQ ID NO: 3983 - protein, 320 aa, Homo sapiens
  Payload ID: 904;
  Gene Symbol: AKR1E2;
  Gene Name: aldo-keto reductase family 1, member E2;
  Uniprot ID:  Q96JD6;
  ENSP ID: ENSP00000298375
MGDIPAVGLSSWKASPGKVTEAVKEAIDAGYRHFDCAYFYHNEREVGAGIRCKIKEGAVRREDLFIATKLWCTCHKKSLVETACRKSLKALKLNYLDLYLIHWPMGFKPPHPEWIMSCSELSFCLSHPRVQDLPLDESNMVIPSDTDFLDTWEAMEDLVITGLVKNIGVSNFNHEQLERLLNKPGLRFKPLTNQIECHPYLTQKNLISFCQSRDVSVTAYRPLGGSCEGVDLIDNPVIKRIAKEHGKSPAQILIRFQIQRNVIVIPGSITPSHIKENIQVFDFELTQHDMDNILSLNRNLRLAMFPITKNHKDYPFHIEY

SEQ ID NO: 3984 - protein, 263 aa, Homo sapiens
  Payload ID: 904;
  Gene Symbol: AKR1E2;
  Gene Name: aldo-keto reductase family 1, member E2;
  Uniprot ID:  Q96JD6;
  ENSP ID: ENSP00000335034
MGDIPAVGLSSWKASPGKVTEAVKEAIDAGYRHFDCAYFYHNEREVGAGIRCKIKEGAVRREDLFIATKLWCTCHKKSLVETACRKSLKALKLNYLDLYLIHWPMGFKPPHPEWIMSCSELSFCLSHPRVQDLPLDESNMVIPSDTDFLDTWEAMEDLVITGLVKNIGVSNFNHEQLERLLNKPGLRFKPLTNQILIRFQIQRNVIVIPGSITPSHIKENIQVFDFELTQHDMDNILSLNRNLRLAMFPITKNHKDYPFHIEY

SEQ ID NO: 3985 - protein, 222 aa, Homo sapiens
  Payload ID: 904;
  Gene Symbol: AKR1E2;
  Gene Name: aldo-keto reductase family 1, member E2;
  Uniprot ID:  Q96JD6;
  ENSP ID: ENSP00000335603
MGDIPAVGLSSWKASPGKVTEAVKEAIDAGYRHFDCAYFYHNEREVGAGIRCKIKEGAVRREDLFIATKLWCTCHKKSLVETACRKSLKALKLNYLDLYLIHWPMGFKPPHPEWIMSCSELSFCLSHPRVQDLPLDESNMVIPSDTDFLDTWEILIRFQIQRNVIVIPGSITPSHIKENIQVFDFELTQHDMDNILSLNRNLRLAMFPITKNHKDYPFHIEY

SEQ ID NO: 3986 - protein, 56 aa, Homo sapiens
  Payload ID: 904;
  Gene Symbol: AKR1E2;
  Gene Name: aldo-keto reductase family 1, member E2;
  ENSP ID: ENSP00000431625
  MOD_RES (1)..(1): Any amino acid
XDVSVTAYRPLGGSCEGVDLIDNPVIKRIAKEHDFDPISNPEECDSDPRIYHPKSH

SEQ ID NO: 3987 - protein, 250 aa, Homo sapiens
  Payload ID: 904;
  Gene Symbol: AKR1E2;
  Gene Name: aldo-keto reductase family 1, member E2;
  Uniprot ID:  Q96JD6;
  ENSP ID: ENSP00000432947
MGDIPAVGLSSWKASPGKVTEAVKEAIDAGYRHFDCAYFYHNEREVGAGIRCKIKEGAVRREDLFIATKLWCTCHKKSLVETACRKSLKALKLNYLDLYLIHWPMGFKPPHPEWIMSCSELSFCLSHPRVQDLPLDESNMVIPSDTDFLDTWEAMEDLVITGLVKNIGVSNFNHEQLERLLNKPGLRFKPLTNQILIRFQIQRNVIVIPGSITPSHIKENIQVFDFELTQHDMDNILSLNRNLRLAMFPM

SEQ ID NO: 3988 - protein, 37 aa, Homo sapiens
  Payload ID: 904;
  Gene Symbol: AKR1E2;
  Gene Name: aldo-keto reductase family 1, member E2;
  ENSP ID: ENSP00000433496
  MOD_RES (1)..(1): Any amino acid
XSLKALKLNYLDLYLIHWPMGFKVPFTSSSRMDHELQ

SEQ ID NO: 3989 - protein, 203 aa, Homo sapiens
  Payload ID: 904;
  Gene Symbol: AKR1E2;
  Gene Name: aldo-keto reductase family 1, member E2;
  ENSP ID: ENSP00000434437
MGFKPPHPEWIMSCSELSFCLSHPRVQDLPLDESNMVIPSDTDFLDTWEAMEDLVITGLVKNIGVSNFNHEQLERLLNKPGLRFKPLTNQIECHPYLTQKNLISFCQSRDVSVTAYRPLGGSCEGVDLIDNPVIKRIAKEHGKSPAQILIRFQIQRNVIVIPGSITPSHIKENIQVFDFELTQHDMDNILSLNRNLRLAMFPM

SEQ ID NO: 3990 - protein, 198 aa, Homo sapiens
  Payload ID: 904;
  Gene Symbol: AKR1E2;
  Gene Name: aldo-keto reductase family 1, member E2;
  ENSP ID: ENSP00000435436
MQVIFSTAPWPNLPRAQASPGKVTEAVKEAIDAGYRHFDCAYFYHNEREVGAGIRCKIKEGAVRREDLFIATKLWCTCHKKSLVETACRKSLKALKLNYLDLYLIHWPMGFKPPHPEWIMSCSELSFCLSHPRVQDLPLDESNMVIPSDTDFLDTWEAMEDLVITGLVKNIGVSNFNHEQLERLLNKPGLRFKPLTNQ

SEQ ID NO: 3991 - protein, 307 aa, Homo sapiens
  Payload ID: 904;
  Gene Symbol: AKR1E2;
  Gene Name: aldo-keto reductase family 1, member E2;
  Uniprot ID:  Q96JD6;
  ENSP ID: ENSP00000436794
MGDIPAVGLSSWKASPGKVTEAVKEAIDAGYRHFDCAYFYHNEREVGAGIRCKIKEGAVRREDLFIATKLWCTCHKKSLVETACRKSLKALKLNYLDLYLIHWPMGFKPPHPEWIMSCSELSFCLSHPRVQDLPLDESNMVIPSDTDFLDTWEAMEDLVITGLVKNIGVSNFNHEQLERLLNKPGLRFKPLTNQIECHPYLTQKNLISFCQSRDVSVTAYRPLGGSCEGVDLIDNPVIKRIAKEHGKSPAQILIRFQIQRNVIVIPGSITPSHIKENIQVFDFELTQHDMDNILSLNRNLRLAMFPM

SEQ ID NO: 3992 - protein, 359 aa, Homo sapiens
  Payload ID: 905;
  Gene Symbol: AKR7A2;
  Gene Name: aldo-keto reductase family 7, member A2;
  Uniprot ID:  O43488;
  ENSP ID: ENSP00000235835
MLSAASRVVSRAAVHCALRSPPPEARALAMSRPPPPRVASVLGTMEMGRRMDAPASAAAVRAFLERGHTELDTAFMYSDGQSETILGGLGLGLGGGDCRVKIATKANPWDGKSLKPDSVRSQLETSLKRLQCPQVDLFYLHAPDHGTPVEETLHACQRLHQEGKFVELGLSNYASWEVAEICTLCKSNGWILPTVYQGMYNATTRQVETELFPCLRHFGLRFYAYNPLAGGLLTGKYKYEDKDGKQPVGRFFGNSWAETYRNRFWKEHHFEAIALVEKALQAAYGASAPSVTSAALRWMYHHSQLQGAHGDAVILGMSSLEQLEQNLAATEEGPLEPAVVDAFNQAWHLVAHECPNYFR

SEQ ID NO: 3993 - protein, 314 aa, Homo sapiens
  Payload ID: 905;
  Gene Symbol: AKR7A2;
  Gene Name: aldo-keto reductase family 7, member A2;
  ENSP ID: ENSP00000339084
RAAVHCALRSPPPEARALAMSRPPPPRVASVLGTMEMGRRMDAPASAAAVRAFLERGHTELDTAFMYSDGQSETILGGLGLGLGGGDCRVKIATKANPWDGKSLKPDSVRSQLETSLKRLQCPQVDLFYLHAPDHGTPVEETLHACQRLHQEGMYNATTRQVETELFPCLRHFGLRFYAYNPLAGGLLTGKYKYEDKDGKQPVGRFFGNSWAETYRNRFWKEHHFEAIALVEKALQAAYGASAPSVTSAALRWMYHHSQLQGAHGDAVILGMSSLEQLEQNLAATEEGPLEPAVVDAFNQAWHLVAHECPNYFR

SEQ ID NO: 3994 - protein, 55 aa, Homo sapiens
  Payload ID: 905;
  Gene Symbol: AKR7A2;
  Gene Name: aldo-keto reductase family 7, member A2;
  ENSP ID: ENSP00000417891
GTPVEETLHACQRLHQEGKFVELGLSNYASWEVAEICTLCKSNGWILPTVYQGAC

SEQ ID NO: 3995 - protein, 205 aa, Homo sapiens
  Payload ID: 905;
  Gene Symbol: AKR7A2;
  Gene Name: aldo-keto reductase family 7, member A2;
  ENSP ID: ENSP00000419936
  MOD_RES (1)..(1): Any amino acid
XAFMYSDGQSETILGGLGLGLGGGDCRVKIATKANPWDGKSLKPDSVRSQLETSLKRLQCPQVDLFYLHAPDHGTPVEETLHACQRLHQEGKFVELGLSNYASWEVAEICTLCKSNGWILPTVYQLLEGAPLRGHCVGGEGPAGRIWRQRPQCDLGCPPVDVPPLTAAGCPRGRGHPGHVQPGAAGAELGSNRGRAPGAGCRGCL

SEQ ID NO: 3996 - protein, 331 aa, Homo sapiens
  Payload ID: 906;
  Gene Symbol: AKR7A3;
  Gene Name: aldo-keto reductase family 7, member A3 (aflatoxin aldehyde reductase);
  Uniprot ID:  O95154;
  ENSP ID: ENSP00000355377
MSRQLSRARPATVLGAMEMGRRMDAPTSAAVTRAFLERGHTEIDTAFVYSEGQSETILGGLGLRLGGSDCRVKIDTKAIPLFGNSLKPDSLRFQLETSLKRLQCPRVDLFYLHMPDHSTPVEETLRACHQLHQEGKFVELGLSNYAAWEVAEICTLCKSNGWILPTVYQGMYNAITRQVETELFPCLRHFGLRFYAFNPLAGGLLTGKYKYEDKNGKQPVGRFFGNTWAEMYRNRYWKEHHFEGIALVEKALQAAYGASAPSMTSATLRWMYHHSQLQGAHGDAVILGMSSLEQLEQNLAAAEEGPLEPAVVDAFNQAWHLVTHECPNYFR

SEQ ID NO: 3997 - protein, 204 aa, Homo sapiens
  Payload ID: 907;
  Gene Symbol: AKR7L;
  Gene Name: aldo-keto reductase family 7-like ( gene/pseudogene);
  ENSP ID: ENSP00000402491
  MOD_RES (1)..(1): Any amino acid
XAFLYSDGQSETILGGLGLRMGSSDCRVKIATKANPWIGNSLKPDSVRSQLETSLKRLQCPVDLFYLHAPDHSAPVEETLRACHQLHQEGKFVELGLSNYAAWEVAEICTLCKSNGWILPTVYQLLEGAPLRGHCPGGEGPAGRVWRQRSQHDLGRPPVDVPPLTAAGCPRGRGHPGHVQPGAAGAELGSGRGRAPGAGCRGRL

SEQ ID NO: 3998 - protein, 330 aa, Homo sapiens
  Payload ID: 907;
  Gene Symbol: AKR7L;
  Gene Name: aldo-keto reductase family 7-like ( gene/pseudogene);
  Uniprot ID:  Q8NHP1;
  ENSP ID: ENSP00000406430
MSRQLSRARPATVLGAMEMGRRMDAPTSAAVTRAFLERGHTEIDTAFLYSDGQSETILGGLGLRMGSSDCRVKIATKANPWIGNSLKPDSVRSQLETSLKRLQCPVDLFYLHAPDHSAPVEETLRACHQLHQEGKFVELGLSNYAAWEVAEICTLCKSNGWILPTVYQGMYSATTRQVETELFPCLRHFGLRFYAYNPLAGGLLTGKYKYEDKDGKQPVGRFFGTQWAEIYRNHFWKEHHFEGIALVEKALQAAYGASAPSMTSAALRWMYHHSQLQGAHGDAVILGMSSLEQLEQNLAAAEEGPLEPAVVDAFNQAWHLFAHECPNYFI

SEQ ID NO: 3999 - protein, 330 aa, Homo sapiens; identical to SEQ ID NO: 3998
  Payload ID: 907;
  Gene Symbol: AKR7L;
  Gene Name: aldo-keto reductase family 7-like ( gene/pseudogene);
  ENSP ID: ENSP00000411913

SEQ ID NO: 4000 - protein, 364 aa, Homo sapiens
  Payload ID: 908;
  Gene Symbol: ALDOA;
  Gene Name: aldolase A, fructose-bisphosphate;
  Uniprot ID:  P04075;
  ENSP ID: ENSP00000336927
MPYQYPALTPEQKKELSDIAHRIVAPGKGILAADESTGSIAKRLQSIGTENTEENRRFYRQLLLTADDRVNPCIGGVILFHETLYQKADDGRPFPQVIKSKGGVVGIKVDKGVVPLAGTNGETTTQGLDGLSERCAQYKKDGADFAKWRCVLKIGEHTPSALAIMENANVLARYASICQQNGIVPIVEPEILPDGDHDLKRCQYVTEKVLAAVYKALSDHHIYLEGTLLKPNMVTPGHACTQKFSHEEIAMATVTALRRTVPPAVTGITFLSGGQSEEEASINLNAINKCPLLKPWALTFSYGRALQASALKAWGGKKENLKAAQEEYVKRALANSLACQGKYTPSGQAGAAASESLFVSNHAY

SEQ ID NO: 4001 - protein, 368 aa, Homo sapiens
  Payload ID: 908;
  Gene Symbol: ALDOA;
  Gene Name: aldolase A, fructose-bisphosphate;
  ENSP ID: ENSP00000378661
MPYQYPALTPEQKKELSDIAHRIVAPGKGILAADESTGSIAKRLQSIGTENTEENRRFYRQLLLTADDRVNPCIGGVILFHETLYQKADDGRPFPQVIKSKGGVVGIKVDKGVVPLAGTNGETTTQGLDGLSERCAQYKKDGADFAKWRCVLKIGEHTPSALAIMENANVLARYASICQQVGLQNGIVPIVEPEILPDGDHDLKRCQYVTEKVLAAVYKALSDHHIYLEGTLLKPNMVTPGHACTQKFSHEEIAMATVTALRRTVPPAVTGITFLSGGQSEEEASINLNAINKCPLLKPWALTFSYGRALQASALKAWGGKKENLKAAQEEYVKRALANSLACQGKYTPSGQAGAAASESLFVSNHAY

SEQ ID NO: 4002 - protein, 418 aa, Homo sapiens
  Payload ID: 908;
  Gene Symbol: ALDOA;
  Gene Name: aldolase A, fructose-bisphosphate;
  Uniprot ID:  P04075;
  ENSP ID: ENSP00000378669
MARRKPEGSSFNMTHLSMAMAFSFPPVASGQLHPQLGNTQHQTELGKELATTSTMPYQYPALTPEQKKELSDIAHRIVAPGKGILAADESTGSIAKRLQSIGTENTEENRRFYRQLLLTADDRVNPCIGGVILFHETLYQKADDGRPFPQVIKSKGGVVGIKVDKGVVPLAGTNGETTTQGLDGLSERCAQYKKDGADFAKWRCVLKIGEHTPSALAIMENANVLARYASICQQNGIVPIVEPEILPDGDHDLKRCQYVTEKVLAAVYKALSDHHIYLEGTLLKPNMVTPGHACTQKFSHEEIAMATVTALRRTVPPAVTGITFLSGGQSEEEASINLNAINKCPLLKPWALTFSYGRALQASALKAWGGKKENLKAAQEEYVKRALANSLACQGKYTPSGQAGAAASESLFVSNHAY

SEQ ID NO: 4003 - protein, 364 aa, Homo sapiens; identical to SEQ ID NO: 4000
  Payload ID: 908;
  Gene Symbol: ALDOA;
  Gene Name: aldolase A, fructose-bisphosphate;
  Uniprot ID:  P04075;
  ENSP ID: ENSP00000400452

SEQ ID NO: 4004 - protein, 140 aa, Homo sapiens
  Payload ID: 908;
  Gene Symbol: ALDOA;
  Gene Name: aldolase A, fructose-bisphosphate;
  ENSP ID: ENSP00000454499
MPYQYPALTPEQKKELSDIAHRIVAPGSIAKRLQSIGTENTEENRRFYRQLLLTADDRVNPCIGGVILFHETLYQKADDGRPFPQVIKSKGGVVGIKVDKGVVPLAGTNGETTTQGLDGLSERCAQYKKDGADFAKWRCV

SEQ ID NO: 4005 - protein, 278 aa, Homo sapiens
  Payload ID: 908;
  Gene Symbol: ALDOA;
  Gene Name: aldolase A, fructose-bisphosphate;
  ENSP ID: ENSP00000455455
MARRKPEGSSFNMTHLSMAMAFSFPPVASGQLHPQLGNTQHQTELGKELATTSTMPYQYPALTPEQKKELSDIAHRIVAPGKGILAADESTGSIAKRLQSIGTENTEENRRFYRQLLLTADDRVNPCIGGVILFHETLYQKADDGRPFPQVIKSKGGVVGIKVDKGVVPLAGTNGETTTQGLDGLSERCAQYKKDGADFAKWRCVLKIGEHTPSALAIMENANVLARYASICQQNGIVPIVEPEILPDGDHDLKRCQYVTEKVLAAVYKALSDHHIYL

SEQ ID NO: 4006 - protein, 364 aa, Homo sapiens; identical to SEQ ID NO: 4000
  Payload ID: 908;
  Gene Symbol: ALDOA;
  Gene Name: aldolase A, fructose-bisphosphate;
  Uniprot ID:  P04075;
  ENSP ID: ENSP00000455700

SEQ ID NO: 4007 - protein, 364 aa, Homo sapiens; identical to SEQ ID NO: 4000
  Payload ID: 908;
  Gene Symbol: ALDOA;
  Gene Name: aldolase A, fructose-bisphosphate;
  Uniprot ID:  P04075;
  ENSP ID: ENSP00000455724

SEQ ID NO: 4008 - protein, 364 aa, Homo sapiens; identical to SEQ ID NO: 4000
  Payload ID: 908;
  Gene Symbol: ALDOA;
  Gene Name: aldolase A, fructose-bisphosphate;
  Uniprot ID:  P04075;
  ENSP ID: ENSP00000455800

SEQ ID NO: 4009 - protein, 361 aa, Homo sapiens
  Payload ID: 908;
  Gene Symbol: ALDOA;
  Gene Name: aldolase A, fructose-bisphosphate;
  ENSP ID: ENSP00000455857
MPYQYPALTPEQKKELSDIAHRIVAPGKGILAADESTGSIAKRLQSIGTENTEENRRFYRQLLLTADDRVNPCIGGVILFHETLYQKADDGRPFPQVIKSKGGVVGIKVDKGVVPLAGTNGETTTQGLDGLSERCAQYKKDGADFAKWRCVLKIGEHTPSALAIMENANVLARYASICQQNGIVPIVEPEILPDGDHDLKRCQYVTEKVLAAVYKALSDHHIYLEGTLLKPNMVTPGHACTQKFSHEEIAMATVTALRRTVPPAVTGITFLSGGQSEEEASINLNAINKCPLLKPWALTFSYGRALQASALKAWGGKKENLKAAQEEYVKRALVRIGRRWAGCLGGWDSEKSPSHSTPLPA

SEQ ID NO: 4010 - protein, 364 aa, Homo sapiens; identical to SEQ ID NO: 4000
  Payload ID: 908;
  Gene Symbol: ALDOA;
  Gene Name: aldolase A, fructose-bisphosphate;
  Uniprot ID:  P04075;
  ENSP ID: ENSP00000455917

SEQ ID NO: 4011 - protein, 162 aa, Homo sapiens
  Payload ID: 908;
  Gene Symbol: ALDOA;
  Gene Name: aldolase A, fructose-bisphosphate;
  ENSP ID: ENSP00000456020
MPYQYPALTPEQKKELSDIAHRIVAPGSIAKRLQSIGTENTEENRRFYRQLLLTADDRVNPCIGGVILFHETLYQKADDGRPFPQVIKSKGGVVGIKVDKGVVPLAGTNGETTTQGLDGLSERCAQYKKDGADFAKWRCVLKIGEHTPSALAIMENANVLAR

SEQ ID NO: 4012 - protein, 130 aa, Homo sapiens
  Payload ID: 908;
  Gene Symbol: ALDOA;
  Gene Name: aldolase A, fructose-bisphosphate;
  ENSP ID: ENSP00000456098
  MOD_RES (1)..(1): Any amino acid
XPGHACTQKFSHEEIAMATVTALRRTVPPAVTGITFLSGGQSEEEASINLNAINKCPLLKPWALTFSYGRALQASALKAWGGKKENLKAAQEEYVKRALANSLACQGKYTPSGQAGAAASESLFVSNHAY

SEQ ID NO: 4013 - protein, 418 aa, Homo sapiens; identical to SEQ ID NO: 4002
  Payload ID: 908;
  Gene Symbol: ALDOA;
  Gene Name: aldolase A, fructose-bisphosphate;
  Uniprot ID:  P04075;
  ENSP ID: ENSP00000457468

SEQ ID NO: 4014 - protein, 204 aa, Homo sapiens
  Payload ID: 908;
  Gene Symbol: ALDOA;
  Gene Name: aldolase A, fructose-bisphosphate;
  ENSP ID: ENSP00000457514
RRFYRQLLLTADDRVNPCIGGVILFHETLYQKADDGRPFPQVIKSKGGVVGIKVDKGVVPLAGTNGETTTQGLDGLSERCAQYKKDGADFAKWRCVLKIGEHTPSALAIMENANVLARYASICQQVLAAVYKALSDHHIYLEGTLLKPNMVTPGHACTQKFSHEEIAMATVTALRRTVPPAVTGITFLSGGQSEEEASINLNAI

SEQ ID NO: 4015 - protein, 155 aa, Homo sapiens
  Payload ID: 908;
  Gene Symbol: ALDOA;
  Gene Name: aldolase A, fructose-bisphosphate;
  ENSP ID: ENSP00000457643
MPYQYPALTPEQKKELSDIAHRIVAPGKGILAADESTGSIAKRLQSIGTENTEENRRFYRQLLLTADDRVNPCIGGVILFHETLYQKADDGRPFPQVIKSKGGVVGIKVDKGVVPLAGTNGETTTQGLDGLSERCAQYKKDGADFAKWRCVLKIG

SEQ ID NO: 4016 - protein, 12 aa, Homo sapiens
  Payload ID: 908;
  Gene Symbol: ALDOA;
  Gene Name: aldolase A, fructose-bisphosphate;
  ENSP ID: ENSP00000457683
MPYQYPALTPEQ

SEQ ID NO: 4017 - protein, 368 aa, Homo sapiens; identical to SEQ ID NO: 4001
  Payload ID: 908;
  Gene Symbol: ALDOA;
  Gene Name: aldolase A, fructose-bisphosphate;
  ENSP ID: ENSP00000485952

SEQ ID NO: 4018 - protein, 364 aa, Homo sapiens
  Payload ID: 909;
  Gene Symbol: ALDOB;
  Gene Name: aldolase B, fructose-bisphosphate;
  Uniprot ID:  P05062;
  ENSP ID: ENSP00000363988
MAHRFPALTQEQKKELSEIAQSIVANGKGILAADESVGTMGNRLQRIKVENTEENRRQFREILFSVDSSINQSIGGVILFHETLYQKDSQGKLFRNILKEKGIVVGIKLDQGGAPLAGTNKETTIQGLDGLSERCAQYKKDGVDFGKWRAVLRIADQCPSSLAIQENANALARYASICQQNGLVPIVEPEVIPDGDHDLEHCQYVTEKVLAAVYKALNDHHVYLEGTLLKPNMVTAGHACTKKYTPEQVAMATVTALHRTVPAAVPGICFLSGGMSEEDATLNLNAINLCPLPKPWKLSFSYGRALQASALAAWGGKAANKEATQEAFMKRAMANCQAAKGQYVHTGSSGAASTQSLFTACYTY

SEQ ID NO: 4019 - protein, 316 aa, Homo sapiens [sequence omitted]

SEQ ID NO: 4020 - protein, 364 aa, Homo sapiens
  Payload ID: 910;
  Gene Symbol: ALDOC;
  Gene Name: aldolase C, fructose-bisphosphate;
  Uniprot ID:  P09972;
  ENSP ID: ENSP00000226253
MPHSYPALSAEQKKELSDIALRIVAPGKGILAADESVGSMAKRLSQIGVENTEENRRLYRQVLFSADDRVKKCIGGVIFFHETLYQKDDNGVPFVRTIQDKGIVVGIKVDKGVVPLAGTDGETTTQGLDGLSERCAQYKKDGADFAKWRCVLKISERTPSALAILENANVLARYASICQQNGIVPIVEPEILPDGDHDLKRCQYVTEKVLAAVYKALSDHHVYLEGTLLKPNMVTPGHACPIKYTPEEIAMATVTALRRTVPPAVPGVTFLSGGQSEEEASFNLNAINRCPLPRPWALTFSYGRALQASALNAWRGQRDNAGAATEEFIKRAEVNGLAAQGKYEGSGEDGGAAAQSLYIANHAY

SEQ ID NO: 4021 - protein, 336 aa, Homo sapiens
  Payload ID: 910;
  Gene Symbol: ALDOC;
  Gene Name: aldolase C, fructose-bisphosphate;
  ENSP ID: ENSP00000378729
MPHSYPALSAEQKKELSDIALRIVAPGKGILAADESVGSMAKRLSQIGVENTEENRRLYRQVLFSADDRVKKCIGGVIFFHETLYQKDDNGVPFVRTIQDKGIVVGIKVDKGVVPLAGTDGETTTQGLDGLSERCAQYKKDGADFAKWRCVLKISERTPSALAILENANVLARYASICQQVLAAVYKALSDHHVYLEGTLLKPNMVTPGHACPIKYTPEEIAMATVTALRRTVPPAVPGVTFLSGGQSEEEASFNLNAINRCPLPRPWALTFSYGRALQASALNAWRGQRDNAGAATEEFIKRAEVNGLAAQGKYEGSGEDGGAAAQSLYIANHAY

SEQ ID NO: 4022 - protein, 364 aa, Homo sapiens; identical to SEQ ID NO: 4020
  Payload ID: 910;
  Gene Symbol: ALDOC;
  Gene Name: aldolase C, fructose-bisphosphate;
  Uniprot ID:  P09972;
  ENSP ID: ENSP00000378731

SEQ ID NO: 4023 - protein, 149 aa, Homo sapiens
  Payload ID: 910;
  Gene Symbol: ALDOC;
  Gene Name: aldolase C, fructose-bisphosphate;
  ENSP ID: ENSP00000398976
MPHSYPALSAEQKKELSDIALRIVAPGKGILAADESVGSMAKRLSQIGVENTEENRRLYRQVLFSADDRVKKCIGGVIFFHETLYQKDDNGVPFVRTIQDKGIVVGIKVDKGVVPLAGTDGETTTQGLDGLSERCAQYKKDGADFAKWR

SEQ ID NO: 4024 - protein, 175 aa, Homo sapiens
  Payload ID: 910;
  Gene Symbol: ALDOC;
  Gene Name: aldolase C, fructose-bisphosphate;
  ENSP ID: ENSP00000462674
MPHSYPALSAEQKKELSDIALRIVAPGKGILAADESVGSMAKRLSQIGVENTEENRRLYRQVLFSADDRVKKCIGGVIFFHETLYQKDDNGVPFVRTIQDKGIVVGIKVDKGVVPLAGTDGETTTQGLDGLSERCAQYKKDGADFAKWRCVLKISERTPSALAILENANVLARYA

SEQ ID NO: 4025 - protein, 122 aa, Homo sapiens
  Payload ID: 910;
  Gene Symbol: ALDOC;
  Gene Name: aldolase C, fructose-bisphosphate;
  ENSP ID: ENSP00000463118
MPHSYPALSAEQKKELSDIALRIVAPGKGILAADESVGSMAKRLSQIGVENTEENRRLYRQVLFSADDRVKKCIGGVIFFHETLYQKDDNGVPFVRTIQDKGIVVGIKVDKGVVPLAGTDGE

SEQ ID NO: 4026 - protein, 180 aa, Homo sapiens
  Payload ID: 910;
  Gene Symbol: ALDOC;
  Gene Name: aldolase C, fructose-bisphosphate;
  ENSP ID: ENSP00000463174
MPHSYPALSAEQKKELSDIALRIVAPGKGILAADESVGSMAKRLSQIGVENTEENRRLYRQVLFSADDRVKKCIGGVIFFHETLYQKDDNGVPFVRTIQDKGIVVGIKVDKGVVPLAGTDGETTTQGLDGLSERCAQYKKDGADFAKWRCVLKISERTPSALAILENANVLARYASICQQ

SEQ ID NO: 4027 - protein, 135 aa, Homo sapiens
  Payload ID: 910;
  Gene Symbol: ALDOC;
  Gene Name: aldolase C, fructose-bisphosphate;
  ENSP ID: ENSP00000465623
MAKRLSQIGVENTEENRRLYRQVLFSADDRVKKCIGGVIFFHETLYQKDDNGVPFVRTIQDKGIVVGIKVDKGVVPLAGTDGETTTQGLDGLSERCAQYKKDGADFAKWRCVLKISERTPSALAILENANVLARY

SEQ ID NO: 4028 - protein, 464 aa, Homo sapiens
  Payload ID: 911;
  Gene Symbol: ALG1;
  Gene Name: ALG1, chitobiosyldiphosphodolichol beta-mannosyltransferase;
  Uniprot ID:  Q9BT22;
  ENSP ID: ENSP00000262374
MAASCLVLLALCLLLPLLLLGGWKRWRRGRAARHVVAVVLGDVGRSPRMQYHALSLAMHGFSVTLLGFCNSKPHDELLQNNRIQIVGLTELQSLAVGPRVFQYGVKVVLQAMYLLWKLMWREPGAYIFLQNPPGLPSIAVCWFVGCLCGSKLVIDWHNYGYSIMGLVHGPNHPLVLLAKWYEKFFGRLSHLNLCVTNAMREDLADNWHIRAVTVYDKPASFFKETPLDLQHRLFMKLGSMHSPFRARSEPEDPVTERSAFTERDAGSGLVTRLRERPALLVSSTSWTEDEDFSILLAALEKFEQLTLDGHNLPSLVCVITGKGPLREYYSRLIHQKHFQHIQVCTPWLEAEDYPLLLGSADLGVCLHTSSSGLDLPMKVVDMFGCCLPVCAVNFKCLHELVKHEENGLVFEDSEELAAQLQMLFSNFPDPAGKLNQFRKNLRESQQLRWDESWVQTVLPLVMDT

SEQ ID NO: 4029 - protein, 353 aa, Homo sapiens
  Payload ID: 911;
  Gene Symbol: ALG1;
  Gene Name: ALG1, chitobiosyldiphosphodolichol beta-mannosyltransferase;
  Uniprot ID:  Q9BT22;
  ENSP ID: ENSP00000440019
MYLLWKLMWREPGAYIFLQNPPGLPSIAVCWFVGCLCGSKLVIDWHNYGYSIMGLVHGPNHPLVLLAKWYEKFFGRLSHLNLCVTNAMREDLADNWHIRAVTVYDKPASFFKETPLDLQHRLFMKLGSMHSPFRARSEPEDPVTERSAFTERDAGSGLVTRLRERPALLVSSTSWTEDEDFSILLAALEKFEQLTLDGHNLPSLVCVITGKGPLREYYSRLIHQKHFQHIQVCTPWLEAEDYPLLLGSADLGVCLHTSSSGLDLPMKVVDMFGCCLPVCAVNFKCLHELVKHEENGLVFEDSEELAAQLQMLFSNFPDPAGKLNQFRKNLRESQQLRWDESWVQTVLPLVMDT

SEQ ID NO: 4030 - protein, 167 aa, Homo sapiens
  Payload ID: 911;
  Gene Symbol: ALG1;
  Gene Name: ALG1, chitobiosyldiphosphodolichol beta-mannosyltransferase;
  ENSP ID: ENSP00000464700
MYLLWKLMWREPGAYIFLQNPPGLPSIAVCWFVGCLCGSKLVIDWHNYGYSIMGLVHGPNHPLVLLAKWYEKFFGRLSHLNLCVTNAMREDLADNWHIRAVTVYDKPASFFKETPLDLQHRLFMKLGSMHSPFRARSEPEDPVTERSAFTERDAGSGLVTRLRERPA

SEQ ID NO: 4031 - protein, 184 aa, Homo sapiens
  Payload ID: 911;
  Gene Symbol: ALG1;
  Gene Name: ALG1, chitobiosyldiphosphodolichol beta-mannosyltransferase;
  ENSP ID: ENSP00000467538
MAASCLVLLALCLLLPLLLLGGWKRWRRGRAARHVVAVVLGDVGRSPRMQYHALSLAMHGFSVTLLGFCNSKPHDELLQNNRIQIVGLTELQSLAVGPRVFQYGVKVVLQAMYLLWKLMWREPGAYIFLQVCLALLSAGSWAAFVEASSSLTGTTMATPSWVWCMAPTIPSFCWPSGTRSSLGA

SEQ ID NO: 4032 - protein, 84 aa, Homo sapiens
  Payload ID: 911;
  Gene Symbol: ALG1;
  Gene Name: ALG1, chitobiosyldiphosphodolichol beta-mannosyltransferase;
  ENSP ID: ENSP00000467865
MAASCLVLLALCLLLPLLLLGGWKRWRRGRAARHVVAVVLGDVGRSPRMQYHALSLAMHGFSVTLLGFCSEWPRVWEGRCSLSR

SEQ ID NO: 4033 - protein, 353 aa, Homo sapiens; identical to SEQ ID NO: 4029
  Payload ID: 911;
  Gene Symbol: ALG1;
  Gene Name: ALG1, chitobiosyldiphosphodolichol beta-mannosyltransferase;
  Uniprot ID:  Q9BT22;
  ENSP ID: ENSP00000468118

SEQ ID NO: 4034 - protein, 187 aa, Homo sapiens
  Payload ID: 912;
  Gene Symbol: ALG1L;
  Gene Name: ALG1, chitobiosyldiphosphodolichol beta-mannosyltransferase-like;
  Uniprot ID:  Q6GMV1;
  ENSP ID: ENSP00000340009
MERSAFMELDAGSRLVMHLREWPALLVSSTGWTEFEQLTLDGHNLPSLVCVITGSVDLGVCLHMSSSGLDLPMKVVDMFGCCLPVCAVNFKCLHELVKHEENGLVFEDSEELAALQMLFSNFPDPAGKLNQFWKNLRESQQLRWDESWVQTVLPLVMDIQLLGQRLKPRDPCCPSRSFFSESQGKPF

SEQ ID NO: 4035 - protein, 207 aa, Homo sapiens
  Payload ID: 912;
  Gene Symbol: ALG1L;
  Gene Name: ALG1, chitobiosyldiphosphodolichol beta-mannosyltransferase-like;
  ENSP ID: ENSP00000482705
MKLGGTHSLFRACSEPEDAAMERSAFMELDAGSRLVMHLREWPALLVSSTGWTEFEQLTLDGHNLPSLVCVITGSVDLGVCLHMSSSGLDLPMKVVDMFGCCLPVCAVNFKCLHELVKHEENGLVFEDSEELAALQMLFSNFPDPAGKLNQFWKNLRESQQLRWDESWVQTVLPLVMDIQLLGQRLKPRDPCCPSRSFFSESQGKPF

SEQ ID NO: 4036 - protein, 215 aa, Homo sapiens
  Payload ID: 913;
  Gene Symbol: ALG1L2;
  Gene Name: ALG1, chitobiosyldiphosphodolichol beta-mannosyltransferase-like 2;
  Uniprot ID:  C9J202;
  ENSP ID: ENSP00000479850
MGATAGWAVTVYDKPASFFKEAPLDLQHRLFMKLGSTHSPFRARSEPEDPDTERSAFTERDSGSGLVTRLHERPALLVSSTSWTEFEQLTLDGQNLPSLVCVITGKGPLREYYSRLIHQKHFQHIQVCIPWLEGRGLPPLLGSVDLDVCLDTSSSGLDLPMKVVDMFRCCLPACAVNFKCLHELVKHEENRLVFEDSEELAAQLQYFADAFLKLS

SEQ ID NO: 4037 - protein, 473 aa, Homo sapiens
  Payload ID: 914;
  Gene Symbol: ALG10;
  Gene Name: ALG10, alpha-1,2-glucosyltransferase;
  Uniprot ID:  Q5BKT4;
  ENSP ID: ENSP00000266483
MAQLEGYYFSAALSCTFLVSCLLFSAFSRALREPYMDEIFHLPQAQRYCEGHFSLSQWDPMITTLPGLYLVSIGVIKPAIWIFGWSEHVVCSIGMLRFVNLLFSVGNFYLLYLLFCKVQPRNKAASSIQRVLSTLTLAVFPTLYFFNFLYYTEAGSMFFTLFAYLMCLYGNHKTSAFLGFCGFMFRQTNIIWAVFCAGNVIAQKLTEAWKTELQKKEDRLPPIKGPFAEFRKILQFLLAYSMSFKNLSMLLLLTWPYILLGFLFCAFVVVNGGIVIGDRSSHEACLHFPQLFYFFSFTLFFSFPHLLSPSKIKTFLSLVWKRRILFFVVTLVSVFLVWKFTYAHKYLLADNRHYTFYVWKRVFQRYETVKYLLVPAYIFAGWSIADSLKSKSIFWNLMFFICLFTVIVPQKLLEFRYFILPYVIYRLNIPLPPTSRLICELSCYAVVNFITFFIFLNKTFQWPNSQDIQRFMW

SEQ ID NO: 4038 - protein, 77 aa, Homo sapiens
  Payload ID: 914;
  Gene Symbol: ALG10;
  Gene Name: ALG10, alpha-1,2-glucosyltransferase;
  ENSP ID: ENSP00000443142
MAQLEGYYFSAALSCTFLVSCLLFSAFSRALREPYMDEIFHLPQAQRYLGSHDYYITWLVPGVNWSDQTCHLDLWMV

SEQ ID NO: 4039 - protein, 126 aa, Homo sapiens
  Payload ID: 914;
  Gene Symbol: ALG10;
  Gene Name: ALG10, alpha-1,2-glucosyltransferase;
  ENSP ID: ENSP00000444084
MAQLEGYYFSAALSCTFLVSCLLFSAFSRALREPYMDEIFHLPQAQRYCEGHFSLSQWDPMITTLPGLYLVSIGVIKPAIWIFGWSEHVVCSIGMLRFVNLLFSVGNFYLLYLLFCKVQPRNKEYF

SEQ ID NO: 4040 - protein, 473 aa, Homo sapiens
  Payload ID: 915;
  Gene Symbol: ALG10B;
  Gene Name: ALG10B, alpha-1,2-glucosyltransferase;
  Uniprot ID:  Q5I7T1;
  ENSP ID: ENSP00000310120
MAQLEGYCFSAALSCTFLVSCLLFSAFSRALREPYMDEIFHLPQAQRYCEGHFSLSQWDPMITTLPGLYLVSVGVVKPAIWIFAWSEHVVCSIGMLRFVNLLFSVGNFYLLYLLFHKVQPRNKAASSIQRVLSTLTLAVFPTLYFFNFLYYTEAGSMFFTLFAYLMCLYGNHKTSAFLGFCGFMFRQTNIIWAVFCAGNVIAQKLTEAWKTELQKKEDRLPPIKGPFAEFRKILQFLLAYSMSFKNLSMLFCLTWPYILLGFLFCAFVVVNGGIVIGDRSSHEACLHFPQLFYFFSFTLFFSFPHLLSPSKIKTFLSLVWKHGILFLVVTLVSVFLVWKFTYAHKYLLADNRHYTFYVWKRVFQRYAILKYLLVPAYIFAGWSIADSLKSKPIFWNLMFFICLFIVIVPQKLLEFRYFILPYVIYRLNITLPPTSRLVCELSCYAIVNFITFYIFLNKTFQWPNSQDIQRFMW

SEQ ID NO: 4041 - protein, 126 aa, Homo sapiens
  Payload ID: 915;
  Gene Symbol: ALG10B;
  Gene Name: ALG10B, alpha-1,2-glucosyltransferase;
  ENSP ID: ENSP00000448819
MAQLEGYCFSAALSCTFLVSCLLFSAFSRALREPYMDEIFHLPQAQRYCEGHFSLSQWDPMITTLPGLYLVSVGVVKPAIWIFAWSEHVVCSIGMLRFVNLLFSVGNFYLLYLLFHKVQPRNKEYF

SEQ ID NO: 4042 - protein, 77 aa, Homo sapiens
  Payload ID: 915;
  Gene Symbol: ALG10B;
  Gene Name: ALG10B, alpha-1,2-glucosyltransferase;
  ENSP ID: ENSP00000449210
MAQLEGYCFSAALSCTFLVSCLLFSAFSRALREPYMDEIFHLPQAQRYLGSHDYYITWLVPGVSWSGQTCHLDLCMV

SEQ ID NO: 4043 - protein, 36 aa, Homo sapiens
  Payload ID: 916;
  Gene Symbol: ALG11;
  Gene Name: ALG11, alpha-1,2-mannosyltransferase;
  ENSP ID: ENSP00000429497
MAAGERSWCLCKLLRSCGVYGSWHNYPCTQFGGPKA

SEQ ID NO: 4044 - protein, 492 aa, Homo sapiens
  Payload ID: 916;
  Gene Symbol: ALG11;
  Gene Name: ALG11, alpha-1,2-mannosyltransferase;
  Uniprot ID:  Q2TAA5;
  ENSP ID: ENSP00000430236
MAAGERSWCLCKLLRFFYSLFFPGLIVCGTLCVCLVIVLWGIRLLLQRKKKLVSTSKNGKNQMVIAFFHPYCNAGGGGERVLWCALRALQKKYPEAVYVVYTGDVNVNGQQILEGAFRRFNIRLIHPVQFVFLRKRYLVEDSLYPHFTLLGQSLGSIFLGWEALMQCVPDVYIDSMGYAFTLPLFKYIGGCQVGSYVHYPTISTDMLSVVKNQNIGFNNAAFITRNPFLSKVKLIYYYLFAFIYGLVGSCSDVVMVNSSWTLNHILSLWKVGNCTNIVYPPCDVQTFLDIPLHEKKMTPGHLLVSVGQFRPEKNHPLQIRAFAKLLNKKMVESPPSLKLVLIGGCRNKDDELRVNQLRRLSEDLGVQEYVEFKINIPFDELKNYLSEATIGLHTMWNEHFGIGVVECMAAGTIILAHNSGGPKLDIVVPHEGDITGFLAESEEDYAETIAHILSMSAEKRLQIRKSARASVSRFSDQEFEVTFLSSVEKLFK

SEQ ID NO: 4045 - protein, 30 aa, Homo sapiens
  Payload ID: 916;
  Gene Symbol: ALG11;
  Gene Name: ALG11, alpha-1,2-mannosyltransferase;
  ENSP ID: ENSP00000481922
MAAGERSWCLCKLLSFEYVFISSVKMNLVP

SEQ ID NO: 4046 - protein, 488 aa, Homo sapiens
  Payload ID: 917;
  Gene Symbol: ALG12;
  Gene Name: ALG12, alpha-1,6-mannosyltransferase;
  Uniprot ID:  Q9BV10;
  ENSP ID: ENSP00000333813
MAGKGSSGRRPLLLGLLVAVATVHLVICPYTKVEESFNLQATHDLLYHWQDLEQYDHLEFPGVVPRTFLGPVVIAVFSSPAVYVLSLLEMSKFYSQLIVRGVLGLGVIFGLWTLQKEVRRHFGAMVATMFCWVTAMQFHLMFYCTRTLPNVLALPVVLLALAAWLRHEWARFIWLSAFAIIVFRVELCLFLGLLLLLALGNRKVSVVRALRHAVPAGILCLGLTVAVDSYFWRQLTWPEGKVLWYNTVLNKSSNWGTSPLLWYFYSALPRGLGCSLLFIPLGLVDRRTHAPTVLALGFMALYSLLPHKELRFIIYAFPMLNITAARGCSYLLNNYKKSWLYKAGSLLVIGHLVVNAAYSATALYVSHFNYPGGVAMQRLHQLVPPQTDVLLHIDVAAAQTGVSRFLQVNSAWRYDKREDVQPGTGMLAYTHILMEAAPGLLALYRDTHRVLASVVGTTGVSLNLTQLPPFNVHLQTKLVLLERLPRPS

SEQ ID NO: 4047 - protein, 196 aa, Homo sapiens
  Payload ID: 917;
  Gene Symbol: ALG12;
  Gene Name: ALG12, alpha-1,6-mannosyltransferase;
  ENSP ID: ENSP00000417387
  MOD_RES (1)..(1): Any amino acid
XLLALAAWLRHEWARFIWLSAFAIIVFRVELCLFLGLLLLLALGNRKVSVVRALRHAVPAGILCLGLTVAVDSYFWRQLTWPEGKVLWYNTVLNKSSNWGTSPLLWYFYSALPRGLGCSLLFIPLGLVDRRTHAPTVLALGFMALYSLLPHKELRFIIYAFPMLNITAARGCSYLWRRNAEAAPAGAPPDRRPSAH

SEQ ID NO: 4048 - protein, 205 aa, Homo sapiens
  Payload ID: 917;
  Gene Symbol: ALG12;
  Gene Name: ALG12, alpha-1,6-mannosyltransferase;
  ENSP ID: ENSP00000420630
  MOD_RES (1)..(1): Any amino acid
XSALPRGLGCSLLFIPLGLVDRRTHAPTVLALGFMALYSLLPHKELRFIIYAFPMLNITAARGCSYLLNNYKKSWLYKAGSLLVIGHLVVNAAYSATALYVSHFNYPGGVAMQRLHQLVPPQTDVLLHIDVAAAQTGVSRFLQVNSAWRQSWCFWRGSPGRPEGDQAALSSHRPSRSCYHYQFLAQFQHNYDNSEKQVKGLGTCL

SEQ ID NO: 4049 - protein, 954 aa, Homo sapiens
  Payload ID: 918;
  Gene Symbol: ALG13;
  Gene Name: ALG13, UDP-N-acetylglucosaminyltransferase subunit;
  Uniprot ID:  Q9NP73;
  ENSP ID: ENSP00000251943
MNNHQLELAKQLHKEGHLFYCTCRVLTCPGQAKSIASAPGKCQDSAALTSTAFSGLDFGLLSGYLHKQALVTATHPTCTLLFPSCHAFFPLPLTPTLYKMHKGWKNYCSQKSLNEASMDEYLGSLGLFRKLTAKDASCLFRAISEQLFCSQVHHLEIRKACVSYMRENQQTFESYVEGSFEKYLERLGDPKESAGQLEIRALSLIYNRDFILYRFPGKPPTYVTDNGYEDKILLCYSSSGHYDSVYSKQFQSSAAVCQAVLYEILYKDVFVVDEEELKTAIKLFRSGSKKNRNNAVTGSEDAHTDYKSSNQNRMEEWGACYNAENIPEGYNKGTEETKSPENPSKMPFPYKVLKALDPEIYRNVEFDVWLDSRKELQKSDYMEYAGRQYYLGDKCQVCLESEGRYYNAHIQEVGNENNSVTVFIEELAEKHVVPLANLKPVTQVMSVPAWNAMPSRKGRGYQKMPGGYVPEIVISEMDIKQQKKMFKKIRGKEVYMTMAYGKGDPLLPPRLQHSMHYGHDPPMHYSQTAGNVMSNEHFHPQHPSPRQGRGYGMPRNSSRFINRHNMPGPKVDFYPGPGKRCCQSYDNFSYRSRSFRRSHRQMSCVNKESQYGFTPGNGQMPRGLEETITFYEVEEGDETAYPTLPNHGGPSTMVPATSGYCVGRRGHSSGKQTLNLEEGNGQSENGRYHEEYLYRAEPDYETSGVYSTTASTANLSLQDRKSCSMSPQDTVTSYNYPQKMMGNIAAVAASCANNVPAPVLSNGAAANQAISTTSVSSQNAIQPLFVSPPTHGRPDTKVLQYYFNLGLQCYYHSYWHSMVYVPQMQQQLHVENYPVYTEPPLVDQTVPQCYSEVRREDGIQAEASANDTFPNADSSSVPHGAVYYPVMSDPYGQPPLPGFDSCLPVVPDYSCVPPWHPVGTAYGGSSQIHGAINPGPIGCIAPSPPASHYVPQGM

SEQ ID NO: 4050 - protein, 165 aa, Homo sapiens
  Payload ID: 918;
  Gene Symbol: ALG13;
  Gene Name: ALG13, UDP-N-acetylglucosaminyltransferase subunit;
  Uniprot ID:  Q9NP73;
  ENSP ID: ENSP00000361047
MKCVFVTVGTTSFDDLIACVSAPDSLQKIESLGYNRLILQIGRGTVVPEPFSTESFTLDVYRYKDSLKEDIQKADLVISHAGAGSCLETLEKGKPLVVVINEKLMNNHQLELAKQLHKEGHLFYCTCSTLPGLLQSMDLSTLKCYPPGQPEKFSAFLDKVVGLQK

SEQ ID NO: 4051 - protein, 1137 aa, Homo sapiens
  Payload ID: 918;
  Gene Symbol: ALG13;
  Gene Name: ALG13, UDP-N-acetylglucosaminyltransferase subunit;
  Uniprot ID:  Q9NP73;
  ENSP ID: ENSP00000378260
MKCVFVTVGTTSFDDLIACVSAPDSLQKIESLGYNRLILQIGRGTVVPEPFSTESFTLDVYRYKDSLKEDIQKADLVISHAGAGSCLETLEKGKPLVVVINEKLMNNHQLELAKQLHKEGHLFYCTCRVLTCPGQAKSIASAPGKCQDSAALTSTAFSGLDFGLLSGYLHKQALVTATHPTCTLLFPSCHAFFPLPLTPTLYKMHKGWKNYCSQKSLNEASMDEYLGSLGLFRKLTAKDASCLFRAISEQLFCSQVHHLEIRKACVSYMRENQQTFESYVEGSFEKYLERLGDPKESAGQLEIRALSLIYNRDFILYRFPGKPPTYVTDNGYEDKILLCYSSSGHYDSVYSKQFQSSAAVCQAVLYEILYKDVFVVDEEELKTAIKLFRSGSKKNRNNAVTGSEDAHTDYKSSNQNRMEEWGACYNAENIPEGYNKGTEETKSPENPSKMPFPYKVLKALDPEIYRNVEFDVWLDSRKELQKSDYMEYAGRQYYLGDKCQVCLESEGRYYNAHIQEVGNENNSVTVFIEELAEKHVVPLANLKPVTQVMSVPAWNAMPSRKGRGYQKMPGGYVPEIVISEMDIKQQKKMFKKIRGKEVYMTMAYGKGDPLLPPRLQHSMHYGHDPPMHYSQTAGNVMSNEHFHPQHPSPRQGRGYGMPRNSSRFINRHNMPGPKVDFYPGPGKRCCQSYDNFSYRSRSFRRSHRQMSCVNKESQYGFTPGNGQMPRGLEETITFYEVEEGDETAYPTLPNHGGPSTMVPATSGYCVGRRGHSSGKQTLNLEEGNGQSENGRYHEEYLYRAEPDYETSGVYSTTASTANLSLQDRKSCSMSPQDTVTSYNYPQKMMGNIAAVAASCANNVPAPVLSNGAAANQAISTTSVSSQNAIQPLFVSPPTHGRPVIASPSYPCHSAIPHAGASLPPPPPPPPPPPPPPPPPPPPPPPPPPPALDVGETSNLQPPPPLPPPPYSCDPSGSDLPQDTKVLQYYFNLGLQCYYHSYWHSMVYVPQMQQQLHVENYPVYTEPPLVDQTVPQCYSEVRREDGIQAEASANDTFPNADSSSVPHGAVYYPVMSDPYGQPPLPGFDSCLPVVPDYSCVPPWHPVGTAYGGSSQIHGAINPGPIGCIAPSPPASHYVPQGM

SEQ ID NO: 4052 - protein, 954 aa, Homo sapiens; identical to SEQ ID NO: 4049
  Payload ID: 918;
  Gene Symbol: ALG13;
  Gene Name: ALG13, UDP-N-acetylglucosaminyltransferase subunit;
  Uniprot ID:  Q9NP73;
  ENSP ID: ENSP00000392990

SEQ ID NO: 4053 - protein, 159 aa, Homo sapiens
  Payload ID: 918;
  Gene Symbol: ALG13;
  Gene Name: ALG13, UDP-N-acetylglucosaminyltransferase subunit;
  ENSP ID: ENSP00000426892
MKCVFVTVGTTSFDDLIACVSAPDSLQKIESLGYNRLILQIGRGTVVPEPFSTESFTLDVYRYKDSLKEDIQKADLVISHAGAGSCLETLEKGKPLVVVINEKLMNNHQLELAKQLHKEGHLFYCTCRLILKKCLLVVEGGDKEILWVAGGSQLGLKFC

SEQ ID NO: 4054 - protein, 51 aa, Homo sapiens
  Payload ID: 918;
  Gene Symbol: ALG13;
  Gene Name: ALG13, UDP-N-acetylglucosaminyltransferase subunit;
  ENSP ID: ENSP00000427093
MKCVFVTVGTTSFDDLIACVSAPDSLQVSEGGEQAAAWLATRHLRPYCQPR

SEQ ID NO: 4055 - protein, 61 aa, Homo sapiens
  Payload ID: 918;
  Gene Symbol: ALG13;
  Gene Name: ALG13, UDP-N-acetylglucosaminyltransferase subunit;
  ENSP ID: ENSP00000477513
MNNHQLELAKQLHKEGHLFYCTCSTLPGLLQSMDLSTLKCYPPGQPEKFSAFLDKVVGLQK

SEQ ID NO: 4056 - protein, 171 aa, Homo sapiens
  Payload ID: 918;
  Gene Symbol: ALG13;
  Gene Name: ALG13, UDP-N-acetylglucosaminyltransferase subunit;
  ENSP ID: ENSP00000478130
MLDTSCLQTSDSKFFSFGTRTGSPCSSACRHPIVGPCDCKIESLGYNRLILQIGRGTVVPEPFSTESFTLDVYRYKDSLKEDIQKADLVISHAGAGSCLETLEKGKPLVVVINEKLMNNHQLELAKQLHKEGHLFYCTCRLILKKCLLVVEGGDKEILWVAGGSQLGLKFC

SEQ ID NO: 4057 - protein, 43 aa, Homo sapiens
  Payload ID: 918;
  Gene Symbol: ALG13;
  Gene Name: ALG13, UDP-N-acetylglucosaminyltransferase subunit;
  ENSP ID: ENSP00000479424
MKCVFVTVGTTSFDDLIACVSAPDSLQVQGFLERRHSESRSCY

SEQ ID NO: 4058 - protein, 43 aa, Homo sapiens; identical to SEQ ID NO: 4057
  Payload ID: 918;
  Gene Symbol: ALG13;
  Gene Name: ALG13, UDP-N-acetylglucosaminyltransferase subunit;
  ENSP ID: ENSP00000479483

SEQ ID NO: 4059 - protein, 51 aa, Homo sapiens; identical to SEQ ID NO: 4054
  Payload ID: 918;
  Gene Symbol: ALG13;
  Gene Name: ALG13, UDP-N-acetylglucosaminyltransferase subunit;
  ENSP ID: ENSP00000479632

SEQ ID NO: 4060 - protein, 1059 aa, Homo sapiens
  Payload ID: 918;
  Gene Symbol: ALG13;
  Gene Name: ALG13, UDP-N-acetylglucosaminyltransferase subunit;
  Uniprot ID:  Q9NP73;
  ENSP ID: ENSP00000479731
MFTGAGSCLETLEKGKPLVVVINEKLMNNHQLELAKQLHKEGHLFYCTCRVLTCPGQAKSIASAPGKCQDSAALTSTAFSGLDFGLLSGYLHKQALVTATHPTCTLLFPSCHAFFPLPLTPTLYKMHKGWKNYCSQKSLNEASMDEYLGSLGLFRKLTAKDASCLFRAISEQLFCSQVHHLEIRKACVSYMRENQQTFESYVEGSFEKYLERLGDPKESAGQLEIRALSLIYNRDFILYRFPGKPPTYVTDNGYEDKILLCYSSSGHYDSVYSKQFQSSAAVCQAVLYEILYKDVFVVDEEELKTAIKLFRSGSKKNRNNAVTGSEDAHTDYKSSNQNRMEEWGACYNAENIPEGYNKGTEETKSPENPSKMPFPYKVLKALDPEIYRNVEFDVWLDSRKELQKSDYMEYAGRQYYLGDKCQVCLESEGRYYNAHIQEVGNENNSVTVFIEELAEKHVVPLANLKPVTQVMSVPAWNAMPSRKGRGYQKMPGGYVPEIVISEMDIKQQKKMFKKIRGKEVYMTMAYGKGDPLLPPRLQHSMHYGHDPPMHYSQTAGNVMSNEHFHPQHPSPRQGRGYGMPRNSSRFINRHNMPGPKVDFYPGPGKRCCQSYDNFSYRSRSFRRSHRQMSCVNKESQYGFTPGNGQMPRGLEETITFYEVEEGDETAYPTLPNHGGPSTMVPATSGYCVGRRGHSSGKQTLNLEEGNGQSENGRYHEEYLYRAEPDYETSGVYSTTASTANLSLQDRKSCSMSPQDTVTSYNYPQKMMGNIAAVAASCANNVPAPVLSNGAAANQAISTTSVSSQNAIQPLFVSPPTHGRPVIASPSYPCHSAIPHAGASLPPPPPPPPPPPPPPPPPPPPPPPPPPPALDVGETSNLQPPPPLPPPPYSCDPSGSDLPQDTKVLQYYFNLGLQCYYHSYWHSMVYVPQMQQQLHVENYPVYTEPPLVDQTVPQCYSEVRREDGIQAEASANDTFPNADSSSVPHGAVYYPVMSDPYGQPPLPGFDSCLPVVPDYSCVPPWHPVGTAYGGSSQIHGAINPGPIGCIAPSPPASHYVPQGM

SEQ ID NO: 4061 - protein, 51 aa, Homo sapiens; identical to SEQ ID NO: 4054
  Payload ID: 918;
  Gene Symbol: ALG13;
  Gene Name: ALG13, UDP-N-acetylglucosaminyltransferase subunit;
  ENSP ID: ENSP00000480638

SEQ ID NO: 4062 - protein, 133 aa, Homo sapiens
  Payload ID: 918;
  Gene Symbol: ALG13;
  Gene Name: ALG13, UDP-N-acetylglucosaminyltransferase subunit;
  ENSP ID: ENSP00000480711
MKCVFVTVGTTSFDDLIACVSAPDSLQKIESLGYNRLILQIGRGTVVPEPFSTESFTLDVYRYKDSLKEDIQKADLVISHAGAGSCLETLEKGKPLVVVINEKLMNNHQLELAKQLHKEGHLFYCTCSSSLRH

SEQ ID NO: 4063 - protein, 954 aa, Homo sapiens; identical to SEQ ID NO: 4049
  Payload ID: 918;
  Gene Symbol: ALG13;
  Gene Name: ALG13, UDP-N-acetylglucosaminyltransferase subunit;
  Uniprot ID:  Q9NP73;
  ENSP ID: ENSP00000481509

SEQ ID NO: 4064 - protein, 51 aa, Homo sapiens; identical to SEQ ID NO: 4054
  Payload ID: 918;
  Gene Symbol: ALG13;
  Gene Name: ALG13, UDP-N-acetylglucosaminyltransferase subunit;
  ENSP ID: ENSP00000482257

SEQ ID NO: 4065 - protein, 35 aa, Homo sapiens
  Payload ID: 918;
  Gene Symbol: ALG13;
  Gene Name: ALG13, UDP-N-acetylglucosaminyltransferase subunit;
  ENSP ID: ENSP00000484523
IACVSAPDSLQVSEGGEQAAAWLATRHLRPYCQPR

SEQ ID NO: 4066 - protein, 132 aa, Homo sapiens
  Payload ID: 918;
  Gene Symbol: ALG13;
  Gene Name: ALG13, UDP-N-acetylglucosaminyltransferase subunit;
  ENSP ID: ENSP00000485067
MKCVFVTVGTTSFDDLIACVSAPDSLQKIESLGYNRLILQIGRGTVVPEPFSTESFTLDVYRYKDSLKEDIQKADLVISHAGAGSCLETLEKGKPLVVVINEKLMNNHQLELAKQLHKEGHLFYCTCRYARD

SEQ ID NO: 4067 - protein, 77 aa, Homo sapiens
  Payload ID: 918;
  Gene Symbol: ALG13;
  Gene Name: ALG13, UDP-N-acetylglucosaminyltransferase subunit;
  ENSP ID: ENSP00000485071
  MOD_RES (1)..(1): Any amino acid
XPPLPGFDSCLPVVPDYSCVPPWHPVGTAYGGSSQIHGAINPGPIGCIAPSPPASHYVPQESKTKSLCFWITHLILN

SEQ ID NO: 4068 - protein, 150 aa, Homo sapiens
  Payload ID: 918;
  Gene Symbol: ALG13;
  Gene Name: ALG13, UDP-N-acetylglucosaminyltransferase subunit;
  ENSP ID: ENSP00000485093
MKCVFVTVGTTSFDDLIACVSAPDSLQKIESLGYNRLILQIGRGTVVPEPFSTESFTLDVYRCRKLFGDSGKRKATRSGYKRKVDEQSSAGTGKAATQRGSSLLLYLQGPDLSWASQVHCFCSWEVPRFCSADFNCLFRPRLWAAFRIPA

SEQ ID NO: 4069 - protein, 43 aa, Homo sapiens; identical to SEQ ID NO: 4057
  Payload ID: 918;
  Gene Symbol: ALG13;
  Gene Name: ALG13, UDP-N-acetylglucosaminyltransferase subunit;
  ENSP ID: ENSP00000485181

SEQ ID NO: 4070 - protein, 51 aa, Homo sapiens; identical to SEQ ID NO: 4054
  Payload ID: 918;
  Gene Symbol: ALG13;
  Gene Name: ALG13, UDP-N-acetylglucosaminyltransferase subunit;
  ENSP ID: ENSP00000485279

SEQ ID NO: 4071 - protein, 162 aa, Homo sapiens
  Payload ID: 918;
  Gene Symbol: ALG13;
  Gene Name: ALG13, UDP-N-acetylglucosaminyltransferase subunit;
  ENSP ID: ENSP00000485333
VTVGTTSFDDLIACVSAPDSLQKIESLGYNRLILQIGRGTVVPEPFSTESFTLDVYRYKDSLKEDIQKADLVISHAGKGAGSCLETLEKGKPLVVVINEKLMNNHQLELAKQLHKEGHLFYCTCSTLPGLLQSMDLSTLKCYPPGQPEKFSAFLDKVVGLQK

SEQ ID NO: 4072 - protein, 61 aa, Homo sapiens; identical to SEQ ID NO: 4055
  Payload ID: 918;
  Gene Symbol: ALG13;
  Gene Name: ALG13, UDP-N-acetylglucosaminyltransferase subunit;
  ENSP ID: ENSP00000485392

SEQ ID NO: 4073 - protein, 42 aa, Homo sapiens
  Payload ID: 918;
  Gene Symbol: ALG13;
  Gene Name: ALG13, UDP-N-acetylglucosaminyltransferase subunit;
  ENSP ID: ENSP00000485400
  MOD_RES (1)..(1): Any amino acid
XPPLPPPPYSCDPSGSDLPQDTKVLQYYFNLGLQVSAMLKFL

SEQ ID NO: 4074 - protein, 51 aa, Homo sapiens; identical to SEQ ID NO: 4054
  Payload ID: 918;
  Gene Symbol: ALG13;
  Gene Name: ALG13, UDP-N-acetylglucosaminyltransferase subunit;
  ENSP ID: ENSP00000485420

SEQ ID NO: 4075 - protein, 373 aa, Homo sapiens
  Payload ID: 918;
  Gene Symbol: ALG13;
  Gene Name: ALG13, UDP-N-acetylglucosaminyltransferase subunit;
  ENSP ID: ENSP00000485624
DSVYSKQFQSSAAVCQAVLYEILYKDVFVVDEEELKTAIKLFRSGSKKNRNNAVTGSEDAHTDYKSSNQNRMEEWGACYNAENIPEGYNKGTEETKVCLESEGRYYNAHIQEVGNENNSVTVFIEELAEKHVVPLANLKPVTQVMSVPAWNAMPSRKGRGYQKMPGGYVPEIVISEMDIKQQKKMFKKIRGKEVYMTMAYGKGDPLLPPRLQHSMHYGHDPPMHYSQTAGNVMSNEHFHPQHPSPRQGRGYGMPRNSSRFINRHNMPGPKVDFYPGPGKRCCQSYDNFSYRSRSFRRSHRQMSCVNKESQYGFTPGNGQMPRGLEETITFYEVEEGDETAYPTLPNHGGPSTMVPATSGYCVGRRGHSSGKQT

SEQ ID NO: 4076 - protein, 35 aa, Homo sapiens; identical to SEQ ID NO: 4065
  Payload ID: 918;
  Gene Symbol: ALG13;
  Gene Name: ALG13, UDP-N-acetylglucosaminyltransferase subunit;
  ENSP ID: ENSP00000485658

SEQ ID NO: 4077 - protein, 216 aa, Homo sapiens
  Payload ID: 919;
  Gene Symbol: ALG14;
  Gene Name: ALG14, UDP-N-acetylglucosaminyltransferase subunit;
  Uniprot ID:  Q96F25;
  ENSP ID: ENSP00000359224
MVCVLVLAAAAGAVAVFLILRIWVVLRSMDVTPRESLSILVVAGSGGHTTEILRLLGSLSNAYSPRHYVIADTDEMSANKINSFELDRADRDPSNMYTKYYIHRIPRSREVQQSWPSTVFTTLHSMWLSFPLIHRVKPDLVLCNGPGTCVPICVSALLLGILGIKKVIIVYVESICRVETLSMSGKILFHLSDYFIVQWPALKEKYPKSVYLGRIV

SEQ ID NO: 4078 - protein, 323 aa, Homo sapiens
  Payload ID: 920;
  Gene Symbol: ALG2;
  Gene Name: ALG2, alpha-1,3/1,6-mannosyltransferase;
  Uniprot ID:  Q9H553;
  ENSP ID: ENSP00000326609
MPLLKLVHGSPLVFGEKFKLFTLVSACIPVFRLARRRKKILFYCHFPDLLLTKRDSFLKRLYRAPIDWIEEYTTGMADCILVNSQFTAAVFKETFKSLSHIDPDVLYPSLNVTSFDSVVPEKLDDLVPKGKKFLLLSINRYERKKNLTLALEALVQLRGRLTSQDWERVHLIVAGGYDERVLENVEHYQELKKMVQQSDLGQYVTFLRSFSDKQKISLLHSCTCVLYTPSNEHFGIVPLEAMYMQCPVIAVNSGGPLESIDHSVTGFLCEPDPVHFSEAIEKFIREPSLKATMGLAGRARVKEKFSPEAFTEQLYRYVTKLLV

SEQ ID NO: 4079 - protein, 416 aa, Homo sapiens
  Payload ID: 920;
  Gene Symbol: ALG2;
  Gene Name: ALG2, alpha-1,3/1,6-mannosyltransferase;
  Uniprot ID:  Q9H553;
  ENSP ID: ENSP00000417764
MAEEQGRERDSVPKPSVLFLHPDLGVGGAERLVLDAALALQARGCSVKIWTAHYDPGHCFAESRELPVRCAGDWLPRGLGWGGRGAAVCAYVRMVFLALYVLFLADEEFDVVVCDQVSACIPVFRLARRRKKILFYCHFPDLLLTKRDSFLKRLYRAPIDWIEEYTTGMADCILVNSQFTAAVFKETFKSLSHIDPDVLYPSLNVTSFDSVVPEKLDDLVPKGKKFLLLSINRYERKKNLTLALEALVQLRGRLTSQDWERVHLIVAGGYDERVLENVEHYQELKKMVQQSDLGQYVTFLRSFSDKQKISLLHSCTCVLYTPSNEHFGIVPLEAMYMQCPVIAVNSGGPLESIDHSVTGFLCEPDPVHFSEAIEKFIREPSLKATMGLAGRARVKEKFSPEAFTEQLYRYVTKLLV

SEQ ID NO: 4080 - protein, 138 aa, Homo sapiens
  Payload ID: 920;
  Gene Symbol: ALG2;
  Gene Name: ALG2, alpha-1,3/1,6-mannosyltransferase;
  ENSP ID: ENSP00000432675
MAEEQGRERDSVPKPSVLFLHPDLGVGGAERLVLDAALALQARGCSVKIWTAHYDPGHCFAESRELPVRCAGDWLPRGLGWGGRGAAVCAYVRMVFLALYVLFLADEEFDVVVCDQAICIPLSLCSEPGHTVLSSVMC

SEQ ID NO: 4081 - protein, 438 aa, Homo sapiens
  Payload ID: 921;
  Gene Symbol: ALG3;
  Gene Name: ALG3, alpha-1,3- mannosyltransferase;
  Uniprot ID:  Q92685;
  ENSP ID: ENSP00000380793
MAAGLRKRGRSGSAAQAEGLCKQWLQRAWQERRLLLREPRYTLLVAACLCLAEVGITFWVIHRVAYTEIDWKAYMAEVEGVINGTYDYTQLQGDTGPLVYPAGFVYIFMGLYYATSRGTDIRMAQNIFAVLYLATLLLVFLIYHQTCKVPPFVFFFMCCASYRVHSIFVLRLFNDPVAMVLLFLSINLLLAQRWGWGCCFFSLAVSVKMNVLLFAPGLLFLLLTQFGFRGALPKLGICAGLQVVLGLPFLLENPSGYLSRSFDLGRQFLFHWTVNWRFLPEALFLHRAFHLALLTAHLTLLLLFALCRWHRTGESILSLLRDPSKRKVPPQPLTPNQIVSTLFTSNFIGICFSRSLHYQFYVWYFHTLPYLLWAMPARWLTHLLRLLVLGLIELSWNTYPSTSCSSAALHICHAVILLQLWLGPQPFPKSTQHSKKAH

SEQ ID NO: 4082 - protein, 105 aa, Homo sapiens
  Payload ID: 921;
  Gene Symbol: ALG3;
  Gene Name: ALG3, alpha-1,3- mannosyltransferase;
  ENSP ID: ENSP00000392209
  MOD_RES (1)..(1): Any amino acid
XGLRKRGRSGSAAQAEGLCKQWLQRAWQERRLLLREPRYTLLVAACLCLAEVGITFWVIHRVACTQLVSCTSLWGCTMPPAEALTSAWPRTSLLCSTWLPCCLSS

SEQ ID NO: 4083 - protein, 107 aa, Homo sapiens
  Payload ID: 921;
  Gene Symbol: ALG3;
  Gene Name: ALG3, alpha-1,3- mannosyltransferase;
  ENSP ID: ENSP00000394917
MAAGLRKRGRSGSAAQAEGLCKQWLQRAWQERRLLLREPRYTLLVAACLCLAEVGITFWVIHRVACTQLVSCTSLWGCTMPPAEALTSAWPRTSLLCSTWLPCCLSS

SEQ ID NO: 4084 - protein, 323 aa, Homo sapiens
  Payload ID: 921;
  Gene Symbol: ALG3;
  Gene Name: ALG3, alpha-1,3- mannosyltransferase;
  ENSP ID: ENSP00000397326
  MOD_RES (1)..(1): Any amino acid
XAGLRKRGRSGSAAQAEGLCKQWLQRAWQERRLLLREPRYTLLVAACLCLAEVPPFVFFFMCCASYRVHSIFVLRLFNDPVAMVLLFLSINLLLAQRWGWGCCFFSLAVSVKMNVLLFAPGLLFLLLTQFGFRGALPKLGICAGLQVVLGLPFLLENPSGYLSRSFDLGRQFLFHWTVNWRFLPEALFLHRAFHLALLTAHLTLLLLFALCRWHRTGESILSLLRDPSKRKVPPQPLTPNQIVSTLFTSNFIGICFSRSLHYQFYVWYFHTLPYLLWAMPARWLTHLLRLLVLGLIELSWNTYPSTSCSSAALHICHAVILLQ

SEQ ID NO: 4085 - protein, 398 aa, Homo sapiens
  Payload ID: 921;
  Gene Symbol: ALG3;
  Gene Name: ALG3, alpha-1,3- mannosyltransferase;
  ENSP ID: ENSP00000397613
MKTGYSDRRLAWWDARHGKRNLSVEDTEIDWKAYMAEVEGVINGTYDYTQLQGDTGPLVYPAGFVYIFMGLYYATSRGTDIRMAQNIFAVLYLATLLLVFLIYHQTCKVPPFVFFFMCCASYRVHSIFVLRLFNDPVAMVLLFLSINLLLAQRWGWGCCFFSLAVSVKMNVLLFAPGLLFLLLTQFGFRGALPKLGICAGLQVVLGLPFLLENPSGYLSRSFDLGRQFLFHWTVNWRFLPEALFLHRAFHLALLTAHLTLLLLFALCRWHRTGESILSLLRDPSKRKVPPQPLTPNQIVSTLFTSNFIGICFSRSLHYQFYVWYFHTLPYLLWAMPARWLTHLLRLLVLGLIELSWNTYPSTSCSSAALHICHAVILLQLWLGPQPFPKSTQHSKKAH

SEQ ID NO: 4086 - protein, 390 aa, Homo sapiens
  Payload ID: 921;
  Gene Symbol: ALG3;
  Gene Name: ALG3, alpha-1,3- mannosyltransferase;
  Uniprot ID:  Q92685;
  ENSP ID: ENSP00000402744
MFPAQAKENAGFSGCGGDTEIDWKAYMAEVEGVINGTYDYTQLQGDTGPLVYPAGFVYIFMGLYYATSRGTDIRMAQNIFAVLYLATLLLVFLIYHQTCKVPPFVFFFMCCASYRVHSIFVLRLFNDPVAMVLLFLSINLLLAQRWGWGCCFFSLAVSVKMNVLLFAPGLLFLLLTQFGFRGALPKLGICAGLQVVLGLPFLLENPSGYLSRSFDLGRQFLFHWTVNWRFLPEALFLHRAFHLALLTAHLTLLLLFALCRWHRTGESILSLLRDPSKRKVPPQPLTPNQIVSTLFTSNFIGICFSRSLHYQFYVWYFHTLPYLLWAMPARWLTHLLRLLVLGLIELSWNTYPSTSCSSAALHICHAVILLQLWLGPQPFPKSTQHSKKAH

SEQ ID NO: 4087 - protein, 65 aa, Homo sapiens
  Payload ID: 921;
  Gene Symbol: ALG3;
  Gene Name: ALG3, alpha-1,3- mannosyltransferase;
  ENSP ID: ENSP00000407011
MAAGLRKRGRSGSAAQAEGLCKQWLQRAWQERRLLLREPRYTLLVAACLCLAETQRLTGRPTWPR

SEQ ID NO: 4088 - protein, 324 aa, Homo sapiens
  Payload ID: 922;
  Gene Symbol: ALG5;
  Gene Name: ALG5, dolichyl-phosphate beta-glucosyltransferase;
  Uniprot ID:  Q9Y673;
  ENSP ID: ENSP00000239891
MAPLLLQLAVLGAALAAAALVLISIVAFTTATKMPALHRHEEEKFFLNAKGQKETLPSIWDSPTKQLSVVVPSYNEEKRLPVMMDEALSYLEKRQKRDPAFTYEVIVVDDGSKDQTSKVAFKYCQKYGSDKVRVITLVKNRGKGGAIRMGIFSSRGEKILMADADGATKFPDVEKLEKGLNDLQPWPNQMAIACGSRAHLEKESIAQRSYFRTLLMYGFHFLVWFLCVKGIRDTQCGFKLFTREAASRTFSSLHVERWAFDVELLYIAQFFKIPIAEIAVNWTEIEGSKLVPFWSWLQMGKDLLFIRLRYLTGAWRLEQTRKMN

SEQ ID NO: 4089 - protein, 294 aa, Homo sapiens
  Payload ID: 922;
  Gene Symbol: ALG5;
  Gene Name: ALG5, dolichyl-phosphate beta-glucosyltransferase;
  Uniprot ID:  Q9Y673;
  ENSP ID: ENSP00000390533
MAPLLLQLAVLGAALAAAALVLISIVAFTTATKMPALHRHEEEKFFLNAKGQKETLPSIWDSPTKQLSVVVPSYNEEKRLPVMMDEALSYLEKRQKYGSDKVRVITLVKNRGKGGAIRMGIFSSRGEKILMADADGATKFPDVEKLEKGLNDLQPWPNQMAIACGSRAHLEKESIAQRSYFRTLLMYGFHFLVWFLCVKGIRDTQCGFKLFTREAASRTFSSLHVERWAFDVELLYIAQFFKIPIAEIAVNWTEIEGSKLVPFWSWLQMGKDLLFIRLRYLTGAWRLEQTRKMN

SEQ ID NO: 4090 - protein, 509 aa, Homo sapiens
  Payload ID: 923;
  Gene Symbol: ALG6;
  Gene Name: ALG6, alpha-1,3-glucosyltransferase;
  ENSP ID: ENSP00000263440
MEKWYLMTVVVLIGLTVRWTVSLNSYSGAGKPPMFGDYEAQRHWQEITFNLPVKQWYFNSSDNNLQYWGLDYPPLTAYHSLLCAYVAKFINPDWIALHTSRGYESQAHKLFMRTTVLIADLLIYIPAVVLYCCCLKEISTKKKIANALCILLYPGLILIDYGHFQNIYNSVSLGFALWGVLGISCDCDLLGSLAFCLAINYKQMELYHALPFFCFLLGKCFKKGLKGKGFVLLVKLACIVVASFVLCWLPFFTEREQTLQVLRRLFPVDRGLFEDKVANIWCSFNVFLKIKDILPRHIQLIMSFCSTFLSLLPACIKLILQPSSKGFKFTLVSCALSFFLFSFQVHEKSILLVSLPVCLVLSEIPFMSTWFLLVSTFSMLPLLLKDELLMPSVVTTMAFFIACVTSFSIFEKTSEEELQLKSFSISVRKYLPCFTFLSRIIQYLFLISVITMVLLTLMTVTLDPPQKLPDLFSVLVCFVSCLNFLFFLVYFNIIIMWDSKSGRNQKKIS

SEQ ID NO: 4091 - protein, 507 aa, Homo sapiens
  Payload ID: 923;
  Gene Symbol: ALG6;
  Gene Name: ALG6, alpha-1,3-glucosyltransferase;
  Uniprot ID:  Q9Y672;
  ENSP ID: ENSP00000360149
MEKWYLMTVVVLIGLTVRWTVSLNSYSGAGKPPMFGDYEAQRHWQEITFNLPVKQWYFNSSDNNLQYWGLDYPPLTAYHSLLCAYVAKFINPDWIALHTSRGYESQAHKLFMRTTVLIADLLIYIPAVVLYCCCLKEISTKKKIANALCILLYPGLILIDYGHFQYNSVSLGFALWGVLGISCDCDLLGSLAFCLAINYKQMELYHALPFFCFLLGKCFKKGLKGKGFVLLVKLACIVVASFVLCWLPFFTEREQTLQVLRRLFPVDRGLFEDKVANIWCSFNVFLKIKDILPRHIQLIMSFCSTFLSLLPACIKLILQPSSKGFKFTLVSCALSFFLFSFQVHEKSILLVSLPVCLVLSEIPFMSTWFLLVSTFSMLPLLLKDELLMPSVVTTMAFFIACVTSFSIFEKTSEEELQLKSFSISVRKYLPCFTFLSRIIQYLFLISVITMVLLTLMTVTLDPPQKLPDLFSVLVCFVSCLNFLFFLVYFNIIIMWDSKSGRNQKKIS

SEQ ID NO: 4092 - protein, 43 aa, Homo sapiens
  Payload ID: 923;
  Gene Symbol: ALG6;
  Gene Name: ALG6, alpha-1,3-glucosyltransferase;
  ENSP ID: ENSP00000473328
MEKWYLMTVVVLIGLTVRWTVSLNSYSGNTFLLVKKKTKFSFE

SEQ ID NO: 4093 - protein, 281 aa, Homo sapiens
  Payload ID: 923;
  Gene Symbol: ALG6;
  Gene Name: ALG6, alpha-1,3-glucosyltransferase;
  ENSP ID: ENSP00000473934
MEKWYLMTVVVLIGLTVRWTVSLNSYSGAGKPPMFGDYEAQRHWQEITFNLPVKQWYFNSSDNNLQYWGLDYPPLTAYHSLLCAYVAKFINPDWIALHTSRGYESQAHKLFMRTTVLIADLLIYIPAVVLYCCCLKEISTKKKIANALCILLYPGLILIDYGHFQNIYNSVSLGFALWGVLGISCDCDLLGSLAFCLAINYKQMELYHALPFFCFLLGKCFKKGLKGKGFVLLVKLACIVVASFVLCWLPFFTEREQTLQVLRRLFPVDRGLFEASFVLRF

SEQ ID NO: 4094 - protein, 526 aa, Homo sapiens
  Payload ID: 924;
  Gene Symbol: ALG8;
  Gene Name: ALG8, alpha-1,3-glucosyltransferase;
  Uniprot ID:  Q9BVK2;
  ENSP ID: ENSP00000299626
MAALTIATGTGNWFSALALGVTLLKCLLIPTYHSTDFEVHRNWLAITHSLPISQWYYEATSEWTLDYPPFFAWFEYILSHVAKYFDQEMLNVHNLNYSSSRTLLFQRFSVIFMDVLFVYAVRECCKCIDGKKVGKELTEKPKFILSVLLLWNFGLLIVDHIHFQYNGFLFGLMLLSIARLFQKRHMEGAFLFAVLLHFKHIYLYVAPAYGVYLLRSYCFTANKPDGSIRWKSFSFVRVISLGLVVFLVSALSLGPFLALNQLPQVFSRLFPFKRGLCHAYWAPNFWALYNALDKVLSVIGLKLKFLDPNNIPKASMTSGLVQQFQHTVLPSVTPLATLICTLIAILPSIFCLWFKPQGPRGFLRCLTLCALSSFMFGWHVHEKAILLAILPMSLLSVGKAGDASIFLILTTTGHYSLFPLLFTAPELPIKILLMLLFTIYSISSLKTLFRKEKPLFNWMETFYLLGLGPLEVCCEFVFPFTSWKVKYPFIPLLLTSVYCAVGITYAWFKLYVSVLIDSAIGKTKKQ

SEQ ID NO: 4095 - protein, 467 aa, Homo sapiens
  Payload ID: 924;
  Gene Symbol: ALG8;
  Gene Name: ALG8, alpha-1,3-glucosyltransferase;
  Uniprot ID:  Q9BVK2;
  ENSP ID: ENSP00000365326
MAALTIATGTGNWFSALALGVTLLKCLLIPTYHSTDFEVHRNWLAITHSLPISQWYYEATSEWTLDYPPFFAWFEYILSHVAKYFDQEMLNVHNLNYSSSRTLLFQRFSVIFMDVLFVYAVRECCKCIDGKKVGKELTEKPKFILSVLLLWNFGLLIVDHIHFQYNGFLFGLMLLSIARLFQKRHMEGAFLFAVLLHFKHIYLYVAPAYGVYLLRSYCFTANKPDGSIRWKSFSFVRVISLGLVVFLVSALSLGPFLALNQLPQVFSRLFPFKRGLCHAYWAPNFWALYNALDKVLSVIGLKLKFLDPNNIPKASMTSGLVQQFQHTVLPSVTPLATLICTLIAILPSIFCLWFKPQGPRGFLRCLTLCALSSFMFGWHVHEKAILLAILPMSLLSVGKAGDASIFLILTTTGHYSLFPLLFTAPELPIKILLMLLFTIYSISSLKTLFRRSFTLVAQAGVQWHDLS

SEQ ID NO: 4096 - protein, 96 aa, Homo sapiens
  Payload ID: 924;
  Gene Symbol: ALG8;
  Gene Name: ALG8, alpha-1,3-glucosyltransferase;
  ENSP ID: ENSP00000431357
MVVCIHHSTDFEVHRNWLAITHSLPISQWYYEATSEWTLDYPPFFAWFEYILSHVAKYFDQEMLNVHNLNYSSSRTLLFQRFSVIFMDVLFVYAVR

SEQ ID NO: 4097 - protein, 228 aa, Homo sapiens
  Payload ID: 924;
  Gene Symbol: ALG8;
  Gene Name: ALG8, alpha-1,3-glucosyltransferase;
  ENSP ID: ENSP00000432381
  MOD_RES (1)..(1): Any amino acid
XGLVVFLVSALSLGPFLALNQLPQVFSRLFPFKRGLCHAYWAPNFWALYNALDKVLSVIGPRGFLRCLTLCALSSFMFGWHVHEKAILLAILPMSLLSVGKAGDASIFLILTTTGHYSLFPLLFTAPELPIKILLMLLFTIYSISSLKTLFRKEKPLFNWMETFYLLGLGPLEVCCEFVFPFTSWKVKYPFIPLLLTSVYCAVGITYAWFKLYVSVLIDSAIGKTKKQ

SEQ ID NO: 4098 - protein, 157 aa, Homo sapiens
  Payload ID: 924;
  Gene Symbol: ALG8;
  Gene Name: ALG8, alpha-1,3-glucosyltransferase;
  ENSP ID: ENSP00000432953
  MOD_RES (1)..(1): Any amino acid
XIVDHIHFQYNGFLFGLMLLSIARLFQKRHMEGAFLFAVLLHFKHIYLYVAPAYGVYLLRSYCFTANKPDGSIRWKSFSFVRVISLGLVVFLVSALSLGPFLALNQLPQVFSRLFPFKRGLCHAYWAPNFWALYNALDKVLSVIGMVASIFYSDSEY

SEQ ID NO: 4099 - protein, 226 aa, Homo sapiens
  Payload ID: 924;
  Gene Symbol: ALG8;
  Gene Name: ALG8, alpha-1,3-glucosyltransferase;
  ENSP ID: ENSP00000433429
KRHMEGAFLFAVLLHFKHIYLYVAPAYGVYLLRSYCFTANKPDGSIRWKSFSFVRVISLGLVVFLVSALSLGPFLALNQLPQVFSRLFPFKRGLCHAYWAPNFWALYNALDKVLSVIGLKLKFLDPNNIPKASMTSGLVQQFQHTVLPSVTPLATLICTLIAILVQAILLPQPPEYLGIQPSIFCLWFKPQGPRGFLRCLTLCALSSFMFGWHVHEKAILLAILPM

SEQ ID NO: 4100 - protein, 87 aa, Homo sapiens
  Payload ID: 924;
  Gene Symbol: ALG8;
  Gene Name: ALG8, alpha-1,3-glucosyltransferase;
  ENSP ID: ENSP00000434066
  MOD_RES (1)..(1): Any amino acid
XSRLFPFKRGLCHAYWAPNFWALYNALDKVLSVIGLKLKFLDPNNIPKASMTSGLVQQFQHTVLPSVTPLATLICTLIAILKRKTSF

SEQ ID NO: 4101 - protein, 197 aa, Homo sapiens
  Payload ID: 924;
  Gene Symbol: ALG8;
  Gene Name: ALG8, alpha-1,3-glucosyltransferase;
  ENSP ID: ENSP00000434388
WFGSAVPTHSPSLSDSLGNPHLHTDCHIGPRGFLRCLTLCALSSFMFGWHVHEKAILLAILPMSLLSVGKAGDASIFLILTTTGHYSLFPLLFTAPELPIKILLMLLFTIYSISSLKTLFRKEKPLFNWMETFYLLGLGPLEVCCEFVFPFTSWKVKYPFIPLLLTSVYCAVGITYAWFKLYVSVLIDSAIGKTKKQ

SEQ ID NO: 4102 - protein, 282 aa, Homo sapiens
  Payload ID: 924;
  Gene Symbol: ALG8;
  Gene Name: ALG8, alpha-1,3-glucosyltransferase;
  ENSP ID: ENSP00000434660
MAALTIATGTGNWFSALALGVTLLKCLLIPTYSHSTDFEVHRNWLAITHSLPISQWYYEATSEWTLDYPPFFAWFEYILSHVAKYFDQEMLNVHNLNYSSSRTLLFQRFSVIFMDVLFVYAVRECCKCIDGKKVGKELTEKPKFILSVLLLWNFGLLIVDHIHFQYNGFLFGLMLLSIARLFQKRHMEGAFLFAVLLHFKHIYLYVAPAYGVYLLRSYCFTANKPDGSIRWKSFSFVRVISLGLVVFLVSALSLGPFLALNQLPQVFSRLFPFKRGLCHAYW

SEQ ID NO: 4103 - protein, 172 aa, Homo sapiens
  Payload ID: 924;
  Gene Symbol: ALG8;
  Gene Name: ALG8, alpha-1,3-glucosyltransferase;
  ENSP ID: ENSP00000435417
MLNVHNLNYSSSRTLLFQRFSVIFMDVLFVYAVRECCKCIDGKKVGKELTEKPKFILSVLLLWNFGLLIVDHIHFQYNGFLFGLMLLSIARLFQKRHMEGAFLFAVLLHFKHIYLYVAPAYGVYLLRSYCFTANKPDGSIRWKSFSFVRVISLGLVVFLVSALSLGPFLALN

SEQ ID NO: 4104 - protein, 242 aa, Homo sapiens
  Payload ID: 924;
  Gene Symbol: ALG8;
  Gene Name: ALG8, alpha-1,3-glucosyltransferase;
  ENSP ID: ENSP00000435467
MPSHPHIATSEWTLDYPPFFAWFEYILSHVAKYFDQEMLNVHNLNYSSSRTLLFQRFSVIFMDVLFVYAVRECCKCIDGKKVGKELTEKPKFILSVLLLWNFGLLIVDHIHFQYNGFLFGLMLLSIARLFQKRHMEGAFLFAVLLHFKHIYLYVAPAYGVYLLRSYCFTANKPDGSIRWKSFSFVRVISLGLVVFLVSALSLGPFLALNQLPQVFSRLFPFKRGLCHAYWAPNFWALYNALD

SEQ ID NO: 4105 - protein, 281 aa, Homo sapiens
  Payload ID: 924;
  Gene Symbol: ALG8;
  Gene Name: ALG8, alpha-1,3-glucosyltransferase;
  ENSP ID: ENSP00000435626
  MOD_RES (1)..(1): Any amino acid
XIDGKKVGKELTEKPKFILSVLLLWNFGLLIVDHIHFQYNGFLFGLMLLSIARLFQKRHMEGAFLFAVLLHFKHIYLYVAPAYGVYLLRSYCFTANKPDGSIRWKSFSFVRVISLGLVVFLVSALSLGPFLALPSIFCLWFKPQGPRGFLRCLTLCALSSFMFGWHVHEKAILLAILPMSLLSVGKAGDASIFLILTTTGHYSLFPLLFTAPELPIKILLMLLFTIYSISSLKTLFRKEKPLFNWMETFYLLGLGPLEVCCEFVFPFTSWKVKYPFIPLLL

SEQ ID NO: 4106 - protein, 136 aa, Homo sapiens
  Payload ID: 924;
  Gene Symbol: ALG8;
  Gene Name: ALG8, alpha-1,3-glucosyltransferase;
  ENSP ID: ENSP00000436064
MLNVHNLNYSSSRTLLFQRFSVIFMDVLFVYAVRECCKCIDGKKVGKELTEKPKFILSVLLLWNFGLLIVDHIHFQYNGFLFGLMLLSIARLFQKRHMEGAFLFAVLLHFKHIYLYVAPAYGVYLLRSYCFTANKP

SEQ ID NO: 4107 - protein, 133 aa, Homo sapiens
  Payload ID: 924;
  Gene Symbol: ALG8;
  Gene Name: ALG8, alpha-1,3-glucosyltransferase;
  ENSP ID: ENSP00000436366
MAALTIATGTGNWFSALALGVTLLKCLLIPTYHSTDFEVHRNWLAITHSLPISQWYYEATSEWTLDYPPFFAWFEYILSHVAKYFDQEMLNVHNLNYSSSRTLLFQRFSVIFMDVLFVYAVRDCFCFFPNVSM

SEQ ID NO: 4108 - protein, 126 aa, Homo sapiens
  Payload ID: 924;
  Gene Symbol: ALG8;
  Gene Name: ALG8, alpha-1,3-glucosyltransferase;
  ENSP ID: ENSP00000437033
MDVGPRLKAWKPRSNHEMVVCIHHSTDFEVHRNWLAITHSLPISQWYYEATSEWTLDYPPFFAWFEYILSHVAKYFDQEMLNVHNLNYSSSRTLLFQRFSVIFMDVLFVYAVRECCKCIDGKKVGK

SEQ ID NO: 4109 - protein, 236 aa, Homo sapiens
  Payload ID: 924;
  Gene Symbol: ALG8;
  Gene Name: ALG8, alpha-1,3-glucosyltransferase;
  ENSP ID: ENSP00000437199
MAALTIATGTGNWFSALALGVTLLKCLLIPTYHSTDFEVHRNWLAITHSLPISQWYYEATSEWTLDYPPFFAWFEYILSHVAKYFDQEMLNVHNLNYSSSRTLLFQRFSVIFMDVLFVYAVRECCKCIDGKKVGKELTEKPKFILSVLLLWNFGLLIVDHIHFQYNGFLFGLMLLSIARLFQRQGLPILSRLVLNSWGQAILPRRLTKVLGLQVKGIWKEHFSLLFSYISSISTSM

SEQ ID NO: 4110 - protein, 467 aa, Homo sapiens; identical to SEQ ID NO: 4095
  Payload ID: 924;
  Gene Symbol: ALG8;
  Gene Name: ALG8, alpha-1,3-glucosyltransferase;
  Uniprot ID:  Q9BVK2;
  ENSP ID: ENSP00000480742

SEQ ID NO: 4111 - protein, 440 aa, Homo sapiens
  Payload ID: 925;
  Gene Symbol: ALG9;
  Gene Name: ALG9, alpha-1,2-mannosyltransferase;
  Uniprot ID:  Q9H6U8;
  ENSP ID: ENSP00000381090
MMLAFLVLSTGMFCSSSAFLPSSFCMYTTLIAMTGWYMDKTSIAVLGVAAGAILGWPFSAALGLPIAFDLLVMKHRWKSFFHWSLMALILFLVPVVVIDSYYYGKLVIAPLNIVLYNVFTPHGPDLYGTEPWYFYLINGFLNFNVAFALALLVLPLTSLMEYLLQRFHVQNLGHPYWLTLAPMYIWFIIFFIQPHKEERFLFPVYPLICLCGAVALSALQKCYHFVFQRYRLEHYTVTSNWLALGTVFLFGLLSFSRSVALFRGYHGPLDLYPEFYRIATDPTIHTVPEGRPVNVCVGKEWYRFPSSFLLPDNWQLQFIPSEFRGQLPKPFAEGPLATRIVPTDMNDQNLEEPSRYIDISKCHYLVDLDTMRETPREPKYSSNKEEWISLAYRPFLDASRSSKLLRAFYVPFLSDQYTVYVNYTILKPRKAKQIRKKSGG

SEQ ID NO: 4112 - protein, 207 aa, Homo sapiens
  Payload ID: 925;
  Gene Symbol: ALG9;
  Gene Name: ALG9, alpha-1,2-mannosyltransferase;
  ENSP ID: ENSP00000432442
  MOD_RES (1)..(1): Any amino acid
XTVFLFGLLSFSRSVALFRGYHGPLDLYPEFYRIATDPTIHTVPEGRPVNVCVGKEWYRFPSSFLLPDNWQLQFIPSEFRGQLPKPFAEGPLATRIVPTDMNDQNLEEPSRYIDISKCHYLVDLDTMRETPREPKYSSNKEEWISLAYRPFLDASRSSKLLRAFYVPFLSDQYTVYVNYTILKPRKAKQIRKKSGDRRRAEPTYRKN

SEQ ID NO: 4113 - protein, 447 aa, Homo sapiens
  Payload ID: 925;
  Gene Symbol: ALG9;
  Gene Name: ALG9, alpha-1,2-mannosyltransferase;
  Uniprot ID:  Q9H6U8;
  ENSP ID: ENSP00000435517
MMLAFLVLSTGMFCSSSAFLPSSFCMYTTLIAMTGWYMDKTSIAVLGVAAGAILGWPFSAALGLPIAFDLLVMKHRWKSFFHWSLMALILFLVPVVVIDSYYYGKLVIAPLNIVLYNVFTPHGPDLYGTEPWYFYLINGFLNFNVAFALALLVLPLTSLMEYLLQRFHVQNLGHPYWLTLAPMYIWFIIFFIQPHKEERFLFPVYPLICLCGAVALSALQHSFLYFQKCYHFVFQRYRLEHYTVTSNWLALGTVFLFGLLSFSRSVALFRGYHGPLDLYPEFYRIATDPTIHTVPEGRPVNVCVGKEWYRFPSSFLLPDNWQLQFIPSEFRGQLPKPFAEGPLATRIVPTDMNDQNLEEPSRYIDISKCHYLVDLDTMRETPREPKYSSNKEEWISLAYRPFLDASRSSKLLRAFYVPFLSDQYTVYVNYTILKPRKAKQIRKKSGG

SEQ ID NO: 4114 - protein, 35 aa, Homo sapiens
  Payload ID: 925;
  Gene Symbol: ALG9;
  Gene Name: ALG9, alpha-1,2-mannosyltransferase;
  ENSP ID: ENSP00000436798
  MOD_RES (1)..(1): Any amino acid
XKYSSNKEEWISLAYRPFLDASSFEGWKTKITMPV

SEQ ID NO: 4115 - protein, 24 aa, Homo sapiens
  Payload ID: 925;
  Gene Symbol: ALG9;
  Gene Name: ALG9, alpha-1,2-mannosyltransferase;
  ENSP ID: ENSP00000437211
  MOD_RES (1)..(1): Any amino acid
XEEWISLAYRPFLDASRVSLCCPG

SEQ ID NO: 4116 - protein, 134 aa, Homo sapiens
  Payload ID: 925;
  Gene Symbol: ALG9;
  Gene Name: ALG9, alpha-1,2-mannosyltransferase;
  ENSP ID: ENSP00000478246
MASRGARQRLKGSGASSGDTAPAADKLRELLGSREAGGAEHRTELSGNKAGQVWAPEGSTAFKCLLSARLCAALLSNISDCDETFNYWEPVDTLPHLWGRVSDLGIFPSICHSLLCLPVASCLASCISCKNSTN

SEQ ID NO: 4117 - protein, 168 aa, Homo sapiens
  Payload ID: 925;
  Gene Symbol: ALG9;
  Gene Name: ALG9, alpha-1,2-mannosyltransferase;
  ENSP ID: ENSP00000479335
MASRGARQRLKGSGASSGDTAPAADKLRELLGSREAGGAEHRTELSGNKAGQVWAPEGSTAFKCLLSARLCAALLSNISDCDETFNYWEPTHYLIYGEGFQTWEYSPAYAIRSYAYLLLHAWPAAFHARILQTNKGCVQEVWVARESNDASLLGSQHWHVLLIISIPS

SEQ ID NO: 4118 - protein, 102 aa, Homo sapiens
  Payload ID: 925;
  Gene Symbol: ALG9;
  Gene Name: ALG9, alpha-1,2-mannosyltransferase;
  ENSP ID: ENSP00000480661
MASRGARQRLKGSGASSGDTAPAADKLRELLGSREAGGAEHRTEHTTSSMGKGFRLGNIPQHMPFAPMLTCCFMPGQLHFMQEFYKLIRFLCFTFCDVFWLL

SEQ ID NO: 4119 - protein, 618 aa, Homo sapiens
  Payload ID: 925;
  Gene Symbol: ALG9;
  Gene Name: ALG9, alpha-1,2-mannosyltransferase;
  Uniprot ID:  Q9H6U8;
  ENSP ID: ENSP00000482437
MASRGARQRLKGSGASSGDTAPAADKLRELLGSREAGGAEHRTELSGNKAGQVWAPEGSTAFKCLLSARLCAALLSNISDCDETFNYWEPTHYLIYGEGFQTWEYSPAYAIRSYAYLLLHAWPAAFHARILQTNKILVFYFLRCLLAFVSCICELYFYKAVCKKFGLHVSRMMLAFLVLSTGMFCSSSAFLPSSFCMYTTLIAMTGWYMDKTSIAVLGVAAGAILGWPFSAALGLPIAFDLLVMKHRWKSFFHWSLMALILFLVPVVVIDSYYYGKLVIAPLNIVLYNVFTPHGPDLYGTEPWYFYLINGFLNFNVAFALALLVLPLTSLMEYLLQRFHVQNLGHPYWLTLAPMYIWFIIFFIQPHKEERFLFPVYPLICLCGAVALSALQHSFLYFQKCYHFVFQRYRLEHYTVTSNWLALGTVFLFGLLSFSRSVALFRGYHGPLDLYPEFYRIATDPTIHTVPEGRPVNVCVGKEWYRFPSSFLLPDNWQLQFIPSEFRGQLPKPFAEGPLATRIVPTDMNDQNLEEPSRYIDISKCHYLVDLDTMRETPREPKYSSNKEEWISLAYRPFLDASRSSKLLRAFYVPFLSDQYTVYVNYTILKPRKAKQIRKKSGG

SEQ ID NO: 4120 - protein, 198 aa, Homo sapiens
  Payload ID: 925;
  Gene Symbol: ALG9;
  Gene Name: ALG9, alpha-1,2-mannosyltransferase;
  ENSP ID: ENSP00000482975
MASRGARQRLKGSGASSGDTAPAADKLRELLGSREAGGAEHRTELSGNKAGQVWAPEGSTAFKCLLSARLCAALLSNISDCDETFNYWEPTHYLIYGEGFQTWEYSPAYAIRSYAYLLLHAWPAAFHARILQTNKILVFYFLRCLLAFVSCICELYFYKAVCKKFGLHVSRMMLAFLVLSTGMFCSSSVYPLPLICWS

SEQ ID NO: 4121 - protein, 611 aa, Homo sapiens
  Payload ID: 925;
  Gene Symbol: ALG9;
  Gene Name: ALG9, alpha-1,2-mannosyltransferase;
  Uniprot ID:  Q9H6U8;
  ENSP ID: ENSP00000484200
MASRGARQRLKGSGASSGDTAPAADKLRELLGSREAGGAEHRTELSGNKAGQVWAPEGSTAFKCLLSARLCAALLSNISDCDETFNYWEPTHYLIYGEGFQTWEYSPAYAIRSYAYLLLHAWPAAFHARILQTNKILVFYFLRCLLAFVSCICELYFYKAVCKKFGLHVSRMMLAFLVLSTGMFCSSSAFLPSSFCMYTTLIAMTGWYMDKTSIAVLGVAAGAILGWPFSAALGLPIAFDLLVMKHRWKSFFHWSLMALILFLVPVVVIDSYYYGKLVIAPLNIVLYNVFTPHGPDLYGTEPWYFYLINGFLNFNVAFALALLVLPLTSLMEYLLQRFHVQNLGHPYWLTLAPMYIWFIIFFIQPHKEERFLFPVYPLICLCGAVALSALQKCYHFVFQRYRLEHYTVTSNWLALGTVFLFGLLSFSRSVALFRGYHGPLDLYPEFYRIATDPTIHTVPEGRPVNVCVGKEWYRFPSSFLLPDNWQLQFIPSEFRGQLPKPFAEGPLATRIVPTDMNDQNLEEPSRYIDISKCHYLVDLDTMRETPREPKYSSNKEEWISLAYRPFLDASRSSKLLRAFYVPFLSDQYTVYVNYTILKPRKAKQIRKKSGG

SEQ ID NO: 4122 - protein, 264 aa, Homo sapiens
  Payload ID: 926;
  Gene Symbol: ACER1;
  Gene Name: alkaline ceramidase 1;
  Uniprot ID:  Q8TDN7;
  ENSP ID: ENSP00000301452
MPSIFAYQSSEVDWCESNFQYSELVAEFYNTFSNIPFFIFGPLMMLLMHPYAQKRSRYIYVVWVLFMIIGLFSMYFHMTLSFLGQLLDEIAILWLLGSGYSIWMPRCYFPSFLGGNRSQFIRLVFITTVVSTLLSFLRPTVNAYALNSIALHILYIVCQEYRKTSNKELRHLIEVSVVLWAVALTSWISDRLLCSFWQRIHFFYLHSIWHVLISITFPYGMVTMALVDANYEMPGETLKVRYWPRDSWPVGLPYVEIRGDDKDC

SEQ ID NO: 4123 - protein, 275 aa, Homo sapiens [sequence omitted]

SEQ ID NO: 4124 - protein, 76 aa, Homo sapiens
  Payload ID: 928;
  Gene Symbol: ACER3;
  Gene Name: alkaline ceramidase 3;
  ENSP ID: ENSP00000278544
MAPAADREGYWGPTTSTLDWCEENYSVTWYIAEFWNTVSNLIMIIPPMFGAVQSVRDGLEKRYIASYLALTEVLQI

SEQ ID NO: 4125 - protein, 172 aa, Homo sapiens
  Payload ID: 928;
  Gene Symbol: ACER3;
  Gene Name: alkaline ceramidase 3;
  ENSP ID: ENSP00000431149
MIYSCCIFVYCMFECFKIKNSVNYHLLFTLVLFSLIVTTVYLKVKEPIFHQVMYGMLVFTLVLRSIYIVTWVYPWLRGLGYTSLGIFLLGFLFWNIDNIFCESLRNFRKKVPPIIGITTQFHAWWHILTGLGSYLHILFSLYTRTLYLRYRPKVKFLFGIWPVILFEPLRKH

SEQ ID NO: 4126 - protein, 51 aa, Homo sapiens
  Payload ID: 928;
  Gene Symbol: ACER3;
  Gene Name: alkaline ceramidase 3;
  ENSP ID: ENSP00000431504
MAPAADREGYWGPTTSTLDWCEENYSVTWYIAEFCSFLPSSLKSNLKEYSE

SEQ ID NO: 4127 - protein, 51 aa, Homo sapiens; identical to SEQ ID NO: 4126
  Payload ID: 928;
  Gene Symbol: ACER3;
  Gene Name: alkaline ceramidase 3;
  ENSP ID: ENSP00000432109

SEQ ID NO: 4128 - protein, 80 aa, Homo sapiens
  Payload ID: 928;
  Gene Symbol: ACER3;
  Gene Name: alkaline ceramidase 3;
  ENSP ID: ENSP00000432379
MAPAADREGYWGPTTSTLDWCEENYSVTWYIAEFWNTVSNLIMIIPPMFGAVQSVRDGLEKRYIASYLALTDGVSLCRRG

SEQ ID NO: 4129 - protein, 74 aa, Homo sapiens
  Payload ID: 928;
  Gene Symbol: ACER3;
  Gene Name: alkaline ceramidase 3;
  ENSP ID: ENSP00000433368
MAPAADREGYWGPTTSTLDWCEENYSVTWYIAEFWNTVSNLIMIIPPMFGAVQSVRDGLEKRYIASYLALTAIG

SEQ ID NO: 4130 - protein, 267 aa, Homo sapiens [sequence omitted]

SEQ ID NO: 4131 - protein, 71 aa, Homo sapiens
  Payload ID: 928;
  Gene Symbol: ACER3;
  Gene Name: alkaline ceramidase 3;
  ENSP ID: ENSP00000435048
MAPAADREGYWGPTTSTLDWCEENYSVTWYIAEFCSFLPSSLKSNLKLVSTHQASFLVLGLWAGRGDIPVI

(The sequence listing continues in the following parts.)

1.-36. (canceled)

37. A stimulus response element (SRE) comprising human carbonic anhydrase 2 (CA2; SEQ ID NO: 11717) in whole or in part, wherein the CA2 further comprises one or more mutations selected from L156H, I59N, G102R, S56N, G63D, D71L, E186D, W208S, E69V, N231I, R27L, T87I, H122Y, N252D, D72F, V241F, P249L, T87N, L250R, L183S, S172C, F178Y, L197P, or any combination thereof.

38. The SRE of claim 37, wherein the SRE is CA2 (aa 2-260 of WT, L156H)(SEQ ID NO: 210600), CA2 (L156H)(SEQ ID NO: 210602), CA2 (aa 2-260 of WT, I59N, G102R)(SEQ ID NO: 210598), CA2 (aa 2-260 of WT, S56N)(SEQ ID NO: 210498), CA2 (aa 2-260 of WT, G63D, E69V, N231I)(SEQ ID NO: 210748), CA2 (aa 2-260 of WT, R27L, T87I, H122Y, N252D)(SEQ ID NO: 210702), CA2 (aa 2-260 of WT, D72F, V241F, P249L)(SEQ ID NO: 210503), CA2 (aa 2-260 of WT, D71L, T87N, L250R)(SEQ ID NO: 210510), CA2 (aa 2-260 of WT, L183S)(SEQ ID NO: 210512), CA2 (aa 2-260 of WT, L156H, S172C, F178Y, E186D)(SEQ ID NO: 210756), CA2 (aa 2-260 of WT, L197P)(SEQ ID NO: 210760), or CA2 (aa 2-260 of WT, W208S)(SEQ ID NO: 210494).

39. The SRE of claim 38, wherein the SRE is CA2 (aa 2-260 of WT, L156H), said SRE comprising SEQ ID NO: 210600.

40. The SRE of claim 38, wherein the SRE is CA2 (L156H), said SRE comprising SEQ ID NO: 210602.

41. The SRE of claim 38, wherein the SRE is CA2 (aa 2-260 of WT, S56N), said SRE comprising SEQ ID NO: 210498.

42. The SRE of claim 37, wherein the mutation is S56N.

43. The SRE of claim 37, wherein the SRE is responsive to one or more stimuli.

44. The SRE of claim 43, wherein the stimulus is a small molecule and wherein the small molecule is Acetazolamide or Celecoxib.

45. A CA2 biocircuit system comprising at least one effector module, said at least one effector module comprising:
(a) a stimulus response element (SRE) comprising human carbonic anhydrase 2 (CA2; SEQ ID NO: 11717) in whole or in part, wherein the CA2 further comprises one or more mutations selected from L156H, I59N, G102R, S56N, G63D, D71L, E186D, W208S, E69V, N231I, R27L, T87I, H122Y, N252D, D72F, V241F, P249L, T87N, L250R, L183S, S172C, F178Y, L197P, or any combination thereof; and
(b) at least one payload, wherein the at least one payload is attached, appended or associated with said SRE.

46. The CA2 biocircuit system of claim 45, wherein the SRE is CA2 (aa 2-260 of WT, L156H)(SEQ ID NO: 210600), CA2 (L156H)(SEQ ID NO: 210602), CA2 (aa 2-260 of WT, I59N, G102R)(SEQ ID NO: 210598), CA2 (aa 2-260 of WT, S56N)(SEQ ID NO: 210498), CA2 (aa 2-260 of WT, G63D, E69V, N231I)(SEQ ID NO: 210748), CA2 (aa 2-260 of WT, R27L, T871, H122Y, N252D)(SEQ ID NO: 210702), CA2 (aa 2-260 of WT, D72F, V241F, P249L)(SEQ ID NO: 210503), CA2 (aa 2-260 of WT, D71L, T87N, L250R)(SEQ ID NO: 210510), CA2 (aa 2-260 of WT, L183S)(SEQ ID NO: 210512), CA2 (aa 2-260 of WT, L 156H, S172C, F178Y, E186D)(SEQ ID NO: 210756), CA2 (aa 2-260 of WT, L197P)(SEQ ID NO: 210760), or CA2 (aa 2-260 of WT, W208S)(SEQ ID NO: 210494).

47. The CA2 biocircuit system of claim 46, wherein the SRE is CA2 (aa 2-260 of WT, L156H), said SRE comprising SEQ ID NO: 210600.

48. The CA2 biocircuit system of claim 46, wherein the SRE is CA2 (L156H), said SRE comprising SEQ ID NO: 210602.

49. The CA2 biocircuit system of claim 46, wherein the SRE is CA2 (aa 2-260 of WT, S56N), said SRE comprising SEQ ID NO: 210498.

50. The CA2 biocircuit system of claim 45, wherein the mutation is S56N.

51. The CA2 biocircuit system of claim 45, wherein the payload is a cytokine or a CAR.

52. The CA2 biocircuit system of claim 45, wherein the payload is IL-12, CD40L, or CD19 CAR.

53. The CA2 biocircuit system of claim 52, wherein the IL-12 is membrane bound IL-12.

54. The CA2 biocirsuit system of claim 45, wherein the effector molecule comprises the amino acid sequence of SEQ ID NO: 210927 or 210955.

55. The CA2 biocircuit system of claim 45, wherein the effector molecule comprises the amino acid sequence of SEQ ID NO: 210692, 210694, 211112, 211113, 211114, 211115, 211116, 211117, 211118, or 211119.

56. The CA2 biocircuit system of claim 45, wherein the SRE is responsive to one or more stimuli, wherein the one or more stimuli comprise a small molecule and wherein the small molecule is Acetazolamide or Celecoxib.
